(19) United States
(12) Patent Application Publication
(10) Pub. No.: US 2010/0120627 A1
(43) Pub. Date: May 13, 2010

(54) GENEMAP OF THE HUMAN GENES ASSOCIATED WITH PSORIASIS

(76) Inventors: Abdelmajid Belouchi, Beaconsfield (CA); John Verner Raelson, Hudson Heights (CA); Walter Edward Bradley, Montreal (CA); Bruno Paquian, Chateauguay (CA); Quynh Nguyen-Huu, Longueuil (CA); Pascal Croteau, Laval (CA); Rene Allard, Montreal (CA); Randall David Little, Dorothee (CA); Johanne Cousineau, Beaconsfield (CA); Sophie Debrus, Montreal (CA); Tim Keith, Bedford, MA (US); Natali Henderson, Pointe-Claire (CA); Daniel Dubois, Laval (CA); Paul Van Eerdewegh, Carlisle, MA (US); Jonathan Segal, Efrat, IL (US)

Correspondence Address: DOWELL & DOWELL P.C., 103 Oronoco St., Suite 220, Alexandria, VA, 22314, US

(21) Appl. No.: 12/309,878

(22) PCT Filed: Aug. 2, 2006
(86) PCT No.: PCT/US06/30281

§ 371 Date: Nov. 18, 2009

(51) Int. Cl. C40B 30/04; C12Q 1/68; C12Q 1/02; C12N 5/02

(52) U.S. Cl. 506/9; 435/6; 435/29; 435/375

(57) ABSTRACT

The present invention relates to the selection of a set of polymorphism markers for use in genome wide association studies based on linkage disequilibrium mapping. In particular, the invention relates to the fields of pharmacogenomics, diagnostics, patient therapy and the use of genetic haplotype information to predict an individual's susceptibility to psoriasis disease and/or their response to a particular drug or drugs.

### FIELD OF THE INVENTION

[0001] The invention relates to the field of genomics and genetics, including genome analysis and the study of DNA variations. In particular, the invention relates to the fields of pharmacogenomics, diagnostics, patient therapy and the use of genetic haplotype information to predict an individual's susceptibility to psoriasis disease and/or their response to a particular drug or drugs, so that drugs tailored to genetic differences of population groups may be developed and/or administered to the appropriate population.

[0002] The invention also relates to a GeneMap for psoriasis disease, which links variations in DNA (including both genic and non-genic regions) to an individual's susceptibility to psoriasis and/or response to a particular drug or drugs. The invention further relates to the genes disclosed in the GeneMap (see Tables 10, 11 and 12), and methods and reagents for detection of an individual's increased or decreased risk for psoriasis by identifying at least one polymorphism in one or a combination of the genes from the GeneMap. Also related are the candidate regions identified in Table 1, which are associated with psoriasis. In addition the invention further relates to nucleotide sequences of those genes as well as sequences derived therefrom, including isolated genomic DNA and RNA sequences and fragments thereof, cDNA sequences, oligonucleotide probes, single nucleotide polymorphisms (SNPs), alleles and haplotypes (see Sequence Listing and Tables 2-14).

[0003] The invention further relates to isolated nucleic acids comprising these nucleotide sequences and isolated polypeptides or peptides encoded thereby. Also related are expression vectors and host cells comprising the disclosed nucleic acids or fragments thereof, as well as antibodies that bind to the encoded polypeptides or peptides.

[0004] The present invention further relates to ligands that modulate the activity of the disclosed genes or gene products. In addition, the invention relates to diagnostics and therapeutics for psoriasis disease, utilizing the disclosed nucleic acids, SNPs, chromosomal regions, gene maps, polypeptides or peptides, antibodies and/or ligands and small molecules that activate or repress relevant signaling events.

### BACKGROUND OF THE INVENTION

[0005] Inflammatory or allergic skin diseases, especially the proliferative ones, have always been a source of physical and psychological problems for humans and other animals. For some of these skin diseases, such as psoriasis, there is no cure. Psoriasis is a chronic and recurring disease recognized by its raised red silvery scaled eruptions and plaques of various sizes. These plaques can appear anywhere on the skin. Psoriasis is a very visible skin condition that has a high impact on the quality of life of the patient. The scaling is caused by an increase and an abnormally high production of cutaneous cells. The cause of this accelerated cellular growth is unknown, but it is believed that immunological mechanisms may play an important role. The disease is common, affecting from 2 to 4% of the Caucasian population. There are very distinct degrees of psoriasis, regarding the intensity of the cutaneous disorder and the extent and location of the affected areas.

[0006] No known therapeutic method can cure psoriasis, but the majority of cases can be controlled. In the less severe cases of the disease, treatment with pomades or emollient creams that keep the skin hydrated can be sufficient. In the more severe cases, the antineoplastics methotrexate or cyclosporin, both of which provoke serious side effects, can be used. In many of the moderate cases of psoriasis, however, topical formulations (pomades, creams, gels and lotions) containing corticosteroids are used by applying them underneath an occlusive covering made of cellophane or polyethylene, or incorporating them into an adhesive bandage. Depending on the affected area, applying these topical formulations can represent a real practical problem for the patient, especially during the day. In addition to the problems inherent in their topical application, another problem with corticosteroids is that the disease does not always respond to treatment and, when it does, it tends to relapse rapidly. The frequency of relapses is relevant to the treatment of psoriasis because the prolonged application of topical corticosteroids causes local side effects (atrophic alterations, loss of collagen, stretch marks, hypertrichosis, telangiectasia and pigmentary disorders) and loss of efficacy.

[0007] Despite a preponderance of evidence showing inheritance of a risk for psoriasis through epidemiological studies and genome wide linkage analyses, the genes affecting psoriasis have yet to be discovered. There is a need in the art for identifying specific genes related to psoriasis disease to enable the development of therapeutics that address the causes of the disease rather than relieving its symptoms. The failure in past studies to identify causative genes in complex diseases, such as psoriasis, has been due to the lack of appropriate methods to detect a sufficient number of variations in genomic DNA samples (markers), the insufficient quantity of necessary markers available, and the number of needed individuals to enable such a study. The present invention addresses these issues.

[0008] The DNA sequences between two human genomes are 99.9% identical. The variations in DNA sequence between individuals can be as an example, deletions of small or large stretches of DNA, insertions of stretches of DNA, variations in the number of repetitive DNA elements in non-coding regions, and changes in single base positions in the genome called “single nucleotide polymorphisms” (SNPs). Human DNA sequence variation accounts for a large fraction of observed differences between individuals, including susceptibility to disease.

[0009] Many common diseases, like psoriasis, are complex genetic traits and are believed to involve several disease-genes rather than single genes, as is observed for rare diseases. This makes detection of any particular gene substantially more difficult than in a rare disease, where a single gene mutation that segregates according to a Mendelian inheritance pattern is the causative mutation. Any one of the multiple interacting gene mutations involved in the etiology of a complex disease will impart a lower relative risk for the disease than will the single gene mutation involved in a simple genetic disease. Low relative risk alleles are more difficult to detect and, as a result, the success of positional cloning using linkage mapping that was achieved for simple genetic disease genes has not been repeated for complex diseases.

[0010] Several approaches have been proposed to discover and characterize multiple genes in complex genetic traits. These gene discovery methods can be subdivided into hypothesis-free disease association studies and hypothesis-driven candidate gene or region studies. The candidate gene approach relies on the analysis of a gene in patients who have a disease in which the gene is thought to play a role. This approach is limited in utility because it only provides for the investigation of genes with known functions. Although variant sequences of candidate genes may be identified using this approach, it is inherently limited by the fact that variant sequences in other genes that contribute to the phenotype will be necessarily missed when the technique is employed. Genome-wide scans (GWS) have been shown to be efficient in identifying psoriasis susceptibility genes, such as the MHC class 1 HLA molecules identified at the PSORS 1 locus (HLA-B13, B17 and B37, and HLA-Cw6, Cw7 and DR7.). In contrast to the candidate gene approach, a GWS searches throughout the genome without any a priori hypothesis and consequently can identify genes that are not obvious candidates for the disease as well as genes that are relevant candidates for the disease, as well as chromosomal regions that are structurally important where an “associated allele”, a “particular allele of a polymorphic locus”, or the likes can influence the expression of specific genes.

[0011] Family-based linkage mapping methods were initially used for disease locus identification. This technique locates genes based on the relatively limited number of genetic recombination events within the families used in the study, and results in large chromosomal regions containing hundreds of genes, any one of which could be the disease-causing gene. Population-based, or linkage disequilibrium (LD) mapping is based on the premise that regions adjacent to a gene of interest are co-transmitted through the generations along with the gene. As a result, LD extends over shorter genetic regions than does linkage (Hewett et al., 2002), and can facilitate detection of genes with lower relative risk than family linkage mapping approaches. It also defines much smaller candidate regions which may contain only a few genes, making the identification of the actual disease gene much easier.

[0012] It has been estimated that a genome wide scan that uses a general population and case/control association (LD) analysis would require approximately 700,000 SNP markers (Carlson et al., 2003). The cost of a GWS at this marker density for a sufficient sample size for statistical power is economically prohibitive. The use of a special founder population (genetic isolates), such as the French Canadian population of Quebec, is one solution to the problem with LD analysis. The French Canadian population in Quebec (Quebec Founder Population—QFP) provides one of the best resources in the world for gene discovery based on its high levels of genetic sharing and genetic homogeneity. By combining DNA collected from the QFP, high throughput genotyping capabilities and proprietary algorithms for genetic analysis, a comprehensive genome-wide association study was facilitated. The present invention relates specifically to a set of psoriasis-causing genes (GeneMap) and targets which present attractive points of therapeutic intervention.

[0013] Identifying susceptibility genes associated with psoriasis disease and their respective biochemical pathways will facilitate the identification of diagnostic markers as well as novel targets for improved therapeutics. It will also improve the quality of life for those afflicted by this disease and will reduce the economic costs of these afflictions at the individual and societal level. The identification of those genetic markers would provide the basis for novel genetic tests and eliminate or reduce the need for the battery of laboratory and biopsy tests currently used. The present invention satisfies this need and provides related advantages as well.

### BRIEF DESCRIPTION OF THE DRAWINGS

[0014] FIGS. 1 to 13: Graphical representation of networks 1 to 13. Lists of directly interacting genes, as described in the text, were imported in the IPA software from Ingenuity Systems Inc. to generate networks of interacting genes. These networks are based on functional relationships between gene products using known interactions in the literature.

### DESCRIPTION OF THE FILES CONTAINED ON THE CD-R

[0015] The contents of the submission on compact discs submitted herewith are incorporated herein by reference in their entirety: A compact disc copy of the Sequence Listing (COPY 1) (filename: GENI 017/00WO Sequence Listing.txt, date recorded: Jul. 31, 2006, file size 80,914 kilobytes); a duplicate compact disc copy of the Sequence Listing (COPY 2) (filename: GENI 017/00WO Sequence Listing.txt, date recorded: Jul. 31, 2006, file size 80,914 kilobytes); a duplicate compact disc copy of the Sequence Listing (COPY 3) (filename: GENI 017/00WO Sequence Listing.txt, date recorded: Jul. 31, 2006, file size 80,914 kilobytes); a computer readable format copy of the Sequence Listing (CRF COPY) (filename: GENI 017/00WO Sequence Listing.txt, date recorded: Jul. 31, 2006, file size 80,914 kilobytes); a compact disc copy of the Tables (COPY 1) (filename: GENI 017/00WO Tables.pdf, date recorded: Jul. 31, 2006, file size 15,060 kilobytes); a duplicate compact disc copy of the Tables (COPY 2) (filename: GENI 017/00WO Tables.pdf, date recorded: Jul. 31, 2006, file size 15,060 kilobytes); and a duplicate compact disc copy of the Tables (COPY 3) (filename: GENI 017/00WO Tables.pdf, date recorded: Jul. 31, 2006, file size 15,060 kilobytes).

[0016] Definitions

[0017] Throughout the description of the present invention, several terms are used that are specific to the science of this field. For the sake of clarity and to avoid any misunderstanding, these definitions are provided to aid in the understanding of the specification and claims:

[0018] Allele: One of a pair, or series, of forms of a gene or non-genic region that occur at a given locus in a chromosome. Alleles are represented by variations of the same basic symbol (e.g., B for dominant and b for recessive); B1, B2, Bn for n additive alleles at a locus). In a normal diploid cell there are two alleles of any one gene (one from each parent), which occupy the same relative position (locus) on homologous chromosomes. Within a population there may be more than two alleles of a gene, i.e., multiple alleles. SNPs also have alleles, i.e., the two (or more) nucleotides that characterize the SNP.

[0019] Amplification of nucleic acids: refers to methods such as polymerase chain reaction (PCR), ligation amplification (or ligase chain reaction, LCR), amplification methods based on the use of Q-beta replicase, and any other in vitro amplification reaction known in the art or to be developed in the future. These methods are well known in the art and are described, for example, in U.S. Pat. Nos. 4,683,195 and 4,683,202. Reagents and hardware for conducting PCR are commercially available. Primers useful for amplifying sequences from the disorder region are preferably complementary to, and preferably hybridize specifically to, sequences in the disease region, i.e., region associated with psoriasis, or in regions that flank a target region therein. Genes from Tables 10-12 generated by amplification may be sequenced directly. Alternatively, the amplified sequence(s) may be cloned prior to sequence analysis.

[0020] Antigenic component: is a moiety that binds to its specific antibody with sufficiently high affinity to form a detectable antigen-antibody complex.

[0021] Antibodies: refer to polyclonal and/or monoclonal antibodies and fragments thereof, and immunologic binding equivalents thereof, including Fab fragments (Fab)₂ fragments, Fv fragments, humanized antibodies, chimeric antibodies, etc., that can bind to proteins and fragments thereof or to nucleic acid sequences from the disease region, particularly from the disease gene products or a portion thereof. The term antibody is used both to refer to a homogeneous molecular entity, or a mixture such as a serum product made up of a plurality of different molecular entities. Proteins may be prepared synthetically in a protein synthesizer and coupled to a carrier molecule and injected over several months into rabbits. Rabbit sera are tested for immunoreactivity to the protein or fragment. Monoclonal antibodies may be made by injecting mice with the proteins, or fragments thereof. Monoclonal antibodies will be screened by ELISA and tested for specific immunoreactivity with protein or fragments thereof. (Harlow et al. 1988, Antibodies: A Laboratory Manual, Cold Spring Harbor Laboratory, Cold Spring Harbor, N.Y.). These antibodies will be useful in assays as well as therapeutics.

[0022] Associated allele: refers to an allele at a polymorphic locus that is associated with a particular phenotype of interest, e.g., a predisposition to disease or a particular drug response.

[0023] cDNA: refers to complementary or copy DNA produced from an RNA template by the action of RNA-dependent DNA polymerase (reverse transcriptase). Thus, a cDNA clone means a duplex DNA sequence complementary to an RNA molecule of interest, included in a cloning vector or PCR amplified. This term includes genes from which intervening sequences, including non-coding sequences, have been removed.

[0024] cDNA library: refers to a collection of recombinant DNA molecules containing cDNA inserts that together comprise essentially all of the expressed genes of an organism or tissue. A cDNA library can be prepared by methods known to one skilled in the art (see, e.g., Cowell and Austin, 1997, “DNA Library Protocols,” Methods in Molecular Biology). Generally, RNA is first isolated from the cells of the desired organism, and the RNA is used to prepare cDNA molecules.

[0025] Cloning: refers to the use of recombinant DNA techniques to insert a particular gene or other DNA sequence into a vector molecule. In order to successfully clone a desired gene, it is necessary to use methods for generating DNA fragments, for joining the fragments to vector molecules, for introducing the composite DNA molecule into a host cell in which it can replicate, and for selecting the clone having the target gene from amongst the recipient host cells.

[0026] Cloning vector: refers to a plasmid or phage DNA or other DNA molecule that is able to replicate in a host cell. The cloning vector is typically characterized by one or more endonuclease recognition sites at which such DNA sequences may be cleaved in a determinable fashion without loss of an essential biological function of the DNA, and which may contain a selectable marker suitable for use in the identification of cells containing the vector.

[0027] Coding sequence or a protein-coding sequence: is a polynucleotide sequence capable of being transcribed into mRNA and/or capable of being translated into a polypeptide or peptide. The boundaries of the coding sequence are typically determined by a translation start codon at the 5′-terminus and a translation stop codon at the 3′-terminus.

[0028] Complement of a nucleic acid sequence: refers to the antisense sequence that participates in Watson-Crick base-pairing with the original sequence.

[0029] Disorder region: refers to the portions of the human chromosomes displayed in Table 1 bounded by the markers from Tables 2-13.

[0030] Disorder-associated nucleic acid or polypeptide sequence: refers to a nucleic acid sequence that maps to region of Table 1 or the polypeptides encoded therein (Tables 2-14 SNPs, nucleic acids, and polypeptides). For nucleic acids, this encompasses sequences that are identical or complementary to the gene sequences from Tables 4-6, as well as sequence-conservative, function-conservative, and non-conservative variants thereof. For polypeptides, this encompasses sequences that are identical to the disclosed polypeptides, as well as function-conservative and non-conservative variants thereof. Included are the alleles of naturally-occurring polymorphisms causative of psoriasis such as, but not limited to, alleles that cause altered expression of genes of Tables 10-12 and alleles that cause altered protein levels, conformation or stability (e.g., decreased levels, increased levels, expression in an inappropriate tissue type, increased stability, and decreased stability).

[0031] Expression vector: refers to a vehicle or plasmid that is capable of expressing a gene that has been cloned into it, after transformation or integration in a host cell. The cloned gene is usually placed under the control of (i.e., operably linked to) a regulatory sequence.

[0032] Function-conservative variants: are those in which a change in one or more nucleotides in a given codon position results in a polypeptide sequence in which a given amino acid residue in the polypeptide has been replaced by a conservative amino acid substitution. Function-conservative variants also include analogs and homologs of a given polypeptide and any polypeptides that have the ability to elicit antibodies specific to a designated polypeptide.

[0033] Founder population: Also called a population isolate, this is a large number of people who have mostly descended, in genetic isolation from other populations, from a much smaller number of people who lived many generations ago.

[0034] Gene: Refers to a DNA sequence that encodes through its template or messenger RNA a sequence of amino acids characteristic of a specific peptide, polypeptide, or protein. The term “gene” also refers to DNA sequence that encodes an RNA product. The term gene as used herein with reference to genomic DNA includes intervening, non-coding regions, as well as regulatory regions, including regions at one or both of the 5′ and 3′ ends. A gene sequence is wild-type if such sequence is usually found in individuals unaffected by the disease or condition of interest. However, environmental factors and other genes can also play an important role in the ultimate determination of the disease. In the context of complex diseases involving multiple genes (oligogenic diseases), the wild type, or normal sequence can also be associated with a measurable risk or susceptibility, receiving its reference status based on its frequency in the general population.

[0035] GeneMaps are defined as groups of gene(s) that are directly or indirectly involved in at least one phenotype of a particular disease or disorder, for instance, psoriasis. As such, GeneMaps enable the development of synergistic diagnostic products, creating “theranostics”.

[0036] Genotype: Set of alleles at a specified locus or loci.

[0037] Haplotype: The allelic pattern of a group of (usually contiguous) DNA markers or other polymorphic loci along an individual chromosome or double helical DNA segment. Haplotypes identify individual chromosomes or chromosome segments. The presence of shared haplotype patterns among a group of individuals implies that the locus defined by the haplotype has been inherited, identical by descent (IBD), from a common ancestor. Detection of identical by descent haplotypes is the basis of linkage disequilibrium (LD) mapping. Haplotypes are broken down through the generations by recombination and mutation. In some instances, a specific allele or haplotype may be associated with susceptibility to a disease or condition of interest, e.g., psoriasis disease. In other instances, an allele or haplotype may be associated with a decrease in susceptibility to a disease or condition of interest, i.e., a protective sequence.

[0038] Host: includes prokaryotes and eukaryotes. The term includes an organism or cell that is the recipient of an expression vector (e.g., autonomously replicating or integrating vector).

[0039] Hybridizable: nucleic acids are hybridizable to each other when at least one strand of the nucleic acid can anneal to another nucleic acid strand under defined stringency conditions. In some embodiments, hybridization requires that the two nucleic acids contain a stretch of at least 10 completely complementary or substantially complementary nucleotides; depending on the stringency of hybridization, mismatches may be tolerated. The appropriate stringency for hybridizing nucleic acids depends on the length of the nucleic acids and the degree of complementarily, and can be determined in accordance with the methods described herein.

[0040] Identity by descent (IBD): Identity among DNA sequences for different individuals that is due to the fact that they have all been inherited from a common ancestor. LD mapping identifies IBD haplotypes as the likely location of disease genes shared by a group of patients.

[0041] Identity or percentage identity: as known in the art, is a relationship between two or more polypeptide sequences or two or more polynucleotide sequences, as determined by comparing the sequences. In the art, identity refers to the degree of sequence relatedness between polypeptide or polynucleotide sequences, as the case may be, as determined by the match between strings of such sequences. Identity and similarity can be readily calculated by known methods, including but not limited to those described in A. M. Lesk (ed), 1988, Computational Molecular Biology, Oxford University Press, NY; D. W. Smith (ed), 1993, Biocomputing. Informatics and Genome Projects, Academic Press, NY; A. M. Griffin and H. G. Griffin, H. G (eds), 1994, ComputerAnalysis of Sequence Data, Part 1, Humana Press, NJ; G. von Heinje, 1987, Sequence Analysis in Molecular Biology, Academic Press; and M. Gribskov and J. Devereux (eds), 1991, Sequence Analysis Primer, M Stockton Press, NY; H. Carillo and D. Lipman, 1988, SIAM J. Applied Math., 48:1073.

[0042] Immunogenic component: is a moiety that is capable of eliciting a humoral and/or cellular immune response in a host animal.

[0043] Isolated nucleic acids: are nucleic acids separated away from other components (e.g., DNA, RNA, and protein) with which they are associated (e.g., as obtained from cells, chemical synthesis systems, or phage or nucleic acid libraries). Isolated nucleic acids are at least 60% free, preferably 75% free, and most preferably 90% free from other associated components. In accordance with the present invention, isolated nucleic acids can be obtained by methods described herein, or other established methods, including isolation from natural sources (e.g., cells, tissues, or organs), chemical synthesis, recombinant methods, combinations of recombinant and chemical methods, and library screening methods.

[0044] Isolated polypeptides or peptides: are those that are separated from other components (e.g., DNA, RNA, and other polypeptides or peptides) with which they are associated (e.g., as obtained from cells, translation systems, or chemical synthesis systems). In a preferred embodiment, isolated polypeptides or peptides are at least 10% pure; more preferably, 80% or 90% pure. Isolated polypeptides and peptides include those obtained by methods described herein, or other established methods, including isolation from natural sources (e.g., cells, tissues, or organs), chemical synthesis, recombinant methods, or combinations of recombinant and chemical methods. Proteins or polypeptides referred to herein as recombinant are proteins or polypeptides produced by the expression of recombinant nucleic acids. A portion as used herein with regard to a protein or polypeptide, refers to fragments of that protein or polypeptide. The fragments can range in size from about 5 amino acid residues to all but one residue of the entire protein sequence. Thus, a portion or fragment can be at least about 5 to about 50, about 50 to about 100, about 100 to about 200, about 200 to about 400, about 400 to about 800, or more consecutive amino acid residues of a protein or polypeptide, and more specifically, at least about 5, at least about 10, at least about 15, at least about 20, at least about 25, at least about 30, at least about 50, at least about 75, at least about 100, at least about 150, at least about 200, at least about 300, at least about 500, at least about 800, or more consecutive amino acid residues of a protein or polypeptide.

[0045] Linkage disequilibrium (LD): the situation in which the alleles for two or more loci do not occur together in individuals sampled from a population at frequencies predicted by the product of their individual allele frequencies. In other words, markers that are in LD do not follow Mendel's second law of independent random segregation. LD can be caused by any of several demographic or population artifacts as well as by the presence of genetic linkage between markers. However, when these artifacts are controlled and eliminated as sources of LD, then LD results directly from the fact that the loci involved are located close to each other on the same chromosome so that specific combinations of alleles for different markers (haplotypes) are inherited together. Markers that are in high LD can be assumed to be located near each other and a marker or haplotype that is in high LD with a genetic trait can be assumed to be located near the gene that affects that trait. The physical proximity of markers can be measured in family studies where it is called linkage or in population studies where it is called linkage disequilibrium.

[0046] LD mapping: population based gene mapping, which locates disease genes by identifying regions of the genome where haplotypes or marker variation patterns are shared statistically more frequently among disease patients compared to healthy controls. This method is based upon the assumption that many of the patients will have inherited an allele associated with the disease from a common ancestor (IBD), and that this allele will be in LD with the disease gene.

[0047] Locus: a specific position along a chromosome or DNA sequence. Depending upon context, a locus could be a gene, a marker, a chromosomal band or a specific sequence of one or more nucleotides.

[0048] Minor allele frequency (MAF): the population frequency of one of the alleles for a given polymorphism, which is equal or less than 50%. The sum of the MAF and the Major allele frequency equals one.

[0049] Markers: an identifiable DNA sequence that is variable (polymorphic) for different individuals within a population. These sequences facilitate the study of inheritance of a trait or a gene. Such markers are used in mapping the order of genes along chromosomes and in following the inheritance of particular genes; genes closely linked to the marker or in LD with the marker will generally be inherited with it. Two types of markers that are commonly used in genetic analysis include microsatellites and SNPs.

[0050] Microsatellite: DNA of eukaryotic cells comprising a repetitive, short sequence of DNA that is present as tandem repeats and in highly variable copy number, flanked by sequences unique to that locus.

[0051] Mutant sequence: a sequence that differs from one or more wild-type sequences. For example, a nucleic acid from a gene listed in Tables 10-12 containing a particular allele of a single nucleotide polymorphism may be a mutant sequence. In some cases, the individual carrying this allele has increased susceptibility toward the disease or condition of interest. In other cases, the mutant sequence might also refer to an allele that decreases the susceptibility toward a disease or condition of interest and thus acts in a protective manner. The term mutation may also be used to describe a specific allele of a polymorphic locus.

[0052] Non-conservative variants: are those in which a change in one or more nucleotides in a given codon position results in a polypeptide sequence in which a given amino acid residue in a polypeptide has been replaced by a non-conservative amino acid substitution. Non-conservative variants also include polypeptides comprising non-conservative amino acid substitutions.

[0053] Nucleic acid or polynucleotide: purine- and pyrimidine-containing polymers of any length, either polyribonucleotides or polydeoxyribonucleotide or mixed polyribo polydeoxyribonucleotides. This includes single- and double-stranded molecules, i.e., DNA-DNA, DNA-RNA and RNA-RNA hybrids, as well as protein nucleic acids (PNA) formed by conjugating bases to an amino acid backbone. This also includes nucleic acids containing modified bases.

[0054] Nucleotide: a nucleotide, the unit of a DNA molecule, is composed of a base, a 2′-deoxyribose and phosphate ester(s) attached at the 5′ carbon of the deoxyribose. For its incorporation in DNA, the nucleotide needs to possess three phosphate esters but it is converted into a monoester in the process.

[0055] Operably linked: with reference to a gene and a promoter or regulatory sequence means that the promoter or regulatory sequence controls the initiation of or regulates the expression of the gene. A promoter is operably linked to a sequence of proximal DNA if upon introduction into a host cell the promoter determines the transcription of the proximal DNA sequence(s) into one or more species of RNA. A promoter is operably linked to a DNA sequence if the promoter is capable of initiating transcription of that DNA sequence.

[0056] Ortholog: denotes a gene or polypeptide obtained from one species that has homology to an analogous gene or polypeptide from a different species.

[0057] Paralog: denotes a gene or polypeptide obtained from a given species that has homology to a distinct gene or polypeptide from that same species.

[0058] Phenotype: any visible, detectable or otherwise measurable property of an organism such as symptoms of or susceptibility to, a disease.

[0059] Polymorphism: occurrence of two or more alternative genomic sequences or alleles between or among different genomes or individuals at a single locus. A polymorphic site thus refers specifically to the locus at which the variation occurs. In some cases, an individual carrying a particular allele of a polymorphism has an increased or decreased susceptibility toward a disease or condition of interest.

[0060] Portion: with regard to a nucleic acid or polynucleotide, refers to fragments of that nucleic acid or polynucleotide. Accordingly, portion and fragment are synonymous. The fragments can range in size from about 8 nucleotides to all but one nucleotide of the entire gene sequence. Preferably, the fragments are at least about 8 to about 10 nucleotides in length; at least about 12 nucleotides in length; at least about 15 to about 20 nucleotides in length; at least about 25 nucleotides in length; at least about 35 to about 55 nucleotides in length; at least about 75 to about 100 nucleotides in length; at least about 125 to about 150 nucleotides in length; at least about 175 to about 200 nucleotides in length; at least about 200 to about 300 nucleotides in length, or more.

[0061] Probe or primer: refers to a nucleic acid or oligonucleotide that forms a hybrid structure with a sequence in a target region of a nucleic acid due to complementarity of the probe or primer sequence to at least one portion of the target region sequence.

[0062] Protein: is synonymous with polypeptide. Peptides are defined as fragments or portions of polypeptides, preferably fragments or portions having at least one functional activity (e.g., proteolysis, adhesion, fusion, antigenic, or intracellular activity) of the complete polypeptide sequence.

[0063] Psoriasis: a chronic and recurring inflammatory skin disease recognized by its raised red silvery scaled eruptions and plaques of various sizes. Types of psoriasis include psoriasis vulgaris or plaque psoriasis (the most common type), nail psoriasis, scalp psoriasis, pustular psoriasis, guttate psoriasis, inverse or flexural psoriasis, erythrodermic psoriasis and psoriatic arthritis.

[0064] Recombinant nucleic acids: nucleic acids which have been produced by recombinant DNA methodology, including those nucleic acids that are generated by procedures which rely upon a method of artificial replication, such as the polymerase chain reaction (PCR) and/or cloning into a vector using restriction enzymes. Portions of recombinant nucleic acids which code for polypeptides can be identified and isolated by, for example, the method of M. Jasin et al., U.S. Pat. No. 4,952,501.

[0065] Regulatory sequence: refers to a nucleic acid sequence that controls or regulates expression of structural genes when operably linked to those genes. These include, for example, the lac systems, the trp system, major operator and promoter regions of the phage lambda, the control region of fd coat protein and other sequences known to control the expression of genes in prokaryotic or eukaryotic cells. Regulatory sequences will vary depending on whether the vector is designed to express the operably linked gene in a prokaryotic or eukaryotic host, and may contain transcriptional elements such as enhancer elements, termination sequences, tissue-specificity elements and/or translational initiation and termination sites.

[0066] Sample: as used herein refers to a biological sample, such as, for example, tissue or fluid isolated from an individual or animal (including, without limitation, plasma, serum, cerebrospinal fluid, lymph, tears, saliva, milk, pus, and tissue exudates and secretions) or from in vitro cell culture-constituents, as well as samples obtained from, for example, a laboratory procedure.

[0067] Single nucleotide polymorphism (SNP): variation of a single nucleotide. This includes the replacement of one nucleotide by another and deletion or insertion of a single nucleotide. Typically, SNPs are biallelic markers although tri- and tetra-allelic markers also exist. For example, SNP A\C may comprise allele C or allele A (Tables 2-9 and 13). Thus, a nucleic acid molecule comprising SNP A\C may include a C or A at the polymorphic position. For a combination of SNPs, the term “haplotype” is used, e.g. the genotype of the SNPs in a single DNA strand that are linked to one another. In certain embodiments, the term “haplotype” is used to describe a combination of SNP alleles, e.g., the alleles of the SNPs found together on a single DNA molecule. In some embodiments, the SNPs in a haplotype are in linkage disequilibrium with one another.

[0068] Sequence-conservative: refers to variants in which a change of one or more nucleotides in a given codon position results in no alteration in the amino acid encoded at that position (i.e., silent mutation).

[0069] Substantially homologous: a nucleic acid or fragment thereof is substantially homologous to another if, when optimally aligned (with appropriate nucleotide insertions and/or deletions) with the other nucleic acid (or its complementary strand), there is nucleotide sequence identity in at least about 60% of the nucleotide bases, usually at least about 70%, more usually at least about 80%, preferably at least about 90%, and more preferably at least about 95-98% of the nucleotide bases. Alternatively, substantial homology exists when a nucleic acid or fragment thereof will hybridize, under selective hybridization conditions, to another nucleic acid (or a complementary strand thereof). Selectivity of hybridization exists when hybridization which is substantially more selective than total lack of specificity occurs. Typically, selective hybridization will occur when there is at least about 55% sequence identity over a stretch of at least about nine or more nucleotides, preferably at least about 65%, more preferably at least about 75%, and most preferably at least about 90% (M. Kanehisa, 1984, NucL Acids Res. 11:203-213). The length of homology comparison, as described, may be over longer stretches, and in certain embodiments will often be over a stretch of at least about 14 nucleotides, usually at least about 20 nucleotides, more usually at least about 24 nucleotides, typically at least about 28 nucleotides, more typically at least about 32 nucleotides, and preferably at least about 36 or more nucleotides.

[0070] Wild-type gene from Tables 10-12: refers to the reference sequence. The wild-type gene sequences from Tables 10-12 are used to identify the variants (polymorphisms, alleles, and haplotypes) described in detail herein.

[0071] Technical and scientific terms used herein have the meanings commonly understood by one of ordinary skill in the art to which the present invention pertains, unless otherwise defined. Reference is made herein to various methodologies known to those of skill in the art. Publications and other materials setting forth such known methodologies to which reference is made are incorporated herein by reference in their entireties as though set forth in full. Standard reference works setting forth the general principles of recombinant DNA technology include J. Sambrook et a., 1989, Molecular Cloning: A Laboratory Manual, 2d Ed., Cold Spring Harbor Laboratory Press, Cold Spring Harbor, N.Y.; P. B. Kaufman et al., (eds), 1995, Handbook of Molecular and Cellular Methods in Biology and Medicine, CRC Press, Boca Raton; M. J. McPherson (ed), 1991, Directed Mutagenesis: A Practical Approach, IRL Press, Oxford; J. Jones, 1992, Amino Acid and Peptide Synthesis, Oxford Science Publications, Oxford; B. M. Austen and O. M. R. Westwood, 1991, Protein Targeting and Secretion, IRL Press, Oxford; D. N Glover (ed), 1985, DNA Cloning, Volumes I and 11; M. J. Gait (ed), 1984, Oligonucleotide Synthesis; B. D. Hames and S. J. Higgins (eds), 1984, Nucleic Acid Hybridization; Wu and Grossman (eds), Methods in Enzymology (Academic Press, Inc.), Vol. 154 and Vol. 155; Quirke and Taylor (eds), 1991, PCR-A Practical Approach; Harries and Higgins (eds), 1984, Transcription and Translation; R. I. Freshney (ed), 1986, Animal Cell Culture; Immobilized Cells and Enzymes, 1986, IRL Press; Perbal, 1984, A Practical Guide to Molecular Cloning, J. H. Miller and M. P. Calos (eds), 1987, Gene Transfer Vectors for Mammalian Cells, Cold Spring Harbor Laboratory Press; M. J. Bishop (ed), 1998, Guide to Human Genome Computing, 2d Ed., Academic Press, San Diego, Calif.; L. F. Peruski and A. H. Peruski, 1997, The Internet and the New Biology. Tools for Genomic and Molecular Research, American Society for Microbiology, Washington, D.C. Standard reference works setting forth the general principles of immunology include S. Sell, 1996, Immunology, Immunopathology & Immunity, 5th Ed., Appleton & Lange, Publ., Stamford, Conn.; D. Male et al., 1996, Advanced Immunology, 3d Ed., Times Mirror Int'l Publishers Ltd., Publ., London; D. P. Stites and A. L Terr, 1991, Basic and Clinical Immunology, 7th Ed., Appleton & Lange, Publ., Norwalk, Conn.; and A. K. Abbas et al., 1991, Cellular and Molecular Immunology, W. B. Saunders Co., Publ., Philadelphia, Pa. Any suitable materials and/or methods known to those of skill can be utilized in carrying out the present invention; however, preferred materials and/or methods are described. Materials, reagents, and the like to which reference is made in the following description and examples are generally obtainable from commercial sources, and specific vendors are cited herein.

### DETAILED DESCRIPTION OF THE INVENTION

[0072] General Description of Psoriasis Disease

[0073] Psoriasis vulgaris is a chronic inflammatory skin disease, the prevalence rate of which is 2-5% in Caucasian populations; 1-2% in English and European populations; and 0.1-0.3% in Far Eastern and Chinese populations. Most cases of psoriasis vulgaris are sporadic. Sporadic cases are characterized by inflammatory skin lesions showing abnormal differentiation and hyperproliferation of keratinocytes, infiltration of activated helper T cells and monocytes, hypervascularization, and release of proinflammatory cytokines.

[0074] Psoriasis is a T-cell-mediated inflammatory disease in which the activation of the immune system in focal skin regions, mediated by CD8+ and CD4+ T lymphocytes, results in epidermal hyperplasia (Krueger, 2002). The cause of psoriatic lesions has been suggested to be related to antigens/superantigens or autoantigens provided by non-dermal inducing factors (Freedberg et al., 1998).

[0075] Three basic treatments are currently used for psoriasis: 1) applying a topical agent, 2) using phototherapy, and 3) applying systemic agents. Applying a topical agent is typically the first approach to treating psoriasis. Topical agents include corticosteroids, coal tar, anthralin, calcipotriene, and tazarotene. The treatment of choice for providing symptomatic relief entails the topical application of corticosteroids. All topical steroids have anti-inflammatory, anti-pruritic, and vasoconstrictive effects. However, their long-term use is often accompanied by loss of effectiveness.

[0076] Topical coal tar contains more than 10,000 different chemical substances. The exact mechanism of action thereof is unknown. The most common coal tar treatment protocol (the Goeckermann method, which also uses UV phototherapy) involves almost a month of messy topical treatments at a day treatment center. Although this method has a high rate of success in clearing skin, it is relatively expensive and time-consuming. Anthralin is a synthetic derivative of a tree bark extract and is a cellular antiproliferative agent that decreases the rate of epidermal cell growth. Although anthralin is considered one of the most effective agents available for treating psoriasis, it is not in widespread use because of its high potential to cause irritation and staining of the skin. Calcipotriene is a synthetic vitamin D-3 analog that regulates skin cell production. It is not in widespread use, however, because it is expensive and dosage is limited due to the risk of irritation and vitamin D toxicity. Tazarotene is a retinoid derivative that has been used to topically treat psoriasis. However, it often causes irritation and, thus, is typically used in conjunction with topical steroid treatments. For plaque psoriasis, retinoids are used in combination with ultraviolet phototherapy to minimize the dosage thereof that is required. The utility of such methods is limited by the side effects and precautions that are generally associated with retinoids, as would be appreciated by one skilled in the art.

[0077] Phototherapy is generally used only in the presence of extensive, widespread disease. Resistance to other topical treatments is another indication for phototherapy. There are two main forms of phototherapy, UVB and PUVA phototherapy. UVB, or Ultraviolet B, phototherapy uses light having a wavelength in the range of 290-320 nm. Such phototherapy is usually combined with one or more topical treatments including: topically applying coal tar, followed by using UVB (the aforementioned Goeckerman method); using a coal tar bath, followed by UVB, and then followed by topically applying anthralin (the Ingram method); or using UVB in combination with topically applying corticosteroids, calcipotriene, tazarotene, or simply bland emollients. A major drawback of such methods is the long duration thereof and accessibility to UVB equipment. PUVA uses the photosensitizing drug methoxsalen (8methoxypsoralens) in conjunction with UVA light (wavelengths in the 320-400 nm range). PUVA interferes with DNA synthesis (methoxsalen binds covalently to pyrimidine bases in DNA), decreases cellular proliferation, and induces apoptosis of cutaneous lymphocytes leading to localized immunosuppression. Adverse effects associated with both of these treatments include nausea, pruritus, burning, photo damage to the skin and increased risk of skin cancer. Systemic psoriasis treatment is usually initiated only after both topical treatment and phototherapy have failed, or for patients with very active psoriatic arthritis. The main agents available are the immunomodulators Methotrexate and Cyclosporine, and the oral retinoid Acitretin, as well as and new biological agents. For example, recent new proposed treatments involve recombinant human cytokines, growth factors, or monoclonal antibodies and fusion proteins thereof (Wons et al., 2002). Methotrexate is a folic acid antagonist that inhibits DNA synthesis in tissues with high rates of turnover, such as psoriatic plaques, and is immunosuppresive to mononuclear cells in the skin, blood, and lymphatic system. Methotrexate has toxic effects on hematologic, renal, GI, pulmonary, and neurologic systems. Cyclosporine inhibits production of interleukin-2, the cytokine responsible for inducing T-Cell proliferation. Psoriasis skin lesions can recur within days to weeks after this systemic treatment is stopped. Adverse effects include hypertension, impaired renal function, and an increased risk of cancer. Acitretin is a second generation oral retinoid. The use of oral retinoid therapy has shown limited efficacy for chronic stable plaque psoriasis.

[0078] Thus, while there are a number of treatments for psoriasis currently available, they all are accompanied by various side effects, high costs, and long complicated treatment protocols. Accordingly, there remains a need in the art for more effective and otherwise improved methods for treating dermatological conditions related to psoriasis. The present invention fulfills this need and provides further related advantages.

[0079] Previously Identified Genes and Loci

[0080] Familial aggregation, twin studies and consistent ethnic differences in disease frequency have strongly supported the important role of genetic factors in the cause of psoriasis Studies of twins have shown the heritability of psoriasis to be 70-90%. Such familial investigations clearly indicate that there are strong genetic factors associated with psoriatic pathogenesis. Several psoriasis-susceptibility loci have been reported on chromosomes: 6p21.3 (PSORS1) (Trembath et al., 1997; Zhang et al., 2002); 17q25 (PSORS2) (Tomfohrde et al., 1994), 4q34 (PSORS3) (Matthews et al. 1996), 1q (PSORS4) (Capon et al., 1999), and 3q (PSORS5) (Samuelsson et al., 1999), 19p13 (PSORS6) (Lee et al., 2000), 1p (PSORS7) (Vael et al., 2001), 4q31 (PSORS9) (Zhang et al., 2002), 4q13 (Samuelsson et al., 1999), 16q, 20p (Nair, 1997), 8q (Trembath et al., 1997), 2p (Veal et al., 2001), 2q (Trembath et al., 1997), 7 (Veal et al., 2001), 9q33 (Zhang et al., 2002), 14q (Veal et al., 2001), 15 (Samuelsson et al., 1999) and 18p11 (Asumalahti et al., 2003).

[0081] These 19 loci are located on 15 different chromosomes and of these regions, only one locus, 6p21, has been consistently implicated in psoriasis (reviewed in Sagoo et al., 2004). Thus, there is a continuing need in the medical arts for genetic markers of psoriasis and guidance for the use of such markers.

[0082] Genome Wide Association Study to Construct a GeneMap for Psoriasis Disease

[0083] The present invention is based on the discovery of genes associated with psoriasis. In the preferred embodiment, disease-associated loci (candidate regions; Table 1) are therefore identified by the statistically significant differences in haplotype frequencies between the cases and the controls. For the purpose of the present invention, novel candidate regions showing a difference with a −log 10 P value of 3.0 or higher are identified along with previously known regions that have been previously reported to be associated with psoriasis.

[0084] The invention provides a method for the discovery of genes associated with psoriasis and the construction of a GeneMap (see FIGS. 1-13 herein) for psoriasis disease in a human population, comprising the following steps (see also Example section herein):

[0085] Step 1: Recruit Patients (Cases) and Controls

[0086] In the preferred embodiment, 500 patients diagnosed for psoriasis along with two family members are recruited from the Quebec Founder Population (QFP). The preferred trios recruited are parent-parent-child (PPC) trios. Trios can also be recruited as parent-child-child (PCC) trios.

[0087] In another embodiment, the present invention is performed as a whole or partially with DNA samples from individuals of another founder population than the Quebec population or from the general population.

[0088] Step 2: DNA Extraction and Quantitation

[0089] Any sample comprising cells or nucleic acids from patients or controls may be used. Preferred samples are those easily obtained from the patient or control. Such samples include, but are not limited to blood, peripheral lymphocytes, buccal swabs, epithelial cell swabs, nails, hair, bronchoalveolar lavage fluid, sputum, or other body fluid or tissue obtained from an individual.

[0090] In the preferred embodiment, DNA is extracted from such samples in the quantity and quality necessary to perform the invention using conventional DNA extraction and quantitation techniques. The present invention is not linked to any DNA extraction or quantitation platform in particular.

[0091] Step 3: Genotype the Recruited Individuals

[0092] In the preferred embodiment, assay specific and/or locus-specific and/or allele-specific oligonucleotides for every SNP marker of the present invention (Tables 2-10 and 13) are organized onto one or more arrays. The genotype at each SNP locus is revealed by hybridizing short PCR fragments comprising each SNP locus onto these arrays. The arrays permit a high-throughput genome wide association study using DNA samples from individuals of the Quebec founder population. Such assay-specific and/or locus-specific and/or allele-specific oligonucleotides necessary for scoring each SNP of the present invention are preferably organized onto a solid support. Such supports can be arrayed on wafers, glass slides, beads or any other type of solid support.

[0093] In another embodiment, the assay-specific and/or locus-specific and/or allele-specific oligonucleotides are not organized onto a solid support but are still used as a whole, in panels or one by one. The present invention is therefore not linked to any genotyping platform in particular.

[0094] In another embodiment, one or more portions of the SNP maps (publicly available maps, proprietary maps from Perlegen Sciences, Inc. (Mountain View, Calif., USA), and our own proprietary QLDM map) are used to screen the whole genome, a subset of chromosomes, a chromosome, a subset of genomic regions or a single genomic region.

[0095] The 1,500 individuals composing the 500 trios are preferably individually genotyped with at least 80,000 markers, generating at least a few million genotypes; more preferable, at least a hundred million.

[0096] Step 4: Exclude the Markers that did not Pass the Quality Control of the Assay.

[0097] Preferably, the quality controls consist of, but are not limited to, the following criteria: SNPs that had a high rate of Mendelian errors (cut-off at 1% Mendelian error rate), that deviate from the Hardy-Weinberg equilibrium, that have too many missing data (cut-off at 1% missing values or higher), or simply because they are non-polymorphic in the Quebec founder population (cut-off at 10% MAF, or below).

[0098] Step 5: Perform the Genetic Analysis on the Results Obtained using Haplotype Information as Well as Single-Marker Association.

[0099] In the preferred embodiment, genetic analysis is performed on all the genotypes from step 3.

[0100] In another embodiment, genetic analysis is performed on a total of 80,654 SNPs.

[0101] In one embodiment, the genetic analysis consists of, but is not limited to the features corresponding to Phase information and haplotype structures. Phase information and haplotype structures are preferably deduced from trio genotypes using Phasefinder. Since chromosomal assignment (phase) can not be estimated when all trio members are heterozygous, an Expectation-Maximization (EM) algorithm may be used to resolve chromosomal assignment ambiguities after Phasefinder.

[0102] In yet another embodiment, the PL-EM algorithm (Partition-Ligation EM; Niu et al., Am. J. Hum. Genet. 70:157 (2002)) can be used to estimate haplotypes from the “genotype” data as a measured estimate of the reference allele frequency of a in 15-marker windows that advance in increments of one marker across the data set. The results from such algorithms are converted into 15-marker haplotype files. Subsequently, the individual 15-marker block files are assembled into one continuous block of haplotypes for the entire chromosome. These extended haplotypes can then be used for further analysis. Such haplotype assembly algorithms take the consensus estimate of the allele call at each marker over all separate estimations (most markers are estimated 15 different times as the 15 marker blocks pass over their position).

[0103] In the preferred embodiment, the haplotypes for both the controls and the patients are derived in this manner. The preferred control of a trio structure is the spouse if the patient is one of the parents or the non-transmitted chromosomes (chromosomes found in parents but not in affected child) if the patient is the child.

[0104] In another embodiment, the haplotype frequencies among patients are compared to those among the controls using LDSTATS, a program that assesses the association of haplotypes with the disease. Such program defines haplotypes using multi-marker windows that advance across the marker map in one-marker increments. Such windows can be 1, 3, 5, 7 or 9 markers wide, and all these window sizes are tested concurrently. At each position the frequency of haplotypes in cases is compared to the frequency of haplotypes in controls. Such allele frequency differences for single marker windows can be tested using Pearson's Chi-square with one degree of freedom. Multi-allelic haplotype association can be tested using Smith's normalization of the square root of Pearson's Chi-square. Such significance of association can be reported in two ways:

[0105] The significance of association within any one haplotype window is plotted against the marker that is central to that window.

[0106] P-values of association for each specific marker are calculated as a pooled P-value across all haplotype windows in which they occur. The pooled P-value is calculated using an expected value and variance calculated using a permutation test that considers covariance between individual windows. Such pooled P-values can yield narrower regions of gene location than the window data (see example 3 for details on analysis methods, such as LDSTATs V2.0 and V4.0).

[0107] In another embodiment, conditional haplotype analyses can be performed on subsets of the original set of cases and controls using the program LDSTAT. The selection of a subset of cases and their matched controls can be based on the carrier status of cases at a gene or locus of interest (see conditional analysis section in example 3 herein). Various conditional haplotypes can be derived, such as protective haplotypes and risk haplotypes.

[0108] Step 6: Fine Mapping

[0109] In this step, the candidate regions that were identified by step 4 are further mapped for the purpose of refinement and validation.

[0110] In the preferred embodiment, this fine mapping is performed with a density of genetic markers higher than in the genome wide scan (step 3) using any genotyping platform available in the art. Such fine mapping can be but is not limited to typing the allele via an allele-specific elongation assay that is then ligated to a locus-specific oligonucleotide. Such assays can be performed directly on the genomic DNA at a highly multiplex level and the products can be amplified using universal oligonucleotides. For each candidate region, the density of genetic markers, can be but is not limited to a set of SNP markers with an average inter-marker distance of 1 to 4 Kb distributed over about 400 Kb to 1 Mb roughly centered at the highest point of the GWS curves was selected. The preferred samples are those obtained from psoriasis disease PPC trios including the ones used for the GWS. Other preferred samples are trios or case control samples from another population

[0111] In the preferred embodiment, the genetic analysis of the results obtained using haplotype information as well as single-marker association (as performed as in step 3, described herein). The candidate regions validated and confirmed after this analysis are processed to a gene mining step described in example 5 to characterize it's marker and genetic content.

[0112] Step 7: SNP and DNA Polymorphism Discovery

[0113] In the preferred embodiment, all the candidate genes and regions identified in step 6 are sequenced for polymorphism identification.

[0114] In another embodiment, the entire region, including all introns, is sequenced to identify all polymorphisms.

[0115] In yet another embodiment, the candidate genes are prioritized for sequencing, and only functional gene elements (promoters, conserved non-coding exons and splice sites) are sequenced.

[0116] In yet another embodiment, previously identified polymorphisms in the candidate regions can also be used. For example, SNPs from dbSNP, Perlegen Sciences, Inc., or others can also be used rather than resequencing the candidate regions to identify polymorphisms.

[0117] The discovery of SNPs and DNA polymorphisms generally comprises a step consisting of determining the major haplotypes in the region to be sequenced. The preferred samples are selected according to which haplotypes contribute to the association signal observed in the region to be sequenced. The purpose is to select a set of samples that covers all the major haplotypes in the given region. Each major haplotype is preferably present in at least a few copies.

[0118] Any analytical procedure may be used to detect the presence or absence of variant nucleotides at one or more polymorphic positions of the invention. In general, the detection of allelic variation requires a mutation discrimination technique, optionally an amplification reaction and optionally a signal generation system. Any means of a mutation detection or discrimination may be used. For instance, DNA sequencing, scanning methods, hybridization, extension based methods, incorporation based methods, restriction enzyme-based methods and ligation-based methods may be used in the methods of the invention.

[0119] Sequencing methods include, but are not limited to, direct sequencing, and sequencing by hybridization. Scanning methods include, but are not limited to, protein truncation test (PTT), single-strand conformation polymorphism analysis (SSCP), denaturing gradient gel electrophoresis (DGGE), temperature gradient gel electrophoresis (TGGE), cleavage, heteroduplex analysis, chemical mismatch cleavage (CMC), and enzymatic mismatch cleavage. Hybridization-based methods of detection include, but are not limited to, solid phase hybridization such as dot blots, multiple allele specific diagnostic assay (MASDA), reverse dot blots, and oligonucleotides arrays (DNA Chips). Solution phase hybridization amplification methods may also be used, such as Taqman. Extension based methods include, but are not limited to, amplification refraction mutation systems (ARMS), amplification refractory mutation systems (ALEX), and competitive oligonucleotides priming systems (COPS). Incorporation based methods include, but are not limited to, mini-sequencing and arrayed primer extension (APEX). Restriction enzyme-based detection systems include, but are not limited to restriction site generating PCR. Lastly, ligation based detection methods include, but are not limited to, oligonucleotides ligation assay (OLA). Signal generation or detection systems that may be used in the methods of the invention include, but are not limited to, fluorescence methods such as fluorescence resonance energy transfer (FRET), fluorescence quenching, fluorescence polarization as well as other chemiluminescence, electrochemiluminescence, Raman, radioactivity, colometric methods, hybridization protection assays and mass spectrometry methods. Further amplification methods include, but are not limited to self sustained replication (SSR), nucleic acid sequence based amplification (NASBA), ligase chain reaction (LCR), strand displacement amplification (SDA) and branched DNA (B-DNA).

[0120] Step 8: Ultrafine Mapping

[0121] This step further maps the candidate regions and genes confirmed in the previous step to identify and validate the responsible polymorphisms associated with psoriasis in the human population.

[0122] In a preferred embodiment, the discovered SNPs and polymorphisms of step 7 are ultrafine mapped at a higher density of markers than the fine mapping described herein using the same technology described in step 6.

[0123] Step 9: GeneMap Construction

[0124] The confirmed variations in DNA (including both genic and non-genic regions) are used to build a GeneMap for psoriasis disease. The gene content of this GeneMap is described in more detail below. Such GeneMap can be used for other methods of the invention comprising the diagnostic methods described herein, the susceptibility to psoriasis, the response to a particular drug, the efficacy of a particular drug, the screening methods described herein and the treatment methods described herein.

[0125] As is evident to one of ordinary skill in the art, all of the above steps or the steps do not need to be performed, or performed in a given order to practice or use the SNPs, genomic regions, genes, proteins, etc. in the methods of the invention.

[0126] Genes from the GeneMap

[0127] In the preferred embodiment the GeneMap consists of genes and targets, in a variety of combinations, identified from the candidate regions listed in Table 1. Such genes's are briefly described in Tables 10-12 and 14. In the preferred embodiment, all genes from Tables 10-12 and 14 are present in the GeneMap.

[0128] The genes of the invention are arranged by candidate regions and by their chromosomal location. Such order is for the purpose of clarity and does not reflect any other criteria of selection in the association of the genes with psoriasis.

[0129] The genes of the invention were also evaluated using the Ingenuity Pathway Analysis application (IPA, Ingenuity systems) in order to identify direct biological interactions between these genes, and also to identify molecular regulators acting on those genes (indirect interactions) that could also be involved in psoriasis. The purpose of this effort was to decipher the molecules involved in contributing to psoriasis susceptibility. These gene interaction networks are very valuable tools in the sense that they facilitate extension of the map of gene products that could represent potential drug targets for psoriasis.

[0130] A selection of 15 genes from Tables 10-12 was performed based on the results of the genetic analyses; those genes were considered for the development of potential protein interaction networks involved in psoriasis. These genes were imported in the IPA software and are presented in Table A below.

TABLE A
Input list of genes

| Region ID | Entrez Gene ID | Gene Symbol |
|---|---|---|
| 78, 491, 492 | 8829 | NRP1 |
| 131 | 3560 | IL2RB |
| 99, 570, 571, 572, 573 | 949 | SCARB1 |
| 110, 619 | 2567 | GABRG3 |
| 32, 278, 279, 280, 281, 282, | 56034 | PDGFC |
| 283, 284, 285 | | |
| 73, 480, 481, 482 | 1539 | CYLC2 |
| 47, 343, 344, 345, 346, 300 | 51000 | SLC35B3 |
| 27, 255, 256 | 170712 | COX7B2 |
| 107, 613 | 79890 | RIN3 |
| 100, 582, 583, 584, 585 | 390386 | LOC390386 |
| 100, 582, 583, 584, 585 | 56163 | RNF17 |
| 42, 314, 315 | 353189 | SLCO4C1 |
| 42, 314, 315, 316 | 133482 | SLCO6A1 |
| 40, 306, 307, 308, 309, 310, | 2745 | GLRX |
| 311 | | |
| 125, 687, 688, 689, 690, 000 | 5335 | PLCG1 |

[0131] In a first step, the analysis was performed by looking for direct interactions only. From this analysis 97 genes were mapped to the Ingenuity database and assigned to 8 networks as defined by IPA (primary networks are displayed in FIGS. 1-8). These networks are based on functional relationships between gene products using known interactions in the literature. For each individual network, some nodes were manually extended to include good candidate genes that could play a role in the biochemical pathways of psoriasis. Table B below contains information about the gene content of each network, as well as the top functions assigned to those biochemical pathways. The fusion of those 8 networks resulted in a unique network which likely includes some of the critical pathways involved in the pathogenesis of psoriasis. After having been cleaned for sake of clarity, this network is presented in FIG. 9.

TABLE B
Genetic networks associated with genes identified by the WGAS on psoriasis.
Direct interactions only. Bold genes are those identified by the WGAS

| | | | Genes manually added |
|---|---|---|---|
| Networks | Genes in Ingenuity network* | Top functions | to the networks |
| 1 | BTK, CASP3, CBLB, DOK1, EFS, | Cellular growth and | CD2, CD58, IL2, |
| | EGFR, FYN, GRB2, IL2RB, | proliferation, cell siganling, | IL2RA, IL2RG, IL15, |
| | KHDRBS1, KIT, LAT, LCK, LCP2, | molecular transport | IL15RA, IL15RB, |
| | LYN, PDGFRB, PLCG1, PLCG2, | | JAK1 |
| | PTK2, PTPN6, SRC, SYK, VAV1, | | |
| | WAS | | |
| 2 | MXD1, RNF17 | Cancer, cell morphology, | N/A |
| | | connective tissue disorders | |
| 3 | CEBPA, GLRX, MAP3K5 | Cell cycle, connective tissue | GSTM1 |
| | | development and function, | |
| | | drug metabolism | |
| 4 | PDGFA, PDGFC, PDGFRA | Digestive system | N/A |
| | | development and function, | |
| | | embryonic development, | |
| | | tissue morphology | |
| 5 | GABRA1, GABRA2, GABRA3, | Cell signaling, molecular | N/A |
| | GABRA4, GABRA5, GABRA6, | transport, nervous system | |
| | GABRB1, GABRB2, GABRB3, | development and function | |
| | GABRG2, GABRG3 | | |
| 6 | HHEX, KDR, L1CAM, NRP1, NRP2, | Cell morphology, cellular | N/A |
| | PLXNA1, RGS19IP1, SEMA3A, | compromise, neurological | |
| | SEMA3C, SEMA3D, SEMA3E, | disease | |
| | SEMA3F, VEGF, VEGFB | | |
| 7 | COX1, COX2, COX3, COX4I1, | Neurological disease, genetic | N/A |
| | COX4I2, COX5A, COX5B, COX6A1, | disorder, metabolic disease | |
| | COX6A2, COX6B1, COX6B2, | | |
| | COX6C, COX7A1, COX7A2, | | |
| | COX7A2L, COX7B, COX7B2, | | |
| | COX7C, COX8A, COX8C | | |
| 8 | APOA1, APOA2, APOB, APOC2, | Lipid metabolism, molecular | N/A |
| | APOE, CAV1, HDL3, LTF, MYC, | transport, small molecule | |
| | NFYB, NR0B1, NR5A1, NR5A2, | biochemistry | |
| | PDZK1, PPARA, S100A8, S100A9, | | |
| | SAA1, SCARB1, SREBF1 | | |

[0132] Network 1 contains 33 nodes (24 original and 9 manual additions) and includes 2 genes from the fine mapped regions (FIG. 1). A short description of these 2 genes follows. By virtue of their role in immune response and/or inflammation, several genes from this network are very good candidates for involvement in the pathophysiology of psoriasis. One gene in this network, LYN, was shown to be upregulated in psoriatic skin compared to control skin in a gene expression profiling study (Zhou et al 2003).

[0133] IL2RB

[0134] IL2RB is part of the IL-2 receptor, which is produced by activated T cells. The interleukin 2 receptor, which is involved in T cell-mediated immune responses, is present in 3 forms with respect to its ability to bind interleukin 2. The low affinity form is a monomer of the alpha subunit and is not involved in signal transduction. The intermediate affinity form consists of an alpha/beta subunit heterodimer, while the high affinity form consists of an alpha/beta/gamma subunit heterotrimer. Both the intermediate and high affinity forms of the receptor are involved in receptor-mediated endocytosis and transduction of mitogenic signals from interleukin 2. The protein encoded by the IL2RB gene represents the beta subunit and is a type I membrane protein. Cytokines IL-2 (made by activated T cells) and IL-12 (made by mature Langerhans cells) bind to T-cells; this event regulates mitotic activation and differentiation of T cells into type 1 effectors. IL-2 binds to T-cells which promotes the differentiation of T cells into type 1 effectors (Th1). Also, the IL2R beta and IL2R gamma chains are shared by receptors of IL15 and IL2. This forms the basis of many overlapping biological activities of IL15 and IL2. The IL2 receptor requires an additional IL2-specific alpha subunit for high affinity IL2 binding. The IL15R alpha chain is structurally related to IL2R alpha, but is capable of binding IL15 with high affinity, independent of other subunits, which suggests distinct roles for IL15 and IL2.

[0135] PLCG1:

[0136] The protein encoded by the PLCG1 gene catalyzes the formation of inositol 1,4,5-trisphosphate and diacylglycerol from phosphatidylinositol 4,5-bisphosphate. This reaction uses calcium as a cofactor and plays an important role in the intracellular transduction of receptor-mediated tyrosine kinase activators. For example, when activated by SRC, the encoded protein causes the Ras guanine nucleotide exchange factor RasGRP1 to translocate to the Golgi, where it activates Ras. Also, this protein has been shown to be a major substrate for heparin-binding growth factor 1 (acidic fibroblast growth factor)-activated tyrosine kinase. Bivona et al (2003) demonstrated that, in response to Src-dependent activation of PLCG1, the Ras guanine nucleotide exchange factor RasGRP1 translocates to the Golgi, where it activates Ras. Whereas calcium positively regulated Ras on the Golgi apparatus through RasGRP1, the same second messenger negatively regulated Ras on the plasma membrane by means of the Ras GTPase-activating protein CAPRI. Ras activation after T-cell receptor stimulation in Jurkat cells, rich in RasGRP1, was limited to the Golgi apparatus through the action of CAPRI, unambiguously demonstrating a physiological role for Ras in Golgi apparatus function. Activation of Ras in the Golgi also induced differentiation of PC12 cells, transformed fibroblasts, and mediated radioresistance. Thus, Bivona et al (2003) concluded that activation of Ras in the Golgi apparatus has important biologic consequences and proceeds through a pathway distinct from the one that activates Ras on the plasma membrane. Interestingly, PLCG1 plays an important function in keratinocytes: it has been shown that intracellular PLCG1-mediated Ca2+ mobilization plays a critical role in regulating keratinocyte differentiation (Bourguignon et al 2004). Also, it has been reported that cells lacking PLCG1 fail to activate NF-kB in response to T cell co-stimulation (Dienz et al 2003). Finally, PLCG1 plays a critical role in the signaling pathway leading to Rap1 activation triggered by the TCR (Katagiri et al 2004). Lymphocyte-expressed Rap1 is a key modulator of T cell activation and trafficking.

[0137] Network 2 contains 2 original nodes and includes 1 gene from the fine mapped regions (FIG. 2). A short description of this gene follows. In this network, MXD1 was shown to be upregulated in psoriatic skin compared to control skin in a gene expression profiling study (Zhou et al 2003).

[0138] RNF17

[0139] This gene is also known under the name Mmip-2 and encodes a ring finger protein that interacts with mad proteins. Members of the mad family are basic-helix-loop-helix-leucine zipper proteins which inhibit the transcriptional activity of c-Myc. The inhibition of mad proteins by Mmip-2/Rnf-17 modulates c-Myc function by increasing its ability to regulate a subset of its potential target genes (Yin et al 2001). Interestingly, after skin injury the expression of mad1 mRNA and protein, but not of other mad genes, increases (Werner et al 2001). Thus, by regulating mad protein function, and hence myc function, RNF17 is a very good candidate gene to play a role in the pathogenesis of psoriasis.

[0140] Network 3 contains 4 nodes (3 original and 1 manual addition) and includes the GLRX gene from the fine mapped regions (FIG. 3).

[0141] GLRX

[0142] This gene encodes glutaredoxin which is involved in protection against oxidative stress. It has been shown that dendritic cell presentation of antigens to T-cells causes an elevation in intracellular oxidation states in both cells. If this elevated oxidation state is inhibited artificially by modulating the thioredoxin and glutaredoxin pathways, then DC-induced proliferation and cytokine production by T cells as well as T cell-induced cytokine production by DCs is inhibited. Glutaredoxin has a prominent role in homeostasis of protein sulfhydryl groups, both in a protective mode under overt oxidative stress associated with aging and various disease states (including cardiovascular and neurodegenerative diseases, diabetes, AIDS, and cancer). It also has a regulatory mode whereby reversible glutathionylation represents a mechanism of redox-activated signal transduction. GLRX is also involved in the suppression of apoptosis through ASK1 (apoptosis signal-regulating kinase 1) (Raghavachari et al., 2001). ASK1 is also known as MAP3K5 (refer to FIG. 3), and has been shown to be an intracellular regulator of keratinocyte differentiation (Sayama et al 2001).

[0143] Network 4 contains 3 original nodes and includes the PDGFC gene from the fine mapped regions (FIG. 4).

[0144] PDGFC

[0145] The protein encoded by the PDGFC gene is a member of the platelet-derived growth factor family. It differs from the platelet-derived growth factor alpha and beta polypeptides in having an unusual N-terminal domain, the CUB domain. Indeed, in contrast to PDGF-A and -B, which are secreted as bioactive dimers after intracellular processing, the PDGFC precursor polypeptide is secreted intact from the cell and requires extracellular proteolytic cleavage of the receptor interacting domain (the CUB domain) to produce the active growth factor. The multidomain serine protease tissue plasminogen activator (tPA) has been shown to cleave and activate PDGFC precursors (Fredricksson et al 2005). In its C-terminal region, PDGFC contains the growth factor domain (GFD) which shows some homology to VEGF and PDGF-A chain. The GFD has a potent biological activity. PDGFC-expressing transgenic mice had enlarged livers associated with increased fibrosis, steatosis, cell dysplasia, and hepatocellular carcinomas. These studies indicate that hepatic expression of PDGFC induces a number of profibrotic pathways, suggesting that this growth factor may act as an initiator of fibrosis. Platelet-derived growth factor (PDGF) is a potent mitogenic and chemotactic factor for fibroblasts and other cell types. PDGF effects are mediated by binding of PDGF to dimeric PDGF receptors possessing intrinsic tyrosine kinase activity. The expression pattern of PDGF receptors was recently analyzed in cryostat sections of normal and growth-activated human skin. PDGF receptors are expressed at low levels in normal skin. In contrast, PDGF receptor expression is greatly elevated in the dermis of growth-activated skin from chronic wounds and psoriatic lesions, and is also increased in dermal fibroblasts and in dermal blood vessels in both conditions. Differential expression of PDGF receptors could regulate increased proliferation of vascular and connective tissue cells observed in psoriasis and chronic wounds (Krane et al., 1991). Platelet-derived growth factors, such as PDGFC, are major mitogens and chemotactic factors for fibroblasts and other cell types (Jinnin et al., 2005). Members of the PDGF ligand family are known to play important roles in wound healing and fibrotic disease. PDGFC is activated by proteolysis and induces proliferation of fibroblasts when overexpressed in transgenic mice (Campbell et al., 2005).

[0146] Network 5 contains 11 original nodes and includes the GABRG3 gene from the fine mapped regions (FIG. 5).

[0147] GABRG3

[0148] The gamma-aminobutyric acid (GABA) A receptor, gamma 3 is related to an ion channel. GABA is the major inhibitory neurotransmitter of the brain and acts through binding to GABA A receptors, where the ligand causes an influx of chloride ions.

[0149] One study reported the presence of a GABA A-like receptor in keratinocytes where it was shown to play an important role in barrier homeostasis. Activation of this receptor by GABA improved epidermal hyperplasia when skin was traumatized and thus accelerated skin barrier recovery (Denda et al 2002).

[0150] Network 6 contains 14 original nodes and includes the NRP1 gene from the fine mapped regions (FIG. 6).

[0151] NRP1

[0152] The neuropilin 1 gene encodes a membrane-bound coreceptor to a tyrosine kinase receptor for both vascular endothelial growth factor (VEGF), an angiogenesis factor, and semaphorin 3A (SEMA3A), a mediator of axonal guidance. NRP1 can play a role in angiogenesis, axon guidance, cell survival, migration, and invasion. NRP1 has been shown to be expressed in keratinocytes in vitro and in vivo. In HaCaT cells, a keratinocyte cell line, transcriptional repression of the NRP1 gene by the neuron restrictive silencer factor NRSF reduced the Sema3A mediated inhibition of HaCaT keratinocyte migration (Kurschat et al 2006). In addition, NRP1 has been involved in interactions between dendritic cells (DCs) and T cells that are essential for initiation of the primary immune response. Preincubation of DCs or T cells with blocking NRP1 antibodies inhibits DC-induced proliferation of resting T cells (Tordjman et al 2002).

[0153] Network 7 contains 20 original nodes and includes the COX7B2 gene from the fine mapped regions (FIG. 7).

[0154] COX7B2

[0155] This gene encodes the cytochrome c oxidase subunit VIIb2, the terminal oxidase in mitochondrial electron transport, and is involved in oxidative phosphorylation.

[0156] Network 8 contains 20 original nodes and includes the SCARB1 gene from the fine mapped regions (FIG. 8). The expression of 6 genes from this network has been shown to vary in one study of gene expression profiling for psoriasis. In psoriatic versus control skin, S100A8, S100A9, LTF, and MYC were upregulated, and PDZK1 and APOE were downregulated (Zhou et al 2003).

[0157] SCARB1

[0158] This gene encodes the scavenger receptor class B, member 1 protein. It is a cell surface receptor for high density lipoproteins (HDL) and mediates the selective uptake of cholesterol from circulating HDL. SCARB1 has been shown to be expressed in cultured human keratinocytes and epidermis and its expression is regulated in response to changes in cholesterol homeostasis and barrier requirements (Tsuruoka et al 2002). The epidermis is an active site for cholesterol synthesis which, with ceramides and fatty acids, helps the skin to maintain its function as a permeability barrier.

[0159] In a second step, the analysis was performed by looking for direct and indirect interactions. From this analysis 55 genes were mapped to the Ingenuity database and assigned to 3 genetic networks as defined by IPA (primary networks are shown in FIGS. 10-12). Table C contains information about the gene content of each network, as well as the top functions assigned to those biochemical pathways. FIG. 13 provides a description of the symbols used in the Ingenuity networks.

TABLE C
Genetic networks associated with genes identified by the WGAS on psoriasis. Direct
and indirect interactions. Bold genes are those identified by the WGAS.

| Networks | Genes in Ingenuity network* | Top functions |
|---|---|---|
| 1b | AK2, ARF4, CCL27, CIDEC, COL5A1, | Cell death, hepatic system disease, |
| | COL16A1, COX5B, COX7B2, DLEU1, | connective tissue development and |
| | EGLN1, GDI2, GM2A, HAS1, IL2RB, | function |
| | KIF3C, MXD4, MYC, MYL6, NNMT, NRP1, | |
| | PDGFC, PDZK1IP1, PLCG1, PLF2, PLS3, | |
| | RNF17, SCARB1, SERPINB10, SLC7A1, | |
| | SRM, TGFB1, TNF, TPP2, TSPAN7, ZFP161 | |
| 2b | CAT, CEBPA, GLRX, HOXA9, MAP3K5, | Cell death, cellular development, |
| | MAPK8, PTPN1, TH, TNFSF11 | hematological system development |
| | | and function |
| 3b | GABRA1, GABRA2, GABRA3, GABRA4, | Neurological disease, psychological |
| | GABRA5, GABRA6, GABRB1, GABRB2, | disorders, cell signaling |
| | GABRB3, GABRG2, GABRG3 | |

[0160] Network 1b contains 35 original nodes and includes 7 genes from the fine mapped regions (FIG. 10). The expression of 6 genes from this network has been shown to vary in one study of gene expression profiling for psoriasis. In psoriatic versus control skin, NNMT, PDZK1IP1, PLS3, MYC, EGLN1, and GM2A were upregulated (Zhou et al 2003). For descriptions of the COX7B2, IL2RB, NRP1, PDGFC, PLCG1, RNF17, and SCARB1 genes, please refer to text above about networks from direct analysis only.

[0161] Network 2b contains 9 original nodes and includes 1 gene from the fine mapped regions (FIG. 11). For a description of the GLRX gene, please refer to the text above about network 3, direct interactions only.

[0162] Network 3b contains 11 original nodes and includes 1 gene from the fine mapped regions (FIG. 12). For a description of the GABRG3 gene, please refer to the text above about network 5 direct interactions only.

[0163] Nucleic Acid Sequences

[0164] The nucleic acid sequences of the present invention may be derived from a variety of sources including DNA, cDNA, synthetic DNA, synthetic RNA, derivatives, mimetics or combinations thereof. Such sequences may comprise genomic DNA, which may or may not include naturally occurring introns, genic regions, nongenic regions, and regulatory regions. Moreover, such genomic DNA may be obtained in association with promoter regions or poly (A) sequences. The sequences, genomic DNA, or cDNA may be obtained in any of several ways. Genomic DNA can be extracted and purified from suitable cells by means well known in the art. Alternatively, mRNA can be isolated from a cell and used to produce cDNA by reverse transcription or other means. The nucleic acids described herein are used certain embodiments of the methods of the present invention for production of RNA, proteins or polypeptides, through incorporation into cells, tissues, or organisms. In one embodiment, DNA containing all or part of the coding sequence for the genes described in Tables 10-12 and 14, or the SNP markers described in Tables 2-9 and 13, is incorporated into a vector for expression of the encoded polypeptide in suitable host cells. The invention also comprises the use of the nucleotide sequence of the nucleic acids of this invention to identify DNA probes for the genes described in Tables 10-12 and 14 or the SNP markers described in Tables 2-9 and 13, PCR primers to amplify the genes described in Tables 4-6, or the SNP markers described in Tables 2-9 and 13, nucleotide polymorphisms in the genes described in Tables 10-12 and 14, and regulatory elements of the genes described in Tables 10-12 and 14. The nucleic acids of the present invention find use as primers and templates for the recombinant production of nucleotide polymorphisms in the genes described in Tables 10-12 and 14, and regulatory elements of the genes described in Tables 10-12 and 14, or the SNP markers described in Tables 2-9 and 13. The nucleic acids of the present invention find use as primers and templates for the recombinant production of psoriasis-associated peptides or polypeptides, for chromosome and gene mapping, to provide antisense sequences, for tissue distribution studies, to locate and obtain full length genes, to identify and obtain homologous sequences (wild-type and mutants), and in diagnostic, theranostic and prognostic applications.

[0165] Antisense Oligonucleotides

[0166] In a particular embodiment of the invention, an antisense nucleic acid or oligonucleotide is wholly or partially complementary to, and can hybridize with, a target nucleic acid (either DNA or RNA) having the sequence of SEQ ID NO:1, NO:3 or any SEQ ID from Tables 2-14. For example, an antisense nucleic acid or oligonucleotide comprising 16 nucleotides can be sufficient to inhibit expression of the at least one gene from Tables 10-12 and 14. Alternatively, an antisense nucleic acid or oligonucleotide can be complementary to 5′ or 3′ untranslated regions, or can overlap the translation initiation codon (5′ untranslated and translated regions) of at least one gene from Tables 10-12 and 14, or its functional equivalent. In another embodiment, the antisense nucleic acid is wholly or partially complementary to, and can hybridize with, a target nucleic acid that encodes a polypeptide from a gene described in Tables 10-12 and 14.

[0167] In addition, oligonucleotides can be constructed which will bind to duplex nucleic acid (i.e., DNA:DNA or DNA:RNA), to form a stable triple helixcontaining or triplex nucleic acid. Such triplex oligonucleotides can inhibit transcription and/or expression of a gene from Tables 10-12 and 14, or its functional equivalent (M. D. Frank-Kamenetskii et al., 1995). Triplex oligonucleotides are constructed using the basepairing rules of triple helix formation and the nucleotide sequence of the genes described in Tables 10-12 and 14.

[0168] The present invention encompasses methods of using oligonucleotides in antisense inhibition of the function of the genes from Tables 10-12 and 14. In the context of this invention, the term “oligonucleotide” refers to naturally-occurring species or synthetic species formed from naturally-occurring subunits or their close homologs. The term may also refer to moieties that function similarly to oligonucleotides, but have non-naturally-occurring portions. Thus, oligonucleotides may have altered sugar moieties or inter-sugar linkages. Exemplary among these are phosphorothioate and other sulfur containing species which are known in the art. In preferred embodiments, at least one of the phosphodiester bonds of the oligonucleotide has been substituted with a structure that functions to enhance the ability of the compositions to penetrate into the region of cells where the RNA whose activity is to be modulated is located. It is preferred that such substitutions comprise phosphorothioate bonds, methyl phosphonate bonds, or short chain alkyl or cycloalkyl structures. In accordance with other preferred embodiments, the phosphodiester bonds are substituted with structures which are, at once, substantially non-ionic and non-chiral, or with structures which are chiral and enantiomerically specific. Persons of ordinary skill in the art will be able to select other linkages for use in the practice of the invention. Oligonucleotides may also include species that include at least some modified base forms. Thus, purines and pyrimidines other than those normally found in nature may be so employed. Similarly, modifications on the furanosyl portions of the nucleotide subunits may also be effected, as long as the essential tenets of this invention are adhered to. Examples of such modifications are 2′-O-alkyl- and 2′-halogen-substituted nucleotides. Some non-limiting examples of modifications at the 2′ position of sugar moieties which are useful in the present invention include OH, SH, SCH3, F, OCH3, OCN, O(CH2), NH2 and O(CH2)n CH3, where n is from 1 to about 10. Such oligonucleotides are functionally interchangeable with natural oligonucleotides or synthesized oligonucleotides, which have one or more differences from the natural structure. All such analogs are comprehended by this invention so long as they function effectively to hybridize with at least one gene from Tables 10-12 and 14 (DNA or RNA) to inhibit the function thereof.

[0169] The oligonucleotides in accordance with this invention preferably comprise from about 3 to about 50 subunits. It is more preferred that such oligonucleotides and analogs comprise from about 8 to about 25 subunits and still more preferred to have from about 12 to about 20 subunits. As defined herein, a “subunit” is a base and sugar combination suitably bound to adjacent subunits through phosphodiester or other bonds. Antisense nucleic acids or oligonucleotides can be produced by standard techniques (see, e.g., Shewmaker et al., U.S. Pat. No. 6,107,065. The oligonucleotides used in accordance with this invention may be conveniently and routinely made through the well-known technique of solid phase synthesis.

[0170] Any other means for such synthesis may also be employed; however, the actual synthesis of the oligonucleotides is well within the abilities of the practitioner. It is also well known to prepare other oligonucleotides such as phosphorothioates and alkylated derivatives.

[0171] The oligonucleotides of this invention are designed to be hybridizable with RNA (e.g., mRNA) or DNA from genes described in Tables 10-12 and 14. For example, an oligonucleotide (e.g., DNA oligonucleotide) that hybridizes to mRNA from a gene described in Tables 10-12 and 14 can be used to target the mRNA for RnaseH digestion. Alternatively; an oligonucleotide that can hybridize to the translation initiation site of the mRNA of a gene described in Tables 10-12 and 14 can be used to prevent translation of the mRNA. In another approach, oligonucleotides that bind to the double-stranded DNA of a gene from Tables 10-12 and 14 can be administered. Such oligonucleotides can form a triplex construct and inhibit the transcription of the DNA encoding polypeptides of the genes described in Tables 10-12 and 14. Triple helix pairing prevents the double helix from opening sufficiently to allow the binding of polymerases, transcription factors, or regulatory molecules. Recent therapeutic advances using triplex DNA have been described (see, e.g., J. E. Gee et al., 1994, Molecular and Immunologic Approaches, Futura Publishing Co., Mt. Kisco, N.Y.).

[0172] As non-limiting examples, antisense oligonucleotides may he targeted to hybridize to the following regions: mRNA cap region; translation initiation site; translational termination site; transcription initiation site; transcription termination site; polyadenylation signal; 3′ untranslated region; 5′ untranslated region; 5′coding region; mid coding region; and 3′coding region. Preferably, the complementary oligonucleotide is designed to hybridize to the most unique 5′ sequence of a gene described in Tables 10-12 and 14, including any of about 15-35 nucleotides spanning the 5′ coding sequence. In accordance with the present invention, the antisense oligonucleotide can be synthesized, formulated as a pharmaceutical composition, and administered to a subject. The synthesis and utilization of antisense and triplex oligonucleotides have been previously described (e.g., Simon et al., 1999; Bane et al., 2000; Elez et al., 2000; Sauter et al., 2000).

[0173] Alternatively, expression vectors derived from retroviruses, adenovirus, herpes or vaccinia viruses, or from various bacterial plasmids may be used for delivery of nucleotide sequences to the targeted organ, tissue or cell population. Methods which are well known to those skilled in the art can be used to construct recombinant vectors which will express nucleic acid sequence that is complementary to the nucleic acid sequence encoding a polypeptide from the genes described in Tables 10-12 and 14. These techniques are described both in Sambrook et al., 1989 and in Ausubel et al., 1992. For example, expression of at least one gene from Tables 10-12 can be inhibited by transforming a cell or tissue with an expression vector that expresses high levels of untranslatable sense or antisense sequences. Even in the absence of integration into the DNA, such vectors may continue to transcribe RNA molecules until they are disabled by endogenous nucleases. Transient expression may last for a month or more with a nonreplicating vector, and even longer if appropriate replication elements are included in the vector system. Various assays may be used to test the ability of gene-specific antisense oligonucleotides to inhibit the expression of at least one gene from Tables 10-12 and 14. For example, mRNA levels of the genes described in Tables 10-12 and 14 can be assessed by Northern blot analysis (Sambrook et al., 1989; Ausubel et al., 1992; J. C. Alwine et al. 1977; I. M. Bird, 1998), quantitative or semi-quantitative RT-PCR analysis (see, e.g., W. M. Freeman et al., 1999; Ren et al., 1998; J. M. Cale et al., 1998), or in situ hybridization (reviewed by A. K. Raap, 1998). Alternatively, antisense oligonucleotides may be assessed by measuring levels of the polypeptide from the genes described in Tables 10-12, and 14, e.g., by western blot analysis, indirect immunofluorescence and immunoprecipitation techniques (see, e.g., J. M. Walker, 1998, Protein Protocols on CD-ROM, Humana Press, Totowa, N.J.). Any other means for such detection may also be employed, and are well within the abilities of the practitioner.

[0174] Mapping Technologies

[0175] The present invention includes various methods which employ mapping technologies to map SNPs and polymorphisms. For purpose of clarity, this section comprises, but is not limited to, the description of mapping technologies that can be utilized to achieve the embodiments described herein. Mapping technologies may be based on amplification methods, restriction enzyme cleavage methods, hybridization methods, sequencing methods, and cleavage methods using agents.

[0176] Amplification methods include: self sustained sequence replication (Guatelli et al., 1990), transcriptional amplification system (Kwoh et al., 1989), Q-Beta Replicase (Lizardi et al., 1988), isothermal amplification (e.g. Dean et al., 2002; and Hafner et al., 2001), or any other nucleic acid amplification method, followed by the detection of the amplified molecules using techniques well known to those of ordinary skill in the art. These detection schemes are especially useful for the detection of nucleic acid molecules if such molecules are present in very low number.

[0177] Restriction enzyme cleavage methods include: isolating sample and control DNA, amplification (optional), digestion with one or more restriction endonucleases, determination of fragment length sizes by gel electrophoresis and comparing samples and controls. Differences in fragment length sizes between sample and control DNA indicates mutations in the sample DNA. Moreover, sequence specific ribozymes (see, e.g., U.S. Pat. No. 5,498,531) or DNAzyme (e.g. U.S. Pat. No. 5,807,718) can be used to score for the presence of specific mutations by development or loss of a ribozyme or DNAzyme cleavage site.

[0178] SNPs and SNP maps of the invention can be identified or generated by hybridizing sample nucleic acids, e.g., DNA or RNA, to high density arrays or bead arrays containing oligonucleotide probes corresponding to the polymorphisms of Tables 2-9 and 13 (see the Affymetrix arrays and Illumina bead sets at www.affymetrix.com and www.illumina.com and see Cronin et al., 1996; or Kozal et al., 1996).

[0179] A variety of sequencing reactions known in the art can be used to directly sequence nucleic acids for the presence or the absence of one or more polymorphisms of Tables 2-9 and 13. Examples of sequencing reactions include those based on techniques developed by Maxam and Gilbert (1977) or Sanger (1977). It is also contemplated that any of a variety of automated sequencing procedures can be utilized, including sequencing by mass spectrometry (see, e.g. PCT International Publication No. WO 94/16101; Cohen et al., 1996; and Griffin et al., 1993), real-time pyrophosphate sequencing method (Ronaghi et al., 1998; and Permutt et al., 2001) and sequencing by hybridization (see e.g. Drmanac et al., 2002).

[0180] Other methods of detecting polymorphisms include methods in which protection from cleavage agents is used to detect mismatched bases in RNA/RNA, DNA/DNA or RNA/DNA heteroduplexes (Myers et al., 1985). In general, the technique of “mismatch cleavage” starts by providing heteroduplexes formed by hybridizing (labeled) RNA or DNA containing a wild-type sequence with potentially mutant RNA or DNA obtained from a sample. The double-stranded duplexes are treated with an agent who cleaves single-stranded regions of the duplex such as which will exist due to basepair mismatches between the control and sample strands. For instance, RNA/DNA duplexes can be treated with RNase and DNA/DNA hybrids treated with S1 nuclease to enzymatically digest the mismatched regions. In other embodiments, either DNA/DNA or RNA/DNA duplexes can be treated with hydroxylamine or osmium tetroxide and with piperidine in order to digest mismatched regions. After digestion of the mismatched regions, the resulting material is then separated by size on denaturing polyacrylamide gels to determine the site of a mutation or SNP (see, for example, Cotton et al., 1988; and Saleeba et al., 1992). In a preferred embodiment, the control DNA or RNA can be labeled for detection.

[0181] In still another embodiment, the mismatch cleavage reaction employs one or more proteins that recognize mismatched base pairs in double-stranded DNA (so called “DNA mismatch repair” enzymes) in defined systems for detecting and mapping polymorphism. For example, the mutY enzyme of E. coli cleaves A at G/A mismatches (Hsu et al., 1994). Other examples include, but are not limited to, the MutHLS enzyme complex of E. coli (Smith and Modrich Proc. 1996) and Cel 1 from the celery (Kulinski et al., 2000) both cleave the DNA at various mismatches. According to an exemplary embodiment, a probe based on a polymorphic site corresponding to a polymorphism of Tables 10-12 and 14 is hybridized to a cDNA or other DNA product from a test cell or cells. The duplex is treated with a DNA mismatch repair enzyme, and the cleavage products, if any, can be detected from electrophoresis protocols or the like (see, for example, U.S. Pat. No. 5,459,039). Alternatively, the screen can be performed in vivo following the insertion of the heteroduplexes in an appropriate vector. The whole procedure is known to those ordinary skilled in the art and is referred to as mismatch repair detection (see e.g. Fakhrai-Rad et al., 2004).

[0182] In other embodiments, alterations in electrophoretic mobility can be used to identify polymorphisms in a sample. For example, single strand conformation polymorphism (SSCP) analysis can be used to detect differences in electrophoretic mobility between mutant and wild type nucleic acids (Orita et al., 1989; Cotton et al., 1993; and Hayashi 1992). Single-stranded DNA fragments of case and control nucleic acids will be denatured and allowed to renature. The secondary structure of single-stranded nucleic acids varies according to sequence. The resulting alteration in electrophoretic mobility enables the detection of even a single base change. The DNA fragments may be labeled or detected with labeled probes. The sensitivity of the assay may be enhanced by using RNA (rather than DNA), in which the secondary structure is more sensitive to a change in sequence. In a preferred embodiment, the method utilizes heteroduplex analysis to separate double stranded heteroduplex molecules on the basis of changes in electrophoretic mobility (Kee et al., 1991).

[0183] In yet another embodiment, the movement of mutant or wild-type fragments in a polyacrylamide gel containing a gradient of denaturant is assayed using denaturing gradient gel electrophoresis (DGGE) (Myers et al., 1985). When DGGE is used as the method of analysis, DNA will be modified to insure that it does not completely denature, for example by adding a GC clamp of approximately 40 bp of high-melting GC-rich DNA by PCR. In a further embodiment, a temperature gradient is used in place of a denaturing gradient to identify differences in the mobility of control and sample DNA (Rosenbaum et al., 1987). In another embodiment, the mutant fragment is detected using denaturing HPLC (see e.g. Hoogendoorn et al., 2000).

[0184] Examples of other techniques for detecting polymorphism include, but are not limited to, selective oligonucleotide hybridization, selective amplification, selective primer extension, selective ligation, single-base extension, selective termination of extension or invasive cleavage assay. For example, oligonucleotide primers may be prepared in which the polymorphism is placed centrally and then hybridized to target DNA under conditions which permit hybridization only if a perfect match is found (Saiki et al., 1986); Saiki et al., 1989). Such allele specific oligonucleotides are hybridized to PCR amplified target DNA or a number of different mutations when the oligonucleotides are attached to the hybridizing membrane and hybridized with labeled target DNA. Alternatively, the amplification, the allele-specific hybridization and the detection can be done in a single assay following the principle of the 5′ nuclease assay (e.g. see Livak et al., 1995). For example, the associated allele, a particular allele of a polymorphic locus, or the like is amplified by PCR in the presence of both allele-specific oligonucleotides, each specific for one or the other allele. Each probe has a different fluorescent dye at the 5′ end and a quencher at the 3′ end. During PCR, if one or the other or both allele-specific oligonucleotides are hybridized to the template, the Taq polymerase via its 5′ exonuclease activity will release the corresponding dyes. The latter will thus reveal the genotype of the amplified product.

[0185] Hybridization assays may also be carried out with a temperature gradient following the principle of dynamic allele-specific hybridization or like e.g. Jobs et al., (2003); and Bourgeois and Labuda, (2004). For example, the hybridization is done using one of the two allele-specific oligonucleotides labeled with a fluorescent dye, an intercalating quencher under a gradually increasing temperature. At low temperature, the probe is hybridized to both the mismatched and full-matched template. The probe melts at a lower temperature when hybridized to the template with a mismatch. The release of the probe is captured by an emission of the fluorescent dye, away from the quencher. The probe melts at a higher temperature when hybridized to the template with no mismatch. The temperature-dependent fluorescence signals therefore indicate the absence or presence of an associated allele, a particular allele of a polymorphic locus, or the like (e.g. Jobs et al., 2003). Alternatively, the hybridization is done under a gradually decreasing temperature. In this case, both allele-specific oligonucleotides are hybridized to the template competitively. At high temperature none of the two probes is hybridized. Once the optimal temperature of the full-matched probe is reached, it hybridizes and leaves no target for the mismatched probe (e.g. Bourgeois and Labuda, 2004). In the latter case, if the allele-specific probes are differently labeled, then they are hybridized to a single PCR-amplified target. If the probes are labeled with the same dye, then the probe cocktail is hybridized twice to identical templates with only one labeled probes, different in the two cocktails, in the presence of the unlabeled competitive probe.

[0186] Alternatively, allele specific amplification technology that depends on selective PCR amplification may be used in conjunction with the present invention. Oligonucleotides used as primers for specific amplification may carry the associated allele, a particular allele of a polymorphic locus, or the like, also referred to as “mutation” of interest in the center of the molecule, so that amplification depends on differential hybridization (Gibbs et al., 1989) or at the extreme 3′ end of one primer where, under appropriate conditions, mismatch can prevent, or reduce polymerase extension (Prossner, 1993). In addition it may be desirable to introduce a novel restriction site in the region of the mutation to create cleavage-based detection (Gasparini et al., 1992)). It is anticipated that in certain embodiments amplification may also be performed using Taq ligase for amplification (Barany, 1991). In such cases, ligation will occur only if there is a perfect match at the 3′ end of the 5′ sequence making it possible to detect the presence of a known associated allele, a particular allele of a polymorphic locus, or the like at a specific site by looking for the presence or absence of amplification. The products of such an oligonucleotide ligation assay can also be detected by means of gel electrophoresis. Furthermore, the oligonucleotides may contain universal tags used in PCR amplification and zip code tags that are different for each allele. The zip code tags are used to isolate a specific, labeled oligonucleotide that may contain a mobility modifier (e.g. Grossman et al., (1994).

[0187] In yet another alternative, allele-specific elongation followed by ligation will form a template for PCR amplification. In such cases, elongation will occur only if there is a perfect match at the 3′ end of the allele-specific oligonucleotide using a DNA polymerase. This reaction is performed directly on the genomic DNA and the extension/ligation products are amplified by PCR. To this end, the oligonucleotides contain universal tags allowing amplification at a high multiplex level and a zip code for SNP identification. The PCR tags are designed in such a way that the two alleles of a SNP are amplified by different forward primers, each having a different dye. The zip code tags are the same for both alleles of a given SNPs and they are used for hybridization of the PCR-amplified products to oligonucleotides bound to a solid support, chip, bead array or like. For an example of the procedure, see Fan et al. (Cold Spring Harbor Symposia on Quantitative Biology, Vol. LXVIII, pp. 69-78 (2003)).

[0188] Another alternative includes the single-base extension/ligation assay using a molecular inversion probe, consisting of a single, long oligonucleotide (see e.g. Hardenbol et al., 2003). In such an embodiment, the oligonucleotide hybridizes on both side of the SNP locus directly on the genomic DNA, leaving a one-base gap at the SNP locus. The gap-filling, one-base extension/ligation is performed in four tubes, each having a different dNTP. Following this reaction, the oligonucleotide is circularized whereas unreactive, linear oligonucleotides are degraded using an exonuclease such as exonuclease I of E. coli. The circular oligonucleotides are then linearized and the products are amplified and labeled using universal tags on the oligonucleotides. The original oligonucleotide also contains a SNP-specific zip code allowing hybridization to oligonucleotides bound to a solid support, chip, and bead array or like. This reaction can be performed at a high multiplexed level.

[0189] In another alternative, the associated allele, a particular allele of a polymorphic locus, or the like is scored by single-base extension (see e.g. U.S. Pat. No. 5,888,819). The template is first amplified by PCR. The extension oligonucleotide is then hybridized next to the SNP locus and the extension reaction is performed using a thermostable polymerase such as ThermoSequenase (GE Healthcare) in the presence of labeled ddNTPs. This reaction can therefore be cycled several times. The identity of the labeled ddNTP incorporated will reveal the genotype at the SNP locus. The labeled products can be detected by means of gel electrophoresis, fluorescence polarization (e.g. Chen et al., 1999) or by hybridization to oligonucleotides bound to a solid support, chip, and bead array or like. In the latter case, the extension oligonucleotide will contain a SNP-specific zip code tag.

[0190] In yet another alternative, a SNP is scored by selective termination of extension. The template is first amplified by PCR and the extension oligonucleotide hybridizes in vicinity to the SNP locus, close to but not necessarily adjacent to it. The extension reaction is carried out using a thermostable polymerase such as Thermo Sequenase (GE Healthcare) in the presence of a mix of dNTPs and at least one ddNTP. The latter has to terminate the extension at one of the allele of the interrogated SNP, but not both such that the two alleles will generate extension products of different sizes. The extension product can then be detected by means of gel electrophoresis, in which case the extension products need to be labeled, or by mass spectrometry (see e.g. Storm et al., 2003).

[0191] In another alternative, SNPs are detected using an invasive cleavage assay (see U.S. Pat. No. 6,090,543). There are five oligonucleotides per SNP to interrogate but these are used in a two step-reaction. During the primary reaction, three of the designed oligonucleotides are first hybridized directly to the genomic DNA. One of them is locus-specific and hybridizes up to the SNP locus (the pairing of the 3′ base at the SNP locus is not necessary). There are two allele-specific oligonucleotides that hybridize in tandem to the locus-specific probe but also contain a 5′ flap that is specific for each allele of the SNP. Depending upon hybridization of the allele-specific oligonucleotides at the base of the SNP locus, this creates a structure that is recognized by a cleavase enzyme (U.S. Pat. No. 6,090,606) and the allele-specific flap is released. During the secondary reaction, the flap fragments hybridize to a specific cassette to recreate the same structure as above except that the cleavage will release a small DNA fragment labeled with a fluorescent dye that can be detected using regular fluorescence detector. In the cassette, the emission of the dye is inhibited by a quencher.

[0192] Methods to Identify Agents that Modulate the Expression of a Nucleic Acid Encoding a Gene Involved in Psoriasis.

[0193] The present invention provides methods for identifying agents that modulate the expression of a nucleic acid encoding a gene from Tables 10-12 and 14. Such methods may utilize any available means of monitoring for changes in the expression level of the nucleic acids of the invention. As used herein, an agent is said to modulate the expression of a nucleic acid of the invention if it is capable of up- or down-regulating expression of the nucleic acid in a cell. Such cells can be obtained from any parts of the body such as the scalp, blood, dermis, epidermis and other skin cells, cutaneous surfaces, intertrigious areas, genitalia, vessels and endothelium. Some non-limiting examples of cells that can be used are keratinocytes, monocytes, neutrophils, langerhans cells, CD4+ and CD8+ T cells and lymphocytes. Cytokines and lymphokines can also be used.

[0194] In one assay format, the expression of a nucleic acid encoding a gene of the invention (see Tables 10-12 and 14) in a cell or tissue sample is monitored directly by hybridization to the nucleic acids of the invention. Cell lines or tissues are exposed to the agent to be tested under appropriate conditions and time and total RNA or mRNA is isolated by standard procedures such as those disclosed in Sambrook et al., (1989) Molecular Cloning: A Laboratory Manual, Cold Spring Harbor Laboratory Press).

[0195] Probes to detect differences in RNA expression levels between cells exposed to the agent and control cells may be prepared as described above. Hybridization conditions are modified using known methods, such as those described by Sambrook et al., and Ausubel et al., as required for each probe. Hybridization of total cellular RNA or RNA enriched for polyA RNA can be accomplished in any available format. For instance, total cellular RNA or RNA enriched for polyA RNA can be affixed to a solid support and the solid support exposed to at least one probe comprising at least one, or part of one of the sequences of the invention under conditions in which the probe will specifically hybridize. Alternatively, nucleic acid fragments comprising at least one, or part of one of the sequences of the invention can be affixed to a solid support, such as a silicon chip or a porous glass wafer. The chip or wafer can then be exposed to total cellular RNA or polyA RNA from a sample under conditions in which the affixed sequences will specifically hybridize to the RNA. By examining for the ability of a given probe to specifically hybridize to an RNA sample from an untreated cell population and from a cell population exposed to the agent, agents which up or down regulate expression are identified.

[0196] Methods to Identify Agents that Modulate the Activity of a Protein Encoded by a Gene Involved in Psoriasis.

[0197] The present invention provides methods for identifying agents that modulate at least one activity of the proteins described in Tables 10-12 and 14. Such methods may utilize any means of monitoring or detecting the desired activity. As used herein, an agent is said to modulate the expression of a protein of the invention if it is capable of up- or down-regulating expression of the protein in a cell. Such cells can be obtained from any parts of the body such as the scalp, blood, dermis, epidermis and other skin cells, cutaneous surfaces, intertrigious areas, genitalia, vessels and endothelium. Some non-limiting examples of cells that can be used are keratinocytes, monocytes, neutrophils, langerhans cells, CD4+ and CD8+ T cells and lymphocytes. Cytokines and lymphokines can also be used.

[0198] In one format, the specific activity of a protein of the invention, normalized to a standard unit, may be assayed in a cell population that has been exposed to the agent to be tested and compared to an unexposed control cell population may be assayed. Cell lines or populations are exposed to the agent to be tested under appropriate conditions and times. Cellular lysates may be prepared from the exposed cell line or population and a control, unexposed cell line or population. The cellular lysates are then analyzed with the probe.

[0199] Antibody probes can be prepared by immunizing suitable mammalian hosts utilizing appropriate immunization protocols using the proteins of the invention or antigen-containing fragments thereof. To enhance immunogenicity, these proteins or fragments can be conjugated to suitable carriers. Methods for preparing immunogenic conjugates with carriers such as BSA, KLH or other carrier proteins are well known in the art. In some circumstances, direct conjugation using, for example, carbodiimide reagents may be effective; in other instances linking reagents such as those supplied by Pierce Chemical Co. (Rockford, Ill.) may be desirable to provide accessibility to the hapten. The hapten peptides can be extended at either the amino or carboxy terminus with a cysteine residue or interspersed with cysteine residues, for example, to facilitate linking to a carrier. Administration of the immunogens is conducted generally by injection over a suitable time period and with use of suitable adjuvants, as is generally understood in the art. During the immunization schedule, titers of antibodies are taken to determine adequacy of antibody formation. While the polyclonal antisera produced in this way may be satisfactory for some applications, for pharmaceutical compositions, use of monoclonal preparations is preferred. Immortalized cell lines which secrete the desired monoclonal antibodies may be prepared using standard methods, see e.g., Kohler & Milstein (1992) or modifications which affect immortalization of lymphocytes or spleen cells, as is generally known. The immortalized cell lines secreting the desired antibodies can be screened by immunoassay in which the antigen is the peptide hapten, polypeptide or protein. When the appropriate immortalized cell culture secreting the desired antibody is identified, the cells can be cultured either in vitro or by production in ascites fluid. The desired monoclonal antibodies may be recovered from the culture supernatant or from the ascites supernatant. Fragments of the monoclonal antibodies or the polyclonal antisera which contain the immunologically significant portion(s) can be used as antagonists, as well as the intact antibodies. Use of immunologically reactive fragments, such as Fab or Fab′ fragments, is often preferable, especially in a therapeutic context, as these fragments are generally less immunogenic than the whole immunoglobulin. The antibodies or fragments may also be produced, using current technology, by recombinant means. Antibody regions that bind specifically to the desired regions of the protein can also be produced in the context of chimeras derived from multiple species. Antibody regions that bind specifically to the desired regions of the protein can also be produced in the context of chimeras from multiple species, for instance, humanized antibodies. The antibody can therefore be a humanized antibody or a human antibody, as described in U.S. Pat. No. 5,585,089 or Riechmann et al. (1988).

[0200] Agents that are assayed in the above method can be randomly selected or rationally selected or designed. As used herein, an agent is said to be randomly selected when the agent is chosen randomly without considering the specific sequences involved in the association of the a protein of the invention alone or with its associated substrates, binding partners, etc. An example of randomly selected agents is the use of a chemical library or a peptide combinatorial library, or a growth broth of an organism. As used herein, an agent is said to be rationally selected or designed when the agent is chosen on a non-random basis which takes into account the sequence of the target site or its conformation in connection with the agent's action. Agents can be rationally selected or rationally designed by utilizing the peptide sequences that make up these sites. For example, a rationally selected peptide agent can be a peptide whose amino acid sequence is identical to or a derivative of any functional consensus site. The agents of the present invention can be, as examples, oligonucleotides, antisense polynucleotides, interfering RNA, peptides, peptide mimetics, antibodies, antibody fragments, small molecules, vitamin derivatives, as well as carbohydrates. Peptide agents of the invention can be prepared using standard solid phase (or solution phase) peptide synthesis methods, as is known in the art. In addition, the DNA encoding these peptides may be synthesized using commercially available oligonucleotide synthesis instrumentation and produced recombinantly using standard recombinant production systems. The production using solid phase peptide synthesis is necessitated if non-gene-encoded amino acids are to be included.

[0201] Another class of agents of the present invention includes antibodies or fragments thereof that bind to a protein encoded by a gene in Tables 10-12, and 14. Antibody agents can be obtained by immunization of suitable mammalian subjects with peptides, containing as antigenic regions, those portions of the protein intended to be targeted by the antibodies (see section above of antibodies as probes for standard antibody preparation methodologies).

[0202] In yet another class of agents, the present invention includes peptide mimetics that mimic the three-dimensional structure of the protein encoded by a gene from Tables 10-12, and 14. Such peptide mimetics may have significant advantages over naturally-occurring naturally occurring peptides, including, for example: more economical production, greater chemical stability, enhanced pharmacological properties (half-life, absorption, potency, efficacy, etc.), altered specificity (e.g., a broad-spectrum of biological activities), reduced antigenicity and others. In one form, mimetics are peptide-containing molecules that mimic elements of protein secondary structure. The underlying rationale behind the use of peptide mimetics is that the peptide backbone of proteins exists chiefly to orient amino acid side chains in such a way as to facilitate molecular interactions, such as those of antibody and antigen. A peptide mimetic is expected to permit molecular interactions similar to the natural molecule. In another form, peptide analogs are commonly used in the pharmaceutical industry as non-peptide drugs with properties analogous to those of the template peptide. These types of non-peptide compounds are also referred to as peptide mimetics or peptidomimetics (Fauchere, 1986; Veber & Freidinger, 1985; Evans et al., 1987) which are usually developed with the aid of computerized molecular modeling. Peptide mimetics that are structurally similar to therapeutically useful peptides may be used to produce an equivalent therapeutic or prophylactic effect. Generally, peptide mimetics are structurally similar to a paradigm polypeptide (i.e., a polypeptide that has a biochemical property or pharmacological activity), but have one or more peptide linkages optionally replaced by a linkage using methods known in the art. Labeling of peptide mimetics usually involves covalent attachment of one or more labels, directly or through a spacer (e.g., an amide group), to non-interfering position(s) on the peptide mimetic that are predicted by quantitative structure-activity data and molecular modeling. Such non-interfering positions generally are positions that do not form direct contacts with the macromolecule(s) to which the peptide mimetic binds to produce the therapeutic effect. Derivitization (e.g., labeling) of peptide mimetics should not substantially interfere with the desired biological or pharmacological activity of the peptide mimetic. The use of peptide mimetics can be enhanced through the use of combinatorial chemistry to create drug libraries. The design of peptide mimetics can be aided by identifying amino acid mutations that increase or decrease binding of the protein to its binding partners. Approaches that can be used include the yeast two hybrid method (see Chien et al., 1991) and the phage display method. The two hybrid method detects protein-protein interactions in yeast (Fields et al., 1989). The phage display method detects the interaction between an immobilized protein and a protein that is expressed on the surface of phages such as lambda and M13 (Amberg et al., 1993; Hogrefe et al., 1993). These methods allow positive and negative selection for protein-protein interactions and the identification of the sequences that determine these interactions.

[0203] Method to Diagnose Psoriasis

[0204] The present invention also relates to methods for diagnosing inflammatory disease or a related disease, preferably psoriasis, a disposition to such disease, predisposition to such a disease and/or disease progression. In some methods, the steps comprise contacting a target sample with (a) nucleic acid molecule(s) or fragments thereof and comparing the concentration of individual mRNA(s) with the concentration of the corresponding mRNA(s) from at least one healthy donor. An aberrant (increased or decreased) mRNA level of at least one gene from Tables 10-12 and 14, at least 5 or 10 genes from Tables 10-12 and 14, at least 50 genes from Tables 10-12 and 14, at least 100 genes from Tables 10-12 and 14 or at least 200 genes from Tables 10-12 and 14 determined in the sample in comparison to the control sample is an indication of psoriasis or a related disease or a disposition to such kinds of diseases. For diagnosis, samples are, preferably, obtained from inflamed tissues. Samples can also be obtained from any parts of the body such as the scalp, blood, dermis, epidermis and other skin cells, cutaneous surfaces, intertrigious areas, genitalia, vessels and endothelium. Some non-limiting examples of cells that can be used are keratinocytes, monocytes, neutrophils, langerhans cells, CD4+ and CD8+ T cells and lymphocytes. Cytokines and lymphokines can also be used.

[0205] For analysis of gene expression, total RNA is obtained from cells according to standard procedures and, preferably, reverse-transcribed. Preferably, a DNAse treatment (in order to get rid of contaminating genomic DNA) is performed. Some non-limiting examples of cells that can be used are: keratinocytes, monocytes, neutrophils, langerhans cells, CD4+ and CD8+ T cells and lymphocytes. Cytokines and lymphokines can also be used.

[0206] The nucleic acid molecule or fragment is typically a nucleic acid probe for hybridization or a primer for PCR. The person skilled in the art is in a position to design suitable nucleic acids probes based on the information provided in the Tables of the present invention. The target cellular component, i.e. mRNA, e.g., in skin, may be detected directly in situ, e.g. by in situ hybridization or it may be isolated from other cell components by common methods known to those skilled in the art before contacting with a probe. Detection methods include Northern blot analysis, RNase protection, in situ methods, e.g. in situ hybridization, in vitro amplification methods (PCR, LCR, QRNA replicase or RNA-transcription/amplification (TAS, 3SR), reverse dot blot disclosed in EP-B10237362) and other detection assays that are known to those skilled in the art. Products obtained by in vitro amplification can be detected according to established methods, e.g. by separating the products on agarose or polyacrylamide gels and by subsequent staining with ethidium bromide. Alternatively, the amplified products can be detected by using labeled primers for amplification or labeled dNTPs. Preferably, detection is based on a microarray.

[0207] The probes (or primers) (or, alternatively, the reverse-transcribed sample mRNAs) can be detectably labeled, for example, with a radioisotope, a bioluminescent compound, a chemiluminescent compound, a fluorescent compound, a metal chelate, or an enzyme.

[0208] The present invention also relates to the use of the nucleic acid molecules or fragments described above for the preparation of a diagnostic composition for the diagnosis of psoriasis or a disposition to such a disease.

[0209] The present invention also relates to the use of the nucleic acid molecules of the present invention for the isolation or development of a compound which is useful for therapy of psoriasis. For example, the nucleic acid molecules of the invention and the data obtained using said nucleic acid molecules for diagnosis of psoriasis might allow for the identification of further genes which are specifically dysregulated, and thus may be considered as potential targets for therapeutic interventions.

[0210] The invention further provides prognostic assays that can be used to identify subjects having or at risk of developing psoriasis. In such method, a test sample is obtained from a subject and the amount and/or concentration of the nucleic acid described in Tables 10-12 and 14 is determined; wherein the presence of an associated allele, a particular allele of a polymorphic locus, or the likes in the nucleic acids sequences of this invention (see SEQ ID from Tables 2-14) can be diagnostic for a subject having or at risk of developing psoriasis. As used herein, a “test sample” refers to a biological sample obtained from a subject of interest. For example, a test sample can be a biological fluid, a cell sample, or tissue. A biological fluid can be, but is not limited to saliva, serum, mucus, urine, stools spermatozoids, vaginal secretions, lymph, amiotic liquid, pleural liquid and tears. Cells can be, but are not limited keratinocytes, monocytes, neutrophils, langerhans cells, CD4+ and CD8+ T cells and lymphocytes. Cytokines and lymphokines can also be used.

[0211] Furthermore, the prognostic assays described herein can be used to determine whether a subject can be administered an agent (e.g., an agonist, antagonist, peptidomimetic, polypeptide, nucleic acid such as antisense DNA or interfering RNA (RNAi), small molecule or other drug candidate) to treat psoriasis. Specifically, these assays can be used to predict whether an individual will have an efficacious response or will experience adverse events in response to such an agent. For example, such methods can be used to determine whether a subject can be effectively treated with an agent that modulates the expression and/or activity of a gene from Tables 10-12 and 14, polymorphisms from Tables 2-9 and 13, or the nucleic acids described herein. In another example, an association study may be performed to identify polymorphisms from Tables 2-14 that are associated with a given response to the agent, e.g., an efficacious response or the likelihood of one or more adverse events. Thus, the present invention provides methods for determining whether a subject can be effectively treated with an agent for a disorder associated with aberrant expression or activity of a gene from Tables 10-12 and 14 or polymorphisms from Tables 2-9 and 13, in which a test sample is obtained and nucleic acids or polypeptides from Tables 10-12 and 14 are detected (e.g., wherein the presence of a particular level of expression of a gene from Tables 10-12 and 14 or a particular allelic variant of such gene, such as polymorphism from Tables 2-9 and 13, is diagnostic for a subject that can be administered an agent to treat a disorder such as psoriasis). In the one embodiment, the method includes obtaining a sample from a subject suspected of having psoriasis or an affected individual and exposing such sample to an agent. The expression and/or activity of the nucleic acids and or genes of the invention is monitored before and after treatment with such agent to assess the effect of such agent. After analysis of the expression values, one skilled in the art can determine whether such agent can effectively treat such subject. In another embodiment, the method includes obtaining a sample from a subject having or susceptible to developing psoriasis and determining the allelic constitution of one or more polymorphisms from Tables 2-14, which are associated with a particular response to an agent. After analysis of the allelic constitution of the individual at the associated polymorphisms (e.g., genotyping), one skilled in the art can determine whether such agent can effectively treat such subject.

[0212] The methods of the invention can also be used to detect genetic alterations in a gene from Tables 10-12 and 14, thereby determining if a subject with the lesioned gene is at risk for a disorder associated with psoriasis. In preferred embodiments, the methods include detecting, in a sample of cells from the subject, the presence or absence of a genetic alteration characterized by at least one alteration linked to or affecting the integrity of a gene from Tables 10-12 and 14 encoding a polypeptide or the misexpression of such gene. For example, such genetic alterations can be detected by ascertaining the existence of at least one of: (1) a deletion of one or more nucleotides from a gene from Tables 10-12 and 14; (2) an addition of one or more nucleotides to a gene from Tables 10-12 and 14; (3) a substitution of one or more nucleotides of a gene from Tables 10-12 and 14; (4) a chromosomal rearrangement of a gene from Tables 10-12 and 14; (5) an alteration in the level of a messenger RNA transcript of a gene from Tables 10-12 and 14; (6) aberrant modification of a gene from Tables 10-12 and 14, such as of the methylation pattern of the genomic DNA, (7) the presence of a non-wild type splicing pattern of a messenger RNA transcript of a gene from Tables 10-12 and 14; (8) inappropriate post-translational modification of a polypeptide encoded by a gene from Tables 10-12 and 14; and (9) alternative promoter use. As described herein, there are a large number of assay techniques known in the art which can be used for detecting alterations in a gene from Tables 10-12 and 14. A preferred biological sample is a peripheral blood sample obtained by conventional means from a subject. Another preferred biological sample is a buccal swab. Other biological samples can be, but are not limited to, urine, stools spermatozoids, vaginal secretions, lymph, amiotic liquid, pleural liquid and tears.

[0213] In certain embodiments, detection of the alteration involves the use of a probe/primer in a polymerase chain reaction (PCR) (see, e.g., U.S. Pat. Nos. 4,683,195 and 4,683,202), such as anchor PCR or RACE PCR, or alternatively, in a ligation chain reaction (LCR) (see, e.g., Landegran et al., 1988; and Nakazawa et al., 1994), the latter of which can be particularly useful for detecting point mutations in a gene from Tables 10-12 and 14 (see Abavaya et al., 1995). This method can include the steps of collecting a sample of cells from a patient, isolating nucleic acid (e.g., genomic DNA, mRNA, or both) from the cells of the sample, contacting the nucleic acid sample with one or more primers which specifically hybridize to a gene from Tables 10-12 and 14 under conditions such that hybridization and amplification of the nucleic acid from Tables 10-12 and 14 (if present) occurs, and detecting the presence or absence of an amplification product, or detecting the size of the amplification product and comparing the length to a control sample. PCR and/or LCR may be desirable to use as a preliminary amplification step in conjunction with some of the techniques used for detecting a mutation, an associated allele, a particular allele of a polymorphic locus, or the like, described herein.

[0214] Alternative amplification methods include: self sustained sequence replication (Guatelli et al., 1990), transcriptional amplification system (Kwoh et al., 1989), Q-Beta Replicase (Lizardi et al., 1988), isothermal amplification (e.g. Dean et al., 2002); and Hafner et al., 2001), or any other nucleic acid amplification method, followed by the detection of the amplified molecules using techniques well known to those of ordinary skill in the art. These detection schemes are especially useful for the detection of nucleic acid molecules if such molecules are present in very low number.

[0215] In an alternative embodiment, alterations in a gene from Tables 10-12 and 14, from a sample cell can be identified by identifying changes in a restriction enzyme cleavage pattern. For example, sample and control DNA is isolated, amplified (optionally), digested with one or more restriction endonucleases, and fragment length sizes are determined by gel electrophoresis and compared. Differences in fragment length sizes between sample and control DNA indicate a mutation(s), an associated allele, a particular allele of a polymorphic locus, or the like, in the sample DNA. Moreover, sequence specific ribozymes (see, e.g., U.S. Pat. No. 5,498,531 or DNAzyme e.g. U.S. Pat. No. 5,807,718) can be used to score for the presence of specific associated allele, a particular allele of a polymorphic locus, or the likes by development or loss of a ribozyme or DNAzyme cleavage site.

[0216] The present invention also relates to further methods for diagnosing inflammatory disease or a related disease, preferably psoriasis, a disposition to such disease, predisposition to such a disease and/or disease progression. In some methods, the steps comprise contacting a target sample with (a) nucleic molecule(s) or fragments thereof and determining the presence or absence of a particular allele of a polymorphism that confers a disease-related phenotype (e.g., predisposition to such a disease and/or disease progression). The presence of at least one allele from Tables 2-9 and 13 that is associated with psoriasis disease (“associated allele”), at least 5 or 10 associated alleles from Tables 2-9 and 13, at least 50 associated alleles from Tables 2-9 and 13, at least 100 associated alleles from Tables 2-9 and 13, or at least 200 associated alleles from Tables 2-9 and 13 determined in the sample is an indication of psoriasis or a related disease, a disposition or predisposition to such kinds of diseases, or a prognosis for such disease progression. Samples may be obtained from any parts of the body such as the scalp, blood, dermis, epidermis and other skin cells, cutaneous surfaces, intertrigious areas, genitalia, vessels and endothelium. Some non-limiting examples of cells that can be used are keratinocytes, cytokines, neutrophils, langerhans cells, CD4+ and CD8+ T cells and lymphocytes. Lymphokines and monocytes can also be used.

[0217] In other embodiments, alterations in a gene from Tables 10-12 and 14 or a locus from Table 1 or different alleles of the polymorphisms in Tables 2-9 and 13 can be identified by hybridizing a sample and control nucleic acids, e.g., DNA or RNA, to high density arrays or bead arrays containing tens to thousands of oligonucleotide probes (Cronin et al., 1996; Kozal et al., 1996). For example, alterations in a gene from Tables 10-12 and 14 or a locus from Table 1, or different alleles of the polymorphisms from Tables 2-9 and 13 can be identified in two dimensional arrays containing light-generated DNA probes as described in Cronin et al., (1996). Briefly, a first hybridization array of probes can be used to scan through long stretches of DNA in a sample and control to identify base changes between the sequences by making linear arrays of sequential overlapping probes. This step allows the identification of point mutations or different alleles of polymorphisms. This step is followed by a second hybridization array that allows the characterization of specific mutations by using smaller, specialized probe arrays complementary to all variants or mutations detected. Each mutation array is composed of parallel probe sets, one complementary to the wild-type gene and the other complementary to the mutant gene or associated alleles or particular allele of a polymorphic locus.

[0218] In yet another embodiment, any of a variety of sequencing reactions known in the art can be used to directly sequence a gene from Tables 10-12 and 14 and detect an associated allele, a particular allele of a polymorphic locus, or the like by comparing the sequence of the sample gene from Tables 10-12 and 14 with the corresponding wild-type (control) sequence. Examples of sequencing reactions include those based on techniques developed by Maxam and Gilbert (1977) or Sanger (1977). It is also contemplated that any of a variety of automated sequencing procedures can be utilized when performing the diagnostic assays {Bio/Techniques 19:448 (1995) including sequencing by mass spectrometry (see, e.g. PCT International Publication No. WO 94/16101; Cohen et al., 1996; and Griffin et al. 1993), real-time pyrophosphate sequencing method (Ronaghi et al., 1998; and Permutt et al., 2001) and sequencing by hybridization (see e.g. Drmanac et al., 2002)}.

[0219] Other methods of detecting an associated allele, a particular allele of a polymorphic locus, or the likes in a gene from Tables 10-12 and 14 include methods in which protection from cleavage agents is used to detect mismatched bases in RNA/RNA, DNA/DNA or RNA/DNA heteroduplexes (Myers et al., 1985). In general, the art technique of “mismatch cleavage” starts by providing heteroduplexes formed by hybridizing (labeled) RNA or DNA containing the wild-type gene from Tables 10-12 and 14 sequence with potentially mutant RNA or DNA obtained from a tissue sample. The double-stranded duplexes are treated with an agent that cleaves single-stranded regions of the duplex such as which will exist due to basepair mismatches between the control and sample strands. For instance, RNA/DNA duplexes can be treated with RNase and DNA/DNA hybrids treated with S1 nuclease to enzymatically digest the mismatched regions. In other embodiments, either DNA/DNA or RNA/DNA duplexes can be treated with hydroxylamine or osmium tetroxide and with piperidine in order to digest mismatched regions. After digestion of the mismatched regions, the resulting material is then separated by size on denaturing polyacrylamide gels to determine the site of an associated allele, a particular allele of a polymorphic locus, or the like (see, for example, Cotton et al., 1988; Saleeba et al., 1992). In a preferred embodiment, the control DNA or RNA can be labeled for detection, as described herein.

[0220] In still another embodiment, the mismatch cleavage reaction employs one or more proteins that recognize mismatched base pairs in double-stranded DNA (so called “DNA mismatch repair” enzymes) in defined systems for detecting and mapping point an associated allele, a particular allele of a polymorphic locus, or the likes in a gene from Tables 10-12 and 14 cDNAs obtained from samples of cells. For example, the mutY enzyme of E. coli cleaves A at G/A mismatches (Hsu et al., 1994). Other examples include, but are not limited to, the MutHLS enzyme complex of E. coli (Smith and Modrich., 1996) and Cel 1 from the celery (Kulinski et al., 2000) both cleave the DNA at various mismatches. According to an exemplary embodiment, a probe based on a gene sequence from Tables 10-12 and 14 is hybridized to a cDNA or other DNA product from a test cell or cells. The duplex is treated with a DNA mismatch repair enzyme, and the cleavage products, if any, can be detected using electrophoresis protocols or the like. See, for example, U.S. Pat. No. 5,459,039. Alternatively, the screen can be performed in vivo following the insertion of the heteroduplexes in an appropriate vector. The whole procedure is known to those ordinary skilled in the art and is referred to as mismatch repair detection (see e.g. Fakhrai-Rad et al., 2004).

[0221] In other embodiments, alterations in electrophoretic mobility can be used to identify an associated allele, a particular allele of a polymorphic locus, or the likes in genes from Tables 10-12 and 14. For example, single strand conformation polymorphism (SSCP) can be used to detect differences in electrophoretic mobility between mutant and wild type nucleic acids (Orita et al., 1993; see also Cotton, 1993; and Hayashi et al., 1992). Single-stranded DNA fragments of sample and control nucleic acids from Tables 10-12 and 14 will be denatured and allowed to renature. The secondary structure of single-stranded nucleic acids varies according to sequence; the resulting alteration in electrophoretic mobility enables the detection of even a single base change. The DNA fragments may be labeled or detected with labeled probes. The sensitivity of the assay may be enhanced by using RNA (rather than DNA), in which the secondary structure is more sensitive to a change in sequence. In a preferred embodiment, the method utilizes heteroduplex analysis to separate double stranded heteroduplex molecules on the basis of changes in electrophoretic mobility (Kee et al., 1991).

[0222] In yet another embodiment, the movement of mutant or wild-type fragments in a polyacrylamide gel containing a gradient of denaturant is assayed using denaturing gradient gel electrophoresis (DGGE) (Myers et al., 1985). When DGGE is used as the method of analysis, DNA will be modified to insure that it does not completely denature, for example by adding a GC clamp of approximately 40 bp of high-melting GC-rich DNA by PCR. In a further embodiment, a temperature gradient is used in place of a denaturing gradient to identify differences in the mobility of control and sample DNA (Rosenbaum et al., 1987). In another embodiment, the mutant fragment is detected using denaturing HPLC (see e.g. Hoogendoorn et al., 2000).

[0223] Examples of other techniques for detecting point mutations an associated allele, a particular allele of a polymorphic locus, or the like include, but are not limited to, selective oligonucleotide hybridization, selective amplification, selective primer extension, selective ligation, single-base extension, selective termination of extension or invasive cleavage assay. For example, oligonucleotide primers may be prepared in which the known associated allele, particular allele of a polymorphic locus, or the like is placed centrally and then hybridized to target DNA under conditions which permit hybridization only if a perfect match is found (Saiki et al., 1986; Saiki et al., 1989). Such allele specific oligonucleotides are hybridized to PCR amplified target DNA or a number of different associated alleles, a particular allele of a polymorphic locus, or the likes where the oligonucleotides are attached to the hybridizing membrane and hybridized with labeled target DNA. Alternatively, the amplification, the allele-specific hybridization and the detection can be done in a single assay following the principle of the 5′ nuclease assay (e.g. see Livak et al., 1995). For example, the associated allele, a particular allele of a polymorphic locus, or the like locus is amplified by PCR in the presence of both allele-specific oligonucleotides, each specific for one or the other allele. Each probe has a different fluorescent dye at the 5′ end and a quencher at the 3′ end. During PCR, if one or the other or both allele-specific oligonucleotides are hybridized to the template, the Taq polymerase via its 5′ exonuclease activity will release the corresponding dyes. The latter will thus reveal the genotype of the amplified product.

[0224] The hybridization may also be carried out with a temperature gradient following the principle of dynamic allele-specific hybridization or like (e.g. Jobs et al., 2003); and Bourgeois and Labuda, 2004). For example, the hybridization is done using one of the two allele-specific oligonucleotides labeled with a fluorescent dye, an intercalating quencher under a gradually increasing temperature. At low temperature, the probe is hybridized to both the mismatched and full-matched template. The probe melts at a lower temperature when hybridized to the template with a mismatch. The release of the probe is captured by an emission of the fluorescent dye, away from the quencher. The probe melts at a higher temperature when hybridized to the template with no mismatch. The temperature-dependent fluorescence signals therefore indicate the absence or presence of the associated allele, particular allele of a polymorphic locus, or the like (e.g. Jobs et al. supra). Alternatively, the hybridization is done under a gradually decreasing temperature. In this case, both allele-specific oligonucleotides are hybridized to the template competitively. At high temperature none of the two probes is hybridized. Once the optimal temperature of the full-matched probe is reached, it hybridizes and leaves no target for the mismatched probe. In the latter case, if the allele-specific probes are differently labeled, then they are hybridized to a single PCR-amplified target. If the probes are labeled with the same dye, then the probe cocktail is hybridized twice to identical templates with only one labeled probes, different in the two cocktails, in the presence of the unlabeled competitive probe.

[0225] Alternatively, allele specific amplification technology that depends on selective PCR amplification may be used in conjunction with the present invention. Oligonucleotides used as primers for specific amplification may carry the associated allele, particular allele of a polymorphic locus, or the like of interest in the center of the molecule, so that amplification depends on differential hybridization (Gibbs et al., 1989) or at the extreme 3′ end of one primer where, under appropriate conditions, mismatch can prevent, or reduce polymerase extension (Prossner, 1993). In addition it may be desirable to introduce a novel restriction site in the region of the associated allele, particular allele of a polymorphic locus, or the like to create cleavage-based detection (Gasparini et al., 1992). It is anticipated that in certain embodiments amplification may also be performed using Taq ligase for amplification (Barany, 1991). In such cases, ligation will occur only if there is a perfect match at the 3′ end of the 5′ sequence making it possible to detect the presence of a known associated allele, a particular allele of a polymorphic locus, or the like at a specific site by looking for the presence or absence of amplification. The products of such an oligonucleotide ligation assay can also be detected by means of gel electrophoresis. Furthermore, the oligonucleotides may contain universal tags used in PCR amplification and zip code tags that are different for each allele. The zip code tags are used to isolate a specific, labeled oligonucleotide that may contain a mobility modifier (e.g. Grossman et al., 1994).

[0226] In yet another alternative, allele-specific elongation followed by ligation will form a template for PCR amplification. In such cases, elongation will occur only if there is a perfect match at the 3′ end of the allele-specific oligonucleotide using a DNA polymerase. This reaction is performed directly on the genomic DNA and the extension/ligation products are amplified by PCR. To this end, the oligonucleotides contain universal tags allowing amplification at a high multiplex level and a zip code for SNP identification. The PCR tags are designed in such a way that the two alleles of a SNP are amplified by different forward primers, each having a different dye. The zip code tags are the same for both alleles of a given SNP and they are used for hybridization of the PCR-amplified products to oligonucleotides bound to a solid support, chip, bead array or like. For an example of the procedure, see Fan et al. (Cold Spring Harbor Symposia on Quantitative Biology, Vol. LXVIII, pp. 69-78 (2003)).

[0227] Another alternative includes the single-base extension/ligation assay using a molecular inversion probe, consisting of a single, long oligonucleotide (see e.g. Hardenbol et al., 2003). In such an embodiment, the oligonucleotide hybridizes on both sides of the SNP locus directly on the genomic DNA, leaving a one-base gap at the SNP locus. The gap-filling, one-base extension/ligation is performed in four tubes, each having a different dNTP. Following this reaction, the oligonucleotide is circularized whereas unreactive, linear oligonucleotides are degraded using an exonuclease such as exonuclease I of E. coli. The circular oligonucleotides are then linearized and the products are amplified and labeled using universal tags on the oligonucleotides. The original oligonucleotide also contains a SNP-specific zip code allowing hybridization to oligonucleotides bound to a solid support, chip, bead array or like. This reaction can be performed at a highly multiplexed level.

[0228] In another alternative, the associated allele, particular allele of a polymorphic locus, or the like is scored by single-base extension (see e.g. U.S. Pat. No. 5,888,819). The template is first amplified by PCR. The extension oligonucleotide is then hybridized next to the SNP locus and the extension reaction is performed using a thermostable polymerase such as ThermoSequenase (GE Healthcare) in the presence of labeled ddNTPs. This reaction can therefore be cycled several times. The identity of the labeled ddNTP incorporated will reveal the genotype at the SNP locus. The labeled products can be detected by means of gel electrophoresis, fluorescence polarization (e.g. Chen et al., 1999) or by hybridization to oligonucleotides bound to a solid support, chip, bead array or the like. In the latter case, the extension oligonucleotide will contain a SNP-specific zip code tag.

[0229] In yet another alternative, the variant is scored by selective termination of extension. The template is first amplified by PCR and the extension oligonucleotide hybridizes in vicinity to the SNP locus, close to but not necessarily adjacent to it. The extension reaction is carried out using a thermostable polymerase such as Thermo Sequenase (GE Healthcare) in the presence of a mix of dNTPs and at least one ddNTP. The latter has to terminate the extension at one of the alleles of the interrogated SNP, but not both such that the two alleles will generate extension products of different sizes. The extension product can then be detected by means of gel electrophoresis, in which case the extension products need to be labeled, or by mass spectrometry (see e.g. Storm et al., 2003).

[0230] In another alternative, the associated allele, particular allele of a polymorphic locus, or the like is detected using an invasive cleavage assay (see U.S. Pat. No. 6,090,543). There are five oligonucleotides per SNP to interrogate but these are used in a two step-reaction. During the primary reaction, three of the designed oligonucleotides are first hybridized directly to the genomic DNA. One of them is locus-specific and hybridizes up to the SNP locus (the pairing of the 3′ base at the SNP locus is not necessary). There are two allele-specific oligonucleotides that hybridize in tandem to the locus-specific probe but also contain a 5′ flap that is specific for each allele of the SNP. Depending upon hybridization of the allele-specific oligonucleotides at the base of the SNP locus, this creates a structure that is recognized by a cleavase enzyme (U.S. Pat. No. 6,090,606) and the allele-specific flap is released. During the secondary reaction, the flap fragments hybridize to a specific cassette to recreate the same structure as above except that the cleavage will release a small DNA fragment labeled with a fluorescent dye that can be detected using regular fluorescence detector. In the cassette, the emission of the dye is inhibited by a quencher.

[0231] Other types of markers can also be used for diagnostic purposes. For example, microsatellites can also be useful to detect the genetic predisposition of an individual to a given disease. Microsatellites consist of short sequence motifs of one or a few nucleotides repeated in tandem. The most common motifs are polynucleotide runs, dinucleotide repeats (particularly the CA repeats) and trinucleotide repeats. However, other types of repeats can also be used. The microsatellites are very useful for genetic mapping because they are highly polymorphic in their length. Microsatellite markers can be typed by various means, including but not limited to DNA PCR fragment sizing, oligonucleotide ligation assay and mass spectrometry. For example, the locus of the microsatellite is amplified by PCR and the size of the PCR fragment will be directly correlated to the length of the microsatellite repeat. The size of the PCR fragment can be detected by regular means of gel electrophoresis. The fragment can be labeled internally during PCR or by using end-labeled oligonucleotides in the PCR reaction (e.g. Mansfield et al., 1996). Alternatively, the size of the PCR fragment is determined by mass spectrometry. In such a case, however, the flanking sequences need to be eliminated. This can be achieved by ribozyme cleavage of an RNA transcript of the microsatellite repeat (Krebs et al., 2001). For example, the microsatellite locus is amplified using oligonucleotides that include a T7 promoter on one end and a ribozyme motif on the other end. Transcription of the amplified fragments will yield an RNA substrate for the ribozyme, releasing small RNA fragments that contain the repeated region. The size of the latter is determined by mass spectrometry. Alternatively, the flanking sequences are specifically degraded. This is achieved by replacing the dTTP in the PCR reaction by dUTP. The dUTP nucleosides are then removed by uracyl DNA glycosylases and the resulting abasic sites are cleaved by either abasic endonucleases such as human AP endonuclease or chemical agents such as piperidine. Bases can also be modified post-PCR by chemical agents such as dimethyl sulfate and then cleaved by other chemical agents such as piperidine (see e.g. Maxam and Gilbert, 1977; U.S. Pat. No. 5,869,242; and U.S. Patent pending Ser. No. 60/335,068).

[0232] In another alternative, an oligonucleotide ligation assay can be performed. The microsatellite locus is first amplified by PCR. Then, different oligonucleotides can be submitted to ligation at the center of the repeat with a set of oligonucleotides covering all the possible lengths of the marker at a given locus (Zirvi et al., 1999). Another example of design of an oligonucleotide assay comprises the ligation of three oligonucleotides; a 5′ oligonucleotide hybridizing to the 5′ flanking sequence, a repeat oligonucleotide of the length of the shortest allele of the marker hybridizing to the repeated region and a set of 3′ oligonucleotides covering all the existing alleles hybridizing to the 3′ flanking sequence and a portion of the repeated region for all the alleles longer than the shortest one. For the shortest allele, the 3′ oligonucleotide exclusively hybridizes to the 3′ flanking sequence (U.S. Pat. No. 6,479,244).

[0233] The methods described herein may be performed, for example, by utilizing pre-packaged diagnostic kits comprising at least one probe nucleic acid selected from the SEQ ID of Tables 2-14, or antibody reagent described herein, which may be conveniently used, for example, in a clinical setting to diagnose patient exhibiting symptoms or a family history of a disease or disorder involving abnormal activity of genes from Tables 10-12 and 14.

[0234] Method to Treat an Animal Suspected of Having Psoriasis

[0235] The present invention provides methods of treating a disease associated with psoriasis by expressing in vivo the nucleic acids of at least one gene from Tables 10-12 and 14. These nucleic acids can be inserted into any of a number of well-known vectors for the transfection of target cells and organisms as described below. The nucleic acids are transfected into cells, ex vivo or in vivo, through the interaction of the vector and the target cell. The nucleic acids encoding a gene from Tables 10-12 and 14, under the control of a promoter, then expresses the encoded protein, thereby mitigating the effects of absent, partial inactivation, or abnormal expression of a gene from Tables 10-12 and 14.

[0236] Such gene therapy procedures have been used to correct acquired and inherited genetic defects, cancer, and viral infection in a number of contexts. The ability to express artificial genes in humans facilitates the prevention and/or cure of many important human diseases, including many diseases which are not amenable to treatment by other therapies (for a review of gene therapy procedures, see Anderson, 1992; Nabel & Feigner, 1993; Mitani & Caskey, 1993; Mulligan, 1993; Dillon, 1993; Miller, 1992; Van Brunt, 1998; Vigne, 1995; Kremer & Perricaudet 1995; Doerfler & Bohm 1995; and Yu et al., 1994).

[0237] Delivery of the gene or genetic material into the cell is the first critical step in gene therapy treatment of disease. A large number of delivery methods are well known to those of skill in the art. Preferably, the nucleic acids are administered for in vivo or ex vivo gene therapy uses. Non-viral vector delivery systems include DNA plasmids, naked nucleic acid, and nucleic acid complexed with a delivery vehicle such as a liposome. Viral vector delivery systems include DNA and RNA viruses, which have either episomal or integrated genomes after delivery to the cell. For a review of gene therapy procedures, see the references included in the above section.

[0238] The use of RNA or DNA viral based systems for the delivery of nucleic acids take advantage of highly evolved processes for targeting a virus to specific cells in the body and trafficking the viral payload to the nucleus. Viral vectors can be administered directly to patients (in vivo) or they can be used to treat cells in vitro and the modified cells are administered to patients (ex vivo). Conventional viral based systems for the delivery of nucleic acids could include retroviral, lentivirus, adenoviral, adeno-associated and herpes simplex virus vectors for gene transfer. Viral vectors are currently the most efficient and versatile method of gene transfer in target cells and tissues. Integration in the host genome is possible with the retrovirus, lentivirus, and adeno-associated virus gene transfer methods, often resulting in long term expression of the inserted transgene. Additionally, high transduction efficiencies have been observed in many different cell types and target tissues.

[0239] The tropism of a retrovirus can be altered by incorporating foreign envelope proteins, expanding the potential target population of target cells. Lentiviral vectors are retroviral vectors that are able to transduce or infect non-dividing cells and typically produce high viral titers. Selection of a retroviral gene transfer system would therefore depend on the target tissue. Retroviral vectors are comprised of cis-acting long terminal repeats with packaging capacity for up to 6-10 kb of foreign sequence. The minimum cis-acting LTRs are sufficient for replication and packaging of the vectors, which are then used to integrate the therapeutic gene into the target cell to provide permanent transgene expression. Widely used retroviral vectors include those based upon murine leukemia virus (MuLV), gibbon ape leukemia virus (GaLV), Simian Immuno deficiency virus (SIV), human immuno deficiency virus (HIV), and combinations thereof (see, e.g., Buchscher et al., 1992; Johann et al., 1992; Sommerfelt et al., 1990; Wilson et al., 1989; Miller et al., 1999; and PCT/US94/05700).

[0240] In applications where transient expression of the nucleic acid is preferred, adenoviral based systems are typically used. Adenoviral based vectors are capable of very high transduction efficiency in many cell types and do not require cell division. With such vectors, high titer and levels of expression have been obtained. This vector can be produced in large quantities in a relatively simple system. Adeno-associated virus (“AAV”) vectors are also used to transduce cells with target nucleic acids, e.g., in the in vitro production of nucleic acids and peptides, and for in vivo and ex vivo gene therapy procedures (see, e.g., West et al., 1987; U.S. Pat. No. 4,797,368; WO 93/24641; Kotin, 1994; Muzyczka, 1994). Construction of recombinant AAV vectors are described in a number of publications, including U.S. Pat. No. 5,173,414; Tratschin et al., 1985; Tratschin, et al., 1984; Hermonat & Muzyczka, 1984; and Samulski et al., 1989.

[0241] In particular, numerous viral vector approaches are currently available for gene transfer in clinical trials, with retroviral vectors by far the most frequently used system. All of these viral vectors utilize approaches that involve complementation of defective vectors by genes inserted into helper cell lines to generate the transducing agent. pLASN and MFG-S are examples are retroviral vectors that have been used in clinical trials (Dunbar et al., 1995; Kohn et al., 1995; Malech et al., 1997). PA317/pLASN was the first therapeutic vector used in a gene therapy trial (Blaese et al., 1995). Transduction efficiencies of 50% or greater have been observed for MFG-S packaged vectors (Ellem et al., 1997; and Dranoff et al., 1997).

[0242] Recombinant adeno-associated virus vectors (rAAV) are a promising alternative gene delivery systems based on the defective and nonpathogenic parvovirus adeno-associated type 2 virus. All vectors are derived from a plasmid that retains only the AAV 145 by inverted terminal repeats flanking the transgene expression cassette. Efficient gene transfer and stable transgene delivery due to integration into the genomes of the transduced cell are key features for this vector system. (Wagner et al., 1998, Kearns et al 1996).

[0243] Replication-deficient recombinant adenoviral vectors (Ad) are predominantly used in transient expression gene therapy; because they can be produced at high titer and they readily infect a number of different cell types. Most adenovirus vectors are engineered such that a transgene replaces the Ad E1a, E1b, and E3 genes; subsequently the replication defector vector is propagated in human 293 cells that supply deleted gene function in trans. Ad vectors can transduce multiple types of tissues in vivo, including nondividing, differentiated cells such as those found in the liver, kidney and muscle system tissues. Conventional Ad vectors have a large carrying capacity. An example of the use of an Ad vector in a clinical trial involved polynucleotide therapy for antitumor immunization with intramuscular injection (Sterman et al., 1998). Additional examples of the use of adenovirus vectors for gene transfer in clinical trials include Rosenecker et al., 1996; Sterman et al., 1998; Welsh et al., 1995; Alvarez et al., 1997; Topf et al., 1998; Sterman et al., 1998.

[0244] Packaging cells are used to form virus particles that are capable of infecting a host cell. Such cells include 293 cells, which package adenovirus, and ψ2 cells or PA317 cells, which package retrovirus. Viral vectors used in gene therapy are usually generated by producer cell line that packages a nucleic acid vector into a viral particle. The vectors typically contain the minimal viral sequences required for packaging and subsequent integration into a host, other viral sequences being replaced by an expression cassette for the protein to be expressed. The missing viral functions are supplied in trans by the packaging cell line. For example, AAV vectors used in gene therapy typically only possess ITR sequences from the AAV genome which are required for packaging and integration into the host genome. Viral DNA is packaged in a cell line, which contains a helper plasmid encoding the other AAV genes, namely rep and cap, but lacking ITR sequences. The cell line is also infected with adenovirus as a helper. The helper virus promotes replication of the AAV vector and expression of AAV genes from the helper plasmid. The helper plasmid is not packaged in significant amounts due to a lack of ITR sequences. Contamination with adenovirus can be reduced by, e.g., heat treatment to which adenovirus is more sensitive than AAV.

[0245] In many gene therapy applications, it is desirable that the gene therapy vector be delivered with a high degree of specificity to a particular tissue type. A viral vector is typically modified to have specificity for a given cell type by expressing a ligand as a fusion protein with a viral coat protein on the viruses outer surface. The ligand is chosen to have affinity for a receptor known to be present on the cell type of interest. For example, Han et al., 1995, reported that Moloney murine leukemia virus can be modified to express human heregulin fused to gp70, and the recombinant virus infects certain human breast cancer cells expressing human epidermal growth factor receptor. This principle can be extended to other pairs of virus expressing a ligand fusion protein and target cell expressing a receptor. For example, filamentous phage can be engineered to display antibody fragments (e.g., Fab or Fv) having specific binding affinity for virtually any chosen cellular receptor. Although the above description applies primarily to viral vectors, the same principles can be applied to nonviral vectors. Such vectors can be engineered to contain specific uptake sequences thought to favor uptake by specific target cells.

[0246] Gene therapy vectors can be delivered in vivo by administration to an individual patient, typically by systemic administration (e.g., intravenous, intraperitoneal, intramuscular, subdermal, or intracranial infusion) or topical application. Alternatively, vectors can be delivered to cells ex vivo, such as cells explanted from an individual patient (e.g., lymphocytes, bone marrow aspirates, and tissue biopsy) or universal donor hematopoietic stem cells, followed by reimplantation of the cells into a patient, usually after selection for cells which have incorporated the vector.

[0247] Ex vivo cell transfection for diagnostics, research, or for gene therapy (e.g., via re-infusion of the transfected cells into the host organism) is well known to those of skill in the art. In a preferred embodiment, cells are isolated from the subject organism, transfected with a nucleic acid (gene or cDNA), and re-infused back into the subject organism (e.g., patient). Various cell types suitable for ex vivo transfection are well known to those of skill in the art (see, e.g., Freshney et al., 1994; and the references cited therein for a discussion of how to isolate and culture cells from patients).

[0248] In one embodiment, stem cells are used in ex vivo procedures for cell transfection and gene therapy. The advantage to using stem cells is that they can be differentiated into other cell types in vitro, or can be introduced into a mammal (such as the donor of the cells) where they will engraft in the bone marrow. Methods for differentiating CD34+ cells in vitro into clinically important immune cell types using cytokines such a GM-CSF, IFN-γ and TNF-α are known (see Inaba et al., 1992).

[0249] Stem cells are isolated for transduction and differentiation using known methods. For example, stem cells are isolated from bone marrow cells by panning the bone marrow cells with antibodies which bind unwanted cells, such as CD4+ and CD8+ (T cells), CD45+ (panB cells), GR-1 (granulocytes), and Iad (differentiated antigen presenting cells).

[0250] Vectors (e.g., retroviruses, adenoviruses, liposomes, etc.) containing therapeutic nucleic acids can be also administered directly to the organism for transduction of cells in vivo. Alternatively, naked DNA can be administered.

[0251] Administration is by any of the routes normally used for introducing a molecule into ultimate contact with blood or tissue cells, as described above. The nucleic acids from Tables 10-12 and 14 are administered in any suitable manner, preferably with the pharmaceutically acceptable carriers described above. Suitable methods of administering such nucleic acids are available and well known to those of skill in the art, and, although more than one route can be used to administer a particular composition, a particular route can often provide a more immediate and more effective reaction than another route (see Samulski et al., 1989). The present invention is not limited to any method of administering such nucleic acids, but preferentially uses the methods described herein.

[0252] The present invention further provides other methods of treating psoriasis such as administering to an individual having psoriasis an effective amount of an agent that regulates the expression, activity or physical state of at least one gene from Tables 10-12 and 14. An “effective amount” of an agent is an amount that modulates a level of expression or activity of a gene from Tables 10-12 and 14, in a cell in the individual at least about 10%, at least about 20%, at least about 30%, at least about 40%, at least about 50%, at least about 60%, at least about 70%, at least about 80% or more, compared to a level of the respective gene from Tables 10-12 and 14 in a cell in the individual in the absence of the compound. The preventive or therapeutic agents of the present invention may be administered, either orally or parenterally, systemically or locally. For example, intravenous injection such as drip infusion, intramuscular injection, intraperitoneal injection, subcutaneous injection, suppositories, intestinal lavage, oral enteric coated tablets, and the like can be selected, and the method of administration may be chosen, as appropriate, depending on the age and the conditions of the patient. The effective dosage is chosen from the range of 0.01 mg to 100 mg per kg of body weight per administration. Alternatively, the dosage in the range of 1 to 1000 mg, preferably 5 to 50 mg per patient may be chosen. The therapeutic efficacy of the treatment may be monitored by observing various parts of the body, such as the skin, by any monitoring method known in the art. Others ways of monitoring efficacy can be, but are not limited to monitoring inflammatory condition of the skin.

[0253] The present invention further provides a method of treating an individual clinically diagnosed with psoriasis. The methods generally comprises analyzing a biological sample that includes a cell, in some cases, a skin cell, from an individual clinically diagnosed with psoriasis for the presence of modified levels of expression of at least 1 gene, at least 10 genes, at least 50 genes, at least 100 genes, or at least 200 genes from Tables 10-12 and 14. A treatment plan that is most effective for individuals clinically diagnosed as having a condition associated with psoriasis is then selected on the basis of the detected expression of such genes in a cell. Treatment may include administering a composition that includes an agent that modulates the expression or activity of a protein from Tables 10-12 and 14 in the cell. Information obtained as described in the methods above can also be used to predict the response of the individual to a particular agent. Thus, the invention further provides a method for predicting a patient's likelihood to respond to a drug treatment for a condition associated with psoriasis, comprising determining whether modified levels of a gene from Tables 10-12 and 14 is present in a cell, wherein the presence of protein is predictive of the patient's likelihood to respond to a drug treatment for the condition. Examples of the prevention or improvement of symptoms accompanied by psoriasis that can monitored for effectiveness include prevention or improvement of inflammation, hyperproliferation of the epidermis, altered maturation of the epidermis (resulting in scaling), vascular alterations (which add to redness) and loss of the granular layer.

[0254] The invention also provides a method of predicting a response to therapy in a subject having psoriasis by determining the presence or absence in the subject of one or more markers associated with psoriasis described in Tables 2-14, diagnosing the subject in which the one or more markers are present as having psoriasis, and predicting a response to a therapy based on the diagnosis e.g., response to therapy may include an efficacious response and/or one or more adverse events. The invention also provides a method of optimizing therapy in a subject having psoriasis by determining the presence or absence in the subject of one or more markers associated with a clinical subtype of psoriasis, diagnosing the subject in which the one or more markers are present as having a particular clinical subtype of psoriasis, and treating the subject having a particular clinical subtype of psoriasis based on the diagnosis. As an example, treatment for the guttate psoriasis currently includes presumptive antistreptococcal antibiotic therapy. Although widespread and usually explosive in onset, guttate psoriasis often rapidly responds to sunlight or ultraviolet light therapy. To give optimum treatment, the clinician must find out: which aspects and to what extent the disease worries the patient and what type of improvement would substantially reduce this worry, In addition to the cost and risk of treatment. Current pharmacological treatments are either modestly effective or have substantial risk. Psoriasis is a dynamic disease and treatment risks usually increase with cumulative doses of a specific therapy. Optimum treatment requires periodic re-evaluation often leading to changes in treatment. Because of its chronic nature, psoriasis is a great burden to many patients and a constant challenge to the clinician.

### Examples

### Example 1

### Identification of Cases and Controls

[0255] All individuals were sampled from the Quebec founder population (QFP). Membership in the founder population was defined as having four grandparents with French Canadian family names who were born in the Province of Quebec, Canada or in adjacent areas of the Provinces of New Brunswick and Ontario or in New England or New York State. The Quebec founder population has two distinct advantages over general populations for LD mapping. Because it is relatively young, about 12 to 15 generations from the mid 17th century to the present, and because it has a limited but sufficient number of founders, approximately 2600 effective founders (Charbonneau et al. 1987), the Quebec population is characterized both by extended LD and by decreased genetic heterogeneity. The increased extent of LD allows the detection of disease genes using a reasonable marker density, while still allowing the increased meiotic resolution of population-based mapping. The number of founders is small enough to result in increased LD and reduced allelic heterogeneity, yet large enough to insure that all of the major disease genes involved in general populations are present in Quebec. Reduced allelic heterogeneity will act to increase relative risk imparted by the remaining alleles and so increase the power of case/control studies to detect gene an associated allele, a particular allele of a polymorphic locus, or the likes involved in complex diseases within the Quebec population. The specific combination of age in generations, optimal number of founders and large present population size makes the QFP optimal for LD-based gene mapping.

[0256] Patient inclusion criteria for the study included diagnosis for plaque forming psoriasis vulgaris with the onset of the condition occurred between age 18 and 40.

[0257] Patients that were diagnosed with inverse, palmo-plantar, pustular, erythrodermic, guttate and isolated dermatological lesions were excluded from the study. All human sampling was subject to ethical review procedures.

[0258] All enrolled QFP subjects (patients and family members) provided a 30 ml blood sample (3 barcoded tubes of 10 ml). Samples were processed immediately upon arrival at Genizon's laboratory. All samples were scanned and logged into a LabVantage Laboratory Information Management System (LIMS), which served as a hub between the clinical data management system and the genetic analysis system. Following centrifugation, the buffy coat containing the white blood cells was isolated from each tube. Genomic DNA was extracted from the buffy coat from one of the tubes, and stored at 4° C. until required for genotyping. DNA extraction was performed with a commercial kit using a guanidine hydrochloride based method (FlexiGene, Qiagen) according to the manufacturer's instructions. The extraction method yielded high molecular weight DNA, and the quality of every DNA sample was verified by agarose gel electrophoresis. Genomic DNA appeared on the gel as a large band of very high molecular weight. The remaining two buffy coats were stored at −80° C. as backups.

[0259] The samples were collected as family trios from psoriasis subjects and two close relatives. All the 500 trios were Parent, Parent, Child (PPC) trios. Therefore, only PPC trios were used for the analysis reported here. One member of each trio was affected with psoriasis. When a child was the affected member of the trio, the two non-transmitted parental chromosomes (one from each parent) were used as controls, when one of the parents was affected, that person's spouse provided the control chromosomes. The recruitment of trios allowed the precise determination of haplotypes.

### Example 2

### Genome Wide Association

[0260] Genotyping was performed using Perlegen's ultra-high-throughput platform. Loci of interest were amplified and hybridized to wafers containing arrays of oligonucleotides. Allele discrimination was performed through allele-specific hybridization. In total, 80,654 SNPs, with a variable density adjusted to the extent of local LD, were genotyped on the 500 trios for a total of 97,994,610 genotypes. This set of markers constitutes the QLDM (Quebec LD Map), a map created specifically for the Quebec founder population. Briefly, it possesses a base density of one marker per 40 kb and up to one marker per 10 kb in low-LD regions, the lower the LD is in a given area, the higher the marker density will be. The markers were selected from various databases including the ˜1.6 million SNP database of Perlegen Life Sciences (Patil, 2001), the hapmap consortium database and dbSNP at NCBI. The SNPs were chosen to maximize uniformity of genetic coverage and as much as possible, with a minor allele frequency of 10% or higher. All SNPs that did not pass the quality controls for the assay, that had a high rate of Mendelian error (cut-off at 1% Mendelian error rate), that deviated from the Hardy-Weinberg equilibrium (calculated with control chromosomes only), that had too many missing data (cut-off at 5% missing values or higher), or that were not sufficiently polymorphic in the Quebec founder population (cut-off at 10% MAF or below) were removed from the analysis. Genetic analysis was performed on a total of 61,171 SNPs (58,461 autosomal, 2660 X chromosome 18 Y chromosome and 32 SNPs from the X-Y pseudoautosomal region).

[0261] The genotyping information was entered into a Unified Genotype Database (a proprietary database under development) from which it was accessed using custom-built programs for export to the genetic analysis pipeline via a custom-built system known as GeneSys. GeneSys is a proprietary system that was built to automate data analysis. It significantly speeds up the data analysis by automating most of the statistical genetics processes and serves as a warehouse for storage of the large amount of information collected. Analyses of these genotypes were performed with the statistical tools described in Example 3. The GWS permitted the identification of 80 candidate regions that are further analyzed by the Fine Mapping approach described below.

### Example 3

### Genetic Analysis

[0262] 1. Dataset Quality Assessment

[0263] Prior to performing any analysis, the dataset from the GWS was verified for completeness of the trios. The program GGFileMod removed any trios with abnormal structure or missing individuals (e.g. trios without a proband, duos, singletons, etc.), and calculated the total number of complete trios in the dataset. The trios were also tested to make sure that no subjects within the cohort were related more closely than second cousins (6 meiotic steps).

[0264] Subsequently, the program DataCheck2.1 was used to calculate the following statistics per marker and per family:
[0265] Minor allele frequency (MAF) for each marker;
[0266] Missing values for each marker and family;
[0267] Hardy Weinberg Equilibrium for each marker; and
[0268] Mendelian segregation error rate.

[0269] The following acceptance criteria were applied for internal analysis purposes:

[0270] MAF>10%; Missing values<5%; Observed non-Mendelian segregation<1%; and Allele frequencies for controls in Hardy Weinberg Equilibrium.

[0271] Analyses of variance were performed using the algorithm GenAnova, to assess whether families or markers had the greater effect on missing values and non-Mendelian segregation. This was used to determine the smallest number of data points to remove from the dataset to meet the requirements for missing values and non-Mendelian segregation. Markers or families not meeting the criteria were removed from the dataset in the following step. The families and/or markers were removed from the dataset using the program DataPull, which generates an output file that is used for subsequent analysis of the genotype data.

[0272] 2. Phase Determination

[0273] The Program PhaseFinderSNP2.0 was used to determine phase from trio data on a marker-by-marker, trio-by-trio basis. The output file contains haplotype data for all trio members, containing ambiguities where all trio members are heterozygous or where data is missing. The program FileWriterTemp was then used to determine case and control haplotypes and to prepare the data in the proper input format for the next stage of analysis, using the expectation maximization algorithm, PL-EM, to call phase on the remaining ambiguities. This stage consists of several modules for resolution of the remaining phase ambiguities. PLEMInOut1 was first used to recode the haplotypes for input into the PL-EM algorithm in 15-marker blocks. The haplotype information was encoded as genotypes, allowing for the entry of known phase into the algorithm, which limits the possible number of estimated haplotypes. The PL-EM algorithm was used to estimate haplotypes from the “genotype” data in 15-marker windows, advancing in increments of one marker across the chromosome. The results were then converted into multiple 15-marker haplotype files using the program PLEMInOut2. Subsequently PLEMBlockGroup was used to convert the individual 15-marker block files into one continuous block of haplotypes for the entire chromosome, and to generate files for further analysis by LDSTATS, Hapfreq and HapColor. PLEMBlockGroup takes the consensus estimation of the allele call at each marker over all separate estimations (most markers are estimated 15 different times as the 15 marker blocks pass over their position).

[0274] 3. Haplotype Association Analysis

[0275] Haplotype association analysis was performed using the program LDSTATS. LDSTATS tests for association of haplotypes with the disease phenotype. The algorithms LDSTATS (v2.0) and LDSTATS (v4.0) define haplotypes using multi-marker windows that advance across the marker map in one-marker increments. Windows can contain any odd number of markers specified as a parameter of the algorithm. Other marker windows can also be used. At each position the frequency of haplotypes in cases and controls was calculated and a chi-square statistic was calculated from case control frequency tables. For LDSTATS v2.0, the significance of the chi-square for single marker and 3-marker windows was calculated as Pearson's chi-square with degrees of freedom. Larger windows of multi-allelic haplotype association were tested using Smith's normalization of the square root of Pearson's Chi-square. In addition, LDSTATS v2.0 calculates Chi-square values for the transmission disequilibrium test (TDT) for single markers in situations where the trios consisted of parents and an affected child.

[0276] LDSTATS v4.0 calculates significance of chi-square values using a permutation test in which case-control status is randomly permuted until 350 permuted chi-square values are observed that are greater than or equal to chi-square value of the actual data. The P value is then calculated as 350/the number of permutations required.

[0277] Table 2 lists the results for association analysis using LDSTATs (v2.0 and v4.0) for the candidate regions described above based on the genome wide scan genotype data. For each region that was associated with Psoriasis disease in the genome wide scan, we report in Table 3 the allele frequencies and the relative risk (RR) for the haplotypes contributing to the best signal at each SNP in the region. The best signal at a given location was determined by comparing the significance (p-value) of the association with Psoriasis disease for window sizes of 1, 3, 5, 7, and 9 SNPs, and selecting the most significant window. For a given window size at a given location, the association with Psoriasis disease was evaluated by comparing the overall distribution of haplotypes in the cases with the overall distribution of haplotypes in the controls. Haplotypes with a relative risk greater than one increase the risk of developing Psoriasis disease while haplotypes with a relative risk less than one are protective and decrease the risk.

[0278] 5. Conditional Haplotype Analyses

[0279] Conditional haplotype analyses were performed on subsets of the original set of 500 cases and 500 controls using the program LDSTATS (v2.0). The selection of a subset of cases and their matched controls was based on the carrier status of cases at a gene or locus of interest. We selected seven loci based on our association findings using LDSTAT (v2.0) with 500 trios (see below). The first conditional analysis was performed using a locus in region 32 on chromosome 4. The most significant association was obtained in the gene PDGFC with a SNPs corresponding to SEQ IDs 33380. Allele T was the risk allele. We partitioned the cases into two groups; the first group consisting of those cases that were carrier of the risk allele and the second group consisting of the remaining cases, the non-carriers. The resulting sample sizes were respectively 271 and 206. LDSTAT (v2.0) was run in each group and regions showing association with Psoriasis are reported in Table 4. Ten regions (143, 272, 315, 374, 389, 484, 490, 534, 609, 691) were associated with Psoriasis in the group of carriers (has_{—}32_caserisk), indicating the presence of an epistatic interaction between risk factors in that region and risk factors in region 32 (Table 4). Ninety one regions (147, 149, 150, 161, 163, 165, 171, 172, 174, 177, 178, 180, 187, 188, 193, 199, 211, 214, 219, 220, 235, 236, 248, 257, 260, 265, 267, 277, 293, 301, 319, 325, 338, 347, 349, 351, 362, 370, 380, 396, 407, 418, 433, 444, 446, 449, 461, 468, 473, 478, 482, 497, 509, 512, 514, 530, 539, 548, 561, 566, 580, 595, 596, 599, 607, 608, 614, 621, 622, 623, 625, 628, 630, 631, 632, 634, 645, 649, 658, 660, 672, 673, 678, 679, 682, 683, 703, 716, 718, 724, 728) were associated with Psoriasis in the group of non-carriers (not_{—}32_caserisk), indicating the existence of risk factors acting independently of risk factors in region 32. We repeated the process of partitioning the cases into two groups using allele C, the protective allele. The resulting sample sizes were 397 and 80 for the group of carriers and non-carriers respectively. Thirty seven regions (152, 170, 179, 226, 229, 234, 245, 247, 249, 305, 321, 333, 340, 348, 378, 383, 424, 435, 438, 454, 455, 462, 475, 489, 529, 550, 569, 587, 598, 642, 650, 657, 667, 670, 681, 704, 715) were associated with Psoriasis in the group of carriers (has_{—}32_caseprotective), indicating the existence of risk factors acting independently of risk factors in region 32.

[0280] The second conditional analysis was performed using a locus in region 50 (PSORS1) on chromosome 6. The most significant association was obtained with a haplotype window of size 5 containing SNPs corresponding to SEQ IDs 31191, 31192, 31194, 31195 and 31199. A reduced haplotype diversity was observed and we selected a risk haplotype, CACCT, and a protective haplotype, TATCT, for conditional analyses. Using the risk haplotype, we partitioned the cases into two groups; the first group consisting of those cases that were carrier of the risk haplotype and the second group consisting of the remaining cases, the non-carriers. The resulting sample sizes were respectively 168 and 294. LDSTATS (v2.0) was run in each group and regions showing association with Psoriasis are reported in Table 4. Fourteen regions (146, 157, 312, 354, 355, 376, 406, 503, 504, 602, 603, 615, 685, 692) were associated with Psoriasis in the group of carriers (has_{—}50_caserisk), indicating the presence of an epistatic interaction between risk factors in those regions and risk factors in region 50 (Table 4). Two regions (278, 528) were associated with Psoriasis in the group of non-carriers (not_{—}50_caserisk), indicating the existence of risk factors acting independently of risk factors in region 50. Using the protective haplotype, we partitioned the cases into two groups; the first group consisting of those cases that were carrier of the protective haplotype and the second group consisting of the remaining cases, the non-carriers. The resulting sample sizes were respectively 110 and 352. LDSTATS (v2.0) was run in each group and regions showing association with Psoriasis are reported in Table 4. Three regions (289, 439, 451) were associated with Psoriasis in the group of carriers (has_{—}50_caseprotective), indicating the existence of risk factors acting independently of risk factors in region 50. Forty nine regions (153, 158, 197, 206, 212, 232, 255, 273, 275, 281, 287, 303, 309, 313, 322, 328, 335, 345, 352, 358, 382, 385, 397, 400, 405, 412, 417, 422, 431, 456, 480, 515, 521, 526, 541, 552, 559, 564, 568, 572, 577, 593, 624, 647, 664, 665, 688, 706, 711) were associated with Psoriasis in the group of non-carriers (not_{—}50_caseprotective), indicating the presence of an epistatic interaction between risk factors in those regions and risk factors in region 50 (Table 4). Due to the dominance effect of the risk haplotype, we also considered the protective haplotype while excluding heterozygotes involving the risk haplotype. The sample size for the carriers was 84 and for the non-carriers 378. LDSTATS (v2.0) was run in each group and regions showing association with Psoriasis are reported in Table 4. Twelve regions (176, 290, 291, 375, 441, 474, 553, 590, 597, 669, 684, 721) were associated with Psoriasis in the group of non-carriers (has_{—}50_caseprotective_not_risk), indicating the existence of risk factors acting independently of risk factors in region 50. One hundred and eighteen regions (142, 154, 159, 160, 162, 166, 173, 183, 191, 194, 195, 198, 203, 204, 207, 209, 213, 217, 222, 228, 231, 239, 242, 251, 253, 256, 261, 264, 268, 269, 274, 276, 282, 288, 304, 310, 316, 323, 324, 329, 336, 346, 353, 357, 359, 379, 384, 386, 387, 388, 391, 395, 398, 401, 402, 403, 404, 409, 413, 423, 432, 440, 450, 453, 457, 466, 471, 476, 479, 481, 483, 485, 492, 494, 496, 500, 510, 516, 519, 520, 527, 538, 542, 545, 560, 562, 563, 567, 573, 576, 585, 589, 592, 594, 604, 611, 613, 618, 619, 620, 626, 635, 648, 661, 662, 663, 666, 668, 675, 680, 689, 698, 702, 705, 707, 712, 720, 725) were associated with Psoriasis in the group of non-carriers (not_{—}50_caseprotective_not_risk), indicating the presence of an epistatic interaction between risk factors in these regions and risk factors in region 50 (Table 4).

[0281] The third conditional analysis was performed using a locus in region 78 on chromosome 10. The most significant association was obtained with a SNPs corresponding to SEQ IDs 34384. Allele G was the risk allele. We partitioned the cases into two groups; the first group consisting of those cases that were carrier of the risk allele and the second group consisting of the remaining cases, the non-carriers. The resulting sample sizes were respectively 284 and 192. LDSTAT (v2.0) was run in each group and regions showing association with Psoriasis are reported in Table 4. Nine regions (190, 252, 298, 445, 448, 467, 488, 629, 671) were associated with Psoriasis in the group of carriers (has_{—}78_caserisk) indicating the presence of an epistatic interaction between risk factors in those regions and risk factors in region 78 (Table 4). We repeated the process of partitioning the cases into two groups using allele C, the protective allele. The resulting sample sizes were 402 and 74 for the group of carriers and non-carriers respectively. One region (499) was associated with Psoriasis in the group of non-carriers (not_{—}78_caseprotective), indicating the presence of an epistatic interaction between risk factors in those regions and risk factors in region 78 (Table 4).

[0282] The fourth conditional analysis was performed using a locus in region 99 on chromosome 12. The most significant association was obtained in gene SCARB1 with a SNPs corresponding to SEQ IDs 34811. Allele A was the protective allele. We partitioned the cases into two groups; the first group consisting of those cases that were carrier of a protective haplotype and the second group consisting of the remaining cases, the non-carriers. The resulting sample sizes were respectively 195 and 278. LDSTAT (v2.0) was run in each group and regions showing association with Psoriasis are reported in Table 4. Eleven regions (306, 342, 373, 427, 487, 493, 544, 639, 651, 676, 690) were associated with Psoriasis in the group of carriers (has_{—}99_caseprotective), indicating the existence of risk factors acting independently of risk factors in region 99. Eleven regions (280, 294, 297, 308, 334, 360, 366, 540, 557, 686, 701) was associated with Psoriasis in the group of non-carriers (not_{—}99_protective), indicating the presence of an epistatic interaction between risk factors in that region and risk factors in region 99 (Table 4).

[0283] The fifth conditional analysis was performed using a locus in region 110 on chromosome 15. The most significant association was obtained in gene GABRG3 with a haplotype window of size 7 containing SNPs corresponding to SEQ IDs 35144, 35145, 32221, 35146, 35148, 35149 and 35150. A reduced haplotype diversity was observed and we selected a set of risk haplotypes for conditional analyses. The set consisted of haplotypes GCATCCG, ACATGTA and the haplotype GTGTCCG but only in homozygote form, GTGTCCG/GTGTCCG. We partitioned the cases into two groups; the first group consisting of those cases that were carrier of a risk haplotype and the second group consisting of the remaining cases, the non-carriers. The resulting sample sizes were respectively 129 and 353. LDSTAT (v2.0) was run in each group and regions showing association with Psoriasis are reported in Table 4. Twenty seven regions (144, 151, 164, 182, 205, 218, 221, 223, 230, 244, 258, 286, 369, 470, 502, 505, 518, 546, 549, 565, 574, 575, 578, 633, 656, 677, 708) were associated with Psoriasis in the group of carriers (has_{—}110_caserisk), indicating the presence of an epistatic interaction between risk factors in that region and risk factors in region 110 (Table 4). Twenty two regions (155, 175, 202, 227, 292, 295, 356, 410, 425, 465, 495, 506, 508, 532, 547, 554, 586, 601, 641, 643, 694, 709) was associated with Psoriasis in the group of non-carriers (not_{—}110_caserisk), indicating the existence of risk factors acting independently of risk factors in region 110.

[0284] The sixth conditional analysis was performed using a locus in region 125 on chromosome 20. The most significant association was obtained in gene TOP1 with a haplotype window of size 5 containing SNPs corresponding to SEQ IDs 32488, 35437, 35438, 35439 and 32490 (see Table below for conversion to the specific DNA alleles used). A reduced haplotype diversity was observed and we selected one risk and one protective haplotype for conditional analyses. The risk haplotype was CATTC and the protective haplotype was CGCCG. Using the risk haplotype, we partitioned the cases into two groups; the first group consisting of those cases that were carrier of the risk haplotype and the second group consisting of the remaining cases, the non-carriers. The resulting sample sizes were respectively 375 and 95. LDSTATS (v2.0) was run in each group and regions showing association with Psoriasis are reported in Table 4. Eleven regions (283, 332, 343, 365, 414, 428, 523, 535, 583, 591, 652) were associated with Psoriasis in the group of carriers (has_{—}125_caserisk) indicating the presence of an epistatic interaction between risk factors in those regions and risk factors in region 125 (Table 4). Thirty two regions (148, 167, 186, 200, 210, 215, 224, 250, 262, 263, 270, 296, 317, 318, 320, 337, 377, 399, 411, 419, 421, 436, 459, 531, 543, 581, 606, 627, 636, 659, 693, 713) were associated with Psoriasis in the group of non-carriers (not_{—}125_caserisk), indicating the existence of risk factors acting independently of risk factors in region 125. Because the protective haplotype appears to be dominant, we also considered separately individuals that were homozygote for the risk haplotype. We partitioned the cases into two groups. The resulting sample sizes were 166 and 304 for the group of homozygote carriers and for the remainder, respectively. Three regions (331, 371, 524) were associated with Psoriasis in the group of carriers (has_{—}125_caserisk_homozygote) indicating the presence of an epistatic interaction between risk factors in those regions and risk factors in region 125 (Table 4). Additionally, using the risk haplotype while excluding heterozygotes with the protective haplotype, we partitioned the cases into two groups. The resulting sample sizes were 243 and 227 for the group of carriers and non-carriers respectively. Twenty two regions (192, 238, 284, 307, 314, 330, 372, 393, 429, 477, 486, 491, 525, 536, 582, 612, 654, 674, 700, 717, 726, 727) were associated with Psoriasis in the group of carriers (has_{—}125_caserisk_not_protective), indicating the presence of an epistatic interaction between risk factors in those regions and risk factors in region 125 (Table 4). Three regions (184, 350, 517) were associated with Psoriasis in the group of non-carriers (not_{—}125_caserisk_not_protective), indicating the existence of risk factors acting independently of risk factors in region 125. We repeated the process of partitioning the cases into two groups using the protective haplotype. Due to the dominance effect of the risk haplotype, the first group consisted of those cases that were carrier of the protective haplotype but not the risk haplotype and the second group consisting of the remaining cases, the non-carriers. The resulting sample sizes were 72 and 398 for the group of carriers and non-carriers respectively. Eight regions (168, 185, 243, 420, 498, 501, 579, 637) were associated with Psoriasis in the group of non carriers (has_{—}125_caseprotective_not_risk) indicating the existence of risk factors acting independently of risk factors in region 125 (Table 4). Twenty regions (254, 285, 302, 311, 327, 344, 361, 367, 394, 415, 430, 537, 558, 571, 584, 610, 616, 653, 655, 697) were associated with Psoriasis in the group of non-carriers (not_{—}125_caseprotective_not_risk) indicating the presence of an epistatic interaction between risk factors in those regions and risk factors in region 125 (Table 4).

[0285] A seventh conditional analysis was performed using a locus in region 131 on chromosome 22. The most significant association was obtained in the gene IL2RB with a SNPs corresponding to SEQ IDs 32576. Allele G was the risk allele. We partitioned the cases into two groups; the first group consisting of those cases that were carrier of the risk allele and the second group consisting of the remaining cases, the non-carriers. The resulting sample sizes were respectively 442 and 23. LDSTATS (v2.0) was run in each group and regions showing association with Psoriasis are reported in Table 4. Twelve regions (196, 279, 326, 364, 392, 426, 522, 533, 556, 570, 687, 696) were associated with Psoriasis in the group of carriers (has_{—}131_caserisk), indicating the presence of an epistatic interaction between risk factors in those regions and risk factors in region 131 (Table 4). Two regions (408, 617) were associated with Psoriasis in the group of non-carriers (not_{—}131_caserisk), indicating the presence of risk factors acting independently of risk factors in region 131. We repeated the process of partitioning the cases into two groups using allele A, the protective allele. The resulting sample sizes were 192 and 273 for the group of carriers and non-carriers respectively. One region (363) was associated with Psoriasis in the group of carriers (has_{—}131_caseprotective), indicating the presence of risk factors acting independently of risk factors in region 131. Fifty seven regions (141, 145, 156, 169, 181, 189, 201, 208, 216, 225, 233, 237, 240, 241, 246, 259, 266, 271, 299, 300, 339, 341, 368, 381, 390, 416, 434, 437, 442, 443, 447, 452, 458, 460, 463, 464, 469, 472, 507, 511, 513, 551, 555, 588, 600, 605, 638, 640, 644, 646, 695, 699, 710, 714, 719, 722, 723) were associated with Psoriasis in the group of non-carriers (not_{—}131_caseprotective), indicating the presence of an epistatic interaction between risk factors in these regions and risk factors in region 131 (Table 4).

[0286] For each region that was associated with Psoriasis in the conditional analyses, we report in Table 5 the allele frequencies and the relative risk (RR) for the haplotypes contributing to the best signal centered at each SNP in the region. The best signal at a given location was determined by comparing the significance (p-value) of the association with Psoriasis for window sizes of 1, 3, 5, 7, and 9 SNPs, and selecting the most significant window. For a given window size at a given location, the association with Psoriasis was evaluated by comparing the overall distribution of haplotypes in the cases with the overall distribution of haplotypes in the controls. Haplotypes with a relative risk greater than one increase the risk of developing Psoriasis while haplotypes with a relative risk less than one are protective and decrease the risk.

[0287] In Table 8, we report the allele frequencies and the relative risk (RR) for the haplotypes contributing to the best signal centered at each SNP in the fine mapping regions for every conditional analysis described above, and Table 9 reports the allele frequencies and the relative risk (RR) for the haplotypes contributing to the best signal centered at each SNP in the regions reported in Table 8.

DNA alleles used in haplotypes (Region 32)

| SeqID | 33380 |
|---|---|
| Risk | |
| 1 | T |
| Protective | |
| 2 | C |

DNA alleles used in haplotypes (Region 50)

| SeqID | 31191 | 31192 | 31194 | 31195 | 31199 |
|---|---|---|---|---|---|
| Risk | | | | | |
| 12112 | C | A | C | C | T |
| Protective | | | | | |
| 22212 | T | A | T | C | T |

DNA alleles used in haplotypes (Region 78)

| SeqID | 34384 |
|---|---|
| Risk | |
| 2 | G |
| Protective | |
| 1 | C |

DNA alleles used in haplotypes (Region 99)

| SeqID | 34811 |
|---|---|
| Protective | |
| 1 | A |

DNA alleles used in haplotypes (Region 110)

| SeqID | 35144 | 35145 | 32221 | 35146 | 35148 | 35149 | 35150 |
|---|---|---|---|---|---|---|---|
| Risk | | | | | | | |
| 2221122 | G | C | A | T | C | C | G |
| 1221211 | A | C | A | T | G | T | A |
| Risk/ | | | | | | | |
| Homozygote | | | | | | | |
| form | | | | | | | |
| 2111122/ | G/G | T/T | G/G | T/T | C/C | C/C | G/G |
| 2111122 | | | | | | | |

DNA alleles used in haplotypes (Region 125)

| SeqID | 32488 | 35437 | 35438 | 35439 | 32490 |
|---|---|---|---|---|---|
| Risk | | | | | |
| 11111 | C | A | T | T | C |
| Protective | | | | | |
| 12222 | C | G | C | C | G |

DNA alleles used in haplotypes (Region 131)

| SeqID | 32576 |
|---|---|
| Risk | |
| 1 | G |
| Protective | |
| 2 | A |

[0288] 5. Singletype Analysis

[0289] The SINGLETYPE algorithm assesses the significance of case-control association for single markers using the genotype data from the laboratory as input in contrast to LDSTATS single marker window analyses, in which case-control alleles for single markers from estimated haplotypes in file, hapatctr.txt, as input. SINGLETYPE calculates P values for association for both alleles, 1 and 2, as well as for genotypes, 11, 12, and 22, and plots these as −log₁₀ P values for significance of association against marker position.

### Example 4

### Fine Mapping

[0290] The top regions identified as being associated with psoriasis by the GWS are further analyzed by fine mapping using a denser set of markers, in order to validate and/or refine the signal. The fine mapping is carried out using the Illumina BeadStation 500GX SNP genotyping platform. Alleles are genotyped using an allele-specific elongation assay that involves ligation to a locus-specific oligonucleotide. The assay is performed directly on genomic DNA at a highly multiplex level and the products are amplified using universal oligonucleotides. For each candidate region, a set of SNP markers was selected with an average inter-marker distance of 1-4 Kb distributed over about 400 Kb to 1 Mb and were roughly centered at the highest point of the GWS curves. The cohort used for the fine mapping consisted of 500 Psoriasis disease trios (as for the GWS). The algorithms used for genetic analyses were the same as used in the GWS and are described in Example 3. Table 6 lists the fine mapping SNPs for the confirmed regions and their respective p values using 500 trios and two analysis methods: LDSTATS (v2.0) and LDSTATS (v4.0). For each region that was associated with Psoriasis disease in the fine mapping analyses, we report in Table 7 the allele frequencies and the relative risk (RR) for the haplotypes contributing to the best signal at each SNP in the region. The best signal at a given location was determined by comparing the significance (p-value) of the association with Psoriasis disease for multiple window sizes, and selecting the most significant window. For a given window size at a given location, the association with Psoriasis disease was evaluated by comparing the overall distribution of haplotypes in the cases with the overall distribution of haplotypes in the controls. Haplotypes with a relative risk greater than one increase the risk of developing Psoriasis disease while haplotypes with a relative risk less than one are protective and decrease the risk.

### Example 5

### Gene Identification and Characterization

[0291] A series of gene characterization was performed for each candidate region described in Table 1. Any gene or EST mapping to the interval based on public map data or proprietary map data was considered as a candidate Psoriasis disease gene. The approach used to identify all genes located in the critical regions is described below.

[0292] Public Gene Mining

[0293] Once regions were identified using the analyses described above, a series of public data mining efforts were undertaken, with the aim of identifying all genes located within the critical intervals as well as their respective structural elements (i.e., promoters and other regulatory elements, UTRs, exons and splice sites). The initial analysis relied on annotation information stored in public databases (e.g. NCBI, UCSC Genome Bioinformatics, Entrez Human Genome Browser, OMIM—see below for database URL information). Tables 10-12 and 14 lists the genes that have been mapped to the candidate regions.

Database URLs

| Name | URL |
|---|---|
| Biocarta | http://www.biocarta.com/ |
| BioCyc | http://www.biocyc.org/ |
| Bimolecular Interaction Network | http://bind.ca/ |
| Database (BIND) | |
| Database of Interacting Proteins | http://dip.doe-mbi.ucla.edu/ |
| ECgene EST clustering | http://genome.ewha.ac.kr/ECgene/, also available at |
| | http://genome.ucsc.edu/index.html?org=Human |
| Gene Expression Omnibus | http://www.ncbi.nlm.nih.gov/geo/ |
| Human Genome Browser | http://www.ensembl.org/Homo_sapiens/ |
| Interdom | http://interdom.lit.org.sg/help/term.php |
| Kyoto Encyclopedia of Genes and | http://www.genome.jp/kegg/ |
| Genomes (KEGG) | |
| Molecular Interactions Database | http://mint.bio.uniroma2.it/mint/ |
| (MINT) | |
| National Center for Biotechnology | http://www.ncbi.nlm.nih.gov/ |
| Information (NCBI) | |
| Online Mendelian Inheritance in | http://www.ncbi.nlm.nih.gov/entrez/query.fcgi?db=OMIM |
| Man (OMIM) | |
| OmniViz | http://www.omniviz.com/applications/omni_viz.htm |
| Pathway Enterprise | http://www.omniviz.com/applications/pathways.htm |
| Reactome | http://www.reactome.org/ |
| Transpath | http://www.biobase.de/pages/products/transpath.html |
| UCSC Genome Bioinformatics | http://genome.ucsc.edu/index.html?org=Human |
| UniGene | http://www.ncbi.nlm.nih.gov/entrez/query.fcgi?db=unigene |

[0294] For some genes the available public annotation was extensive, whereas for others very little was known about a gene's function. A more detailed analysis was therefore performed to characterize genes that corresponded to this latter class. Importantly, the presence of rare splice variants and artifactual ESTs was carefully evaluated. The public data derived from the EST clustering software ECgene (Kim et al., 2005) were also examined for additional gene models. This tool combines genome-based EST clustering and transcript assembly to generate a group of alternatively spliced consensi. This analysis of novel ESTs provided an indication of additional gene content in some regions. The resulting clusters were graphically displayed against the genomic sequence, providing indications of separate clusters that may contribute to the same gene, thereby facilitating development of confirmatory experiments in the laboratory.

[0295] A unique consensus sequence was constructed for each splice variant and a trained reviewer assessed each alignment. This assessment included examination of all putative splice junctions for consensus splice donor/acceptor sequences, putative start codons, consensus Kozak sequences and upstream in-frame stops, and the location of polyadenylation signals. In addition, conserved noncoding sequences (CNSs) that could potentially be involved in regulatory functions were included as important information for each gene. The genomic reference and exon sequences were then archived for future reference. A master assembly that included all splice variants, exons and the genomic structure was used in subsequent analyses (i.e., analysis of polymorphisms).

[0296] An important component of these efforts was the ability to visualize and store the results of the data mining efforts. A customized version of the highly versatile genome browser GBrowse (http://www.gmod.org/) was implemented in order to permit the visualization of several types of information against the corresponding genomic sequence. In addition, the results of the statistical analyses were plotted against the genomic interval, thereby greatly facilitating focused analysis of gene content.

[0297] 2. Computational Analysis of Genes and GeneMaps

[0298] In order to assist in the prioritization of candidate genes for which minimal annotation existed, a series of computational analyses were performed that included basic BLAST searches and alignments to identify related genes. In some cases this provided an indication of potential function. In addition, protein domains and motifs were identified that further assisted in the understanding of potential function, as well as predicted cellular localization.

[0299] A comprehensive review of the public literature was also performed in order to facilitate identification of information regarding the potential role of candidate genes in the pathophysiology of psoriasis. In addition to the standard review of the literature, public resources (Medline and other online databases) were also mined for information regarding the involvement of candidate genes in specific signaling pathways. A variety of pathway and yeast two hybrid databases were mined for information regarding protein-protein interactions.

[0300] These included BIND, MINT, DIP, Interdom, and Reactome, among others. By identifying homologues of genes in the psoriasis candidate regions and exploring whether interacting proteins had been identified already, knowledge regarding the GeneMaps for psoriasis was advanced. The pathway information gained from the use of these resources was also integrated with the literature review efforts, as described above.

[0301] 3. Expression Studies

[0302] In order to determine the expression patterns for genes, relevant information was first extracted from public databases. The UniGene database, for example, contains information regarding the tissue source for ESTs and cDNAs contributing to individual clusters. This information was extracted and summarized to provide an indication in which tissues the gene was expressed. Particular emphasis was placed on annotating the tissue source for bona fide ESTs, since many ESTs mapped to Unigene clusters are artifactual. In addition, SAGE and microarray data, also curated at NCBI (Gene Expression Omnibus), provided information on expression profiles for individual genes. Particular emphasis was placed on identifying genes that were expressed in tissues known to be involved in the pathophysiology of psoriasis disorder.

[0303] Total human RNA samples from 24 different tissues as well as one Quantitative PCR (QPCR) Reference Total RNA sample were purchased from commercial sources (Clontech, Stratagene) and used as templates for first-strand cDNA synthesis with the High-Capacity cDNA Archive kit (Applied Biosystems) according to the manufacturer's instructions. A standard PCR protocol was used to amplify genes of interest from the original sample (50 ng cDNA); three serial dilutions of the cDNA samples corresponding to 5, 0.5 and 0.05 ng of cDNA were also tested. PCR products were separated by electrophoresis on a 96-well agarose gel containing ethidium bromide followed by UV imaging. The serial dilutions of the cDNA provided semi-quantitative determination of relative mRNA abundance. Tissue expression profiles were analyzed using standard gel imaging software (AlphaImager 2200); mRNA abundance was interpreted according to the presence of a PCR product in one or more of the cDNA sample dilutions used for amplification. For example, a PCR product present in all the cDNA dilutions (i.e. from 50 to 0.05 ng cDNA) was designated ++++ while a PCR product only detectable in the original undiluted cDNA sample (i.e., 50 ng cDNA) was designated as + (see Table 14). For each target gene, one or more gene-specific primer pairs were designed to span at least one intron when possible. Multiple primer-pairs targeting the same gene allowed comparison of the tissue expression profiles and controlled for cases of poor amplification.

[0304] 4. Polymorphism Analysis

[0305] Polymorphisms identified in candidate genes, including those from the public domain as well as those identified by sequencing candidate genes and regions, are evaluated for potential function. Initially, polymorphisms are examined for potential impact upon encoded proteins. If the protein is a member of a gene family with reported 3-dimensional structural information, this information is used to predict the location of the polymorphism with respect to protein structure. This information provided insight into the potential role of polymorphisms in altering protein or ligand interactions, as well as suitability as a drug target. In a second phase of analysis we evaluate the potential role of polymorphisms in other biological phenomena, including regulation of transcription, splicing and mRNA stability, etc. There are many examples of the functional involvement of naturally occurring polymorphisms in these processes. As part of this analysis, polymorphisms located in promoter or other regulatory elements, canonical splice sites, exonic and intronic splice enhancers and repressors, conserved noncoding sequences and UTRs are localized.

### Example 6

### SNP and Polymorphisms Discovery (SNPD)

[0306] Candidate genes and regions were selected for sequencing in order to identify all polymorphisms. In cases where the critical interval, identified by fine mapping, was relatively small (˜50 kb), the entire region, including all introns, was sequenced to identify polymorphisms. In situations where the region is large (>50 kb), candidate genes were prioritized for sequencing, and/or only functional gene elements (promoters, exons and splice sites) were sequenced (see Table 13 for the SNPD of the invention).

[0307] The samples to be sequenced were selected according to which haplotypes contribute to the association signal observed in the region. The purpose is to select a set of samples that covered all the major haplotypes in the given region. Each major haplotype must be present in a few copies. The first step therefore consisted of determining the major haplotypes in the region to be sequenced.

[0308] Once a region was defined with the two boundary markers, all the markers used in fine mapping that are located within the region were used to determine the major haplotypes. Long haplotypes covering the whole region were thus inferred using the middle marker as an anchor. The results included two series of haplotype themes that define the major haplotypes, comparing the cases and the controls. This exercise was repeated using an anchor in the peripheral regions to ensure that major haplotype subsets that were not anchored at the original middle marker were not missed.

[0309] Once the major haplotypes were determined as described above, appropriate genomic DNA samples are selected such that each major haplotype and haplotype subset were represented in at least two to four copies.

[0310] The protocol includes the following steps, once a region is delimited:

[0311] 1. Primer Design

[0312] The design of the primers is performed using a proprietary primer design tool. A primer quality control is included in the primer design process. Primers that successfully passed the control quality process were synthesized by Integrated DNA Technologies (IDT). The sense and anti-sense oligos are separated such that the sense oligos are placed on one plate in the same position as their anti-sense counterparts are on another plate. Two additional plates are created from each storage plate, one for use in PCR and the other for sequencing. For PCR, the sense and anti-sense oligos of the same pair are combined in the same well to achieve a final concentration of 1.5 μM for each oligonucleotide.

[0313] 2. PCR Optimization

[0314] PCR conditions are optimized by testing a variety of conditions that included varying salt concentrations and temperatures, as well as including various additives. PCR products are checked for robust amplification and minimal background by agarose gel electrophoresis.

[0315] 3. PCR on Selected Samples

[0316] PCR products to be used for sequencing are amplified using the conditions chosen during optimisation. The PCR products are purified free of salts, dNTPs and unincorporated primers by use of a MultiScreen PCR384 filter plate manufactured by Millipore. Following PCR, the amplicons are quantified by use of a lambda/Hind III standard curve. This is done to ensure that the quantity of PCR product required for sequencing had been generated. The raw data was measured against the standard curve data in Excel by use of a macro.

[0317] 4. Sequencing

[0318] Sequencing of PCR products is performed by DNA Landmarks using ABI 3730 capillary sequencing instruments.

[0319] 5. Sequence Analysis

[0320] The ABI Prism SeqScape software (Applied Biosystems) is used for SNP identification. The chromatogram trace files were imported into a SeqScape sequencing project and the base calling is automatically performed. Sequences are then aligned and compared to each other using the SeqScape program. The base calling is checked manually, base by base; editing was performed if needed.

### Example 7

### Ultra Fine Mapping (UFM)

[0321] Once polymorphisms are identified by sequencing efforts as described in Example 6, additional genotyping of all newly found polymorphisms is performed on the 500 PPC trios used in the fine mapping studies. Various types of genotyping assays may need to be utilized based on the type of polymorphism identified (i.e., SNP, indel, microsatellite). The assay type can be, but is not restricted to, Sentrix Assay Matrix on Illumina BeadStations, microsatellite on MegaBACE, SNP on ABI or Orchid. The frequencies of genotypes and haplotypes in cases and controls are analyzed in a similar manner as the GWS and fine mapping data. By examining all SNPs in a region, polymorphisms are identified that increase an individual's susceptibility to psoriasis. The goal of ultra-fine mapping is to identify the polymorphism that is most associated with disease phenotype as part of the search for the actual DNA polymorphism that confers susceptibility to disease. This statistical identification may need to be corroborated by functional studies.

### Example 8

### Confirmation of Candidate Regions and Genes in a General Population

[0322] The confirmation of any putative associations described in Example 7 is performed in an independent general population patient sample. These DNA samples consist of at least 400 trios or 750 patients with psoriasis and at least 750 controls.

[0323] All publications, patents and patent applications mentioned in the specification and reference list are herein incorporated by reference in their entirety for all purposes. Various modifications and variations of the described method and system of the invention will be apparent to those skilled in the art without departing from the scope and spirit of the invention. Although the invention has been described in connection with specific preferred embodiments, it should be understood that the invention as claimed should not be unduly limited to such specific embodiments. Indeed, various modifications of the described modes for carrying out the invention that are obvious to those skilled in molecular biology, genetics, or related fields are intended to be within the scope of the following claims.

[0324] The practice of the present invention will employ, unless otherwise indicated, conventional techniques of cell biology, cell culture, molecular biology, transgenic biology, microbiology, recombinant DNA, and immunology, which are within the skill of the art. Such techniques are explained fully in the literature. See, for example, Molecular CloningA LaboratoryManual, 2nd Ed., ed. by Sambrook, Fritsch and Maniatis (Cold Spring Harbor Laboratory Press: 1989); DNA Cloning, Volumes I and H (D. N. Glover ed., 4); Oligonucleotide Synthesis (M. J. Gait ed., 1984); Mullis et al. U.S. Pat. No. 4,683,195; Nucleic Acid Hybridization (B. D. Hames & S. J. Higgins eds. 1984); Transcription And Translation (B. D. Haines & S. J. Higgins eds. 1984); Culture OfAnimal Cells (R. I. Freshney, Alan R. Liss, Inc., 1987); Immobilized Cells And Enzymes (IRL Press, 1986); B. Perbal, A Practical Guide To Molecular Cloning (1984); the treatise, Methods In Enzymology (Academic Press, Inc., N.Y.); Gene Transfer Vectors For Mammalian Cells (J. H. Miller and M. P. Calos eds., 1987, Cold Spring Harbor Laboratory); Methods In Enzymology, Vols. 154 and 155 (Wu et al. eds.), Immunochemical Methods In Cell And Molecular Biology (Mayer and Walker, eds., Academic Press, London, 1987); Handbook Of Experimental Immunology, Volumes I-IV (D. M. Weir and C. C. Blackwell, eds., 1986); Manipulating the Mouse Embryo, (Cold Spring Harbor Laboratory Press, Cold Spring Harbor, N.Y., 1986).

### REFERENCES

[0325] 1 Abbas, A. K., Lichtman, A. H. and Pober, J. S. (1994). Cellular and Molecular Immunology. Philadelphia, W B Saunders.
[0326] 2 Abe, T., Oue, N., Yasui, W. and Ryoji, M. (2003). “Rapid and Preferential Induction of Atf3 Transcription in Response to Low Doses of Uva Light.” Biochem Biophys Res Commun 310(4): 1168-74.
[0327] 3 Ackermann, L., Harvima, I. T., Pelkonen, J., Ritamaki-Salo, V., Naukkarinen, A., Harvima, R. J. and Horsmanheimo, M. (1999). “Mast Cells in Psoriatic Skin Are Strongly Positive for Interferon-Gamma.” Br J Dermatol 140(4): 624-33.
[0328] 4 Allegra, M., Gagnoux-Palacios, L., Gache, Y., Rogues, S., Lestringant, G., Ortonne, J. P. and Meneguzzi, G. (2003). “Rapid Decay of Alpha6 Integrin Caused by a Mis-Sense Mutation in the Propeller Domain Results in Severe Junctional Epidermolysis Bullosa with Pyloric Atresia.” J Invest Dermatol 121(6): 1336-43.
[0329] 5 Alwine, J. C., Kemp, D. J. and Stark, G. R. (1977). “Method for Detection of Specific Rnas in Agarose Gels by Transfer to Diazobenzyloxymethyl-Paper and Hybridization with DNA Probes.” Proc Natl Acad Sci USA 74(12): 5350-4.
[0330] 6 Alwine, J. C., Reed, S. I. and Stark, G. R. (1977). “Characterization of the Autoregulation of Simian Virus 40 Gene A.” J Virol 24(1): 22-7.
[0331] 7 Anderson, K. E., Coadwell, J., Stephens, L. R. and Hawkins, P. T. (1998). “Translocation of Pdk-1 to the Plasma Membrane Is Important in Allowing Pdk-1 to Activate Protein Kinase B.” Curr Biol 8(12): 684-91.
[0332] 8 Anderson, W. F. (1992). “Human Gene Therapy.” Science 256(5058): 808-13.
[0333] 9 Anton, I. M., de la Fuente, M. A., Sims, T. N., Freeman, S., Ramesh, N., Hartwig, J. H., Dustin, M. L. and Geha, R. S. (2002). “Wip Deficiency Reveals a Differential Role for Wip and the Actin Cytoskeleton in T and B Cell Activation.” Immunity 16(2): 193-204.
[0334] 10 Athar, M., Kim, A. L., Ahmad, N., Mukhtar, H., Gautier, J. and Bickers, D. R. (2000). “Mechanism of Ultraviolet B-Induced Cell Cycle Arrest in G2/M Phase in Immortalized Skin Keratinocytes with Defective P53.” Biochem Biophys Res Commun 277(1): 107-11.
[0335] 11 Austen, B. M. and Westwood, O. M. R. (1991). Protein Targeting and Secretion. New York, Oxford University Press.
[0336] 12 Barany, F. (1991). “Genetic Disease Detection and DNA Amplification Using Cloned Thermostable Ligase.” Proc Natl Acad Sci USA 88(1): 189-93.
[0337] 13 Barre, F. X., Ait-Si-Ali, S., Giovannangeli, C., Luis, R., Robin, P., Pritchard, L. L., Helene, C. and Harel-Bellan, A. (2000). “Unambiguous Demonstration of Triple-Helix-Directed Gene Modification.” Proc Natl Acad Sci USA 97(7): 3084-8.
[0338] 14 Bartholin, L., Maguer-Satta, V., Hayette, S., Martel, S., Gadoux, M., Corbo, L., Magaud, J. P. and Rimokh, R. (2002). “Transcription Activation of Flrg and Follistatin by Activin a, through Smad Proteins, Participates in a Negative Feedback Loop to Modulate Activin a Function.” Oncogene 21(14): 2227-35.
[0339] 15 Bishop, M. J., Ed. (1998). Guide to Human Genome Computing. Toronto, Academic Press.
[0340] 16 Bivona, T. G., Perez De Castro, I., Ahearn, I. M., Grana, T. M., Chiu, V. K., Lockyer, P. J., Cullen, P. J., Pellicer, A., Cox, A. D. and Philips, M. R. (2003). “Phospholipase Cgamma Activates Ras on the Golgi Apparatus by Means of Rasgrp1.” Nature 424(6949): 694-8. Epub 2003 Jun. 29.
[0341] 17 Bivona, T. G. and Philips, M. R. (2003). “Ras Pathway Signaling on Endomembranes.” Curr Opin Cell Biol 15(2): 136-42.
[0342] 18 Bjerke, J. R., Tigalonova, M., Jensen, T. S. and Matre, R. (1994). “Fc Gamma-Receptors in Skin and Serum from Patients with Psoriasis, before and after Therapy.” Acta Derm Venereol Suppl 186: 141-2.
[0343] 19 Blobe, G. C., Schiemann, W. P. and Lodish, H. F. (2000). “Role of Transforming Growth Factor Beta in Human Disease.” N Engl J Med 342(18): 1350-8.
[0344] 20 Bourgeois, S. and Labuda, D. (2004). “Dynamic Allele-Specific Oligonucleotide Hybridization on Solid Support.” Anal Biochem 324(2): 309-11.
[0345] 21 Bourguignon, L. Y., Singleton, P. A. and Diedrich, F. (2004). “Hyaluronan-Cd44 Interaction with Rac1-Dependent Protein Kinase N-Gamma Promotes Phospholipase Cgamma1 Activation, Ca(2+) Signaling, and Cortactin-Cytoskeleton Function Leading to Keratinocyte Adhesion and Differentiation.” J Biol Chem 279(28): 29654-69.
[0346] 22 Bower, K. E., Zeller, R. W., Wachsman, W., Martinez, T. and McGuire, K. L. (2002). “Correlation of Transcriptional Repression by P21(Snft) with Changes in DNA.Nf-at Complex Interactions.” J Biol Chem 277(38): 34967-77. Epub 2002 Jun. 26.
[0347] 23 Boyle, J. M., Grzeschik, K. H., Heath, P. R., Morten, J. E. and Stern, P. L. (1990). “Trophoblast Glycoprotein Recognised by Monoclonal Antibody 5t4 Maps to Human Chromosome 6q14-Q15.” Hum Genet 84(5): 455-8.
[0348] 24 Browning, J. L., Dougas, I., Ngam-ek, A., Bourdon, P. R., Ehrenfels, B. N., Miatkowski, K., Zafari, M., Yampaglia, A. M., Lawton, P., Meier, W. and et al. (1995). “Characterization of Surface Lymphotoxin Forms. Use of Specific Monoclonal Antibodies and Soluble Receptors.” J Immunol 154(1): 33-46.
[0349] 25 Cale, J. M., Shaw, C. E. and Bird, I. M. (1998). “Optimization of a Reverse Transcription-Polymerase Chain Reaction (Rt-Pcr) Mass Assay for Low-Abundance Mrna.” Methods Mol Biol 105: 351-71.
[0350] 26 Campbell, J. S., Hughes, S. D., Gilbertson, D. G., Palmer, T. E., Holdren, M. S., Haran, A. C., Odell, M. M., Bauer, R. L., Ren, H. P., Haugen, H. S., Yeh, M. M. and Fausto, N. (2005). “Platelet-Derived Growth Factor C Induces Liver Fibrosis, Steatosis, and Hepatocellular Carcinoma.” Proc Natl Acad Sci USA 102(9): 3389-94. Epub 2005 Feb. 22.
[0351] 27 Canessa, M. (1994). “Erythrocyte Sodium-Lithium Countertransport: Another Link between Essential Hypertension and Diabetes.” Curr Opin Nephrol Hypertens 3(5): 511-7.
[0352] 28 Capon, F., Allen, M. H., Ameen, M., Burden, A. D., Tillman, D., Barker, J. N. and Trembath, R. C. (2004). “A Synonymous Snp of the Corneodesmosin Gene Leads to Increased Mrna Stability and Demonstrates Association with Psoriasis across Diverse Ethnic Groups.” Hum Mol Genet 13(20): 2361-8. Epub 2004 Aug. 27.
[0353] 29 Caponi, L., Petit-Teixeira, E., Sebbag, M., Bongiorni, F., Moscato, S., Pratesi, F., Pierlot, C., Osorio, J., Chapuy-Regaud, S., Guerrin, M., Cornelis, F., Serre, G. and Migliorini, P. (2005). “A Family Based Study Shows No Association between Rheumatoid Arthritis and the Padi4 Gene in a White French Population.” Ann Rheum Dis 64(4): 587-93. Epub 2004 Oct. 14.
[0354] 30 Cataisson, C., Joseloff, E., Murillas, R., Wang, A., Atwell, C., Torgerson, S., Gerdes, M., Subleski, J., Gao, J. L., Murphy, P. M., Wiltrout, R. H., Vinson, C. and Yuspa, S. H. (2003). “Activation of Cutaneous Protein Kinase C Alpha Induces Keratinocyte Apoptosis and Intraepidermal Inflammation by Independent Signaling Pathways.” J Immunol 171(5): 2703-13.
[0355] 31 Chen, X., Levine, L. and Kwok, P. Y. (1999). “Fluorescence Polarization in Homogeneous Nucleic Acid Analysis.” Genome Res 9(5): 492-8.
[0356] 32 Chien, C. T., Bartel, P. L., Sternglanz, R. and Fields, S. (1991). “The Two-Hybrid System: A Method to Identify and Clone Genes for Proteins That Interact with a Protein of Interest.” Proc Natl Acad Sci USA 88(21): 9578-82.
[0357] 33 Clough, R. L., Sud, R., Davis-Silberman, N., Hertzano, R., Avraham, K. B., Holley, M. and Dawson, S. J. (2004). “Brn-3c (Pou4f3) Regulates Bdnf and Nt-3 Promoter Activity.” Biochem Biophys Res Commun 324(1): 372-81.
[0358] 34 Cohen, A. S., Smisek, D. L. and Wang, B. H. (1996). “Emerging Technologies for Sequencing Antisense Oligonucleotides: Capillary Electrophoresis and Mass Spectrometry.” Adv Chromatogr 36: 127-62.
[0359] 35 Cotton, R. G., Rodrigues, N. R. and Campbell, R. D. (1988). “Reactivity of Cytosine and Thymine in Single-Base-Pair Mismatches with Hydroxylamine and Osmium Tetroxide and Its Application to the Study of Mutations.” Proc Natl Acad Sci USA 85(12): 4397-401.
[0360] 36 Cowell, I. G. and Austin, C. A., Eds. (1997). Cdna Library Protocols. Methods in Molecular Biology. Totowa, N.J., Humana Press.
[0361] 37 Cronin, M. T., Fucini, R. V., Kim, S. M., Masino, R. S., Wespi, R. M. and Miyada, C. G. (1996). “Cystic Fibrosis Mutation Detection by Hybridization to Light-Generated DNA Probe Arrays.” Hum Mutat 7(3): 244-55.
[0362] 38 Dalbeth, N., Gundle, R., Davies, R. J., Lee, Y. C., McMichael, A. J. and Callan, M. F. (2004). “Cd56bright Nk Cells Are Enriched at Inflammatory Sites and Can Engage with Monocytes in a Reciprocal Program of Activation.” J Immunol 173(10): 6418-26.
[0363] 39 Dean, F. B., Hosono, S., Fang, L., Wu, X., Faruqi, A. F., Bray-Ward, P., Sun, Z., Zong, Q., Du, Y., Du, J., Driscoll, M., Song, W., Kingsmore, S. F., Egholm, M. and Lasken, R. S. (2002). “Comprehensive Human Genome Amplification Using Multiple Displacement Amplification.” Proc Natl Acad Sci USA 99(8): 5261-6.
[0364] 40 Denda, M., Inoue, K., Inomata, S. and Denda, S. (2002). “Gamma-Aminobutyric Acid (a) Receptor Agonists Accelerate Cutaneous Barrier Recovery and Prevent Epidermal Hyperplasia Induced by Barrier Disruption.” J Invest Dermatol 119(5): 1041-7.
[0365] 41 Dienz, O., Moller, A., Strecker, A., Stephan, N., Krammer, P. H., Droge, W. and Schmitz, M. L. (2003). “Src Homology 2 Domain-Containing Leukocyte Phosphoprotein of 76 Kda and Phospholipase C Gamma 1 Are Required for Nf-Kappa B Activation and Lipid Raft Recruitment of Protein Kinase C Theta Induced by T Cell Costimulation.” J Immunol 170(1): 365-72.
[0366] 42 Dillon, N. (1993). “Regulating Gene Expression in Gene Therapy.” Trends Biotechnol 11(5): 167-73.
[0367] 43 Drechsler, Y., Chavan, S., Catalano, D., Mandrekar, P. and Szabo, G. (2002). “Fcgammar Cross-Linking Mediates Nf-Kappab Activation, Reduced Antigen Presentation Capacity, and Decreased Il-12 Production in Monocytes without Modulation of Myeloid Dendritic Cell Development.” J Leukoc Biol 72(4): 657-67.
[0368] 44 Drmanac, R., Drmanac, S., Chui, G., Diaz, R., Hou, A., Jin, H., Jin, P., Kwon, S., Lacy, S., Moeur, B., Shafto, J., Swanson, D., Ukrainczyk, T., Xu, C. and Little, D. (2002). “Sequencing by Hybridization (Sbh): Advantages, Achievements, and Opportunities.” Adv Biochem Eng Biotechnol 77: 75-101.
[0369] 45 Elez, R., Piiper, A., Giannini, C. D., Brendel, M. and Zeuzem, S. (2000). “Polo-Like Kinase1, a New Target for Antisense Tumor Therapy.” Biochem Biophys Res Commun 269(2): 352-6.
[0370] 46 Evans, B. E., Rittle, K. E., Bock, M. G., DiPardo, R. M., Freidinger, R. M., Whitter, W. L., Gould, N. P., Lundell, G. F., Homnick, C. F., Veber, D. F. and et al. (1987). “Design of Nonpeptidal Ligands for a Peptide Receptor: Cholecystokinin Antagonists.” J Med Chem 30(7): 1229-39.
[0371] 47 Fackler, O. T. and Peterlin, B. M. (2000). “Endocytic Entry of Hiv-1.” Curr Biol 10(16): 1005-8.
[0372] 48 Fakhrai-Rad, H., Zheng, J., Willis, T. D., Wong, K., Suyenaga, K, Moorhead, M., Eberle, J., Thorstenson, Y. R., Jones, T., Davis, R. W., Namsaraev, E. and Faham, M. (2004). “Snp Discovery in Pooled Samples with Mismatch Repair Detection.” Genome Res 14(7): 1404-12.
[0373] 49 Fields, S. and Song, O. (1989). “A Novel Genetic System to Detect Protein-Protein Interactions.” Nature 340(6230): 245-6.
[0374] 50 Fisher, G. J., Tavakkol, A., Leach, K., Burns, D., Basta, P., Loomis, C., Griffiths, C. E., Cooper, K. D., Reynolds, N. J., Elder, J. T. and et al. (1993). “Differential Expression of Protein Kinase C Isoenzymes in Normal and Psoriatic Adult Human Skin: Reduced Expression of Protein Kinase C-Beta Ii in Psoriasis.” J Invest Dermatol 101(4): 553-9.
[0375] 51 Frank-Kamenetskii, M. D. and Mirkin, S. M. (1995). “Triplex DNA Structures.” Annu Rev Biochem 64: 65-95.
[0376] 52 Fredriksson, L., Ehnman, M., Fieber, C. and Eriksson, U. (2005). “Structural Requirements for Activation of Latent Platelet-Derived Growth Factor Cc by Tissue Plasminogen Activator.” J Biol Chem 280(29): 26856-62.
[0377] 53 Freeman, W. M., Walker, S. J. and Vrana, K. E. (1999). “Quantitative Rt-Pcr: Pitfalls and Potential.” Biotechniques 26(1): 112-22, 124-5.
[0378] 54 Freshney, R. I., Ed. (1986). Animal Cell Culture: A Practical Approach. Oxford, IRL Press.
[0379] 55 Freshney, R. I. (1987). Culture of Animal Cells: A Manual of Basic Technique. New York, A. R. Liss.
[0380] 56 Fukuda, T., Chen, K., Shi, X. and Wu, C. (2003). “Pinch-1 Is an Obligate Partner of Integrin-Linked Kinase (Ilk) Functioning in Cell Shape Modulation, Motility, and Survival.” J Biol Chem 278(51): 51324-33. Epub 2003 Oct. 8.
[0381] 57 Garoia, F., Grifoni, D., Trotta, V., Guerra, D., Pezzoli, M. C. and Cavicchi, S. (2005). “The Tumor Suppressor Gene Fat Modulates the Egfr-Mediated Proliferation Control in the Imaginal Tissues of Drosophila Melanogaster.” Mech Dev 122(2): 175-87.
[0382] 58 Gasparini, P., Bonizzato, A., Dognini, M. and Pignatti, P. F. (1992). “Restriction Site Generating-Polymerase Chain Reaction (Rg-Pcr) for the Probeless Detection of Hidden Genetic Variation: Application to the Study of Some Common Cystic Fibrosis Mutations.” Mol Cell Probes 6(1): 1-7.
[0383] 59 Gery, S. and Koeffler, H. P. (2003). “Repression of the Tmeff2 Promoter by C-Myc.” J Mol Biol 328(5): 977-83.
[0384] 60 Gibbs, R. A., Nguyen, P. N. and Caskey, C. T. (1989). “Detection of Single DNA Base Differences by Competitive Oligonucleotide Priming.” Nucleic Acids Res 17(7): 2437-48.
[0385] 61 Glover, D. M., Ed. (1985). DNA Cloning: A Practical Approach. Practical Approach Series. Oxford, Washington, D.C., IRL Press.
[0386] 62 Gribskov, M. and Devereux, J., Eds. (1994). Sequence Analysis Primer. Uwbc Biotechnical Resource Series. New York, Stockton Press.
[0387] 63 Griffin, A. M. and Griffin, H. G., Eds. (1994). Computer Analysis of Sequence Data. Part 1. Methods in Molecular Biology. Totowa, N.J., Humana Press.
[0388] 64 Griffin, H. G. and Griffin, A. M. (1993). “DNA Sequencing. Recent Innovations and Future Trends.” Appl Biochem Biotechnol 38(1-2): 147-59.
[0389] 65 Grossman, P. D., Bloch, W., Brinson, E., Chang, C. C., Eggerding, F. A., Fung, S., Iovannisci, D. M., Woo, S. and Winn-Deen, E. S. (1994). “High-Density Multiplex Detection of Nucleic Acid Sequences: Oligonucleotide Ligation Assay and Sequence-Coded Separation.” Nucleic Acids Res 22(21): 4527-34.
[0390] 66 Guatelli, J. C., Whitfield, K. M., Kwoh, D. Y., Barringer, K. J., Richman, D. D. and Gingeras, T. R. (1990). “Isothermal, in vitro Amplification of Nucleic Acids by a Multienzyme Reaction Modeled after Retroviral Replication.” Proc Natl Acad Sci USA 87(5): 1874-8.
[0391] 67 Hafner, G. J., Yang, I. C., Wolter, L. C., Stafford, M. R. and Giffard, P. M. (2001). “Isothermal Amplification and Multimerization of DNA by Bst DNA Polymerase.” Biotechniques 30(4): 852-6, 858, 860 passim.
[0392] 68 Hamann, L., Kumpf, O., Muller, M., Visintin, A., Eckert, J., Schlag, P. M. and Schumann, R. R. (2004). “A Coding Mutation within the First Exon of the Human Md-2 Gene Results in Decreased Lipopolysaccharide-Induced Signaling.” Genes Immun 5(4): 283-8.
[0393] 69 Haines, B. D. and Higgins, S. J., Eds. (1984). Transcription and Translation: A Practical Approach. Practical Approach Series. Oxford, IRL Press.
[0394] 70 Hames, B. D. and Higgins, S. J., Eds. (1985). Nucleic Acid Hybridization: A Practical Approach. Practical Approach Series. Oxford, IRL Press.
[0395] 71 Hanada, K., Kumagai, K., Yasuda, S., Miura, Y., Kawano, M., Fukasawa, M. and Nishijima, M. (2003). “Molecular Machinery for Non-Vesicular Trafficking of Ceramide.” Nature 426(6968): 803-9.
[0396] 72 Hardenbol, P., Baner, J., Jain, M., Nilsson, M., Namsaraev, E. A., Karlin-Neumann, G. A., Fakhrai-Rad, H., Ronaghi, M., Willis, T. D., Landegren, U. and Davis, R. W. (2003). “Multiplexed Genotyping with Sequence-Tagged Molecular Inversion Probes.” Nat Biotechnol 21(6): 673-8.
[0397] 73 Harlow, E. and Lane, D., Eds. (1988). Antibodies: A Laboratory Manual. New York, Cold Spring Harbor Laboratory.
[0398] 74 Hayashi, K. (1992). “Pcr-Sscp: A Method for Detection of Mutations.” Genet Anal Tech Appl 9(3): 73-9.
[0399] 75 Hayette, S., Gadoux, M., Martel, S., Bertrand, S., Tigaud, I., Magaud, J. P. and Rimokh, R. (1998). “Flrg (Follistatin-Related Gene), a New Target of Chromosomal Rearrangement in Malignant Blood Disorders.” Oncogene 16(22): 2949-54.
[0400] 76 Heijne, G. V. (1987). Sequence Analysis in Molecular Biology: Treasure Trove or Trivial Pursuit. San Diego, Academic Press.
[0401] 77 Hentges, S. T., Nishiyama, M., Overstreet, L. S., Stenzel-Poore, M., Williams, J. T. and Low, M. J. (2004). “Gaba Release from Proopiomelanocortin Neurons.” J Neurosci 24(7): 1578-83.
[0402] 78 Hermonat, P. L. and Muzyczka, N. (1984). “Use of Adeno-Associated Virus as a Mammalian DNA Cloning Vector: Transduction of Neomycin Resistance into Mammalian Tissue Culture Cells.” Proc Natl Acad Sci USA 81(20): 6466-70.
[0403] 79 Hiran, T. S., Mazurkiewicz, J. E., Kreienberg, P., Rice, F. L. and LaFlamme, S. E. (2003). “Endothelial Expression of the Alpha6beta4 Integrin Is Negatively Regulated During Angiogenesis.” J Cell Sci 116(Pt 18): 3771-81. Epub 2003 Aug. 5.
[0404] 80 Hogan, B., Costantini, F. and Lacy, E., Eds. (1986). Manipulating the Mouse Embryo: A Laboratory Manual. New York, Cold Spring Harbor Laboratory.
[0405] 81 Hogrefe, H. H., Mullinax, R. L., Lovejoy, A. E., Hay, B. N. and Sorge, J. A. (1993). “A Bacteriophage Lambda Vector for the Cloning and Expression of Immunoglobulin Fab Fragments on the Surface of Filamentous Phage.” Gene 128(1): 119-26.
[0406] 82 Holm, S. J., Carlen, L. M., Mallbris, L., Stahle-Backdahl, M. and O'Brien, K. P. (2003). “Polymorphisms in the Seek1 and Spr1 Genes on 6p21.3 Associate with Psoriasis in the Swedish Population.” Exp Dermatol 12(4): 435-44.
[0407] 83 Hoogendoorn, B., Norton, N., Kirov, G., Williams, N., Hamshere, M. L., Spurlock, G., Austin, J., Stephens, M. K., Buckland, P. R., Owen, M. J. and O'Donovan, M. C. (2000). “Cheap, Accurate and Rapid Allele Frequency Estimation of Single Nucleotide Polymorphisms by Primer Extension and Dhplc in DNA Pools.” Hum Genet 107(5): 488-93.
[0408] 84 Hsu, I. C., Yang, Q., Kahng, M. W. and Xu, J. F. (1994). “Detection of DNA Point Mutations with DNA Mismatch Repair Enzymes.” Carcinogenesis 15(8): 1657-62.
[0409] 85 Huber, B. E. and Carr, B. I., Eds. (1994). Molecular and Immunologic Approaches. Cancer Therapy in the Twenty-First Century. Mt. Kisco, N.Y., Futura Publishing Co.
[0410] 86 Ishiguro, T., Nagawa, H., Naito, M. and Tsuruo, T. (2000). “Inhibitory Effect of Atf3 Antisense Oligonucleotide on Ectopic Growth of Ht29 Human Colon Cancer Cells.” Jpn J Cancer Res 91(8): 833-6.
[0411] 87 Jinnin, M., Ihn, H., Mimura, Y., Asano, Y., Yamane, K. and Tamaki, K. (2005). “Regulation of Fibrogenic/Fibrolytic Genes by Platelet-Derived Growth Factor C, a Novel Growth Factor, in Human Dermal Fibroblasts.” J Cell Physiol. 202(2): 510-7.
[0412] 88 Jobs, M., Howell, W. M., Stromqvist, L., Mayr, T. and Brookes, A. J. (2003). “Dash-2: Flexible, Low-Cost, and High-Throughput Snp Genotyping by Dynamic Allele-Specific Hybridization on Membrane Arrays.” Genome Res 13(5): 916-24.
[0413] 89 Jones, D. A., Yawalkar, N., Suh, K. Y., Sadat, S., Rich, B. and Kupper, T. S. (2004). “Identification of Autoantigens in Psoriatic Plaques Using Expression Cloning.” J Invest Dermatol 123(1): 93-100.
[0414] 90 Jones, J. (1992). Amino Acid and Peptide Synthesis. New York, Oxford University Press.
[0415] 91 Jones, J. M. and Gellert, M. (2003). “Autoubiquitylation of the V(D)J Recombinase Protein Rag1.” Proc Natl Acad Sci USA 100(26): 15446-51. Epub 2003 Dec. 11.
[0416] 92 Kanazawa, N., Kurosaki, M., Sakamoto, N., Enomoto, N., Itsui, Y., Yamashiro, T., Tanabe, Y., Maekawa, S., Nakagawa, M., Chen, C. H., Kakinuma, S., Oshima, S., Nakamura, T., Kato, T., Wakita, T. and Watanabe, M. (2004). “Regulation of Hepatitis C Virus Replication by Interferon Regulatory Factor 1.” J Virol 78(18): 9713-20.
[0417] 93 Kanehisa, M. (1984). “Use of Statistical Criteria for Screening Potential Homologies in Nucleic Acid Sequences.” Nucleic Acids Res 12(1 Pt 1): 203-13.
[0418] 94 Katagiri, K., Shimonaka, M. and Kinashi, T. (2004). “Rap1-Mediated Lymphocyte Function-Associated Antigen-1 Activation by the T Cell Antigen Receptor Is Dependent on Phospholipase C-Gamma1.” J Biol Chem 279(12): 11875-81.
[0419] 95 Kataoka, T., Holler, N., Micheau, O., Martinon, F., Tinel, A., Hofmann, K. and Tschopp, J. (2001). “Bcl-Rambo, a Novel Bcl-2 Homologue That Induces Apoptosis Via Its Unique C-Terminal Extension.” J Biol Chem 276(22): 19548-54. Epub 2001 Mar. 21.
[0420] 96 Kaufman, P. B., William, W. and Donghern, K., Eds. (1995). Handbook of Molecular and Cellular Methods in Biology and Medicine. Boca Raton, CRC Press.
[0421] 97 Kettner, A., Kumar, L., Anton, I. M., Sasahara, Y., de la Fuente, M., Pivniouk, V. I., Falet, H., Hartwig, J. H. and Geha, R. S. (2004). “Wip Regulates Signaling Via the High Affinity Receptor for Immunoglobulin E in Mast Cells.” J Exp Med 199(3): 357-68.
[0422] 98 Kim, H. J. and Kim, T. Y. (2005). “Regulation of Vascular Endothelial Growth Factor Expression by Insulin-Like Growth Factor-Ii in Human Keratinocytes, Differential Involvement of Mitogen-Activated Protein Kinases and Feedback Inhibition of Protein Kinase C.” Br J Dermatol 152(3): 418-25.
[0423] 99 Kohler, G. and Milstein, C. (1992). “Continuous Cultures of Fused Cells Secreting Antibody of Predefined Specificity. 1975.” Biotechnology 24: 524-6.
[0424] 100 Kotin, R. M. (1994). “Prospects for the Use of Adeno-Associated Virus as a Vector for Human Gene Therapy.” Hum Gene Ther 5(7): 793-801.
[0425] 101 Kozal, M. J., Shah, N., Shen, N., Yang, R., Fucini, R., Merigan, T. C., Richman, D. D., Morris, D., Hubbell, E., Chee, M. and Gingeras, T. R. (1996). “Extensive Polymorphisms Observed in Hiv-1 Clade B Protease Gene Using High-Density Oligonucleotide Arrays.” Nat Med 2(7): 753-9.
[0426] 102 Krane, J. F., Murphy, D. P., Gottlieb, A. B., Carter, D. M., Hart, C. E. and Krueger, J. G. (1991). “Increased Dermal Expression of Platelet-Derived Growth Factor Receptors in Growth-Activated Skin Wounds and Psoriasis.” J Invest Dermatol 96(6): 983-6.
[0427] 103 Krebs, S., Seichter, D. and Forster, M. (2001). “Genotyping of Dinucleotide Tandem Repeats by Maldi Mass Spectrometry of Ribozyme-Cleaved Rna Transcripts.” Nat Biotechnol 19(9): 877-80.
[0428] 104 Kremer, E. J. and Perricaudet, M. (1995). “Adenovirus and Adeno-Associated Virus Mediated Gene Transfer.” Br Med Bull 51(1): 31-44.
[0429] 105 Kulinski, J., Besack, D., Oleykowski, C. A., Godwin, A. K. and Yeung, A. T. (2000). “Cel I Enzymatic Mutation Detection Assay.” Biotechniques 29(1): 44-6, 48.
[0430] 106 Kurschat, P., Bielenberg, D., Rossignol-Tallandier, M., Stahl, A. and Klagsbrun, M. (2006). “Neuron Restrictive Silencer Factor Nrsf/Rest Is a Transcriptional Repressor of Neuropilin-1 and Diminishes the Ability of Semaphorin 3a to Inhibit Keratinocyte Migration.” J Biol Chem 281(5): 2721-9.
[0431] 107 La Vecchia, C., Negri, E., Parazzini, F., Boyle, P., D'Avanzo, B., Levi, F., Gentile, A. and Franceschi, S. (1990). “Height and Cancer Risk in a Network of Case-Control Studies from Northern Italy.” Int J Cancer 45(2): 275-9.
[0432] 108 Leitges, M., Mayr, M., Braun, U., Mayr, U., Li, C., Pfister, G., Ghaffari-Tabrizi, N., Baier, G., Hu, Y. and Xu, Q. (2001). “Exacerbated Vein Graft Arteriosclerosis in Protein Kinase Cdelta-Null Mice.” J Clin Invest 108(10): 1505-12.
[0433] 109 Lesk, A. M., Ed. (1988). Computational Molecular Biology: Sources and Methods for Sequence Analysis. New York, Oxford University Press.
[0434] 110 Livak, K. J., Marmaro, J. and Todd, J. A. (1995). “Towards Fully Automated Genome-Wide Polymorphism Screening.” Nat Genet 9(4): 341-2.
[0435] 111 Lizardi, P. M., Huang, X., Zhu, Z., Bray-Ward, P., Thomas, D. C. and Ward, D. C. (1998). “Mutation Detection and Single-Molecule Counting Using Isothermal Rolling-Circle Amplification.” Nat Genet 19(3): 225-32.
[0436] 112 Male, D., Cooke, A., Owen, M., Trowsdale, J. and Champion, B., Eds. (1996). Advanced Immunology. London, Baltimore, Mosby.
[0437] 113 Mansfield, E. S., Vainer, M., Enad, S., Barker, D. L., Harris, D., Rappaport, E. and Fortina, P. (1996). “Sensitivity, Reproducibility, and Accuracy in Short Tandem Repeat Genotyping Using Capillary Array Electrophoresis.” Genome Res 6(9): 893-903.
[0438] 114 Mao-Qiang, M., Fowler, A. J., Schmuth, M., Lau, P., Chang, S., Brown, B. E., Moser, A. H., Michalik, L., Desvergne, B., Wahli, W., Li, M., Metzger, D., Chambon, P. H., Elias, P. M. and Feingold, K. R. (2004). “Peroxisome-Proliferator-Activated Receptor (Ppar)-Gamma Activation Stimulates Keratinocyte Differentiation.” J Invest Dermatol 123(2): 305-12.
[0439] 115 Marshall, D., Hardman, M. J., Nield, K. M. and Byrne, C. (2001). “Differentially Expressed Late Constituents of the Epidermal Cornified Envelope.” Proc Natl Acad Sci USA 98(23): 13031-6.
[0440] 116 Martin-Vandelet, N., Paris, S., Bourguignon, J., Sesboue, R., Martin, J. P. and Diarra-Mehrpour, M. (1999). “Assembly and Secretion of Recombinant Chains of Human Inter-Alpha-Trypsin Inhibitor in Cos-7 Cells.” Eur J Biochem 259(1-2): 476-84.
[0441] 117 Martin, F. C., Yeo, A. L. and Sonksen, P. H. (1997). “Growth Hormone Secretion in the Elderly: Aging and the Somatopause.” Baillieres Clin Endocrinol Metab 11(2): 223-50.
[0442] 118 Martin, I., Muraglia, A., Campanile, G., Cancedda, R. and Quarto, R. (1997). “Fibroblast Growth Factor-2 Supports Ex vivo Expansion and Maintenance of Osteogenic Precursors from Human Bone Marrow.” Endocrinology 138(10): 4456-62.
[0443] 119 Matera, L., Mori, M. and Galetto, A. (2001). “Effect of Prolactin on the Antigen Presenting Function of Monocyte-Derived Dendritic Cells.” Lupus 10(10): 728-34.
[0444] 120 Matsuda, A., Suzuki, Y., Honda, G., Muramatsu, S., Matsuzaki, O., Nagano, Y., Doi, T., Shimotohno, K., Harada, T., Nishida, E., Hayashi, H. and Sugano, S. (2003). “Large-Scale Identification and Characterization of Human Genes That Activate Nf-Kappab and Mapk Signaling Pathways.” Oncogene 22(21): 3307-18.
[0445] 121 Maxam, A. M. and Gilbert, W. (1977). “A New Method for Sequencing DNA.” Proc Natl Acad Sci USA 74(2): 560-4.
[0446] 122 McPherson, M. J., Ed. (1991). Directed Mutagenesis: A Practical Approach. Practical Approach Series. New York, IRL Press.
[0447] 123 McPherson, M. J., Quirke, P. and Taylor, G. R., Eds. (1991). Per, a Practical Approach. Practical Approach Series. New York, IRL Press.
[0448] 124 Miccoli, L., Biard, D. S., Frouin, I., Harper, F., Maga, G. and Angulo, J. F. (2003). “Selective Interactions of Human Kin17 and Rpa Proteins with Chromatin and the Nuclear Matrix in a DNA Damage- and Cell Cycle-Regulated Manner.” Nucleic Acids Res 31(14): 4162-75.
[0449] 125 Miccoli, L., Frouin, I., Novae, O., Di Paola, D., Harper, F., Zannis-Hadjopoulos, M., Maga, G., Biard, D. S. and Angulo, J. F. (2005). “The Human Stress-Activated Protein Kin17 Belongs to the Multiprotein DNA Replication Complex and Associates in vivo with Mammalian Replication Origins.” Mol Cell Biol 25(9): 3814-30.
[0450] 126 Miller, A. D. (1992). “Human Gene Therapy Comes of Age.” Nature 357(6378): 455-60.
[0451] 127 Miller, A. D., Garcia, J. V., von Suhr, N., Lynch, C. M., Wilson, C. and Eiden, M. V. (1991). “Construction and Properties of Retrovirus Packaging Cells Based on Gibbon Ape Leukemia Virus.” J Virol 65(5): 2220-4.
[0452] 128 Miller, J. H. and Calos, M. P., Eds. (1987). Gene Transfer Vectors for Mammalian Cells. Current Communications in Molecular Biology. New York, Cold Spring Harbor Laboratory.
[0453] 129 Mitani, K. and Caskey, C. T. (1993). “Delivering Therapeutic Genes—Matching Approach and Application.” Trends Biotechnol 11(5): 162-6.
[0454] 130 Montanari, M., Boninsegna, A., Faraglia, B., Coco, C., Giordano, A., Cittadini, A. and Sgambato, A. (2005). “Increased Expression of Geminin Stimulates the Growth of Mammary Epithelial Cells and Is a Frequent Event in Human Tumors.” J Cell Physiol 202(1): 215-22.
[0455] 131 Muramatsu, T. and Miyauchi, T. (2003). “Basigin (Cd147): A Multifunctional Transmembrane Protein Involved in Reproduction, Neural Function, Inflammation and Tumor Invasion.” Histol Histopathol 18(3): 981-7.
[0456] 132 Muzyczka, N. (1994). “Adeno-Associated Virus (Aav) Vectors: Will They Work?” J Clin Invest 94(4): 1351.
[0457] 133 Myers, R. M., Larin, Z. and Maniatis, T. (1985). “Detection of Single Base Substitutions by Ribonuclease Cleavage at Mismatches in Rna:DNA Duplexes.” Science 230(4731): 1242-6.
[0458] 134 Myers, R. M., Lumelsky, N., Lerman, L. S. and Maniatis, T. (1985). “Detection of Single Base Substitutions in Total Genomic DNA.” Nature 313(6002): 495-8.
[0459] 135 Nabel, G. J. and Felgner, P. L. (1993). “Direct Gene Transfer for Immunotherapy and Immunization.” Trends Biotechnol 11(5): 211-5.
[0460] 136 Nagel, J. E., Smith, R. J., Shaw, L., Bertak, D., Dixit, V. D., Schaffer, E. M. and Taub, D. D. (2004). “Identification of Genes Differentially Expressed in T Cells Following Stimulation with the Chemokines Cxcl12 and Cxcl10.” BMC Immunol 5(1): 17.
[0461] 137 Nagley, P. and Wei, Y. H. (1998). “Aging and Mammalian Mitochondrial Genetics.” Trends Genet 14(12): 513-7.
[0462] 138 Nathan, C. and Shiloh, M. U. (2000). “Reactive Oxygen and Nitrogen Intermediates in the Relationship between Mammalian Hosts and Microbial Pathogens.” Proc Natl Acad Sci USA 97(16): 8841-8.
[0463] 139 Nishihara, H., Maeda, M., Oda, A., Tsuda, M., Sawa, H., Nagashima, K. and Tanaka, S. (2002). “Dock2 Associates with Crk1 and Regulates Rac1 in Human Leukemia Cell Lines.” Blood 100(12): 3968-74. Epub 2002 Jun. 28.
[0464] 140 Nishihara, H., Maeda, M., Tsuda, M., Makino, Y., Sawa, H., Nagashima, K. and Tanaka, S. (2002). “Dock2 Mediates T Cell Receptor-Induced Activation of Rac2 and Il-2 Transcription.” Biochem Biophys Res Commun 296(3): 716-20.
[0465] 141 Niu, T., Qin, Z. S., Xu, X. and Liu, J. S. (2002). “Bayesian Haplotype Inference for Multiple Linked Single-Nucleotide Polymorphisms.” Am J Hum Genet 70(1): 157-69.
[0466] 142 Noblesse, E., Cenizo, V., Bouez, C., Borel, A., Gleyzal, C., Peyrol, S., Jacob, M. P., Sommer, P. and Damour, O. (2004). “Lysyl Oxidase-Like and Lysyl Oxidase Are Present in the Dermis and Epidermis of a Skin Equivalent and in Human Skin and Are Associated to Elastic Fibers.” J Invest Dermatol 122(3): 621-30.
[0467] 143 Nykvist, P., Tu, H., Ivaska, J., Kapyla, J., Pihlajaniemi, T. and Heino, J. (2000). “Distinct Recognition of Collagen Subtypes by Alpha(1)Beta(1) and Alpha(2)Beta(1) Integrins. Alpha(1)Beta(1) Mediates Cell Adhesion to Type Xiii Collagen.” J Biol Chem 275(11): 8255-61.
[0468] 144 Oike, Y., Yasunaga, K., Ito, Y., Matsumoto, S., Maekawa, H., Morisada, T., Arai, F., Nakagata, N., Takeya, M., Masuho, Y. and Suda, T. (2003). “Angiopoietin-Related Growth Factor (Agf) Promotes Epidermal Proliferation, Remodeling, and Regeneration.” Proc Natl Acad Sci USA 100(16): 9494-9. Epub 2003 Jul. 18.
[0469] 145 Orita, M., Iwahana, H., Kanazawa, H., Hayashi, K. and Sekiya, T. (1989). “Detection of Polymorphisms of Human DNA by Gel Electrophoresis as Single-Strand Conformation Polymorphisms.” Proc Natl Acad Sci USA 86(8): 2766-70.
[0470] 146 Pakkanen, T. M., Laitinen, M., Hippelainen, M., Kallionpaa, H., Lehtolainen, P., Leppanen, P., Luoma, J. S., Tarvainen, R., Alhava, E. and Yla-Herttuala, S. (1999). “Enhanced Plasma Cholesterol Lowering Effect of Retrovirus-Mediated Ldl Receptor Gene Transfer to Whhl Rabbit Liver after Improved Surgical Technique and Stimulation of Hepatocyte Proliferation by Combined Partial Liver Resection and Thymidine Kinase—Ganciclovir Treatment.” Gene Ther 6(1): 34-41.
[0471] 147 Paus, R. (1991). “Does Prolactin Play a Role in Skin Biology and Pathology?” Med Hypotheses 36(1): 33-42.
[0472] 148 Pawlowitzki, I. H., Edwards, J. H. and Thompson, E. A., Eds. (1997). Genetic Mapping of Disease Genes. San Diego, Academic Press.
[0473] 149 Perbal, B. V. (1984). A Practical Guide to Molecular Cloning. New York, Wiley.
[0474] 150 Permutt, M. A., Wasson, J. C., Suarez, B. K., Lin, J., Thomas, J., Meyer, J., Lewitzky, S., Rennich, J. S., Parker, A., DuPrat, L., Maruti, S., Chayen, S. and Glaser, B. (2001). “A Genome Scan for Type 2 Diabetes Susceptibility Loci in a Genetically Isolated Population.” Diabetes 50(3): 681-5.
[0475] 151 Peruski, L. F. and Peruski, A. H. (1997). The Internet and the New Biology. Tools for Genomic and Molecular Research. Washington, D.C., ASM Press.
[0476] 152 Piepkorn, M., Pittelkow, M. R. and Cook, P. W. (1998). “Autocrine Regulation of Keratinocytes: The Emerging Role of Heparin-Binding, Epidermal Growth Factor-Related Growth Factors.” J Invest Dermatol 111(5): 715-21.
[0477] 153 Prescott, J. E., Osthus, R. C., Lee, L. A., Lewis, B. C., Shim, H., Barrett, J. F., Guo, Q., Hawkins, A. L., Griffin, C. A. and Dang, C. V. (2001). “A Novel C-Myc-Responsive Gene, Jpo1, Participates in Neoplastic Transformation.” J Biol Chem 276(51): 48276-84. Epub 2001 Oct. 11.
[0478] 154 Raap, A. K. (1998). “Advances in Fluorescence in situ Hybridization.” Mutat Res 400(1-2): 287-98.
[0479] 155 Raghavachari, N., Krysan, K., Xing, K. and Lou, M. F. (2001). “Regulation of Thioltransferase Expression in Human Lens Epithelial Cells.” Invest Ophthalmol Vis Sci 42(5): 1002-8.
[0480] 156 Ratcliffe, K. E., Tao, Q., Yavuz, B., Stoletov, K. V., Spring, S. C. and Terman, B. I. (2002). “Sck Is Expressed in Endothelial Cells and Participates in Vascular Endothelial Growth Factor-Induced Signaling.” Oncogene 21(41): 6307-16.
[0481] 157 Raya, A., Revert-Ros, F., Martinez-Martinez, P., Navarro, S., Rosello, E., Vieites, B., Granero, F., Forteza, J. and Saus, J. (2000). “Goodpasture Antigen-Binding Protein, the Kinase That Phosphorylates the Goodpasture Antigen, Is an Alternatively Spliced Variant Implicated in Autoimmune Pathogenesis.” J Biol Chem 275(51): 40392-9.
[0482] 158 Remick, D. G. (1995). “Applied Molecular Biology of Sepsis.” J Crit Care 10(4): 198-212.
[0483] 159 Ronaghi, M., Uhlen, M. and Nyren, P. (1998). “A Sequencing Method Based on Real-Time Pyrophosphate.” Science 281(5375): 363, 365.
[0484] 160 Rosenecker, J., Harms, K. H., Bertele, R. M., Pohl-Koppe, A., v Mutius, E., Adam, D. and Nicolai, T. (1996). “Adenovirus Infection in Cystic Fibrosis Patients: Implications for the Use of Adenoviral Vectors for Gene Transfer.” Infection 24(1): 5-8.
[0485] 161 Ruiz-Velasco, N., Guerrero-Esteo, M., Briskin, M. J. and Teixido, J. (2000). “The Alpha(4) Integrin Subunit Tyr(187) Has a Key Role in Alpha(4)Beta(7)-Dependent Cell Adhesion.” J Biol Chem 275(10): 7052-9.
[0486] 162 Saiki, R. K., Bugawan, T. L., Horn, G. T., Mullis, K. B. and Erlich, H. A. (1986). “Analysis of Enzymatically Amplified Beta-Globin and Hla-Dq Alpha DNA with Allele-Specific Oligonucleotide Probes.” Nature 324(6093): 163-6.
[0487] 163 Saiki, R. K., Walsh, P. S., Levenson, C. H. and Erlich, H. A. (1989). “Genetic Analysis of Amplified DNA with Immobilized Sequence-Specific Oligonucleotide Probes.” Proc Natl Acad Sci USA 86(16): 6230-4.
[0488] 164 Saleeba, J. A. and Cotton, R. G. (1993). “Chemical Cleavage of Mismatch to Detect Mutations.” Methods Enzymol 217: 286-95.
[0489] 165 Sambrook, J., Fritsch, E. F. and Maniatis, T. (1989). Molecular Cloning: A Laboratory Manual. New York, Cold Spring Harbor Laboratory.
[0490] 166 Samulski, R. J., Chang, L. S. and Shenk, T. (1989). “Helper-Free Stocks of Recombinant Adeno-Associated Viruses: Normal Integration Does Not Require Viral Gene Expression.” J Virol 63(9): 3822-8.
[0491] 167 Sanger, F., Nicklen, S. and Coulson, A. R. (1977). “DNA Sequencing with Chain-Terminating Inhibitors.” Proc Natl Acad Sci USA 74(12): 5463-7.
[0492] 168 Sato, C. (2003). “[Frequent Occurrence and Biological Significance of Degree of Polymerization in Sialic Acid].” Seikagaku 75(12): 1526-30.
[0493] 169 Sauter, E. R., Herlyn, M., Liu, S. C., Litwin, S. and Ridge, J. A. (2000). “Prolonged Response to Antisense Cyclin D1 in a Human Squamous Cancer Xenograft Model.” Clin Cancer Res 6(2): 654-60.
[0494] 170 Savoy, D. N., Billadeau, D. D. and Leibson, P. J. (2000). “Cutting Edge: Wip, a Binding Partner for Wiskott-Aldrich Syndrome Protein, Cooperates with Vav in the Regulation of T Cell Activation.” J Immunol 164(6): 2866-70.
[0495] 171 Sayama, K., Hanakawa, Y., Shirakata, Y., Yamasaki, K., Sawada, Y., Sun, L., Yamanishi, K., Ichijo, H. and Hashimoto, K. (2001). “Apoptosis Signal-Regulating Kinase 1 (Ask1) Is an Intracellular Inducer of Keratinocyte Differentiation.” J Biol Chem 276(2): 999-1004.
[0496] 172 Schottelius, A. J., Moldawer, L. L., Dinarello, C. A., Asadullah, K., Sterry, W. and Edwards, C. K., 3rd (2004). “Biology of Tumor Necrosis Factor-Alpha-Implications for Psoriasis.” Exp Dermatol 13(4): 193-222.
[0497] 173 Sell, S. (1996). Immunology, Immunopathology and Immunity. Stamford, Conn., Appleton and Lange.
[0498] 174 Shilatifard, A., Duan, D. R., Hague, D., Florence, C., Schubach, W. H., Conaway, J. W. and Conaway, R. C. (1997). “Ell2, a New Member of an Ell Family of Rna Polymerase Ii Elongation Factors.” Proc Natl Acad Sci USA 94(8): 3639-43.
[0499] 175 Simon, H., Fortsch, I., Burckhardt, G., Gabrielyan, A., Birch-Hirschfeld, E., Stelzner, A., Prevot-Halter, I., Leumann, C. and Zimmer, C. (1999). “Triple Helix Formation Inhibits DNA Gyrase Activity.” Antisense Nucleic Acid Drug Dev 9(6): 527-31.
[0500] 176 Skurk, T., van Harmelen, V. and Hauner, H. (2004). “Angiotensin Ii Stimulates the Release of Interleukin-6 and Interleukin-8 from Cultured Human Adipocytes by Activation of Nf-Kappab.” Arterioscler Thromb Vasc Biol 24(7): 1199-203. Epub 2004 May 6.
[0501] 177 Smith, D. W., Ed. (1993). Biocomputing. Informatics and Genome Projects. New York, Academic Press.
[0502] 178 Sommerfelt, M. A. and Weiss, R. A. (1990). “Receptor Interference Groups of 20 Retroviruses Plating on Human Cells.” Virology 176(1): 58-69.
[0503] 179 Sterman, D. H., Treat, J., Litzky, L. A., Amin, K. M., Coonrod, L., Molnar-Kimber, K., Recio, A., Knox, L., Wilson, J. M., Albelda, S. M. and Kaiser, L. R. (1998). “Adenovirus-Mediated Herpes Simplex Virus Thymidine Kinase/Ganciclovir Gene Therapy in Patients with Localized Malignancy: Results of a Phase I Clinical Trial in Malignant Mesothelioma.” Hum Gene Ther 9(7): 1083-92.
[0504] 180 Stites, D. P. and Terr, A. I., Eds. (1991). Basic and Clinical Immunology. Norwalk, Conn., Appleton and Lange.
[0505] 181 Storm, N., Darnhofer-Patel, B., van den Boom, D. and Rodi, C. P. (2003). “Maldi-Tof Mass Spectrometry-Based Snp Genotyping.” Methods Mol Biol 212: 241-62.
[0506] 182 Suzuki, Y., Miura, H., Tanemura, A., Kobayashi, K., Kondoh, G., Sano, S., Ozawa, K., Inui, S., Nakata, A., Takagi, T., Tohyama, M., Yoshikawa, K. and Itami, S. (2002). “Targeted Disruption of Lig-1 Gene Results in Psoriasiform Epidermal Hyperplasia.” FEBS Lett 521(1-3): 67-71.
[0507] 183 Takeda, H., Katagata, Y., Hozumi, Y. and Kondo, S. (2004). “Effects of Angiotensin Ii Receptor Signaling During Skin Wound Healing.” Am J Pathol 165(5): 1653-62.
[0508] 184 Takeichi, M. (1993). “Cadherins in Cancer: Implications for Invasion and Metastasis.” Curr Opin Cell Biol 5(5): 806-11.
[0509] 185 Taniguchi, Y., Komatsu, N. and Moriuchi, T. (1995). “Overexpression of the Hox4a (Hoxd3) Homeobox Gene in Human Erythroleukemia Hel Cells Results in Altered Adhesive Properties.” Blood 85(10): 2786-94.
[0510] 186 Teber, O. A., Gillessen-Kaesbach, G., Fischer, S., Bohringer, S., Albrecht, B., Albert, A., Arslan-Kirchner, M., Haan, E., Hagedorn-Greiwe, M., Hammans, C., Henn, W., Hinkel, G. K., Konig, R., Kunstmann, E., Kunze, J., Neumann, L. M., Prott, E. C., Rauch, A., Rott, H. D., Seidel, H., Spranger, S., Sprengel, M., Zoll, B., Lohmann, D. R. and Wieczorek, D. (2004). “Genotyping in 46 Patients with Tentative Diagnosis of Treacher Collins Syndrome Revealed Unexpected Phenotypic Variation.” Eur J Hum Genet 12(11): 879-90.
[0511] 187 Tenaud, I., Leroy, S., Chebassier, N. and Dreno, B. (2002). “Modulation in vitro of Keratinocyte Integrins by Interferon-Alpha and Interferon-Gamma.” Int J Dermatol 41(12): 836-40.
[0512] 188 Tordjman, R., Lepelletier, Y., Lemarchandel, V., Cambot, M., Gaulard, P., Hermine, O. and Romeo, P. H. (2002). “A Neuronal Receptor, Neuropilin-1, Is Essential for the Initiation of the Primary Immune Response.” Nat Immunol 3(5): 477-82.
[0513] 189 Tornillo, L., Carafa, V., Richter, J., Sauter, G., Moch, H., Minola, E., Gambacorta, M., Bianchi, L., Vecchione, R. and Terracciano, L. M. (2000). “Marked Genetic Similarities between Hepatitis B Virus-Positive and Hepatitis C Virus-Positive Hepatocellular Carcinomas.” J Pathol 192(3): 307-12.
[0514] 190 Tratschin, J. D., West, M. H., Sandbank, T. and Carter, B. J. (1984). “A Human Parvovirus, Adeno-Associated Virus, as a Eucaryotic Vector: Transient Expression and Encapsidation of the Procaryotic Gene for Chloramphenicol Acetyltransferase.” Mol Cell Biol 4(10): 2072-81.
[0515] 191 Tsuruoka, H., Khovidhunkit, W., Brown, B. E., Fluhr, J. W., Elias, P. M. and Feingold, K. R. (2002). “Scavenger Receptor Class B Type I Is Expressed in Cultured Keratinocytes and Epidermis. Regulation in Response to Changes in Cholesterol Homeostasis and Barrier Requirements.” J Biol Chem 277(4): 2916-22.
[0516] 192 Uhart, M., McCaul, M. E., Oswald, L. M., Choi, L. and Wand, G. S. (2004). “Gabra6 Gene Polymorphism and an Attenuated Stress Response.” Mol Psychiatry 9(11): 998-1006.
[0517] 193 Vaahtoranta-Lehtonen, H. H., Lehtonen, O. P., Harvima, I., Peltola, O. and Nikoskelainen, E. (1999). “Papillary Hypertrophy of the Upper Tarsal Conjunctiva During Contact Lens Wear: A 4-Month Study with Ethyl-6-O-Decanoyl-Glucoside.” Clao J 25(2): 105-8.
[0518] 194 Vaccaro, M., Magaudda, L., Cutroneo, G., Trimarchi, F., Barbuzza, O., Guarneri, F. and Guarneri, B. (2002). “Changes in the Distribution of Laminin Alpha1 Chain in Psoriatic Skin: Immunohistochemical Study Using Confocal Laser Scanning Microscopy.” Br J Dermatol 146(3): 392-8.
[0519] 195 Van Den Eynde, B. J., Gaugler, B., Probst-Kepper, M., Michaux, L., Devuyst, O., Lorge, F., Weynants, P. and Boon, T. (1999). “A New Antigen Recognized by Cytolytic T Lymphocytes on a Human Kidney Tumor Results from Reverse Strand Transcription.” J Exp Med 190(12): 1793-800.
[0520] 196 Walker, J. M. (1998). “Pathomechanics and Classification of Cartilage Lesions, Facilitation of Repair.” J Orthop Sports Phys Ther 28(4): 216-31.
[0521] 197 Walker, J. M. (1998). “Protein Protocols on Cd-Rom.”
[0522] 198 Wankell, M., Munz, B., Hubner, G., Hans, W., Wolf, E., Goppelt, A. and Werner, S. (2001). “Impaired Wound Healing in Transgenic Mice Overexpressing the Activin Antagonist Follistatin in the Epidermis.” Embo J 20(19): 5361-72.
[0523] 199 Warton, K., Foster, N. C., Gold, W. A. and Stanley, K. K. (2004). “A Novel Gene Family Induced by Acute Inflammation in Endothelial Cells.” Gene 342(1): 85-95.
[0524] 200 Watson, K. L., Justice, R. W. and Bryant, P. J. (1994). “Drosophila in Cancer Research: The First Fifty Tumor Suppressor Genes.” J Cell Sci Suppl 18: 19-33.
[0525] 201 Weir, D. M., Herzenberg, L. A., Blackwell, C. and Herzenberg, L. A., Eds. (1986). Handbook of Experimental Immunology. Oxford, England, Blackwell Scientific Publications.
[0526] 202 Werner, S., Beer, H. D., Mauch, C., Luscher, B. and Werner, S. (2001). “The Mad1 Transcription Factor Is a Novel Target of Activin and Tgf-Beta Action in Keratinocytes: Possible Role of Mad1 in Wound Repair and Psoriasis.” Oncogene 20(51): 7494-504.
[0527] 203 West, A. B., Lockhart, P. J., O'Farell, C. and Farrer, M. J. (2003). “Identification of a Novel Gene Linked to Parkin Via a Bi-Directional Promoter.” J Mol Biol 326(1): 11-9.
[0528] 204 West, M. H., Trempe, J. P., Tratschin, J. D. and Carter, B. J. (1987). “Gene Expression in Adeno-Associated Virus Vectors: The Effects of Chimeric Mrna Structure, Helper Virus, and Adenovirus Va1 Rna.” Virology 160(1): 38-47.
[0529] 205 Wilson, C., Reitz, M. S., Okayama, H. and Eiden, M. V. (1989). “Formation of Infectious Hybrid Virions with Gibbon Ape Leukemia Virus and Human T-Cell Leukemia Virus Retroviral Envelope Glycoproteins and the Gag and Pol Proteins of Moloney Murine Leukemia Virus.” J Virol 63(5): 2374-8.
[0530] 206 Woodward, J., Ed. (1985). Immobilised Cells and Enzymes: A Practical Approach. Practical Approach Series. Oxford, England, IRL Press.
[0531] 207 Wu, R., Ed. (1987). Methods in Enzymology. Recombinant DNA Part F. Amsterdam, Elsevier Science.
[0532] 208 Wu, R. and Grossman, L., Eds. (1987). Methods in Enzymology. Recombinant DNA Part E. Amsterdam, Elsevier Science.
[0533] 209 Xie, W., Li, F., Kudlow, J. E. and Wu, C. (1998). “Expression of the Integrin-Linked Kinase (Ilk) in Mouse Skin: Loss of Expression in Suprabasal Layers of the Epidermis and up-Regulation by Erbb-2.” Am J Pathol 153(2): 367-72.
[0534] 210 Yajnik, V., Paulding, C., Sordella, R., McClatchey, A. I., Saito, M., Wahrer, D. C., Reynolds, P., Bell, D. W., Lake, R., van den Heuvel, S., Settleman, J. and Haber, D. A. (2003). “Dock4, a Gtpase Activator, Is Disrupted During Tumorigenesis.” Cell 112(5): 673-84.
[0535] 211 Yan, C., Jamaluddin, M. S., Aggarwal, B., Myers, J. and Boyd, D. D. (2005). “Gene Expression Profiling Identifies Activating Transcription Factor 3 as a Novel Contributor to the Proapoptotic Effect of Curcumin.” Mol Cancer Ther 4(2): 233-41.
[0536] 212 Yang, B., Wen, X., Kodali, N. S., Oleykowski, C. A., Miller, C. G., Kulinski, J., Besack, D., Yeung, J. A., Kowalski, D. and Yeung, A. T. (2000). “Purification, Cloning, and Characterization of the Cel I Nuclease.” Biochemistry 39(13): 3533-41.
[0537] 213 Yin, X. Y., Grove, L. E. and Prochownik, E. V. (2001). “Mmip-2/Rnf-17 Enhances C-Myc Function and Regulates Some Target Genes in Common with Glucocorticoid Hormones.” Oncogene 20(23): 2908-17.
[0538] 214 Yu, M., Poeschla, E. and Wong-Staal, F. (1994). “Progress Towards Gene Therapy for Hiv Infection.” Gene Ther 1(1): 13-26.
[0539] 215 Zhang, C., Kawauchi, J., Adachi, M. T., Hashimoto, Y., Oshiro, S., Aso, T. and Kitajima, S. (2001). “Activation of Jnk and Transcriptional Repressor Atf3/Lrf1 through the Ire1/Traf2 Pathway Is Implicated in Human Vascular Endothelial Cell Death by Homocysteine.” Biochem Biophys Res Commun 289(3): 718-24.
[0540] 216 Zhang, L., Koivisto, L., Heino, J. and Uitto, V. J. (2004). “Bacterial Heat Shock Protein 60 May Increase Epithelial Cell Migration through Activation of Map Kinases and Inhibition of Alpha6beta4 Integrin Expression.” Biochem Biophys Res Commun 319(4): 1088-95.
[0541] 217 Zhou, X., Krueger, J. G., Kao, M. C., Lee, E., Du, F., Menter, A., Wong, W. H. and Bowcock, A. M. (2003). “Novel Mechanisms of T-Cell and Dendritic Cell Activation Revealed by Profiling of Psoriasis on the 63,100-Element Oligonucleotide Array.” Physiol Genomics 13(1): 69-78.

[0542] Books:

[0543] Abbas A K, Litchman A H. Cellular and Molecular Immunology. Philadelphia: Saunders; 1991. 417 p.

[0544] Austen B M and Westwood O M R. Protein Targeting and Secretion. Oxford: IRL Press; 1991. 85 p.

[0545] Bishop M J, editor. Guide to Human Genome Computing, 2d ed. San Diego: Academic Press; 1998. 306 p.

[0546] Cowell I G, Austin C A, editors. DNA Library Protocols. Methods in Molecular Biology. Vol. 69 Totowa, N.J.: Humana Press; 1997. 321 p.

[0547] Freshney R I, editor. Animal Cell Culture: A Practical Approach. Oxford: IRL Press; 1986.

[0548] Freshney R I. Culture Of Animal Cells: A Manual of Basic Technique. New York: A R Liss; 1987. 397 p.

[0549] Glover D M, editor. DNA Cloning: A Practical Approach. Vols 1 & 2. Oxford; Washington: IRL Press; 1985.

[0550] Gribskov M, Devereux J, editors. Sequence Analysis Primer. Oxford University Press; 1994. 296 p.

[0551] Griffin A M, Griffin H G, editors. ComputerAnalysis of Sequence Data, Part 1. Totowa, N.J. Humana Press; 1994. 392 p.

[0552] Hames B D, Higgins S J, editors. Nucleic Acid Hybridization: A Practical Approach. Oxford: IRL Press; 1985. 245 p.

[0553] Hames B D, Higgins S J, editors. Transcription and Translation: A Practical Approach. Oxford: IRL Press; 1984. 328 p.

[0554] Harlow Ed, Lane D. Antibodies: A Laboratory Manual. New York: Cold Spring Harbor Laboratory; 1988. 726 p.

[0555] Heinje G. von. Sequence Analysis in Molecular Biology. San Diego: Academic Press; 1987. 188 p.

[0556] Hogan B, Costantini F, Lacy E, editors. Manipulating the Mouse Embryo: A Laboratory Manual. New York: Cold Spring Harbor Laboratory Press; 1986. 332 p.

[0557] Huber B E, Can B I. Molecular and Immunologic Approaches. Mt. Kisco, N.Y.: Futura Publishing Co; 1994.

[0558] Jones J. Amino Acid and Peptide Synthesis. Oxford; New York: Oxford Science Publications; 1992. 86 p.

[0559] Kaufman P B, William W, Donghern K, editors. Handbook of Molecular and Cellular Methods in Biology and Medicine. Boca Raton: CRC Press; 1995. 484 p.

[0560] Lesk A M, editor. Computational Molecular Biology: sources and methods for sequence analysis. New York: Oxford University Press; 1988. 254 p.

[0561] Male D, Cooke A, Owen M, Trowsdale J, Champion B, editors. Advanced Immunology. 3rd ed. London; Baltimore: Mosby; 1996. 273 p.

[0562] McPherson M J, editor. Directed Mutagenesis: A Practical Approach. New York: IRL Press; 1991. 257 p.

[0563] McPherson M J, Quirke P, Taylor J R, editors. PCR: A Practical Approach. Oxford; New York: IRL Press; 1991. 253 p.

[0564] Miller J H, Calos M P, editors. Gene Transfer Vectors for Mammalian Cells. New York: Cold Spring Harbor Laboratory Press; 1987. 169 p.

[0565] Miller J H, Calos M P, editors. Gene Transfer Vectors For Mammalian Cells. New York: Cold Spring Harbor Laboratory; 1987. 169 p.

[0566] Pawlowitzki I H, Edwards J H, Thompson E A, editors. Genetic Mapping of Disease Genes. Academic Press London; 1997. 288 p.

[0567] Perbal B V. A Practical Guide to Molecular Cloning. 1st ed. New York: Wiley Interscience Publication; 1984. 554 p.

[0568] Perbal B V. A Practical Guide To Molecular Cloning. New York: Wiley; 1984. 554 p.

[0569] Peruski L F, Peruski A H. The Internet and the New Biology. Tools for Genomic and Molecular Research. Washington, D.C.: American Society for Microbiology Press; 1997.

[0570] Sambrook J. Molecular Cloning: A Laboratory Manual. 2nd ed. 3 vols. New York: Cold Spring Harbor Laboratory Press; 1989.

[0571] Sell S. Immunology, Immunopathology & Immunity. 5th ed. Stamford, Conn.: Appleton & Lange; 1996. 1014 p.

[0572] Smith D W, editor. Biocomputing. Informatics and Genome Projects, New York: Academic Press; 1993. 336 p.

[0573] Stites D P, Terr A T, editors. Basic and Clinical Immunology. 7th ed. Norwalk, Conn.: Appleton & Lange; 1991. 870 p.

[0574] Walker J M. Protein Protocols on CD-ROM, Humana Press, Totowa, N.J.

[0575] Weir D M, Herzenberg L A, Blackwell C, editors. Handbook Of Experimental Immunology. 4 vols. Oxford: Blackwell; 1986.

[0576] Woodward J. Immobilized Cells And Enzymes: A Practical Approach. Oxford: IRL Press; 1986.

[0577] Wu R, Grossman L, editors. Methods in Enzymology: Rexcombinant DNA Part E. Vol. 154. Amsterdam: Elsevier Science; 1987. 576 p.

[0578] Wu R, Grossman L, editors. Methods in Enzymology: Rexcombinant DNA Part F. Vol. 155. Amsterdam: Elsevier Science; 1987. 628 p.

[0579] Patent:

[0580] WO02090571A3

[0581] WO05016282A2

[0582] U.S. Pat. No. 4,683,195

[0583] U.S. Pat. No. 4,683,202.

[0584] U.S. Pat. No. 4,952,501.

[0585] WO03042661A2

[0586] U.S. 20040009479A1

[0587] U.S. Pat. No. 5,315,000

[0588] WO1997US0005216

[0589] U.S. Pat. No. 5,498,531

[0590] U.S. Pat. No. 5,807,718

[0591] U.S. Pat. No. 5,888,819

[0592] U.S. Pat. No. 6,090,543

[0593] U.S. Pat. No. 6,090,606

[0594] U.S. Pat. No. 5,585,089

[0595] U.S. Pat. No. 4,683,195

[0596] U.S. Pat. No. 4,683,202

[0597] U.S. Pat. No. 5,459,039.

[0598] U.S. Pat. No. 6,090,543).

[0599] U.S. Pat. No. 6,090,606

[0600] U.S. Pat. No. 5,869,242

[0601] U.S. Patent No. 60/335,068

[0602] U.S. Pat. No. 6,479,244

[0603] PCT/US94/05700

[0604] U.S. Pat. No. 4,797,368;

[0605] WO 93/24641

[0606] U.S. Pat. No. 5,173,414

We claim:

1. A method of constructing a psoriasis GeneMap in a human population, comprising screening for the expression level of or presence or absence of at least one allele of at least one gene from Tables 10-12 and 14 in at least one sample.

2. (canceled)

3. The method of claim 1, wherein said population is a founder population.

4. The method of claim 3, wherein said founder population is the population of Quebec.

5. A method of constructing a GeneMap in a human population, comprising screening for the presence or absence of at least one allele of at least one single nucleotide polymorphisms (SNPs) from Tables 2-9 and 13 in at least one sample.

6. (canceled)

7. The method of claim 5, wherein said population is a founder population.

8. The method of claim 7, wherein said founder population is the population of Quebec.

9. A method of genetic mapping for detecting the association of at least one marker for psoriasis comprising: a) obtaining biological samples from at least one disease patient; b) screening for the presence or absence of at least one allele of at least one SNP or a group of SNPs from Tables 2-9 and 13 within each biological sample; and c) evaluating whether said SNP or a group of SNPs shows a statistically significant skewed distribution between a group of patients compared to a group of controls.

10. The method of claim 9, wherein said biological samples are selected from the group consisting of fluid, serum, tissue swabs, buccal swabs, saliva, mucus, urine, stools, spermatozoids, vaginal secretions, lymph, amniotic liquid, pleural liquid and tears.

11. The method of claim 9, wherein said patients and controls are from a human population.

12. (canceled)

13. The method of claim 11, wherein said population is a founder population.

14. The method of claim 13, wherein said founder population is the population of Quebec.

15. (canceled)

16. The method of claim 9, wherein said patients and controls are recruited in the form of trios comprising two parents and one child or one parent and two children, or in the form of unrelated individuals.

17. The method of claim 9, wherein said screening is performed using an assay selected from the group consisting of an allele-specific hybridization assay, an oligonucleotide ligation assay, an allele-specific elongation/ligation assay, an allele-specific amplification assay, a single-base extension assay, a molecular inversion probe assay, an invasive cleavage assay, a selective termination assay, RPLP, sequencing assay, SSCP, mismatch-cleaving assay, and denaturing gradient gel electrophoresis.

18. The method of claim 16, wherein said trios are members of a cohort.

19. The method of claim 9, wherein said screening is carried out on pools of patients and pools of controls.

20. The method of claim 9, wherein the genotype distribution is compared one SNP at a time.

21. The method of claim 9, wherein a genotype distribution is compared with a group of markers from Tables 2-9 and 13 forming a haplotype.

22-26. (canceled)

27. A method for predicting the efficacy of a drug for treating psoriasis in a human patient, comprising: a) obtaining a sample of cells from the patient; b) obtaining a gene expression profile from the sample in the absence and presence of in vitro modulation of the cells with specific mediators; the gene expression profile comprising one or more genes from Tables 10-12 and 14; and c) comparing the gene expression profile of the sample with a reference gene expression profile, wherein similarity between the sample expression profile and the reference expression profile predicts the efficacy of the drug for treating psoriasis in the patient.

28. The method of claim 27, further comprising exposing the sample of cells to the drug for treating psoriasis prior to obtaining the gene expression profile of the sample.

29. The method of claim 27, wherein the sample of cells is derived from a tissue selected from the group consisting of: the scalp, blood, dermis, epidermis, skin, cutaneous surfaces, intertrigious areas, genitalia, vessels and endothelium.

30. The method of claim 29, wherein the cells are selected from the group consisting of: keratinocytes, monocytes, neutrophils, Langerhans cells, CD4+ and CD8+ T cells and lymphocytes.

31. The method of claim 27, wherein the sample is obtained via biopsy.

32. The method of claim 27, wherein the gene expression profile comprises expression values for at least two of the genes listed in Tables 10-12 and 14.

33. The method of claim 32, wherein the gene expression profile of the sample is obtained by detecting the protein products of said genes.

34. The method of claim 27, wherein the gene expression profile of the sample is obtained using a hybridization assay to oligonucleotides contained in a microarray.

35. The method of claim 34, wherein the oligonucleotides comprises nucleic acid molecules at least 95% identical to SEQ ID from Tables 2-14.

36. The method of claim 27, wherein the reference expression profile is that of cells derived from patients that do not have psoriasis.

37. The method of claim 27, wherein the drug is selected from the group consisting of symptom relievers and anti-inflammatory drugs for an inflammatory disease condition.

38. A method for inducing a psoriasis-like state in a resident tissue or cell, comprising contacting the tissue or cell with at least one gene from Tables 10-12 and 14 or modulating the expression of at least one gene from Tables 10-12 and 14 in the resident tissue or cell.

39. The method of claim 38, wherein the resident tissue or cell is derived from the group consisting of blood, dermis, epidermis, skin, cutaneous surfaces, intertrigious areas, genitalia, vessels and endothelium, keratinocytes, monocytes, neutrophils, Langerhans cells, CD4+ and CD8+ T cells and lymphocytes.

40. A method for screening drug candidates for treating psoriasis, comprising: a) contacting a resident cell induced by the method of claim 38 with a drug candidate for treating psoriasis; and b) assaying for a pro-inflammatory like state, such that an absence of the proinflammatory like state is indicative of the drug candidate being effective in treating psoriasis.

41-44. (canceled)

45. A drug screening assay comprising: a) administering one or more test compounds to an animal having psoriasis, or a cell composition isolated there from; and b) comparing the level of gene expression of at least one gene from Tables 10-12 and 14 in the presence of the one or more test compounds with one or both of the levels of said gene expression in the absence of the one or more test compounds or in normal cells; wherein test compounds which cause the level of expression of one or more genes from Tables 10-12 and 14 to approach normal are candidates for drugs to treat psoriasis.

46-47. (canceled)

48. A method for identifying a gene that regulates drug response in psoriasis, comprising: a) obtaining a gene expression profile for at least one gene from Tables 10-12 and 14 in a resident tissue cell induced to a pro-inflammatory like state in the presence of the candidate drug; and b) comparing the expression profile of said gene to a reference expression profile for said gene in a cell induced to the pro-inflammatory like state in the absence of the candidate drug, wherein genes whose expression is altered by the drug relative to the reference expression profile may identify the gene as a gene that regulates drug response in psoriasis.

49. An expression profile indicative of the presence of psoriasis in a patient, comprising an expression level of at least one gene of Tables 10-12 and 14.

50-52. (canceled)

53. A method of diagnosing susceptibility to psoriasis in an individual, comprising screening for an at-risk haplotype of at least one gene from Tables 10-12 and 14, or comprising at least one SNP from Tables 2-9 and 13, that is more frequently present in an individual susceptible to psoriasis, compared to the frequency of its presence in a control individual, wherein the presence of the at-risk haplotype is indicative of a susceptibility to psoriasis.

54. The method of claim 53, wherein the at-risk haplotype is characterized by the presence of at least one single nucleotide polymorphism from Tables 2-9 and 13.

55. The method of claim 53, wherein said screening comprises enzymatic amplification of nucleic acid from said individual or amplification using universal oligos on elongation/ligation products.

56. The method of claim 55, wherein the nucleic acid is DNA.

57. The method of claim 56, wherein the DNA is human DNA.

58. The method of claim 55, wherein said screening further comprises determining the presence or absence of an at-risk haplotype in said amplified nucleic acid.

59. The method of claim 58, wherein said determining is performed by an assay selected from the group consisting of electrophoretic analysis, restriction length polymorphism analysis, sequence analysis and hybridization analysis.

60-104. (canceled)

105. A method of assessing a patient's risk of having or developing psoriasis, comprising: a) determining the level of expression of at least one gene from Tables 4-6 or gene products thereof, and comparing the level of expression to a normal cell; and b) assessing a patient's risk of having or developing psoriasis, if any, by determining the correlation between the differential expression of said genes or gene products with known changes in expression of said genes measured in at least one patent suffering from psoriasis.

106-107. (canceled)

108. A method of diagnosing psoriasis in a patient, comprising detecting a nucleic acid molecule encoding at least one protein from Tables 10-12 and 14 in a fluid or tissue sample from the patient.

109. The method of claim 108, wherein the detection comprises detecting at least one associated allele, particular allele of a polymorphic locus, or the like in the nucleic acid molecule encoding said at least one protein.

110. The method of claim 109, wherein said method comprises hybridizing at least one probe to said sample under stringent conditions which allow hybridization of said at least one probe to nucleic acid comprising said associated allele, a particular allele of a polymorphic locus, or the like, wherein the presence of a hybridization signal indicates the presence of said associated allele, particular allele of a polymorphic locus, or the like, in at least one gene from Tables 10-12 and 14.

111. The method of claim 110, wherein the nucleic acid molecule has been amplified prior to said hybridization.

112. The method of claim 111, wherein said method comprises using a single-stranded conformation polymorphism technique to assay for detecting said associated allele, particular allele of a polymorphic locus, or the like.

113. The method of claim 111, wherein said method further comprises sequencing at least one gene from Tables 4-6 from the sample.

114. (canceled)

115. The method of claim 111, wherein said method comprises sequencing at least one gene from Tables 10-12 and 14 in the sample.

116. The method of claim 111, wherein said method comprises determining the sequence of at least one gene from Tables 10-12 and 14 by preparing a cDNA from a RNA taken from said sample and sequencing said cDNA to determine the presence or absence of an associated allele, a particular allele of a polymorphic locus, or the like.

117. The method of claim 110, wherein said method comprises performing an RNAse assay.

118. The method of claim 110, wherein said at least one probe is attached to a microarray or a bead.

119. The method of claim 110, wherein said at least one probe is an oligonucleotide.

120. (canceled)

121. The method of claim 109, wherein the associated allele, particular allele of a polymorphic locus, or the like is selected from the group consisting of at least one of the SNPs from Tables 2-9 and 13, alone or in combination.

122. A method for assaying the presence of a nucleic acid associated with resistance or susceptibility to psoriasis in a sample, comprising: contacting said sample with a nucleic acid recited in claim 1 under stringent hybridization conditions; and detecting the presence of a hybridization complex wherein the presence of the hybridization complex is indicative of the presence of a nucleic acid associated with resistance or susceptibility to psoriasis.

123. A method for diagnosing or determining psoriasis or the predisposition to psoriasis, or the progression of psoriasis, comprising obtaining a sample from a patient; contacting the sample with a nucleic acid of Tables 2-9 and 13; and detecting the presence or absence of a hybridization complex, wherein the presence or absence of a hybridization complex is a diagnosis of psoriasis.

124-128. (canceled)

129. A method for predicting the efficacy of a drug for treating psoriasis disease in a human patient, comprising: a) obtaining a sample of cells from the patient; b) obtaining a set of genotypes from the sample, wherein the set of genotypes comprises genotypes of one or more polymorphic loci from Tables 2-14; and c) comparing the set of genotypes of the sample with a set of genotypes associated with efficacy of the drug, wherein similarity between the set of genotypes of the sample and the set of genotypes associated with efficacy of the drug predicts the efficacy of the drug for treating psoriasis disease in the patient.

130. The method of claim 129, wherein the sample of cells is derived from a tissue selected from the group consisting of: the scalp, GI track, muscle, sebaceous gland, nerve, blood, dermis, epidermis, skin, cutaneous surfaces, intertrigious areas, genitalia, vessels and endothelium.

131. The method of claim 130, wherein the cells are selected from the group consisting of: blood, dermis, epidermis, skin, cutaneous surfaces, intertrigious areas, genitalia, vessels and endothelium, keratinocytes, monocytes, neutrophils, Langerhans cells, CD4+ and CD8+ T cells and lymphocytes.

132. The method of claim 129, wherein the sample is obtained via biopsy.

133. The method of claim 129, wherein the set of genotypes from the sample comprises genotypes of at least two of the polymorphic loci listed in Tables 2-14.

134. The method of claim 129 wherein the set of genotypes from the sample is obtained by hybridization to allele-specific oligonucleotides complementary to the polymorphic loci from Tables 2-14, wherein said allele-specific oligonucleotides are contained on a microarray.

135. The method of claim 134, wherein the oligonucleotides comprise nucleic acid molecules at least 95% identical to SEQ ID from Tables 2-14.

136. The method of claim 129, wherein the set of genotypes from the sample is obtained by sequencing said polymorphic loci in said sample.

137. The method of claim 129, wherein the drug is selected from the group consisting of symptom relievers and drugs for psoriasis disease.

138-148. (canceled)

149. A method of assessing a patient's risk of having or developing psoriasis disease, comprising: a) selecting at least one polymorphic locus from Tables 2-14; b) determining a genotype for at least one polymorphic locus from Tables 2-14 in a patient; c) comparing said genotype of b) to a genotype for at least one polymorphic locus from Tables 2-14 that is associated with psoriasis disease; and d) assessing the patient's risk of having or developing psoriasis disease, wherein said patient has a higher risk of having or developing psoriasis disease if the genotype for at least one polymorphic locus from Tables 2-14 in said patient is the same as said genotype for at least one polymorphic locus from Tables 2-14 that is associated with psoriasis disease.

The application's sequence listing, which the Patent Office published only in electronic form, follows.

SEQUENCE LISTING (40189 sequences)

SEQ ID NO: 1 - DNA, 1809 bp, Homo sapiens
acgccggcgctcccaggccgcgcttcctgcgtccccaacccggtccctgagagggcactgcgccctctccaccactgcgttccctcggctaagaatcccccgaaccccagccccgcgatcgcggcgcccaccgaggaggccgcccgggtggggcgcgggggtcgcgaagcccgcagccccggaccgcccagccgagacggagccggacccgccgcctcccgggcccttccaccgcagctatccgcacgggaggcctcgcgattgctcggaaccatcccgcaggagttcagctgatattttctagtgtggggcgagagattttgtggagcgcatttaaggggtttttgttgtgactgctgccttgtatatatttattttctttcttggaactgggcctcgccctcctcccactgacatgatggcccagtccaaggccaatggctcgcactatgcgctgaccgccatcggcctggggatgctggtccttggggtgatcatggccatgtggaacctggtacccggcttcagcgcggccgagaagccaacagctcagggcagcaacaagaccgaggtgggtggcggcatcctcaagagcaagaccttctctgtggcctacgtgctggtcggggccggggtgatgctgctgctgctttctatctgcctgagtatcagggataagaggaagcagcggcagggcgaggacctggcccatgtccagcacccgacaggcgctgggcctcacgcccaggaggaagacagccaggaggaagaagaggaggatgaggaggctgcctcaaggtactatgttcccagctacgaggaagtgatgaacacaaactactcagaagcaaggggagaggagcagaacccgaggttgagcatctctctcccgtcctatgagtcactgacggggctcgacgagaccacccccacatccaccagggctgacgtggaggccagccctgggaacccccctgacaggcagaactctaagttggccaaacgactgaaaccgctgaaagttcgaaggattaaatctgaaaagcttcacctcaaagactttaggatcaacctcccagacaaaaacgtccctcctccctcgatagagcctttgactcctccaccgcagtatgatgaagtccaggagaaggcccccgacacccggccgcccgactgaatggccccacttgagccacgctccctcctgtctctcacacctttcacccccaagactctaacaaagccacatgagccacagttgagaagcggaggggccagctgtgcatggagccatttggatggcggcgggcgggggggattctctgtatcaggagtgactttgttgccccacacagcctcctgctgcaggtgctttggaaagagatgctgccttggagctggtgaatctgtggaccacattcaagggtgtggcacaggcatcttcccatccttttcactccgaatcgctggcgacacattctcctttccagctaggaaagggttcctcgcggctggtttagattgtggttgtttgttttgcttctactaagactgttttgtttcaaaaaggaaacaaattttgtgtttgctgtctacgctggagtcctgaactgtgggtagaaaacacgacctggctttgtagaaaggacacagggctgttttatgaactaagcggtgaggctcaggtggcggctctcacagagcccctgatgctgttgttctttgagggcttaaggcctgatgaacgtaggcacgtgatgcgtaatagtcttcaatggtacacttaactagtctcttctgtgtaacagc

SEQ ID NO: 2 - protein, 253 aa, Homo sapiens
MMAQSKANGSHYALTAIGLGMLVLGVIMAMWNLVPGFSAAEKPTAQGSNKTEVGGGILKSKTFSVAYVLVGAGVMLLLLSICLSIRDKRKQRQGEDLAHVQHPTGAGPHAQEEDSQEEEEEDEEAASRYYVPSYEEVMNTNYSEARGEEQNPRLSISLPSYESLTGLDETTPTSTRADVEASPGNPPDRQNSKLAKRLKPLKVRRIKSEKLHLKDFRINLPDKNVPPPSIEPLTPPPQYDEVQEKAPDTRPPD

SEQ ID NO: 3 - DNA, 4625 bp, Homo sapiens
ccatgtaagaagtgcttttcgcctcccaccatgattctgaggcctccccggccatgtggaactatcagtgccctacagaaaggctacagcaaggtgctgtgccagaccctgtcagagcggaactcagaaatcacatccctgaagaatgagggcgagaacttaaagagagacaacgctatcacatcagggatggtgtcatctttgcaaaaagacatattagcaaaggatgagcaagttcaacaactaaaggaagaggtcagtcacctaaaaagtcagaacaaggacaaggaccaccagctggaagcccttggctctagatgctcggtgctaaaggaagagttaaaacaggaagatgctcacagggagctcagggaagcccaggagaaagagttaaaactctgcaaaacccaaatccaagacatggagaaagaaatgaagaagcttagggcagagctgaggaagagttgtactgaacaaagcgtgatctctaggactctgagagaaaaaagcaaggttgaagagaagcttcaggaggattccagaaggaaattgcttcagctgcaagaaatggggaacagagagagcgtcattaaaatcaatttggagagggcagtaggtcagctggagcacttcagaagtcaagtcatcaaggccacctatggacgggcgaagccgttccgggacaagcccgtcaccgaccaacagttaatagagaaaattacccaggtcactgaggacaacatcaattttcagcagaaaaagtggaccctccagaaagagacccagctgagcaactccaagcaggaggagaccaccgagaacatcgagaagctgaggacgtcgctggacagctgccaggcttgcatgaaaatatcctgttgcagccatgacctgaagaaggaggtcgaccttcttcagcacctccaggtgagcccacctgtctcggggctccagaaggtggtgctggacgtcctgaggcacgcgctgtcctggctggaggaggtggagcagctcctccgggacctcgggatcctgccctccagccccaacaaagggttctctttgtatctgatatatcttctggaacattataaaaaacttatgagccaggcccaggaacttcagatcaagttcaacagttctcaggaaactcagcagtctttactgcaggaaaagctgcgggagcatctggcagagaaggagaagctgaacgaggagaggctagagcaagaggagaagctcaaagccaaaatcaggcaactgacggaagagaaggcggctttggaggagtacattactcaagagagaaacagagcgaaagagactttagaggaagaacggaagagaatgcaagaactggagagcctcctggcccagcagaagaaggctttggcgaaaagcattacccaggagaagaacagagtgaaggaagcattagaggaagagcagacaagagtccaagagctggaggaacgcttggcccgccagaaggagatctcagagagcaacattgcgtacgagaaacgcaaagcaaaggaggccatggagaaggaaaagaaaaaggtgcaagacctggagaatcgcttaaccaagcagaaagaggaattagaattaaaagagcaaaaagaggacgttttaaataataaattaagtgacgcactggccatggttgaagagactcagaaaacaaaggcaactgaaagtctaaaagcagagagcctcgccttgaaattaaatgaaacattagccgaactggaaactaccaagacaaaaatgatcatggtggaagagcggctaatcctgcagcagaagatggtaaaggccctccaggatgagcaggaatcacagagacacgggtttgaagaagagatcatggaatataaggagcaaatcaaacagcacgcccagacaattgtgagcctcgaagagaaactccagaaagtcactcagcaccataaaaaaatagaaggcgagattgcaacattgaaggacaatgacccagccccaaaggaggaaaggccgcaagaccctctggtggctcccatgacagagagcagtgccaaagacatggcgtacgaacatctgatagatgacttattggctgctcagaaggaaattctgtctcagcaggaagtcatcatgaagttaaggaaagaccttaccgaagcccacagcagaatgtcggatttgagaggggagctaaacgagaagcagaagatggaactggagcagaacgtggtgctggtccagcagcagagcaaggagctgagtgtgctcaaggagaagatggcccagatgagcagcctggtagaaaagaaagatcgggagctgaaggcccttgaggaggcactcagggcttcccaagagaaacacagactccagctgaacacagagaaggaacagaagccccggaagaagacccagacgtgtgacacctctgtgcagatagaacccgtccacactgaggccttctccagcagccaagagcagcaatccttcagcgatctaggggtcaggtgcaaagggtcccggcacgaggaggtcattcagcgtcagaaaaaggccttatctgaacttcgagcgcgaattaaagaactcgagaaggcgcgctcaccagatcataaagaccaccagaatgaatcatttctagatttaaagaacctcagaatggaaaacaatgtccagaaaatactactggatgcaaaaccggatttgccaactctctcaagaatagagatcctagcgcctcagaatggcctttgcaacgcaaggttcggctcagccatggagaagtcagggaagatggatgtggctgaggctttagagctcagtgaaaagctgtacctggatatgagcaaaaccctcggaagtctcatgaacatcaagaatatgtcaggccacgtgtccatgaaatacctctcccgccaggagagggagaaggtcaaccagcttcgacaaagggacctcgacctggtgtttgataagatcacccaactcaagaaccagctggggaggaaagaggagctgttgagaggatatgaaaaggacgttgaacagctcaggcggagcaaagtgtccattgagatgtaccagtcgcaggtggcaaagctggaggatgatatctacaaagaggccgaagagaaggccctgctgaaggaggccctggagcgcatggagcaccagctgtgccaggagaagaggatcaacagggccatccggcagcagaagtagatgggagcttccagcccctgcctcgcagacagatggtgaggatgaaagaatgcaggcatccctcgctatctgctgtccactctcgctgtcgtcatacctcaggagccaagtgcttttggatggtgagggtgcttgtcccgtctctgaagcacctgcccagggcctggcaccagccggcggacactgccttccccatgctgcccatgacccatgctgcccgtgacccatgcaggtggtctcctgggtgagtcctgcctcagacccggtagggtctacacactggaaagtttccccaaagcaagtcacacatgagcagcacccgggcggcttccaaagctccctgaaagctggcagaggggctttcctgtctgctttgcagttgacatattcatcatccactcctgcagtccacaaggcactggaacagtgacctctaaatagagccagactctccctttccttcactcttgcctaaggtggagcagatcccaaggctggggttaggcaagtcagggaaagaaccacagtcactgtttcttcatgaccgtctccaggccagggactgggctcacctgagctttgcagccgtgatagggcttattaatgcctctaatagccctgcctggtacgatgatccctattttacagatgaggaaactgcgcctcagagagttaagaggcgcccaagtgcacacagcggctggtaaggacagctgggacctgaccccagatccctctgaccctggttctcctgctgtctgcagggttggccgtgagtcccctccttgtaactgtcagcttttatgtgtgtgtgcattctcgtgtgtgtgtacattctcatgtgtgtgtgtgtgtgcacatgtgtaccatgtgcatgagggtttggctgtgtgtgacactatgtgtgtgtgtttgtgtgtgttgcctgcctgagctcagagagagccaaacccccagagaagggtgccccctccaccaaccaggtgagctccttgcagaggcctggccttcatcccacaaaccttgcagaccacaggctccctggcttgcagcccccaaaaatgaaggcagcgctctgctctggacgtggcctttccagcactcaccactctgaattaaacatcacaggcccccatctgcacatgtcgtggggctgcctcgggcagaggaccgtttccttttacgctgtgccatgccagggagatctgggcagcagcagagtcctgagatgtcctttgatgtacccacaggagagttcgctccttcccgaggcagtgtcccccagggcttggcaggccaggcccacagcagagacaccaaaccacagaatgggacggcagagggccctaaaaagcccattgtcatgcactggctgaaaatgaaagaaaacctgc

SEQ ID NO: 4 - protein, 1066 aa, Homo sapiens
MILRPPRPCGTISALQKGYSKVLCQTLSERNSEITSLKNEGENLKRDNAITSGMVSSLQKDILAKDEQVQQLKEEVSHLKSQNKDKDHQLEALGSRCSVLKEELKQEDAHRELREAQEKELKLCKTQIQDMEKEMKKLRAELRKSCTEQSVISRTLREKSKVEEKLQEDSRRKLLQLQEMGNRESVIKINLERAVGQLEHFRSQVIKATYGRAKPFRDKPVTDQQLIEKITQVTEDNINFQQKKWTLQKETQLSNSKQEETTENIEKLRTSLDSCQACMKISCCSHDLKKEVDLLQHLQVSPPVSGLQKVVLDVLRHALSWLEEVEQLLRDLGILPSSPNKGFSLYLIYLLEHYKKLMSQAQELQIKFNSSQETQQSLLQEKLREHLAEKEKLNEERLEQEEKLKAKIRQLTEEKAALEEYITQERNRAKETLEEERKRMQELESLLAQQKKALAKSITQEKNRVKEALEEEQTRVQELEERLARQKEISESNIAYEKRKAKEAMEKEKKKVQDLENRLTKQKEELELKEQKEDVLNNKLSDALAMVEETQKTKATESLKAESLALKLNETLAELETTKTKMIMVEERLILQQKMVKALQDEQESQRHGFEEEIMEYKEQIKQHAQTIVSLEEKLQKVTQHHKKIEGEIATLKDNDPAPKEERPQDPLVAPMTESSAKDMAYEHLIDDLLAAQKEILSQQEVIMKLRKDLTEAHSRMSDLRGELNEKQKMELEQNVVLVQQQSKELSVLKEKMAQMSSLVEKKDRELKALEEALRASQEKHRLQLNTEKEQKPRKKTQTCDTSVQIEPVHTEAFSSSQEQQSFSDLGVRCKGSRHEEVIQRQKKALSELRARIKELEKARSPDHKDHQNESFLDLKNLRMENNVQKILLDAKPDLPTLSRIEILAPQNGLCNARFGSAMEKSGKMDVAEALELSEKLYLDMSKTLGSLMNIKNMSGHVSMKYLSRQEREKVNQLRQRDLDLVFDKITQLKNQLGRKEELLRGYEKDVEQLRRSKVSIEMYQSQVAKLEDDIYKEAEEKALLKEALERMEHQLCQEKRINRAIRQQK

SEQ ID NO: 5 - DNA, 1369 bp, Homo sapiens
gacatgacagccctcctcaaatatttaaagggctgtctcataaaagagaaataaaacatactcaatgagctccaggtgacagaactgagctcagagaccagaaatcacaaggagacagatctccgctgaatataaagacgagttctataataattggaaccttccagagaaggcatggactttgtgctttaaaagaatcgacagaataattagagaatagactttaccctgtccttgaaggtgggggataagggggctgggtaaatatgtattcctgaatgtctgttattttgctacttgtttttttgtctaggaattagaattaaaagagcaaaaagaggacgttttaaataataaattaagtgacgcactggccatggttgaagagactcagaaaacaaaggcaactgaaagtctaaaagcagagagcctcgccttgaaattaaatgaaacattagccgaactggaaactaccaagacaaaaatgatcatggtggaagagcggctaatcctgcagcagaagatggtaaaggccctccaggatgagcaggaatcacagagacacgggtttgaagaagagatcatggaatataaggagcaaatcaaacagcacgcccagacaattgtgagcctcgaagagaaactccagaaagtcactcagcaccataaaaaaatagaaggcgagattgcaacattgaaggacaatgacccagccccaaaggaggaaaggccgcaagaccctctggtggctcccatgacagagagcagtgccaaagacatggcgtacgaacatctgattgagtctacaaagaagtctatcctcaaagaactgacagttttcagagaaacaaacgtatgaatgggaaagatccagaaagcagcacgtaaagaaggaggcgccgatgggatgcagtggagggattcagaagctcccccaagaggagaaccacctgcctgacccttgcaccaaatcctagtgaccgaagtctaatgtcacagggtttttaccccaaaaagacaaggatactcagcctccgcattgtgaaaagttcctgactcctcctcctgtttaaaatctagaaacggtggtgcccatgacttggagaagactcagcaccacccagctctgctctggtccacttccttggcgtgtgaacatgcttgaattctaaggttttatcctcaagttggaagatttgtggttgcagccaagaacacactcacgtggacacacacgcatgcatgcacacacagaatatactatatctatgtagttattttcattctgatgatcaccagtctttttgtttgtttgtttgacatgcaacctgccagtgttttactttaattcataataaacacagtacct

SEQ ID NO: 6 - protein, 160 aa, Homo sapiens
MVEETQKTKATESLKAESLALKLNETLAELETTKTKMIMVEERLILQQKMVKALQDEQESQRHGFEEEIMEYKEQIKQHAQTIVSLEEKLQKVTQHHKKIEGEIATLKDNDPAPKEERPQDPLVAPMTESSAKDMAYEHLIESTKKSILKELTVFRETNV

SEQ ID NO: 7 - DNA, 2412 bp, Homo sapiens
gagctggagactccgcgggagcgcggccgggaggcttcgccccggagctggcccgacgcctcccgagctggcagggctctcggcggaggtcggagcgtgggcttcctcctcccgccagggaaaacagagaggatgaaggcctatctaaagagcgcagaaggcttttttgtcctaaataaaagtaccacaattggaaggcatgaaaattcagaccttgttttacagtctcctgacatcgacaaccaccatgcactcattgaatataacgaggcggagtgcagctttgttctccaggacttcaattcccgcaacggcacgtttgtcaacgagtgccacattcaaaacgtggctgtgaagctcatccctggagacatcctgagatttgggtctgcagggctgacctatgaactggtcattgaaaatccacctccggtctctttcccatggatgaggggcccagcaccatggccagggccacagccacctcgtgccacacagcagccaaaccaggcccccccaccatcacatatccccttccaccaaggtgtccagccagcaccgatgcaaaggagctggtcccaggcctttcccagacccaccgtggtcctgccggcctcccacaggcggcctgtgagcgccaacaaggagatgttctcgttcgtggtggacgacgcccgcaagccacccgtcatcaagcaaggcctcagggaaactcatgatgtcttttgtgctctctgctgatctcacgccttagtgtggaccaatgccatgaaactgtcagaaaaatcagtggccgaggggattcctggggcagttccccctgcggagatttatgtggaggaggacttggcccagcaggacaagatcagtgccctacagaaaggctacagcaaggtgctgtgccagaccctgtcagagcggaactcagaaatcacatccctgaagaatgagggcgagaacttaaagagagacaacgctatcacatcagggatggtgtcatctttgcaaaaagacatattagcaaaggatgagcaagttcaacaactaaaggaagaggtcagtcacctaaaaagtcagaacaaggacaaggaccaccagctggaagcccttggctctagatgctcggtgctaaaggaagagttaaaacaggaagatgctcacagggagctcagggaagcccaggagaaagagttaaaactctgcaaaacccaaatccaagacatggagaaagaaatgaagaagcttagggcagagctgaggaagagttgtactgaacaaagcgtgatctctaggactctgagagaaaaaagcaagctggagcacttcagaagtcaagtcatcaaggccacctatggacgggcgaagccgttccgggacaagcccgtcaccgaccaacagttaatagagaaaattacccaggtcactgaggacaacatcaattttcagcagaaaaagtggaccctccagaaagagacccagctgagcaactccaagcaggaggagaccaccgagaacatcgagaagctgaggacgtcgctggacagctgccaggcttgcatgaaaatatcctgttgcagccatgacctgaagaaggaggtcgaccttcttcagcacctccaggtgagcccacctgtctcggggctccagaaggtggtgctggacgtcctgaggcacgcgctgtcctggctggaggaggtggagcagctcctccgggacctcgggatcctgccctccagccccaacaaagggttctctttgtatctgatatatcttctggaacattataaaaaacttatgagccaggcccaggaacttcagatcaagttcaacagttctcaggaaactcagcagtctttactgcaggaaaagctgcgggagcatctggcagagaaggagaagctgaacgaggagaggctagagcaagaggagaagctcaaagccaaaatcaggcaactgacggaagagaaggcggctttggaggagtacattactcaagagagaaacagagcgaaagagactttagaggaagaacggaagagaatgcaagaactggagagcctcctggcccagcagaagaaggctttggcgaaaagcattacccagtggaaagtactagagaaacctcgtcccaccaggcctcatgtgatcctctaccagaagctggagcagccaccttggggatcagcagacaccagcagcaggccaaaggatagtggagtggagggacaagaaggcctgggtgagccttctctgagaatcactgagctctgaaccatgaatgaactgcctacctctgtacttcctgttgtataggacaaagaaatccctatctatttaaaccactgtagtcaggtctatgtatttgtgctgtggaacaaaccacccaaactgagtgacttaaaatgacaaata

SEQ ID NO: 8 - protein, 500 aa, Homo sapiens
MKLSEKSVAEGIPGAVPPAEIYVEEDLAQQDKISALQKGYSKVLCQTLSERNSEITSLKNEGENLKRDNAITSGMVSSLQKDILAKDEQVQQLKEEVSHLKSQNKDKDHQLEALGSRCSVLKEELKQEDAHRELREAQEKELKLCKTQIQDMEKEMKKLRAELRKSCTEQSVISRTLREKSKLEHFRSQVIKATYGRAKPFRDKPVTDQQLIEKITQVTEDNINFQQKKWTLQKETQLSNSKQEETTENIEKLRTSLDSCQACMKISCCSHDLKKEVDLLQHLQVSPPVSGLQKVVLDVLRHALSWLEEVEQLLRDLGILPSSPNKGFSLYLIYLLEHYKKLMSQAQELQIKFNSSQETQQSLLQEKLREHLAEKEKLNEERLEQEEKLKAKIRQLTEEKAALEEYITQERNRAKETLEEERKRMQELESLLAQQKKALAKSITQWKVLEKPRPTRPHVILYQKLEQPPWGSADTSSRPKDSGVEGQEGLGEPSLRITEL

SEQ ID NO: 9 - DNA, 3246 bp, Homo sapiens
ccgtcaccgaccaacagttaatagagaaaattacccaggtcactgaggacaacatcaattttcagcagaaaaagtggaccctccagaaagagacccagctgagcaactccaagcaggaggagaccaccgagaacatcgagaagctgaggacgtcgctggacagctgccaggcttgcatgaaaatatcctgttgcagccatgacctgaagaaggaggtcgaccttcttcagcacctccaggtgagcccacctgtctcggggctccagaaggtggtgctggacgtcctgaggcacgcgctgtcctggctggaggaggtggagcagctcctccgggacctcgggatcctgccctccagccccaacaaagggttctctttgtatctgatatatcttctggaacattataaaaaacttatgagccaggcccaggaacttcagatcaagttcaacagttctcaggaaactcagcagtctttactgcaggaaaagctgcgggagcatctggcagagaaggagaagctgaacgaggagaggctagagcaagaggagaagctcaaagccaaaatcaggcaactgacggaagagaaggcggtaaggctttggaggagtacattactcaagagagaaacagagcgaaagagactttagaggaagaacggaagagaatgcaagaactggagagcctcctggcccagcagaagaaggctttggcgaaaagcattacccaggagaagaacagagtgaaggaagcattagaggaagagcagacaagagtccaagagctggaggaacgcttggcccgccagaaggaggttttggagagcagcatagcccatgaaaaaagaaaagcaaaggaagccttggagtcggaaaagagaaaagttcaggatctggagaaccatttaacccaacagaaggagatctcagagagcaacattgcgtacgagaaacgcaaagcaaaggaggccatggagaaggaaaagaaaaaggtgcaagacctggagaatcgcttaaccaagcagaaagaggaattagaattaaaagagcaaaaagaggacgttttaaataataaattaagtgacgcactggccatggttgaagagactcagaaaacaaaggcaactgaaagtctaaaagcagagagcctcgccttgaaattaaatgaaacattagccgaactggaaactaccaagacaaaaatgatcatggtggaagagcggctaatcctgcagcagaagatggtaaaggccctccaggatgagcaggaatcacagagacacgggtttgaagaagagatcatggaatataaggagcaaatcaaacagcacgcccagacaattgtgagcctcgaagagaaactccagaaagtcactcagcaccataaaaaaatagaaggcgagattgcaacattgaaggacaatgacccagccccaaaggaggaaaggccgcaagaccctctggtggctcccatgacagagagcagtgccaaagacatggcgtacgaacatctgatagatgacttattggctgctcagaaggaaattctgtctcagcaggaagtcatcatgaagttaaggaaagaccttaccgaagcccacagcagaatgtcggatttgagaggggagctaaacgagaagcagaagatggaactggagcagaacgtggtgctggtccagcagcagagcaaggagctgagtgtgctcaaggagaagatggcccagatgagcagcctggtagaaaagaaagatcgggagctgaaggcccttgaggaggcactcagggcttcccaagagaaacacagactccagctgaacacagagaaggaacagaagccccggaagaagacccagacgtgtgacacctctgtgcagatagaacccgtccacactgaggccttctccagcagccaagagcaatccttcagcgatctaggggtcaggtgcaaagggtcccggcacgaggaggtcattcagcgtcagaaaaaggccttatctgaacttcgagcgcgaattaaagaactcgagaaggcgcgctcaccagatcataaagaccaccagaatgaatcatttctagatttaaagaacctcagaatggaaaacaatgtccagaaaatactactggatgcaaaaccggatttgccaactctctcaagaatagagatcctagcgcctcagaatggcctttgcaacgcaaggttcggctcagccatggagaagtcagggaagatggatgtggctgaggctttagagctcagtgaaaagctgtacctggatatgagcaaaaccctcggaagtctcatgaacatcaagaatatgtcaggccacgtgtccatgaaatacctctcccgccaggagagggagaaggtcaaccagcttcgacaaagggacctcgacctggtgtttgataagatcacccaactcaagaaccagctggggaggaaagaggagctgttgagaggatatgaaaaggacgttgaacagctcaggcggagcaaagtgtccattgagatgtaccagtcgcaggtggcaaagctggaggatgatatctacaaagaggccgaagagaaggccctgctgaaggaggccctggagcgcatggagcaccagctgtgccaggagaagaggatcaacagggccatccggcagcagaagtagatgggagcttccagcccctgcctcgcagacagatggtgaggatgaaagaatgcaggcatccctcgctatctgctgtccactctcgctgtcgtcatacctcaggagccaagtgcttttggatggtgagggtgcttgtcccgtctctgaagcacctgcccagggcctggcaccagccggcggacactgccttccccatgctgcccatgacccatgctgcccgtgacccatgcaggtggtctcctgggaaagtgtagaggagcacgaactgagaaacgcaaaagaatcgacaccttgcaactgtgccttcaaagagaaagacaggcagagacgagtatttgtagagatggtgaagaacaggatgcagaactcaaattcccaggttggaaccagaaaagcctccctaaagatggaccaagaaagagagatgctgaggaaagagacctccagcaagtccagccagagccttttgcattctaagcccagtggaaagtactagagaaacctcgtcccaccaggcctcatgtgatcctctgtgagttcatgtgactcttctgtgtcatctgtgtcaaaatactgagttgcttttgtaagtc

SEQ ID NO: 10 - protein, 662 aa, Homo sapiens
MQELESLLAQQKKALAKSITQEKNRVKEALEEEQTRVQELEERLARQKEVLESSIAHEKRKAKEALESEKRKVQDLENHLTQQKEISESNIAYEKRKAKEAMEKEKKKVQDLENRLTKQKEELELKEQKEDVLNNKLSDALAMVEETQKTKATESLKAESLALKLNETLAELETTKTKMIMVEERLILQQKMVKALQDEQESQRHGFEEEIMEYKEQIKQHAQTIVSLEEKLQKVTQHHKKIEGEIATLKDNDPAPKEERPQDPLVAPMTESSAKDMAYEHLIDDLLAAQKEILSQQEVIMKLRKDLTEAHSRMSDLRGELNEKQKMELEQNVVLVQQQSKELSVLKEKMAQMSSLVEKKDRELKALEEALRASQEKHRLQLNTEKEQKPRKKTQTCDTSVQIEPVHTEAFSSSQEQSFSDLGVRCKGSRHEEVIQRQKKALSELRARIKELEKARSPDHKDHQNESFLDLKNLRMENNVQKILLDAKPDLPTLSRIEILAPQNGLCNARFGSAMEKSGKMDVAEALELSEKLYLDMSKTLGSLMNIKNMSGHVSMKYLSRQEREKVNQLRQRDLDLVFDKITQLKNQLGRKEELLRGYEKDVEQLRRSKVSIEMYQSQVAKLEDDIYKEAEEKALLKEALERMEHQLCQEKRINRAIRQQK

SEQ ID NO: 11 - DNA, 3981 bp, Homo sapiens
ccatgtaagaagtgcttttcgcctcccaccatgattctgaggcctccccggccatgtggaactatcagtgccctacagaaaggctacagcaaggtgctgtgccagaccctgtcagagcggaactcagaaatcacatccctgaagaatgagggcgagaacttaaagagagacaacgctatcacatcagggatggtgtcatctttgcaaaaagacatattagcaaaggatgagcaagttcaacaactaaaggaagaggtcagtcacctaaaaagtcagaacaaggacaaggaccaccagctggaagcccttggctctagatgctcggtgctaaaggaagagttaaaacaggaagatgctcacagggagctcagggaagcccaggagaaagagttaaaactctgcaaaacccaaatccaagacatggagaaagaaatgaagaagcttagggcagagctgaggaagagttgtactgaacaaagcgtgatctctaggactctgagagaaaaaagcaaggttgaagagaagcttcaggaggattccagaaggaaattgcttcagctgcaagaaatggggaacagagagagcgtcattaaaatcaatttggagagggcagtaggtcagctggagcacttcagaagtcaagtcatcaaggccacctatggacgggcgaagccgttccgggacaagcccgtcaccgaccaacagttaatagagaaaattacccaggtcactgaggacaacatcaattttcagcagaaaaagtggaccctccagaaagagacccagctgagcaactccaagcaggaggagaccaccgagaacatcgagaagctgaggacgtcgctggacagctgccaggcttgcatgaaaatatcctgttgcagccatgacctgaagaaggaggtcgaccttcttcagcacctccaggtgagcccacctgtctcggggctccagaaggtggtgctggacgtcctgaggcacgcgctgtcctggctggaggaggtggagcagctcctccgggacctcgggatcctgccctccagccccaacaaagggttctctttgtatctgatatatcttctggaacattataaaaaacttatgagccaggcccaggaacttcagatcaagttcaacagttctcaggaaactcagcagtctttactgcaggaaaagctgcgggagcatctggcagagaaggagaagctgaacgaggagaggctagagcaagaggagaagctcaaagccaaaatcaggcaactgacggaagagaaggcggctttggaggagtacattactcaagagagaaacagagcgaaagagactttagaggaagaacggaagagaatgcaagaactggagagcctcctggcccagcagaagaaggctttggcgaaaagcattacccaggagaagaacagagtgaaggaagcattagaggaagagcagacaagagtccaagagctggaggaacgcttggcccgccagaaggagatctcagagagcaacattgcgtacgagaaacgcaaagcaaaggaggccatggagaaggaaaagaaaaaggtgcaagacctggagaatcgcttaaccaagcagaaagaggaattagaattaaaagagcaaaaagaggacgttttaaataataaattaagtgacgcactggccatggttgaagagactcagaaaacaaaggcaactgaaagtctaaaagcagagagcctcgccttgaaattaaatgaaacattagccgaactggaaactaccaagacaaaaatgatcatggtggaagagcggctaatcctgcagcagaagatggtaaaggccctccaggatgagcaggaatcacagagacacgggtttgaagaagagatcatggaatataaggagcaaatcaaacagcacgcccagacaattgtgagcctcgaagagaaactccagaaagtcactcagcaccataaaaaaatagaaggcgagattgcaacattgaaggacaatgacccagccccaaaggaggaaaggccgcaagaccctctggtggctcccatgacagagagcagtgccaaagacatggcgtacgaacatctgatagatgacttattggctgctcagaaggaaattctgtctcagcaggaagtcatcatgaagttaaggaaagaccttaccgaagcccacagcagaatgtcggatttgagaggggagctaaacgagaagcagaagatggaactggagcagaacgtggtgctggtccagcagcagagcaaggagctgagtgtgctcaaggagaagatggcccagatgagcagcctggtagaaaagaaagatcgggagctgaaggcccttgaggaggcactcagggcttcccaagagaaacacagactccagctgaacacagagaaggaacagaagccccggaagaagacccagacgtgtgacacctctgtgcagatagaacccgtccacactgaggccttctccagcagccaagagcagcaatccttcagcgatctaggggtcaggtgcaaagggtcccggcacgaggaggtcattcagcgtcagaaaaaggccttatctgaacttcgagcgcgaattaaagaactcgagaaggcgcgctcaccagatcataaagaccaccagaatgaatcatttctagatttaaagaacctcagaatggaaaacaatgtccagaaaatactactggatgcaaaaccggatttgccaactctctcaagaatagagatcctagcgcctcagaatggcctttgcaacgcaaggttcggctcagccatggagaagtcagggaagatggatgtggctgaggctttagagctcagtgaaaagctgtacctggatatgagcaaaaccctcggaagtctcatgaacatcaagaatatgtcaggccacgtgtccatgaaatacctctcccgccaggagagggagaaggtcaaccagcttcgacaaagggacctcgacctggtgtttgataagatcacccaactcaagaaccagctggggaggaaagaggagctgttgagaggatatgaaaaggacgttgaacagctcaggcggagcaaagtgtccattgagatgtaccagtcgcaggtggcaaagctggaggatgatatctacaaagaggccgaagagaaggccctgctgaaggaggccctggagcgcatggagcaccagctgtgccaggagaagaggatcaacagggccatccggcagcagaaggaaagtgtagaggagcacgaactgagaaacgcaaaagaatcgacaccttgcaactgtgccttcaaagagaaagacaggcaggccctgccccacctgcctgcagtttgaacggatgacctaagagacaagcacgcgtccagccccgtctgtccattaagagtcttgctctattgcccaggctagagtgcagtggtgcaatttcggctcactgcaacctccacctcccaggttcaagcgattctcctgcctcagcctcccgagtagctgggactacaggttggaaccagaaaagcctccctaaagatggaccaagaaagagagatgctgaggaaagagacctccagcaagtccagccagagccttttgcattctaagcccagtggaaagtactagagaaacctcgtcccaccaggcctcatgtgatcctctctaggacgggccatgttggaccaatctggctaatgacatataaggaaaagctcctgtggagggcttcccttccagcttctctaggtgaaagcattcacccttggtacctttgtcttgtctcctttctcactcctggagctcagaccagaagctggagcagccaccttggggatcagcagacaccagcagcaggccaaaggatagtggagtggagggacaagaaggcctgggtgagccttctctgagaatcactgagctctgaaccatgaatgaactgcctacctctgtacttcctgttgtataggacaaagaaatccctatcta

SEQ ID NO: 12 - protein, 1101 aa, Homo sapiens
MILRPPRPCGTISALQKGYSKVLCQTLSERNSEITSLKNEGENLKRDNAITSGMVSSLQKDILAKDEQVQQLKEEVSHLKSQNKDKDHQLEALGSRCSVLKEELKQEDAHRELREAQEKELKLCKTQIQDMEKEMKKLRAELRKSCTEQSVISRTLREKSKVEEKLQEDSRRKLLQLQEMGNRESVIKINLERAVGQLEHFRSQVIKATYGRAKPFRDKPVTDQQLIEKITQVTEDNINFQQKKWTLQKETQLSNSKQEETTENIEKLRTSLDSCQACMKISCCSHDLKKEVDLLQHLQVSPPVSGLQKVVLDVLRHALSWLEEVEQLLRDLGILPSSPNKGFSLYLIYLLEHYKKLMSQAQELQIKFNSSQETQQSLLQEKLREHLAEKEKLNEERLEQEEKLKAKIRQLTEEKAALEEYITQERNRAKETLEEERKRMQELESLLAQQKKALAKSITQEKNRVKEALEEEQTRVQELEERLARQKEISESNIAYEKRKAKEAMEKEKKKVQDLENRLTKQKEELELKEQKEDVLNNKLSDALAMVEETQKTKATESLKAESLALKLNETLAELETTKTKMIMVEERLILQQKMVKALQDEQESQRHGFEEEIMEYKEQIKQHAQTIVSLEEKLQKVTQHHKKIEGEIATLKDNDPAPKEERPQDPLVAPMTESSAKDMAYEHLIDDLLAAQKEILSQQEVIMKLRKDLTEAHSRMSDLRGELNEKQKMELEQNVVLVQQQSKELSVLKEKMAQMSSLVEKKDRELKALEEALRASQEKHRLQLNTEKEQKPRKKTQTCDTSVQIEPVHTEAFSSSQEQQSFSDLGVRCKGSRHEEVIQRQKKALSELRARIKELEKARSPDHKDHQNESFLDLKNLRMENNVQKILLDAKPDLPTLSRIEILAPQNGLCNARFGSAMEKSGKMDVAEALELSEKLYLDMSKTLGSLMNIKNMSGHVSMKYLSRQEREKVNQLRQRDLDLVFDKITQLKNQLGRKEELLRGYEKDVEQLRRSKVSIEMYQSQVAKLEDDIYKEAEEKALLKEALERMEHQLCQEKRINRAIRQQKESVEEHELRNAKESTPCNCAFKEKDRQALPHLPAV

SEQ ID NO: 13 - DNA, 3577 bp, Homo sapiens
ccatgtaagaagtgcttttcgcctcccaccatgattctgaggcctccccggccatgtggaactatcagtgccctacagaaaggctacagcaaggtgctgtgccagaccctgtcagagcggaactcagaaatcacatccctgaagaatgagggcgagaacttaaagagagacaacgctatcacatcagggatggtgtcatctttgcaaaaagacatattagcaaaggatgagcaagttcaacaactaaaggaagaggtcagtcacctaaaaagtcagaacaaggacaaggaccaccagctggaagcccttggctctagatgctcggtgctaaaggaagagttaaaacaggaagatgctcacagggagctcagggaagcccaggagaaagagttaaaactctgcaaaacccaaatccaagacatggagaaagaaatgaagaagcttagggcagagctgaggaagagttgtactgaacaaagcgtgatctctaggactctgagagaaaaaagcaaggttgaagagaagcttcaggaggattccagaaggaaattgcttcagctgcaagaaatggggaacagagagagcgtcattaaaatcaatttggagagggcagtaggtcagctggagcacttcagaagtcaagtcatcaaggccacctatggacgggcgaagccgttccgggacaagcccgtcaccgaccaacagttaatagagaaaattacccaggtcactgaggacaacatcaattttcagcagaaaaagtggaccctccagaaagagacccagctgagcaactccaagcaggaggagaccaccgagaacatcgagaagctgaggacgtcgctggacagctgccaggcttgcatgaaaatatcctgttgcagccatgacctgaagaaggaggtcgaccttcttcagcacctccaggtgagcccacctgtctcggggctccagaaggtggtgctggacgtcctgaggcacgcgctgtcctggctggaggaggtggagcagctcctccgggacctcgggatcctgccctccagccccaacaaagggttctctttgtatctgatatatcttctggaacattataaaaaacttatgagccaggcccaggaacttcagatcaagttcaacagttctcaggaaactcagcagtctttactgcaggaaaagctgcgggagcatctggcagagaaggagaagctgaacgaggagaggctagagcaagaggagaagctcaaagccaaaatcaggcaactgacggaagagaaggcggctttggaggagtacattactcaagagagaaacagagcgaaagagactttagaggaagaacggaagagaatgcaagaactggagagcctcctggcccagcagaagaaggctttggcgaaaagcattacccaggagaagaacagagtgaaggaagcattagaggaagagcagacaagagtccaagagctggaggaacgcttggcccgccagaaggagatctcagagagcaacattgcgtacgagaaacgcaaagcaaaggaggccatggagaaggaaaagaaaaaggtgcaagacctggagaatcgcttaaccaagcagaaagaggaattagaattaaaagagcaaaaagaggacgttttaaataataaattaagtgacgcactggccatggttgaagagactcagaaaacaaaggcaactgaaagtctaaaagcagagagcctcgccttgaaattaaatgaaacattagccgaactggaaactaccaagacaaaaatgatcatggtggaagagcggctaatcctgcagcagaagatggtaaaggccctccaggatgagcaggaatcacagagacacgggtttgaagaagagatcatggaatataaggagcaaatcaaacagcacgcccagacaattgtgagcctcgaagagaaactccagaaagtcactcagcaccataaaaaaatagaaggcgagattgcaacattgaaggacaatgacccagccccaaaggaggaaaggccgcaagaccctctggtggctcccatgacagagagcagtgccaaagacatggcgtacgaacatctgatagatgacttattggctgctcagaaggaaattctgtctcagcaggaagtcatcatgaagttaaggaaagaccttaccgaagcccacagcagaatgtcggatttgagaggggagctaaacgagaagcagaagatggaactggagcagaacgtggtgctggtccagcagcagagcaaggagctgagtgtgctcaaggagaagatggcccagatgagcagcctggtagaaaagaaagatcgggagctgaaggcccttgaggaggcactcagggcttcccaagagaaacacagactccagctgaacacagagaaggaacagaagccccggaagaagacccagacgtgtgacacctctgtgcagatagaacccgtccacactgaggccttctccagcagccaagagcagcaatccttcagcgatctaggggtcaggtgcaaagggtcccggcacgaggaggtcattcagcgtcagaaaaaggccttatctgaacttcgagcgcgaattaaagaactcgagaaggcgcgctcaccagatcataaagaccaccagaatgaatcatttctagatttaaagaacctcagaatggaaaacaatgtccagaaaatactactggatgcaaaaccggatttgccaactctctcaagaatagagatcctagcgcctcagaatggcctttgcaacgcaaggttcggctcagccatggagaagtcagggaagatggatgtggctgaggctttagagctcagtgaaaagctgtacctggatatgagcaaaaccctcggaagtctcatgaacatcaagaatatgtcaggccacgtgtccatgaaatacctctcccgccaggagagggagaaggtcaaccagcttcgacaaagggacctcgacctggtgtttgataagatcacccaactcaagaaccagctggggaggaaagaggagctgttgagaggatatgaaaaggacgttgaacagctcaggcggagcaaagtgtccattgagatgtaccagtcgcaggtggcaaagctggaggatgatatctacaaagaggccgaagagaaggccctgctgaaggaggccctggagcgcatggagcaccagctgtgccaggagaagaggatcaacagggccatccggcagcagaagatgggagcttccagcccctgcctcgcagacagatggtgaggatgaaagaatgcaggcatccctcgctatctgctgtccactctcgctgtcgtcatacctcaggagccaagtgcttttggatggttggaaccagaaaagcctccctaaagatggaccaagaaagagagatgctgaggaaagagacctccagcaagtccagccagagccttttgcattctaagcccagtggaaagtactagagaaacctcgtcccaccaggcctcatgtgatcctctgtgagttcatgtgactcttctgtgtcatctgtgtcaaaatactgagttgcttttgtaagtctttaaagattgtt

SEQ ID NO: 14 - protein, 1078 aa, Homo sapiens
MILRPPRPCGTISALQKGYSKVLCQTLSERNSEITSLKNEGENLKRDNAITSGMVSSLQKDILAKDEQVQQLKEEVSHLKSQNKDKDHQLEALGSRCSVLKEELKQEDAHRELREAQEKELKLCKTQIQDMEKEMKKLRAELRKSCTEQSVISRTLREKSKVEEKLQEDSRRKLLQLQEMGNRESVIKINLERAVGQLEHFRSQVIKATYGRAKPFRDKPVTDQQLIEKITQVTEDNINFQQKKWTLQKETQLSNSKQEETTENIEKLRTSLDSCQACMKISCCSHDLKKEVDLLQHLQVSPPVSGLQKVVLDVLRHALSWLEEVEQLLRDLGILPSSPNKGFSLYLIYLLEHYKKLMSQAQELQIKFNSSQETQQSLLQEKLREHLAEKEKLNEERLEQEEKLKAKIRQLTEEKAALEEYITQERNRAKETLEEERKRMQELESLLAQQKKALAKSITQEKNRVKEALEEEQTRVQELEERLARQKEISESNIAYEKRKAKEAMEKEKKKVQDLENRLTKQKEELELKEQKEDVLNNKLSDALAMVEETQKTKATESLKAESLALKLNETLAELETTKTKMIMVEERLILQQKMVKALQDEQESQRHGFEEEIMEYKEQIKQHAQTIVSLEEKLQKVTQHHKKIEGEIATLKDNDPAPKEERPQDPLVAPMTESSAKDMAYEHLIDDLLAAQKEILSQQEVIMKLRKDLTEAHSRMSDLRGELNEKQKMELEQNVVLVQQQSKELSVLKEKMAQMSSLVEKKDRELKALEEALRASQEKHRLQLNTEKEQKPRKKTQTCDTSVQIEPVHTEAFSSSQEQQSFSDLGVRCKGSRHEEVIQRQKKALSELRARIKELEKARSPDHKDHQNESFLDLKNLRMENNVQKILLDAKPDLPTLSRIEILAPQNGLCNARFGSAMEKSGKMDVAEALELSEKLYLDMSKTLGSLMNIKNMSGHVSMKYLSRQEREKVNQLRQRDLDLVFDKITQLKNQLGRKEELLRGYEKDVEQLRRSKVSIEMYQSQVAKLEDDIYKEAEEKALLKEALERMEHQLCQEKRINRAIRQQKMGASSPCLADRW

SEQ ID NO: 15 - DNA, 1671 bp, Homo sapiens
catgattctgaggcctccccggccatgtggaactatcagtgccctacagaaaggctacagcaaggtgctgtgccagaccctgtcagagcggaactcagaaatcacatccctgaagaatgagggcgagaacttaaagagagacaacgctatcacatcagggatggtgtcatctttgcaaaaagacatattagcaaaggatgagcaagttcaacaactaaaggaagaggtcagtcacctaaaaagtcagaacaaggacaaggaccaccagctggaagcccttggctctagactggagcacttcagaagtcaagtcatcaaggccacctatggacgggcgaagccgttccgggacaagcccgtcaccgaccaacagttaatagagaaaattacccaggtcactgaggacaacatcaattttcagcagaaaaagtggaccctccagaaagagacccagctgagcaactccaagcaggaggagaccaccgagaacatcgagaagctgaggacgtcgctggacagctgccaggcttgcatgaaaatatcctgttgcagccatgacctgaagaaggaggtcgaccttcttcagcacctccaggtgagcccacctgtctcggggctccagaaggtggtgctggacgtcctgaggcacgcgctgtcctggctggaggaggtggagcagctcctccgggacctcgggatcctgccctccagccccaacaaaggttactgggactttttttctcacatggttgcatgactctaaaatgtcgcgttgaatctcagcatgatgggacatctgttgaggaagtcttcctgggtatctggccaagtctattcccttctccagaaccccctgcttctctgcttgaggcgtaattttccattaaaaaaaaaaacacacacatacaagtgagacacgataactgaagaaaaatgaaacaaaacagaggcaaaaggaaaattaaatcgaaattatgcaaagtctaattacgctgtttaacctccaaggcattttcccatggaaataaccgcgtgattccaggcaagtgacttaccctgtctatgcctcagtttccctatctgtaaaatgaggctaatagggagtacccaccctttagggctgttgtgatcattaaaatgcatgaatatatggaaagtacttggaatagtacctggcacacaataggcattactgaatgtttattgacttttaatttgacaaaaaaatagtgtcacgttaccctcgattttctttggtttattcctaatggtacgtcatccatgtcagtagacacagacctacatcatcgctgttaccgacggcagttactgattccattgtgtaggatgtgccattgttttagacaatcccctatcatgggcacttaggtgatttccagtttttcacactcataaatcatgctgggatgaacattgttgcacacatacctgctcatattatctttattctcctagaggtggagaggtatgaatcactttctttcaacaaatagtgattgcatgcatgcttaccagaggccacatgttgtgcagggcagagacgtaacggggtcaggaacaggtagaatcaggtcatgggtatatggttcactgtaaaattcttccaatatgtccatacatttgaaattttttataataaaatactgggga

SEQ ID NO: 16 - protein, 251 aa, Homo sapiens
MILRPPRPCGTISALQKGYSKVLCQTLSERNSEITSLKNEGENLKRDNAITSGMVSSLQKDILAKDEQVQQLKEEVSHLKSQNKDKDHQLEALGSRLEHFRSQVIKATYGRAKPFRDKPVTDQQLIEKITQVTEDNINFQQKKWTLQKETQLSNSKQEETTENIEKLRTSLDSCQACMKISCCSHDLKKEVDLLQHLQVSPPVSGLQKVVLDVLRHALSWLEEVEQLLRDLGILPSSPNKGYWDFFSHMVA

SEQ ID NO: 17 - DNA, 4539 bp, Homo sapiens
ccatgtaagaagtgcttttcgcctcccaccatgattctgaggcctccccggccatgtggaactatcagtgccctacagaaaggctacagcaaggtgctgtgccagaccctgtcagagcggaactcagaaatcacatccctgaagaatgagggcgagaacttaaagagagacaacgctatcacatcagggatggtgtcatctttgcaaaaagacatattagcaaaggatgagcaagttcaacaactaaaggaagaggtcagtcacctaaaaagtcagaacaaggacaaggaccaccagctggaagcccttggctctagatgctcggtgctaaaggaagagttaaaacaggaagatgctcacagggagctcagggaagcccaggagaaagagttaaaactctgcaaaacccaaatccaagacatggagaaagaaatgaagaagcttagggcagagctgaggaagagttgtactgaacaaagcgtgatctctaggactctgagagaaaaaagcaaggttgaagagaagcttcaggaggattccagaaggaaattgcttcagctgcaagaaatggggaacagagagagcgtcattaaaatcaatttggagagggcagtaggtcagctggagcacttcagaagtcaagtcatcaaggccacctatggacgggcgaagccgttccgggacaagcccgtcaccgaccaacagttaatagagaaaattacccaggtcactgaggacaacatcaattttcagcagaaaaagtggaccctccagaaagagacccagctgagcaactccaagcaggaggagaccaccgagaacatcgagaagctgaggacgtcgctggacagctgccaggcttgcatgaaaatatcctgttgcagccatgacctgaagaaggaggtcgaccttcttcagcacctccaggtgagcccacctgtctcggggctccagaaggtggtgctggacgtcctgaggcacgcgctgtcctggctggaggaggtggagcagctcctccgggacctcgggatcctgccctccagccccaacaaagggttctctttgtatctgatatatcttctggaacattataaaaaacttatgagccaggcccaggaacttcagatcaagttcaacagttctcaggaaactcagcagtctttactgcaggaaaagctgcgggagcatctggcagagaaggagaagctgaacgaggagaggctagagcaagaggagaagctcaaagccaaaatcaggcaactgacggaagagaaggcggctttggaggagtacattactcaagagagaaacagagcgaaagagactttagaggaagaacggaagagaatgcaagaactggagagcctcctggcccagcagaagaaggctttggcgaaaagcattacccaggagaagaacagagtgaaggaagcattagaggaagagcagacaagagtccaagagctggaggaacgcttggcccgccagaaggagatctcagagagcaacattgcgtacgagaaacgcaaagcaaaggaggccatggagaaggaaaagaaaaaggtgcaagacctggagaatcgcttaaccaagcagaaagaggaattagaattaaaagagcaaaaagaggacgttttaaataataaattaagtgacgcactggccatggttgaagagactcagaaaacaaaggcaactgaaagtctaaaagcagagagcctcgccttgaaattaaatgaaacattagccgaactggaaactaccaagacaaaaatgatcatggtggaagagcggctaatcctgcagcagaagatggtaaaggccctccaggatgagcaggaatcacagagacacgggtttgaagaagagatcatggaatataaggagcaaatcaaacagcacgcccagacaattgtgagcctcgaagagaaactccagaaagtcactcagcaccataaaaaaatagaaggcgagattgcaacattgaaggacaatgacccagccccaaaggaggaaaggccgcaagaccctctggtggctcccatgacagagagcagtgccaaagacatggcgtacgaacatctgatagatgacttattggctgctcagaaggaaattctgtctcagcaggaagtcatcatgaagttaaggaaagaccttaccgaagcccacagcagaatgtcggatttgagaggggagctaaacgagaagcagaagatggaactggagcagaacgtggtgctggtccagcagcagagcaaggagctgagtgtgctcaaggagaagatggcccagatgagcagcctggtagaaaagaaagatcgggagctgaaggcccttgaggaggcactcagggcttcccaagagaaacacagactccagctgaacacagagaaggaacagaagccccggaagaagacccagacgtgtgacacctctgtgcagatagaacccgtccacactgaggccttctccagcagccaagagcagcaatccttcagcgatctaggggtcaggtgcaaagggtcccggcacgaggaggtcattcagcgtcagaaaaaggccttatctgaacttcgagcgcgaattaaagaactcgagaaggcgcgctcaccagatcataaagaccaccagaatgaatcatttctagatttaaagaacctcagaatggaaaacaatgtccagaaaatactactggatgcaaaaccggatttgccaactctctcaagaatagagatcctagcgcctcagaatggcctttgcaacgcaaggttcggctcagccatggagaagtcagggaagatggatgtggctgaggctttagagctcagtgaaaagctgtacctggatatgagcaaaaccctcggaagtctcatgaacatcaagaatatgtcaggccacgtgtccatgaaatacctctcccgccaggagagggagaaggtcaaccagcttcgacaaagggacctcgacctggtgtttgataagatcacccaactcaagaaccagctggggaggaaagaggagctgttgagaggatatgaaaaggacgttgaacagctcaggcggagcaaagtgtccattgagatgtaccagtcgcaggtggcaaagctggaggatgatatctacaaagaggccgaagagaaggccctgctgaaggaggccctggagcgcatggagcaccagctgtgccaggagaagaggatcaacagggccatccggcagcagaagatgaggaaactgcgcctcagagagttaagaggcgcccaagtgcacacagcggctggtaaggacagctgggacctgaccccagatccctctgaccctggttctcctgctgtctgcagggttggccgaaagtgtagaggagcacgaactgagaaacgcaaaagaatcgacaccttgcaactgtgccttcaaagagaaagacaggcaggccctgccccacctgcctgcagtttgaacggatgacctaagagacaagcacgcgtccagccccgtctgtccattaagagacgagtatttgtagagatggtgaagaacaggatgcagaactcaaattcccaggttggaaccagaaaagcctccctaaagatggaccaagaaagagagatgctgaggaaagagacctccagcaagtccagccagagccttttgcattctaagcccagtggaaagtactagagaaacctcgtcccaccaggcctcatgtgatcctctgtgagttcatgtgactcttctgtgtcatctgtgtcaaaatactgagttgcttttgtaagtctttaaagattgttaccctagtgtttcatttcctagaccagtattttgaacaatattatattttggagactgtggggagaagggttcttctttaaaaatacctatgaatgtacacgaactcaggtatatgaagaatagaagtgtgtaacccagatgtccaggcctggtagatataattatgtggtccacgttgggtcatgatgttcccaaatatcaaacctcctaagacttccaacagactcacacttgagaaaacctaagacttgtactggagcctcagggcagaattgtaaccttggagctctcagggccttgggatagtgaattcaagtctccgttatggcctggcaggatggctcatgcctgtaatctcagcactttgggaggccgaggcaggcggattataagatcaggagtttgagaccagcctggcaaacatagtgaatacctgtctctactaaaaatacaaaaattagccaggtgtggtggcacatgcctgtagtcccagctacacaggaggctgaggtgggagaatcacttgaacctaggaggcagaggttgcagtgagccaagaccacgccattgcacgccagcctaacagagtgagactctgtctttaaaaaaaaaaaaaaatggctgggcctgtaatcccagctactcgggaggctgagacaggagaatcacttcaacccgggaggtgatgattgcagggagccaagatcacacaactgcactctagcctgagtgacagagcaagactcc

SEQ ID NO: 18 - protein, 1145 aa, Homo sapiens
MILRPPRPCGTISALQKGYSKVLCQTLSERNSEITSLKNEGENLKRDNAITSGMVSSLQKDILAKDEQVQQLKEEVSHLKSQNKDKDHQLEALGSRCSVLKEELKQEDAHRELREAQEKELKLCKTQIQDMEKEMKKLRAELRKSCTEQSVISRTLREKSKVEEKLQEDSRRKLLQLQEMGNRESVIKINLERAVGQLEHFRSQVIKATYGRAKPFRDKPVTDQQLIEKITQVTEDNINFQQKKWTLQKETQLSNSKQEETTENIEKLRTSLDSCQACMKISCCSHDLKKEVDLLQHLQVSPPVSGLQKVVLDVLRHALSWLEEVEQLLRDLGILPSSPNKGFSLYLIYLLEHYKKLMSQAQELQIKFNSSQETQQSLLQEKLREHLAEKEKLNEERLEQEEKLKAKIRQLTEEKAALEEYITQERNRAKETLEEERKRMQELESLLAQQKKALAKSITQEKNRVKEALEEEQTRVQELEERLARQKEISESNIAYEKRKAKEAMEKEKKKVQDLENRLTKQKEELELKEQKEDVLNNKLSDALAMVEETQKTKATESLKAESLALKLNETLAELETTKTKMIMVEERLILQQKMVKALQDEQESQRHGFEEEIMEYKEQIKQHAQTIVSLEEKLQKVTQHHKKIEGEIATLKDNDPAPKEERPQDPLVAPMTESSAKDMAYEHLIDDLLAAQKEILSQQEVIMKLRKDLTEAHSRMSDLRGELNEKQKMELEQNVVLVQQQSKELSVLKEKMAQMSSLVEKKDRELKALEEALRASQEKHRLQLNTEKEQKPRKKTQTCDTSVQIEPVHTEAFSSSQEQQSFSDLGVRCKGSRHEEVIQRQKKALSELRARIKELEKARSPDHKDHQNESFLDLKNLRMENNVQKILLDAKPDLPTLSRIEILAPQNGLCNARFGSAMEKSGKMDVAEALELSEKLYLDMSKTLGSLMNIKNMSGHVSMKYLSRQEREKVNQLRQRDLDLVFDKITQLKNQLGRKEELLRGYEKDVEQLRRSKVSIEMYQSQVAKLEDDIYKEAEEKALLKEALERMEHQLCQEKRINRAIRQQKMRKLRLRELRGAQVHTAAGKDSWDLTPDPSDPGSPAVCRVGRKCRGARTEKRKRIDTLQLCLQRERQAGPAPPACSLNG

SEQ ID NO: 19 - DNA, 356 bp, Homo sapiens
ccatgcaggtggtctcctggatgaggaaactgcgcctcagagagttaagaggcgcccaagtgcacacagcggctgagacgagtatttgtagagatggtgaagaacaggatgcagaactcaaattcccaggttggaaccagaaaagcctccctaaagatggaccaagaaagagagatgctgaggaaagagacctccagcaagtccagccagagccttttgcattctaagcccagtggaaagtactagagaaacctcgtcccaccaggcctcatgtgatcctctgtgagttcatgtgactcttctgtgtcatctgtgtcaaaatactgagttgcttttgtaagtctttaaagattgtt

SEQ ID NO: 20 - protein, 74 aa, Homo sapiens
MQVVSWMRKLRLRELRGAQVHTAAETSICRDGEEQDAELKFPGWNQKSLPKDGPRKRDAEERDLQQVQPEPFAF

SEQ ID NO: 21 - DNA, 4203 bp, Homo sapiens
ccatgtaagaagtgcttttcgcctcccaccatgattctgaggcctccccggccatgtggaactatcagtgccctacagaaaggctacagcaaggtgctgtgccagaccctgtcagagcggaactcagaaatcacatccctgaagaatgagggcgagaacttaaagagagacaacgctatcacatcagggatggtgtcatctttgcaaaaagacatattagcaaaggatgagcaagttcaacaactaaaggaagaggtcagtcacctaaaaagtcagaacaaggacaaggaccaccagctggaagcccttggctctagatgctcggtgctaaaggaagagttaaaacaggaagatgctcacagggagctcagggaagcccaggagaaagagttaaaactctgcaaaacccaaatccaagacatggagaaagaaatgaagaagcttagggcagagctgaggaagagttgtactgaacaaagcgtgatctctaggactctgagagaaaaaagcaaggttgaagagaagcttcaggaggattccagaaggaaattgcttcagctgcaagaaatggggaacagagagagcgtcattaaaatcaatttggagagggcagtaggtcagctggagcacttcagaagtcaagtcatcaaggccacctatggacgggcgaagccgttccgggacaagcccgtcaccgaccaacagttaatagagaaaattacccaggtcactgaggacaacatcaattttcagcagaaaaagtggaccctccagaaagagacccagctgagcaactccaagcaggaggagaccaccgagaacatcgagaagctgaggacgtcgctggacagctgccaggcttgcatgaaaatatcctgttgcagccatgacctgaagaaggaggtcgaccttcttcagcacctccaggtgagcccacctgtctcggggctccagaaggtggtgctggacgtcctgaggcacgcgctgtcctggctggaggaggtggagcagctcctccgggacctcgggatcctgccctccagccccaacaaagggttctctttgtatctgatatatcttctggaacattataaaaaacttatgagccaggcccaggaacttcagatcaagttcaacagttctcaggaaactcagcagtctttactgcaggaaaagctgcgggagcatctggcagagaaggagaagctgaacgaggagaggctagagcaagaggagaagctcaaagccaaaatcaggcaactgacggaagagaaggcggctttggaggagtacattactcaagagagaaacagagcgaaagagactttagaggaagaacggaagagaatgcaagaactggagagcctcctggcccagcagaagaaggctttggcgaaaagcattacccaggagaagaacagagtgaaggaagcattagaggaagagcagacaagagtccaagagctggaggaacgcttggcccgccagaaggagatctcagagagcaacattgcgtacgagaaacgcaaagcaaaggaggccatggagaaggaaaagaaaaaggtgcaagacctggagaatcgcttaaccaagcagaaagaggaattagaattaaaagagcaaaaagaggacgttttaaataataaattaagtgacgcactggccatggttgaagagactcagaaaacaaaggcaactgaaagtctaaaagcagagagcctcgccttgaaattaaatgaaacattagccgaactggaaactaccaagacaaaaatgatcatggtggaagagcggctaatcctgcagcagaagatggtaaaggccctccaggatgagcaggaatcacagagacacgggtttgaagaagagatcatggaatataaggagcaaatcaaacagcacgcccagacaattgtgagcctcgaagagaaactccagaaagtcactcagcaccataaaaaaatagaaggcgagattgcaacattgaaggacaatgacccagccccaaaggaggaaaggccgcaagaccctctggtggctcccatgacagagagcagtgccaaagacatggcgtacgaacatctgatagatgacttattggctgctcagaaggaaattctgtctcagcaggaagtcatcatgaagttaaggaaagaccttaccgaagcccacagcagaatgtcggatttgagaggggagctaaacgagaagcagaagatggaactggagcagaacgtggtgctggtccagcagcagagcaaggagctgagtgtgctcaaggagaagatggcccagatgagcagcctggtagaaaagaaagatcgggagctgaaggcccttgaggaggcactcagggcttcccaagagaaacacagactccagctgaacacagagaaggaacagaagccccggaagaagacccagacgtgtgacacctctgtgcagatagaacccgtccacactgaggccttctccagcagccaagagcagcaatccttcagcgatctaggggtcaggtgcaaagggtcccggcacgaggaggtcattcagcgtcagaaaaaggccttatctgaacttcgagcgcgaattaaagaactcgagaaggcgcgctcaccagatcataaagaccaccagaatgaatcatttctagatttaaagaacctcagaatggaaaacaatgtccagaaaatactactggatgcaaaaccggatttgccaactctctcaagaatagagatcctagcgcctcagaatggcctttgcaacgcaaggttcggctcagccatggagaagtcagggaagatggatgtggctgaggctttagagctcagtgaaaagctgtacctggatatgagcaaaaccctcggaagtctcatgaacatcaagaatatgtcaggccacgtgtccatgaaatacctctcccgccaggagagggagaaggtcaaccagcttcgacaaagggacctcgacctggtgtttgataagatcacccaactcaagaaccagctggggaggaaagaggagctgttgagaggatatgaaaaggacgttgaacagctcaggcggagcaaagtgtccattgagatgtaccagtcgcaggtggcaaagctggaggatgatatctacaaagaggccgaagagaaggccctgctgaaggaggccctggagcgcatggagcaccagctgtgccaggagaagaggatcaacagggccatccggcagcagaaggttggaaccagaaaagcctccctaaagatggaccaagaaagagagatgctgaggaaagagacctccagcaagtccagccagagccttttgcattctaagcccagtggaaagtactagagaaacctcgtcccaccaggcctcatgtgatcctctgtgagttcatgtgactcttctgtgtcatctgtgtcaaaatactgagttgcttttgtaagtctttaaagattgttaccctagtgtttcatttcctagaccagtattttgaacaatattatattttggagactgtggggagaagggttcttctttaaaaatacctatgaatgtacacgaactcaggtatatgaagaatagaagtgtgtaacccagatgtccaggcctggtagatataattatgtggtccacgttgggtcatgatgttcccaaatatcaaacctcctaagacttccaacagactcacacttgagaaaacctaagacttgtactggagcctcagggcagaattgtaaccttggagctctcagggccttgggatagtgaattcaagtctccgttatggcctggcaggatggctcatgcctgtaatctcagcactttgggaggccgaggcaggcggattataagatcaggagtttgagaccagcctggcaaacatagtgaatacctgtctctactaaaaatacaaaaattagccaggtgtggtggcacatgcctgtagtcccagctacacaggaggctgaggtgggagaatcacttgaacctaggaggcagaggttgcagtgagccaagaccacgccattgcacgccagcctaacagagtgagactctgtctttaaaaaaaaaaaaaaatggctgggcctgtaatcccagctactcgggaggctgagacaggagaatcacttcaacccgggaggtgatgattgcagggagccaagatcacacaactgcactctagcctgagtgacagagcaagactcc

SEQ ID NO: 22 - protein, 1104 aa, Homo sapiens
MILRPPRPCGTISALQKGYSKVLCQTLSERNSEITSLKNEGENLKRDNAITSGMVSSLQKDILAKDEQVQQLKEEVSHLKSQNKDKDHQLEALGSRCSVLKEELKQEDAHRELREAQEKELKLCKTQIQDMEKEMKKLRAELRKSCTEQSVISRTLREKSKVEEKLQEDSRRKLLQLQEMGNRESVIKINLERAVGQLEHFRSQVIKATYGRAKPFRDKPVTDQQLIEKITQVTEDNINFQQKKWTLQKETQLSNSKQEETTENIEKLRTSLDSCQACMKISCCSHDLKKEVDLLQHLQVSPPVSGLQKVVLDVLRHALSWLEEVEQLLRDLGILPSSPNKGFSLYLIYLLEHYKKLMSQAQELQIKFNSSQETQQSLLQEKLREHLAEKEKLNEERLEQEEKLKAKIRQLTEEKAALEEYITQERNRAKETLEEERKRMQELESLLAQQKKALAKSITQEKNRVKEALEEEQTRVQELEERLARQKEISESNIAYEKRKAKEAMEKEKKKVQDLENRLTKQKEELELKEQKEDVLNNKLSDALAMVEETQKTKATESLKAESLALKLNETLAELETTKTKMIMVEERLILQQKMVKALQDEQESQRHGFEEEIMEYKEQIKQHAQTIVSLEEKLQKVTQHHKKIEGEIATLKDNDPAPKEERPQDPLVAPMTESSAKDMAYEHLIDDLLAAQKEILSQQEVIMKLRKDLTEAHSRMSDLRGELNEKQKMELEQNVVLVQQQSKELSVLKEKMAQMSSLVEKKDRELKALEEALRASQEKHRLQLNTEKEQKPRKKTQTCDTSVQIEPVHTEAFSSSQEQQSFSDLGVRCKGSRHEEVIQRQKKALSELRARIKELEKARSPDHKDHQNESFLDLKNLRMENNVQKILLDAKPDLPTLSRIEILAPQNGLCNARFGSAMEKSGKMDVAEALELSEKLYLDMSKTLGSLMNIKNMSGHVSMKYLSRQEREKVNQLRQRDLDLVFDKITQLKNQLGRKEELLRGYEKDVEQLRRSKVSIEMYQSQVAKLEDDIYKEAEEKALLKEALERMEHQLCQEKRINRAIRQQKVGTRKASLKMDQEREMLRKETSSKSSQSLLHSKPSGKY

SEQ ID NO: 23 - DNA, 2387 bp, Homo sapiens
gccaaggcgagtgccgcgcgggccaccatggccacggacgagctggccaccaagctgagccggcggctgcagatggagggcgagggcggcggcgagaccccggagcagcccgggctgaacggggcagcggcggcggcggcgggggcacccgacgaggcggccgaggcgctgggcagcgcggactgcgagctgagcgccaagctgctgcggcgcgcagacctcaaccagggcatcggcgagccccagtcgcccagccgccgcgtcttcaacccctacaccgagttcaaggagttctccaggaagcagatcaaggacatggagaagatgttcaagcagtatgatgccgggcgggacggcttcatcgacctgatggagctaaaactcatgatggagaaacttggggcccctcagacccacctgggcctgaaaaacatgatcaaggaggtggatgaggactttgacagcaagctgagcttccgggagttcctcctgatcttccgcaaggcggcggccggggagcttcaggaggacagcgggctgtgcgtgctggcccgcctctctgagatcgacgtctccagtgagggtgtcaagggggccaagagcttctttgaggccaaggtccaggccatcaacgtgtccagccgcttcgaggaggagatcaaggcagagcaggaggaaaggaagaagcaggcggaggagatgaagcagcggaaagcggccttcaaggagctgcagtccacctttaagtagcgggggctgcagccgaccgccctgctctggccccagtgtggtgggcgagggtggcgcatgggaggccgagcctgaatccttgcctgtgtctgacgggaccactactaaaaacctaaaaatatctgtgaatggagcaagttcaggggtcttatggaggtggcccggcccctccccgctcccttccactctgcacgaggccgccacaccggcgctggctccctgcccggcccggccctccctggcaatccctgggctctcttgcacccctaactgccccctgcctgctccggcactgccccaggcccagctcctggccctaggtccctcccagccccatgtgcctgccgcctgccctccacacatccctgtccccccaacccgggaacccctgccctcctccagcaggccgcaccgcccctggggccccctgccagccccttcccaggctgggagacggcagaagagatagaatcagggctgcccccacagagtgggacccaaggggctaattggaggcacgaggggacccctccccagggccttttcctcctctgcgtcttccatctactgaaatgggagagggggtggggagcttctgttctggtgaagggacccgggcaggcccccagcaccccatgctgacttggagaaccccagatctctggggcccagccaggcagggtgtgggggcagctgtgccaatctacctcacaggcccaccccctgccgggcatgccgtgggatcatgggcagggaaggctctgggggtcggagacaccgctgcttagcacccccagccagaacaccctgagggtctcggggctctggagagagtggggcgggaggaagaattggcaccttcctagggaaggagacgagcgcttcgccttgattctccgagaagcctccgagaagtgctttaagtgtgtttgcatgcgccaggcggtgggcagcgggggcctgtccagccctctcccgccatccttccccaagtgacgtccactgccttgtcaccagcgacctgcctgtcatgcccaccccctgaggaagcatggggaccctaacaccctggtgccctgcaccagacaggccgtggtcaggcccaggccaccggccgggttctgccacagcttcccacgtgcttgctgacatgcgtgtgcctgtgtgtggtgtctgttgctgtgtcgtgaaactgtgaccatcactcagtccaaacaagtgagtggccctcgaggccacagttatgcaactttcagtgtgtgtcataacgacgtcactgctttttaaactcgataactctttattttagtaaaatgcccaggagtcctggaagctacgcggacttgcagaggttttattttttggccttagaatctgcagaaattaggaggcaccgagcccagcgcagcagcctcggacccggattgcgtttgccttagcggatatgtttatacagatgaatataaaatgtttttttctttgggctttttgcttcttttttcccccccttctcaccttcccttctccccgaccccaccccccaaaaaagctacttcttcattccgtggtacgattattttttttaactaaaggaagataaaattctatattcttaaaaaaaaaaaaaaaaaaaaaaa

SEQ ID NO: 24 - protein, 240 aa, Homo sapiens
MATDELATKLSRRLQMEGEGGGETPEQPGLNGAAAAAAGAPDEAAEALGSADCELSAKLLRRADLNQGIGEPQSPSRRVFNPYTEFKEFSRKQIKDMEKMFKQYDAGRDGFIDLMELKLMMEKLGAPQTHLGLKNMIKEVDEDFDSKLSFREFLLIFRKAAAGELQEDSGLCVLARLSEIDVSSEGVKGAKSFFEAKVQAINVSSRFEEEIKAEQEERKKQAEEMKQRKAAFKELQSTFK

SEQ ID NO: 25 - DNA, 917 bp, Homo sapiens
cagccagtcctgagcacctaaccatgttgggcatcactgtcctcgctgcgctcttggcctgtgcctccagctgtggggtgcccagcttcccgcccaacctatccgcccgagtggtgggaggagaggatgcccggccccacagctggccctggcagatctccctccagtacctcaagaacgacacgtggaggcatacgtgtggcgggactttgattgctagcaacttcgtcctcactgccgcccactgcatcagcaacacccggacctaccgtgtggccgtgggaaagaacaacctggaggtggaagacgaagaaggatccctgtttgtgggtgtggacaccatccacgtccacaagagatggaatgccctcctgttgcgcaatgatattgccctcatcaagcttgcagagcatgtggagctgagtgacaccatccaggtggcctgcctgccagagaaggactccctgctccccaaggactacccctgctatgtcaccggctggggccgcctctggaccaacggccccattgctgataagctgcagcagggcctgcagcccgtggtggatcacgccacgtgctccaggattgactggtggggcttcagggtgaagaaaaccatggtgtgcgctgggggcgatggcgtcatctcagcctgcaatggggactccggtggcccactgaactgccagttggagaacggttcctgggaggtgtttggcatcgtcagctttggctcccggcggggctgcaacacccgcaagaagccggtagtctacacccgggtgtccgcctacatcgactggatcaacgagaaaatgcagctgtgatttgttgctgggagcggcggcagcgagtccctgcaacagcaataaacttccttctcctcgggccacctgaaaaaaaaaaaaaaaaaa

SEQ ID NO: 26 - protein, 268 aa, Homo sapiens [sequence omitted]

SEQ ID NO: 27 - DNA, 979 bp, Homo sapiens
cttacagaactcccacggacacaccatgataaggacgctgctgctgtccactttggtggctggagccctcagttgtggggaccccacttacccaccttatgtgactagggtggttggcggtgaagaagcgaggcccaacagctggccctggcaggtctccctgcagtacagctccaatggcaagtggtaccacacctgcggagggtccctgatagccaacagctgggtcctgacggctgcccactgcatcagctcctccaggacctaccgcgtggggctgggccggcacaacctctacgttgcggagtccggctcgctggcagtcagtgtctctaagattgtggtgcacaaggactggaactccaaccaaatctccaaagggaacgacattgccctgctcaaactggctaaccccgtctccctcaccgacaagatccagctggcctgcctccctcctgccggcaccattctacccaacaactacccctgctacgtcacgggctggggaaggctgcagaccaacggggctgttcctgatgtcctgcagcagggccggttgctggttgtggactatgccacctgctccagctctgcctggtggggcagcagcgtgaaaaccagtatgatctgtgctgggggtgatggcgtgatctccagctgcaacggagactctggcgggccactgaactgtcaggcgtctgacggccggtggcaggtgcacggcatcgtcagcttcgggtctcgcctcggctgcaactactaccacaagccctccgtcttcacgcgggtctccaattacatcgactggatcaattcggtgattgcaaataactaaccaaaagaagtccctgggactgtttcagacttggaaaggtcacagaaggaaaataatataataaagtgacaactatgcaaaaaaaaaaaaaaaaaaaaaaaaaaaaaaaaaaataaaaaaaaaaaaaaaaaaaaaaaaaaaaaa

SEQ ID NO: 28 - protein, 269 aa, Homo sapiens
MIRTLLLSTLVAGALSCGDPTYPPYVTRVVGGEEARPNSWPWQVSLQYSSNGKWYHTCGGSLIANSWVLTAAHCISSSRTYRVGLGRHNLYVAESGSLAVSVSKIVVHKDWNSNQISKGNDIALLKLANPVSLTDKIQLACLPPAGTILPNNYPCYVTGWGRLQTNGAVPDVLQQGRLLVVDYATCSSSAWWGSSVKTSMICAGGDGVISSCNGDSGGPLNCQASDGRWQVHGIVSFGSRLGCNYYHKPSVFTRVSNYIDWINSVIANN

SEQ ID NO: 29 - DNA, 941 bp, Homo sapiens
cttacagaactcccacggacacaccatgattaggaccctgctgctgtccactttggtggctggagccctcagttgtggggtctccacttacgcgcctgatatgtctaggatgcttggaggtgaagaagcgaggcccaacagctggccctggcaggtctccctgcagtacagctccaatggccagtggtaccacacctgcggagggtccctgatagccaacagctgggtcctgacggctgcccactgcatcagctcctccgggatctaccgcgtgatgctgggccagcataacctctacgttgcagagtccggctcgctggccgtcagtgtctctaagattgtggtgcacaaggactggaactccgaccaggtctccaaagggaacgacattgccctgctcaaactggctaaccccgtctccctcaccgacaagatccagctggcctgcctccctcctgccggcaccattctacccaacaactacccctgctacgtcacgggctggggaaggctgcagaccaacggggctctccctgatgacctgaagcagggccggttgctggttgtggactatgccacctgctccagctctggctggtggggcagcaccgtgaagacgaatatgatctgtgctgggggtgatggcgtgatatgcacctgcaacggagactccggtgggccgctgaactgtcaggcatctgacggccggtgggaggtgcatggcatcggcagcctcacgtcggtccttggttgcaactactactacaagccctccatcttcacgcgggtctccaactacaacgactggatcaattcggtgattgcaaataactaaccaaaagaagtccctgggactgtttcagacttggaaaggtcacagaaggaaaataatattatataaagtgacaactatgcaaatcacaaaaaaaaaaaaaaaaaaa

SEQ ID NO: 30 - protein, 269 aa, Homo sapiens
MIRTLLLSTLVAGALSCGVSTYAPDMSRMLGGEEARPNSWPWQVSLQYSSNGQWYHTCGGSLIANSWVLTAAHCISSSGIYRVMLGQHNLYVAESGSLAVSVSKIVVHKDWNSDQVSKGNDIALLKLANPVSLTDKIQLACLPPAGTILPNNYPCYVTGWGRLQTNGALPDDLKQGRLLVVDYATCSSSGWWGSTVKTNMICAGGDGVICTCNGDSGGPLNCQASDGRWEVHGIGSLTSVLGCNYYYKPSIFTRVSNYNDWINSVIANN

SEQ ID NO: 31 - DNA, 2034 bp, Homo sapiens
ggccctggggcgggggcgggtcctggggactggggcgggcggccgaggcccggaagcggactgaggcggcctggagtcttagttggctactcgccatggacgaagcggatcggcggctcctgcggcggtgccggctgcggctggtggaagagctgcaggtggaccagctctgggacgccctgctgagccgcgagctgttcaggccccatatgatcgaggacatccagcgggcaggctctggatctcggcgggatcaggccaggcagctgatcatagatctggagactcgagggagtcaggctcttcctttgttcatctcctgcttagaggacacaggccaggacatgctggcttcgtttctgcgaactaacaggcaagcagcaaagttgtcgaagccaaccctagaaaaccttaccccagtggtgctcagaccagagattcgcaaaccagaggttctcagaccggaaacacccagaccagtggacattggttctggaggatttggtgatgtcggtgctcttgagagtttgaggggaaatgcagatttggcttacatcctgagcatggagccctgtggccactgcctcattatcaacaatgtgaacttctgccgtgagtccgggctccgcacccgcactggctccaacatcgactgtgagaagttgcggcgtcgcttctcctcgctgcatttcatggtggaggtgaagggcgacctgactgccaagaaaatggtgctggctttgctggagctggcgcagcaggaccacggtgctctggactgctgcgtggtggtcattctctctcacggctgtcaggccagccacctgcagttcccaggggctgtctacggcacagatggatgccctgtgtcggtcgagaagattgtgaacatcttcaatgggaccagctgccccagcctgggagggaagcccaagctctttttcatccaggcctgtggtggggagcagaaagaccatgggtttgaggtggcctccacttcccctgaagacgagtcccctggcagtaaccccgagccagatgccaccccgttccaggaaggtttgaggaccttcgaccagctggacgccatatctagtttgcccacacccagtgacatctttgtgtcctactctactttcccaggttttgtttcctggagggaccccaagagtggctcctggtacgttgagaccctggacgacatctttgagcagtgggctcactctgaagacctgcagtccctcctgcttagggtcgctaatgctgtttcggtgaaagggatttataaacagatgcctggttgctttaatttcctccggaaaaaacttttctttaaaacatcataaggccagggcccctcaccctgccttatcttgcaccccaaagctttcctgccccaggcctgaaagaggctgaggcctggactttcctgcaactcaaggactttgcagccggcacagggtctgctctttctctgccagtgacagacaggctcttagcagcttccagattgacgacaagtgctgaacagtggaggaagagggacagatgaatgccgtggattgcacgtggcctcttgagcagtggctggtccagggctagtgacttgtgtcccatgatccctgtgttgtctctagagcagggattaacctctgcactactgacatgtggggccaggtcaccctttgctgtgaggctgtcctgtacattgtgggatgttcagcactgtcccttgcctcaatgccagtaacgcgtcttcctgagtggtgccaaacaaaaaggttctcaggtgttgccaaatatgtcctggggtataaaactttcctcgcctgacaaccactggtctgtagggatttttggctacacacaaaccagtatcgctcatagatcagcaaaccggggcctactagagtctgaacagctgtaatctatgaattctaagtgaaattttaaaaattgttaatttttcctatattgcattaattttaaaaaaaaaaaaaaaaaaaaaaaaaaaaaaaaaaaaaaaaaaaaaaa

SEQ ID NO: 32 - protein, 416 aa, Homo sapiens
MDEADRRLLRRCRLRLVEELQVDQLWDALLSRELFRPHMIEDIQRAGSGSRRDQARQLIIDLETRGSQALPLFISCLEDTGQDMLASFLRTNRQAAKLSKPTLENLTPVVLRPEIRKPEVLRPETPRPVDIGSGGFGDVGALESLRGNADLAYILSMEPCGHCLIINNVNFCRESGLRTRTGSNIDCEKLRRRFSSLHFMVEVKGDLTAKKMVLALLELAQQDHGALDCCVVVILSHGCQASHLQFPGAVYGTDGCPVSVEKIVNIFNGTSCPSLGGKPKLFFIQACGGEQKDHGFEVASTSPEDESPGSNPEPDATPFQEGLRTFDQLDAISSLPTPSDIFVSYSTFPGFVSWRDPKSGSWYVETLDDIFEQWAHSEDLQSLLLRVANAVSVKGIYKQMPGCFNFLRKKLFFKTS

SEQ ID NO: 33 - DNA, 1584 bp, Homo sapiens
ggccctggggcgggggcgggtcctggggactggggcgggcggccgaggcccggaagcggactgaggcggcctggagtcttagttggctactcgccatggacgaagcggatcggcggctcctgcggcggtgccggctgcggctggtggaagagctgcaggtggaccagctctgggacgccctgctgagccgcgagctgttcaggccccatatgatcgaggacatccagcgggcaggctctggatctcggcgggatcaggccaggcagctgatcatagatctggagactcgagggagtcaggctcttcctttgttcatctcctgcttagaggacacaggccaggacatgctggcttcgtttctgcgaactaacaggcaagcagcaaagttgtcgaagccaaccctagaaaaccttaccccagtggtgctcagaccagagattcgcaaaccagaggttctcagaccggaaacacccagaccagtggacattggttctggaggatttggtgatgtcgagcagaaagaccatgggtttgaggtggcctccacttcccctgaagacgagtcccctggcagtaaccccgagccagatgccaccccgttccaggaaggtttgaggaccttcgaccagctggacgccatatctagtttgcccacacccagtgacatctttgtgtcctactctactttcccaggttttgtttcctggagggaccccaagagtggctcctggtacgttgagaccctggacgacatctttgagcagtgggctcactctgaagacctgcagtccctcctgcttagggtcgctaatgctgtttcggtgaaagggatttataaacagatgcctggttgctttaatttcctccggaaaaaacttttctttaaaacatcataaggccagggcccctcaccctgccttatcttgcaccccaaagctttcctgccccaggcctgaaagaggctgaggcctggactttcctgcaactcaaggactttgcagccggcacagggtctgctctttctctgccagtgacagacaggctcttagcagcttccagattgacgacaagtgctgaacagtggaggaagagggacagatgaatgccgtggattgcacgtggcctcttgagcagtggctggtccagggctagtgacttgtgtcccatgatccctgtgttgtctctagagcagggattaacctctgcactactgacatgtggggccaggtcaccctttgctgtgaggctgtcctgtacattgtgggatgttcagcactgtcccttgcctcaatgccagtaacgcgtcttcctgagtggtgccaaacaaaaaggttctcaggtgttgccaaatatgtcctggggtataaaactttcctcgcctgacaaccactggtctgtagggatttttggctacacacaaaccagtatcgctcatagatcagcaaaccggggcctactagagtctgaacagctgtaatctatgaattctaagtgaaattttaaaaattgttaatttttcctatattgcattaattttaaaaaaaaaaaaaaaaaaaaaaaaaaaaaaaaaaaaaaaaaaaaaaa

SEQ ID NO: 34 - protein, 266 aa, Homo sapiens
MDEADRRLLRRCRLRLVEELQVDQLWDALLSRELFRPHMIEDIQRAGSGSRRDQARQLIIDLETRGSQALPLFISCLEDTGQDMLASFLRTNRQAAKLSKPTLENLTPVVLRPEIRKPEVLRPETPRPVDIGSGGFGDVEQKDHGFEVASTSPEDESPGSNPEPDATPFQEGLRTFDQLDAISSLPTPSDIFVSYSTFPGFVSWRDPKSGSWYVETLDDIFEQWAHSEDLQSLLLRVANAVSVKGIYKQMPGCFNFLRKKLFFKTS

SEQ ID NO: 35 - DNA, 6035 bp, Homo sapiens
ctccccaggcccaggcgagcgctggtgtggacgggaagctcccggcccggcgaactaactggagcacggagctgcagccggttgggccggtgtactttcccgctctggaaaggaagagaaatggaagtgagaaagttgagcatttcctggcagttcttgatagttctggttctgatcctgcaaattctgtctgcgttggattttgacccatacagagtcctaggggtcagccgaacagccagtcaggctgatattaaaaaggcttataagaagctcgcccgggaatggcatcctgacaaaaacaaagatcctggagcagaagacaagttcattcaaatcagtaaggcttacgagattctttcaaatgaagaaaagagatcaaattatgatcaatatggagacgctggagagaaccagggctaccagaagcagcaacagcagcgagagtatcgcttccgccatttccatgaaaatttttattttgatgaatccttttttcacttcccttttaattctgaacggcgggactcaattgacgaaaagtatttattgcacttttcacattatgtgaatgaagtggttccagatagcttcaagaaaccctacctcatcaagatcacctccgattggtgctttagctgcattcatatcgagcctgtgtggaaagaagtcattcaagaactggaagaattgggtgtaggaattggcgtggtccatgctgggtatgagagacgcctggcccatcacctaggggcacacagcacgccctctatcctaggaatcattaacgggaaaatctccttcttccacaatgcagttgtccgtgaaaatctgcgacaatttgtagaaagtcttcttccagggaacttggtggagaaagttacaaataaaaattacgtcagattcctctctggctggcagcaagagaataagcctcatgtccttctgtttgaccaaacgcccattgtgccactgttatacaagttgactgcctttgcatacaaagattatttatcatttggatatgtatatgtgggtttgagagggacggaagagatgacaaggcggtacaacatcaatatctacgcccctaccctcttggtctttaaagaacatataaacaggcctgccgatgttatccaggcccgaggtatgaagaagcaaatcattgacgacttcatcacccgaaacaaatatctattggcagccaggctcaccagccagaagttgttccatgaactctgccctgtgaaacggtcgcatcgacagaggaagtactgtgtggttttattgactgctgagactaccaagttgagcaaaccctttgaggctttcctgtcctttgccctggcaaacactcaagacacagtgagatttgtgcatgtctacagcaatcggcagcaggagtttgccgacaccttactaccagacagtgaggcgtttcaagggaaatcagcggtgtctattttagaaaggcgcaacacagcaggaagggtggtgtataaaaccctggaagacccttggattgggagtgagagtgacaaatttatcctcttgggctatctcgaccagctgcgtaaagatccagctcttctgtcctctgaagcagtgcttcctgacctgaccgatgaacttgcccctgtttttctccttcgatggttctactctgcttctgactacatctcagactgctgggatagcatttttcacaacaactggagggaaatgatgcccctgctgtccctgatcttctctgccctcttcatcctcttcggcactgtcatcgttcaggctttcagcgactctaatgatgagcgagagtcaagccctccagaaaaagaggaagcccaagagaagactgggaaaactgagccaagcttcaccaaagaaaacagcagcaagattcctaaaaaaggctttgtggaggtaactgaactcacagatgtaacatacaccagtaacttggtacgtctgaggccaggccacatgaatgtggtcctcatcctgtcgaattctaccaagaccagcctactacagaaatttgctttggaggtctacacatttactgggagcagctgcctacacttctccttcctgagtctagataaacacagagaatggctagaatacttactagaatttgctcaagatgcagctccaatcccaaaccaatatgataagcatttcatggagcgtgactacactggttatgtactggctctgaatggccacaagaaatacttctgcctcttcaagccccaaaagacagtcgaagaggaggaagccatagggtcgtgcagtgatgttgactcttccctctacctgggtgaatctcgagggaaaccttcctgtggccttggatccaggcccatcaaaggaaagttgagcaagctctctttatggatggaacgcctgctggagggctccttacagaggttttatatcccatcatggcctgaactagactgagaggattttccaaagagatttgaactcttcagactttttaacatgcccctgtgaacaggtattttcaggactcaaactaccacaatgaacagagtatagattttagattgctcttctagaaccatggctagaagaatctttcctttgtcctgttctaacctaggaatgaaaaacaccaccagtttgaatcgcctagatgaaaatcttttcctctgggtgttatttttccccactgaatgccacaccattgaaaatagactgctcatcccctcttcctttcttgtccttgtcccatgctcaccccaccctcctgtcctgtgtcttggagaagcacagggctccaccctgcaagcggcatctggcggaccctcatgagcctgtcgtgcaggccaggtcattggccccttccccaatcccggccctgctgtgctgctgccatggcgcatgctcctaactctgaacaacccacggcagcttctagccccgcatctggaaaaaggcccctttccaagcaatctcacgtttactggttgttctgggagtaagtggctaaatgtatattttgggggtatcccccaacaacagtttgttggccacaggttgaaaaggaaaggaataaacgggagttctgcatgtgagttctcaagaaaaggaaagggaggctgagcagtggctgaagcgatgcagccttgagacacgctgtgagcatcccatccgccgccccagcgctgctggtagccaggggaggggtctgcacagcgagaagtactgtgatgactttgagccgttgacatgtatgtcttcagatgcctttctgcctctgtcgattttagggtatggatattaggagccataacttgtaatcttgttctctgaacgtagagataagctgctataaagccagtagatgttaaactgaagagaaattattcccacctgctatgagtcaggcttaaggaatctcttcaatagtgtctctttagtaaaataccaaacatgtctttgtatcaaggaacttaaaatttctcaacaattgtattttgaacactgttaccctaaaagtgctgtctcttcaagtcatcttttgcaggaagtgagccaagatttgttctagactcccattttgcaaaaggcttactttccacttctgggctgtattttgatgtctcatcttcattgttttcactcttaacttagagctgcttcaccagtattggggtcagactggccatcagcacctgagcgtgctgagctccaggtatagtggaccccagggtgcctcataccagccagttagagagcataccttttatttttcagggcagaatgaccagtggttctgagtttgagtttggacagcttcaaagagtggtccgttcaaatgtcaaagcaaggtgcctttggtggctttgtgaagggtgaaaatcagtgatgggacatttactaagtatttctttttttttttttttttttagttgttgagacagagtttcactcttgttgcccaggctggagtgaaatggtgcgatctcggttcaccgcaacctccacatcccaggttcaagtgattctcctgcctcagcctcctgagtagctaggattacaggcatgtgccaccatgtaattagcccggctaattttgtatttttagtagagacgggatttctccatgttgatcaggctggtcatgaactcctgacctcaggtgatctgcctgcctcagcctcccaaagtgctgctgggattacaggcgtgagccaccactcccggctaagttagtatttctttaatcttaatgctttaaactaagccacttggatcctgaataatttaaatcttgagctacattggtaagtaataaattatttaaggccaggaattcctgtagttttcatggagtctgtagctttattaaaaaataaatcactgccaggcttcattcttccatatgatcctctaaaaatggacacttcctctgaatgctgtatctcatggcacctggtccaactagaaatggtcaaggaattcatttggctccttgatacatcagtcctcaatattactttctaggtattttatggccagattgcttatatgagtggtcttttggtttggtagtaggtttttatttttaatttctgtactaatgaaattcctgactttaatttctgaaaaccaaaaactctccaagtgtatttatttatattttttttaatagagacgaggtcttgctatgttgcccaggctggtcccaaactcctggcctcaagcagtccttccaccttggcctcccaaagtgctgggattatcaatatgagccaccatgccagatttgttcatttttaaacatttttatctcttcaagtcatcttttgatcttttaaaaagcaccttcaaacagctgcaccttccatttgcactaggaaatgaaggtagtgatgggattggcaatgttcctggcagatgtttcagcccaaaagctcttctacagaccggtttagagctggtgccctatgagaatattagggagcttttattttaaattgaactttacccttgtccatgcaaggcattcctcctgaatgcatccatgaatttgtttacttttgcgtcaaacatatgagccattgtcatgctcagcctgtgccaccattgctctgtctgatgtatgtaatcatacaagacctgattttggttctaacacagtggtctttgactatcaacattgatgtttttagagatgggttcttctggttgatacagactatgcattgcgtttagcagatggggtaaaactggcctaaaacaagtctttgcagaatacatgccaatttccaaaaaaaaaaaaaaatttgttgctcaggtgttgcacaatttttatctaacactgaggctatcagctccaactaaacaacatttcagtgggtgaggctgccctaacttccattaggggccatggtctcactgccatcacttattagccatgagaatttggttgtagttttcaggtaggttggtttcttcctcatttgcagcttgttgatacttgttcctttttatttattaacatcccaatcaatttgcagctgccatcattacataaatatttttctgttataaaaagaagtgtgatctgtttttttagtgatttcctttgtttgggaatagagattggaagcacatactcagacctgttttgttaactagaattctttaaaagctgatgccaaacatctttacagaggaactgtagttcacatccacctgtctgacattgtcccctaaaaacaagtgcagtgtggcagctgctgaatctgtctgttcagtttgtcaaggaggataattatgcttgggagagatctgaaaagaaggtgaatattttgcacttttgatactcttaggaacaaataacttatttggcaaattgtttcttttttatgttttgggtgttgtttttgttttttgactttttttgtattgtgaacaggcactgaagctgatgttattttaagattacagaatggaaaaagaaataaactattttaatgtctgataaaaaaaaaaac

SEQ ID NO: 36 - protein, 782 aa, Homo sapiens
MEVRKLSISWQFLIVLVLILQILSALDFDPYRVLGVSRTASQADIKKAYKKLAREWHPDKNKDPGAEDKFIQISKAYEILSNEEKRSNYDQYGDAGENQGYQKQQQQREYRFRHFHENFYFDESFFHFPFNSERRDSIDEKYLLHFSHYVNEVVPDSFKKPYLIKITSDWCFSCIHIEPVWKEVIQELEELGVGIGVVHAGYERRLAHHLGAHSTPSILGIINGKISFFHNAVVRENLRQFVESLLPGNLVEKVTNKNYVRFLSGWQQENKPHVLLFDQTPIVPLLYKLTAFAYKDYLSFGYVYVGLRGTEEMTRRYNINIYAPTLLVFKEHINRPADVIQARGMKKQIIDDFITRNKYLLAARLTSQKLFHELCPVKRSHRQRKYCVVLLTAETTKLSKPFEAFLSFALANTQDTVRFVHVYSNRQQEFADTLLPDSEAFQGKSAVSILERRNTAGRVVYKTLEDPWIGSESDKFILLGYLDQLRKDPALLSSEAVLPDLTDELAPVFLLRWFYSASDYISDCWDSIFHNNWREMMPLLSLIFSALFILFGTVIVQAFSDSNDERESSPPEKEEAQEKTGKTEPSFTKENSSKIPKKGFVEVTELTDVTYTSNLVRLRPGHMNVVLILSNSTKTSLLQKFALEVYTFTGSSCLHFSFLSLDKHREWLEYLLEFAQDAAPIPNQYDKHFMERDYTGYVLALNGHKKYFCLFKPQKTVEEEEAIGSCSDVDSSLYLGESRGKPSCGLGSRPIKGKLSKLSLWMERLLEGSLQRFYIPSWPELD

SEQ ID NO: 37 - DNA, 2196 bp, Homo sapiens
cttgatcccagggcgcccctgacctttgagccggctcgggttccggctctggcgcgtgcacactcgcctcgccgttcgggaccagccagatcgcggcggcctcgcgggcggtttggtcggtgaggtcttggccgcgcgcggcaatgctgaggctgctggcgtccgggtgcgcccggggcccggggcccggcgtgggcgcgcgtcctgccgcagggctctttcatccggggcgccgccagagccgccaggcttccgacgcgccccggaaccagccccccagccccgagttcgtggcccggccggtgggcgtctgctccatgatgcgcctgccggtgcagacctcccccgaggggctggacgctgccttcatcggggtgcccctggatactgggacctccaaccggcctggggcgagattcggacctcgccgcatccgggaagaatcagtgatgcttgggacagtcaatcctagcacgggggccctccccttccagtccctcatggttgcagacctaggcgatgtgaatgtcaatctttacaaccttcaggacagctgccggcgaattcaagaggcctatgagaaaattgtagcagctggctgtattcctctgaccttgggtggagatcacacaatcacatatcccatattgcaagcgatggcaaaaaagcatggcccagtggggctgctgcacgtggatgcgcacacggacacgaccgacaaggccctaggagagaagctctaccacggggcgcccttccgccggtgtgtggatgagggtctcctggactgtaagcgtgtggtgcagattggcatccggggctcttccacgaccttggatccctacagatacaaccggagccagggcttccgggtagtcctggctgaagactgctggatgaagtcgctggttcctctgatgggggaagtcaggcagcagatgggaggcaaacccatttatatcagctttgatattgacgctctggatcctgcctatgcgccagggacagggacacctgaaattgctggtctcactcctagtcaggctctggagatcatcaggggttgtcaaggcctgaacgtgatgggctgtgatcttgtcgaagtttcaccaccgtatgatctttctgggaacacagccctgctggcggctaacctgctgtttgagatgctatgtgctctccccaaagtgacaaccgtctgagtcttgtgctcttcaagacaaaacagattgcgtcgctgacaagttctcaagaagaacttatgagtaagcagtctgagaactaaagagtttatgccaagaaaactttctgctgaaagtgtcattgctggctgtgaagtcgggataatcagtagaattctcacccaaacagcaacatttctaaggaacttggattaattgggggaaaaaaaaaggagtacttgtactgctttgattttttttcctttgatgaaagatggaggataaaggggaagtgaggagaatttctttcaagattatctaaacattagaaacatgacatttaaaaaaactatgaaataatactgtataagcattccatatttctatatcttccttttaaacatttttttttttgagatggagttttgcttgtcacccaggctggagtgcaatggcatgatctcggttcattgcaacctccgcctcccgagttcaatcgattctcctgcctcagcctcctgagtacctgggattacgggtgcctgccaccacgcctggctaatttttgtatttttagtccagacagggtttcaccacattggccaggctggtcttgaactcctgacctaaggtgatccgcccgcctcagcctccttaaagtgctgggattacaggcatgagccaccgcacccagccgctttttaaaattttgatgatctgcttcctagagtattgagtatcttcctttaaactacagctcctcctcggacgctgcagtgagctgagatcgcaccactgcactccagcctgggtgccagagcaagactccatctcaaaaaaaaaaaaaaaaaatacagcttctcctatgaggtgcttagggctgcatcttggttttaggaccactgtgaacgtaagtaaaaagtataaagtaacacggagagcctaatgaagaaacttcttgctcagaggcctagaagggtacacaaaatgtcttctaaactagaaaacctaaggc

SEQ ID NO: 38 - protein, 352 aa, Homo sapiens
MLRLLASGCARGPGPGVGARPAAGLFHPGRRQSRQASDAPRNQPPSPEFVARPVGVCSMMRLPVQTSPEGLDAAFIGVPLDTGTSNRPGARFGPRRIREESVMLGTVNPSTGALPFQSLMVADLGDVNVNLYNLQDSCRRIQEAYEKIVAAGCIPLTLGGDHTITYPILQAMAKKHGPVGLLHVDAHTDTTDKALGEKLYHGAPFRRCVDEGLLDCKRVVQIGIRGSSTTLDPYRYNRSQGFRVVLAEDCWMKSLVPLMGEVRQQMGGKPIYISFDIDALDPAYAPGTGTPEIAGLTPSQALEIIRGCQGLNVMGCDLVEVSPPYDLSGNTALLAANLLFEMLCALPKVTTV

SEQ ID NO: 39 - DNA, 1759 bp, Homo sapiens
ctcccgcagcaccagccaggccacgccgccgcctcttcccctgcgccccgcgcccaggccgggccgagccgagccgagccgggtcgggcccgggccatgctgctcaccgtgtactgtgtgcggagggacctctccgaggtgaccttttccctccaggtcgacgccgacttcgagctgcacaacttccgcgcgctgtgcgagctcgagtctggcatccccgcagccgagagccagatcgtctatgcggaaagacctctcacagacaaccacagatcattggcttcttatggcttgaaagatggggacgttgtgattttacgacagaaggagaatgcagaccctcgacctccagtgcagttcccaaacttaccccgaatagatttcagtagtatagctgtgcctggcacatcaagtccccggcagcgccagccaccaggaacacagcagtcccactcatctcctggagaaataacttcatctcctcagggcttggacaatccagccttgctccgagatatgttgctggccaacccgcatgagctgtccttgctgaaggaacgcaatccacccctggcagaagctctgctcagtggagaccttgagaaattttctagagtcctggtggagcagcagcaggaccgagcccggagagagcaagaaaggattcgtctgttttctgctgatccctttgaccttgaagctcaggcaaagatagaagaagatataaggcaacagaacattgaggaaaacatgacaatagctatggaagaggctccggaaagttttggccaagtagtgatgctttatattaactgcaaagtgaatggacatcctgtgaaagcctttgttgactcaggtgcccagatgactatcatgagccaagcttgtgcagaaaggtgtaacataatgagactggtggaccgtcggtgggcagggattgccaaaggagtgggcacccagaagattattggaagggtacatctagctcaggttcagattgaaggagattttttgccatgttccttctctatacttgaggaacagcccatggacatgcttctgggactggacatgcttaaacggcaccagtgttccatcgacctgaagaaaaatgtactcgtgatcggcaccacaggctcccagaccacctttcttcctgagggagagctaccagagtgtgcccggttggcatatggggctggaagagaggatgtacggccagaggagattgcagaccaagaattagcagaagcccttcaaaaatcagcagaggatgcagagcgtcagaagccatgatgcatgtagtgtgtgtgtactgcagctggagtgggccccagaccagagaaaagtggtaaagaatctacctcactgggaatgtcatcattaccaacttcagatgggtttaaccatcccgcccgttcttcaggacagagtcctgatgttggtaatcctatgagtcttgctcgctctgtctctgcttcagtctgccctatcaagcccagtgactcagatcgcattgaacctaaagctgtgaaggctttgaaggcttcagctgaattccagctaaactctgaaaagaaagaacatctttctttacaagatctttctgatcatgcttcctcagcagaccatgctccaacagaccagagtccagctatgcctatgcagaattcatccgaagaaataactgttgcaggtaatctggagaaatctgctgaaagaagcacccagggcctcaaatttcatctccatacaagac

SEQ ID NO: 40 - protein, 399 aa, Homo sapiens
MLLTVYCVRRDLSEVTFSLQVDADFELHNFRALCELESGIPAAESQIVYAERPLTDNHRSLASYGLKDGDVVILRQKENADPRPPVQFPNLPRIDFSSIAVPGTSSPRQRQPPGTQQSHSSPGEITSSPQGLDNPALLRDMLLANPHELSLLKERNPPLAEALLSGDLEKFSRVLVEQQQDRARREQERIRLFSADPFDLEAQAKIEEDIRQQNIEENMTIAMEEAPESFGQVVMLYINCKVNGHPVKAFVDSGAQMTIMSQACAERCNIMRLVDRRWAGIAKGVGTQKIIGRVHLAQVQIEGDFLPCSFSILEEQPMDMLLGLDMLKRHQCSIDLKKNVLVIGTTGSQTTFLPEGELPECARLAYGAGREDVRPEEIADQELAEALQKSAEDAERQKP

SEQ ID NO: 41 - DNA, 1854 bp, Homo sapiens
atgtcatcattaccaacttcagatgggtttaaccatcccgcccgttcttcaggacagagtcctgatgttggtaatcctatgagtcttgctcgctctgtctctgcttcagtctgccctatcaagcccagtgactcagatcgcattgaacctaaagctgtgaaggctttgaaggcttcagctgaattccagctaaactctgaaaagaaagaacatctttctttacaagatctttctgatcatgcttcctcagcagaccatgctccaacagaccagagtccagctatgcctatgcagaattcatccgaagaaataactgttgcaggtaatctggagaaatctgctgaaagaagcacccagggcctcaaatttcatctccatacaagacaggaagctagtttatctgtcacatctactaggatgcatgaaccacagatgtttctaggtgaaaaggattggcatccagaaaatcagaacctgagtcaagtgagtgaccctcagcagcacgaagaaccagggaatgaacagtatgaggttgcacaacaaaaagcttcacatgaccaagaatatctttgtaacataggggaccttgagcttcctgaagaaaggcaacagaatcaacacaaaattgttgatttggaagctacgatgaaaggaaatgggctcccacagaatgtggatcctccaagtgcgaagaaaagtattccatcttcagaatgcagtggctgctcaaattcagaaacatttatggaaatcgatacagctcaacagtccctagttactttgcttaattcaacaggcaggcagaatgccaatgtcaagaacattggtgcattggatctcactttagataatcccttgatggaagtagaaacatcaaaatgtaacccttcatctgaaattttgaatgattccatttccactcaggatttacagcccccagaaactaatgttgaaatacctggaacaaataaagaatatggccattactcctctccaagtctctgtggcagttgtcagccttctgtggagtcagcagaagaatcttgcccgtctataacggcagccttgaaagaacttcatgaacttttggttgttagcagtaaaccagcttcagaaaatacatctgaagaagtaatctgtcaatcagaaaccatagctgagggccaaaccagtattaaagacctttctgaaagatggacccaaaatgagcatcttacccagaatgaacagtgtccacaagtctcctttcatcaggccatatctgtatcagtggagacagaaaaattaacaggtacttcatctgacactggaagagaagctgtagaaaatgtaaacttcaggagtctaggtgatggcctgtcaaccgataaggaaggtgtccccaaatctagggaatccataaataagaaccgttctgtcactgtaacctcagctaaaacatccaatcagttacactgcaccttaggtgtagaaatttcacccaaacttttagcaggtgaggaggatgcactcaatcagacttctgagcaaactaagtctttgtcatccaatttcatattggttaaagacttaggtcagggcatacagaattcagtaacagacaggcctgaaaccagagaaaatgtctgtcctgatgcttcgaggccattacttgaatatgaaccacctaccagccatccatcatcaagtcctgccattcttccaccattgatttttcctgccacagatattgaccgcattctccgtgctggctttactttgcaggaagctcttggagctttgcatcgagttggtgggaatgcagaccttgcacttcttgttttgctcgcaaaaaacatcgtagttcctacatga

SEQ ID NO: 42 - protein, 617 aa, Homo sapiens
MSSLPTSDGFNHPARSSGQSPDVGNPMSLARSVSASVCPIKPSDSDRIEPKAVKALKASAEFQLNSEKKEHLSLQDLSDHASSADHAPTDQSPAMPMQNSSEEITVAGNLEKSAERSTQGLKFHLHTRQEASLSVTSTRMHEPQMFLGEKDWHPENQNLSQVSDPQQHEEPGNEQYEVAQQKASHDQEYLCNIGDLELPEERQQNQHKIVDLEATMKGNGLPQNVDPPSAKKSIPSSECSGCSNSETFMEIDTAQQSLVTLLNSTGRQNANVKNIGALDLTLDNPLMEVETSKCNPSSEILNDSISTQDLQPPETNVEIPGTNKEYGHYSSPSLCGSCQPSVESAEESCPSITAALKELHELLVVSSKPASENTSEEVICQSETIAEGQTSIKDLSERWTQNEHLTQNEQCPQVSFHQAISVSVETEKLTGTSSDTGREAVENVNFRSLGDGLSTDKEGVPKSRESINKNRSVTVTSAKTSNQLHCTLGVEISPKLLAGEEDALNQTSEQTKSLSSNFILVKDLGQGIQNSVTDRPETRENVCPDASRPLLEYEPPTSHPSSSPAILPPLIFPATDIDRILRAGFTLQEALGALHRVGGNADLALLVLLAKNIVVPT

SEQ ID NO: 43 - DNA, 4153 bp, Homo sapiens
atggccttttcctacctgtttgccacctgtgcccgcggcctccttccccgccggccgcgctccggagcctccgggccgcggtggagcgagggcccaggcgaggcgagggccgggcggcgggcgccgggccccgcggccggcacgacggagcccccgtacggccggcggcagcggttggcggcggcccccggcccccggcgcgggaagcggcggcggggcggcggcggcggtggcggtggcggtggcggcgacggtggcagcgccatggagccgggggaggtgaaggaccggatcctggagaacatctcgctgtcggtgaagaagttgcagagctattttgctgcatgtgaggatgagatccctgccatccggaaccatgacaaggtcctacagcgtctgtgtgagcacctggaccacgccctgctgtacggactgcaagacctctcctctggctactgggtgctcgtggtgcattttactcggagagaggccatcaagcagatcgaggtgctgcagcacgtggccaccaacctggggcgcagccgtgcctggctgtacctggccctcaacgagaactccttggagagctacctgcggttgttccaggagaacctgggcctgctgcataagtactacgtcaagaatgccctggtctgcagccacgatcacctgacgctcttcctgaccttggtgtccgggctagagttcattcgtttcgagctggatctggatgccccttacctagacctggccccctacatgcccgactactacaaacctcagtacctgctggactttgaagaccgccttcccagctcggtccacggctcagacagtctgtccctcaactctttcaactccgtcacctccaccaacctggagtgggatgacagtgcgattgccccatctagtgaggattatgattttggagatgtgtttccagcagtgccgtctgtacccagcacagactgggaagatggagacctcacagacacggtcagtggtccccgctccacagcctccgacctgaccagcagcaaggcctccaccaggagccccacccagcgccagaaccccttcaacgaggagccggcagagactgtgtcctcctctgacaccacccccgtgcacaccacctctcaggagaaggaggaggcccaggccctggacccgccggatgcctgcacggagctcgaggtcatcagggtcaccaagaagaagaaaattggcaagaagaaaaagagcagatcagatgaggaggcaagtccactccaccccgcctgcagccagaagaaatgtgccaagcagggggacggtgacagccgcaacggcagcccaagccttgggcgggactcgccagacactatgcttgcctccccccaggaggagggagaggggccgagcagcaccacggagagcagcgagcgctccgagccgggcctgctgatccctgagatgaaggacacctccatggagcgcttggggcagcccctgagcaaggttatcgaccagctcaacgggcagctggaccccagcacctggtgctcccgtgctgagcccccagaccagtcctttcggaccggctctcccggggatgccccggagaggccgccgctttgcgactttagtgaggggctttcagccccaatggacttctaccgctttaccgtcgagagtccaagcactgttacatcaggtggcggccaccatgaccctgcagggcttggccaaccgctgcatgttcctagtagccctgaggctgctggccaagaagaagagggaggaggaggagagggacagacgcctcggcccctagaggataccacgagggaggctcaggagctggaggcccagctgtccctggtcagggaggggcctgtgtctgagccagagcctgggacccaggaggttctctgccagctcaagcgagaccagcccagcccgtgtctgagtagcgctgaggattctggggtggatgagggacaggggagcccttcggagatggtccattcctcggagttcagagtagacaacaatcacctgctcctgctcatgatccacgtgttccgagaaaacgaagagcagctgttcaaaatgatccggatgagcaccgggcacatggagggcaacctgcagctgctgtacgtgctgctcacagactgctatgtctacctgctccggaaaggggccacagagaagccatacctggtggaagaggccgtttcttacaatgaacttgactatgtgtcggttggccttgaccagcagacggtgaagctggtgtgcaccaaccgcaggaagcagtttctgctggacacggctgatgtggcgctggctgagttctttttggcttctttgaagtcagccatgatcaaaggctgtcgagaacctccctaccccagcatcctgacggatgccaccatggagaagctggcactggccaaatttgtggcccaagaatcgaagtgtgaggcatctgctgtcaccgtgcgcttctacggccttgtgcactgggaggaccccacagacgagtccctgggccccacgccctgccactgctcaccccccgagggcaccatcaccaaagaaggcatgctgcactacaaggcgggcacctcctacctgggcaaggaacactggaagacgtgcttcgtggtgctcagcaacgggatcctctaccagtacccggaccgcaccgacgtcatccctctgctctcggtgaacatggggggggagcagtgcggtggctgccggagagccaacaccacggatcggccccacgccttccaggtcattctctccgaccggccctgcctggagctaagtgccgagagcgaggccgagatggccgagtggatgcagcatctctgccaggctgtgtccaaaggggtcatcccccagggcgtagctcccagcccctgcataccctgctgcctggtcctcacggatgaccgcctctttacgtgccatgaggattgccagaccagcttcttccgctctttgggcacagccaagctgggcgacatcagcgccgtctccaccgagccgggcaaggagtactgcgtcttggagttctcccaggacagccagcagctcctcccgccctgggtcatctacctgagctgcacttctgaactggaccgattgctgtctgcactgaactctgggtggaaaaccatctatcaggtggacctcccccacacggcgatccaggaagcctccaacaagaagaaattcgaggatgccttgagcctcatccacagcgcctggcagcggagcgacagtctctgccgcggccgagcctcccgagacccctggtgctgaggcagagctggttggcgtccctggtgggcaggaaaggaaggcacgccagccggcaggcacactgtcacggctgttgtcatgctgtcgggagcctacagtccacccctgccctgggcggcagaaccaccgagtgtggcttaagacagggtccctccactccagggatccagatcaggtgcccggcacccctgggcatcctgcccgacaggtagcgaatggaggtcgctgggggcagagggtccgagccctgtgggctctgcggatgcacgccctcctcccgggcctccgcctcagtctgcagaatttctgccgagtggcaccgagaacaccatccatctaaggacgaacaaaagaaccaggagggcgggacccccctcttcctctcctgggttgggggctggggccctgagtgcccagccatccttgttcgtgtttgaacactctcctggccacgtggggaagcgggaacacggggtgtctgcgcatgtttcctcctcctagctccatcactgcgcacacagctgcctgcctcgccagatgcaggggggcgggcagccctccctggctgccaggaggctctgcatgcccacagtcctgccctgcctgtcccctcaacccggcagtgcctgtagcaccgaggagcaaagggggtggatggggggcttggagaagggcggagcccaccagcctggcatccatgttgacatcttctgactgtcccctgcttggctggagccaggcccttccctagagtttcgtcaagagcctcctggggaaggggtcaggtggtttgggttttgttttttaaaataaaatagacatgttatat

SEQ ID NO: 44 - protein, 1107 aa, Homo sapiens
MAFSYLFATCARGLLPRRPRSGASGPRWSEGPGEARAGRRAPGPAAGTTEPPYGRRQRLAAAPGPRRGKRRRGGGGGGGGGGGDGGSAMEPGEVKDRILENISLSVKKLQSYFAACEDEIPAIRNHDKVLQRLCEHLDHALLYGLQDLSSGYWVLVVHFTRREAIKQIEVLQHVATNLGRSRAWLYLALNENSLESYLRLFQENLGLLHKYYVKNALVCSHDHLTLFLTLVSGLEFIRFELDLDAPYLDLAPYMPDYYKPQYLLDFEDRLPSSVHGSDSLSLNSFNSVTSTNLEWDDSAIAPSSEDYDFGDVFPAVPSVPSTDWEDGDLTDTVSGPRSTASDLTSSKASTRSPTQRQNPFNEEPAETVSSSDTTPVHTTSQEKEEAQALDPPDACTELEVIRVTKKKKIGKKKKSRSDEEASPLHPACSQKKCAKQGDGDSRNGSPSLGRDSPDTMLASPQEEGEGPSSTTESSERSEPGLLIPEMKDTSMERLGQPLSKVIDQLNGQLDPSTWCSRAEPPDQSFRTGSPGDAPERPPLCDFSEGLSAPMDFYRFTVESPSTVTSGGGHHDPAGLGQPLHVPSSPEAAGQEEEGGGGEGQTPRPLEDTTREAQELEAQLSLVREGPVSEPEPGTQEVLCQLKRDQPSPCLSSAEDSGVDEGQGSPSEMVHSSEFRVDNNHLLLLMIHVFRENEEQLFKMIRMSTGHMEGNLQLLYVLLTDCYVYLLRKGATEKPYLVEEAVSYNELDYVSVGLDQQTVKLVCTNRRKQFLLDTADVALAEFFLASLKSAMIKGCREPPYPSILTDATMEKLALAKFVAQESKCEASAVTVRFYGLVHWEDPTDESLGPTPCHCSPPEGTITKEGMLHYKAGTSYLGKEHWKTCFVVLSNGILYQYPDRTDVIPLLSVNMGGEQCGGCRRANTTDRPHAFQVILSDRPCLELSAESEAEMAEWMQHLCQAVSKGVIPQGVAPSPCIPCCLVLTDDRLFTCHEDCQTSFFRSLGTAKLGDISAVSTEPGKEYCVLEFSQDSQQLLPPWVIYLSCTSELDRLLSALNSGWKTIYQVDLPHTAIQEASNKKKFEDALSLIHSAWQRSDSLCRGRASRDPWC

SEQ ID NO: 45 - DNA, 3172 bp, Homo sapiens
caggcagccacaggcctgtcagaccaggacccttaccctctagacatggcctcggtcccctgcaaaccccagccccgtagccctgcgaggttacagacagcctaaacgccaccaccacagggcctgtgccgtgcccctgacccgggcacagaaggccactggcccggaggccatggagacggtgcccccagcagtggacctggtgctgggtgcttctgcctgctgcctggcctgtgtcttcaccaaccccctggaggtggtgaagacgcggctgcagctgcagggggagctgcaggcccggggcacctacccacggccctaccatggcttcatagcctctgtcgctgctgtggcccgagcagacgggctgtggggcctgcagaaggggctggctgccggccttctgtaccaaggcctcatgaatggcgttcgtttctactgctacagcctggcgtgccaggctggcctcacgcagcaaccaggtggcaccgtggttgcgggagccgtggcgggggcactgggagccttcgtggggagccctgcttacctgatcaaaacgcagctgcaagctcagacagtggccgcagtggccgtgggacaccagcacaatcaccagactgtcctgggtgccttggagaccatctggcggcagcaagggctcttggggctgtggcagggcgttggtggggctgtgccccgagtcatggtgggctcagctgcccagctggccaccttcgcctctgccaaggcctgggtacagaagcaacagtggctccctgaggacagctggctggtggccctggctgggggcatgatcagcagcatagccgtggttgtcgtcatgactcccttcgatgtggtcagcacgcggctatacaatcagccggtggacacagctggcaggggccagctctatgggggcctcaccgactgcatggtgaagatctggcggcaggagggccccctggcactctacaagggcctgggccccgcctacctgcgcctgggcccccacaccatcctcagcatgctcttctgggacgagcttcggaaactggctgggcgggcccagcacaagggcacctagacgacggccctcacccccacgtcctgacacggccggcacttggccggaagtgagagcctgctccaggacaactggctgtcccggggcgggccatgggcccaggccctgccagaggtcccgggagagtgtggacagctctggtccatccagccccttggcccacccaggtccagagcatccacttcaagttaccacccattctgtcttccagacagttctcttccttctctgtactgcgtactgggtcaccacatcccagagccttgctcagttatagcaactgctgcgggcgtgcacatggcataggcccagtaacttacatacatcggctcacttaggcctcagacagcagcacgaggcaggcacttttacttcttttaccattagaaagccaaggcctagagtggtgggctttgaccacagccacacaattttgaagtggcagagccaggactggagcttagccctgctcaccctagacctatgcgcttgacaagtgcgtgactgtgacaggcccatgggcccggactgcccataggggtcactgtaccatggcaaaggctgaggtgcaccaggaggctgtggcgtcgtcacctgccttatttgctggagaagctgtagcaaagaaccacagactgggcgacttagacaatagaaatgtattttctcacagttctggaggctggatgctggagaccaaggtgtcagtgggctggtttcttctgaggcctctgtccatggcttgcagatgctgctttctctctgtgtctgcacatggtggtccctcgatgtgcgtctgggtcctgatctcctcctcttataaggacacaaatcatgttggcttagggcccaccctcatgaccccactttaatttttttttttttttttgagatgaagtctcactctgccacccaagctggagtgcagtggcacgatctcggttcactgcaaccttggcctcctaggttcaagcaattctcctgccccagcctcctgagtagctgggattacaggtgtgtgccaccacacccggccaatttttgtatctttagtagagatggggttttgccatgttggccagactggtctcgaactcctgacctcaagtgatccactggccttggcctcccaaagtgctgggattacaggcatgagccacctcacttggcccaattttaacttaattatctctgtcaagagcctatctccatatacagtcacatcctgagctactagggggtaggacttcaacatgcacttctgcaggggccgcagttcagccaacatcatctttttttttgagatggagtctcgctttgttgcccaggctggagtgcggtggtgcaatctcggctcaccacaacctccacctcccaggttcaagtgattctcctgcctcagcctcccgagttgctgggactataggtgtgcgccaccatgcccagctaattttgtatttttagtagagacaggctttcgctgtgttggccaggctggtcttgaatgcctgaccttgccgcccgcctcggcctcccaaaatgctgggattacaggcgtgagccaccgcgcctggcctcagccaacatcatctaagggctctcacggagggcctcccagctgcccgccctgtgggcatttgcacatatcctgacaagcctgaaagaagctccgggtgcccattgttcagtccaggtgcccattgttcccgggactgaggcccgggaaagggaagcgacgtgatagggccagcagcagaccctgggcctttctctagactgagcaccattccccgtgggtgtgctctcagcgccgcaccgaccttcacactgcagagatggatgccaactccctggcaggggcaggactgctgccgagcagccccacctgccctcccagccacaccccaagtctgtaagggccgctcccaggaacacctgctactgcacactccaaaccaataaagttttatattttgtttacttaaaaaaaaaaaaaaaaaaaaaaaaaaaaaaaaaaaaaaaaaaaaaaaaaaaaaaaaaaaaaaaaaaaaaaaaaaaaaaaaaaaaaaaaaaaaaaaaaaaaaa

SEQ ID NO: 46 - protein, 304 aa, Homo sapiens
METVPPAVDLVLGASACCLACVFTNPLEVVKTRLQLQGELQARGTYPRPYHGFIASVAAVARADGLWGLQKGLAAGLLYQGLMNGVRFYCYSLACQAGLTQQPGGTVVAGAVAGALGAFVGSPAYLIKTQLQAQTVAAVAVGHQHNHQTVLGALETIWRQQGLLGLWQGVGGAVPRVMVGSAAQLATFASAKAWVQKQQWLPEDSWLVALAGGMISSIAVVVVMTPFDVVSTRLYNQPVDTAGRGQLYGGLTDCMVKIWRQEGPLALYKGLGPAYLRLGPHTILSMLFWDELRKLAGRAQHKGT

SEQ ID NO: 47 - DNA, 1520 bp, Homo sapiens
gctctcctcccctcccctcccctgggcctttgacccctcccagcctctctccttccctccaccgacacctttgcccagtgacgttggtctgtccttacgcagacctggccggaggctggggctccttccggggctgccatgttctctcttccatccctcccctcctggctccccggcctcccctccctcgagtggggctctagcctccttgactccctcctgcaaggcctgatcggggcccttggagtcttggtcctgaacagcctcctgaaagtttacttcttcgtgggctgtgccaatgacccgcagcggcgacccgaaaaggagcggcttcgggcccagtgggcctccctggaaacggtgcacctggcagggctggccctgtttctgacggtcgtggggtcccgggtggctgccctcgtggtgctcgagttctccctccgggccgtgtccacgctgctgtccctgggcaagggctcccagggtgccgccgagaggctgcagctctacctgctgtgccagtactcgctgggctgcgggctgacctgtggcctgagcttcctgcaggagggcgcccctcaccgcacgctgaacctgctgctgagcctcgggctggccacgctgctgggcctgggtgcccggcgcctccaccgccacgtctgccgcctctacgagctgcacagcagccagcgctactgtggggtgtgcctgggcctgctggcccatgcacatggcctcccccagctgctgggccgtgccctggccatagcctttgccgtgggtgacctggcagctgtggccctcatcaaccaggacttcctgaccacctcggaggccatgcggttctggacaccgctcaccatctgctacacgctgctggtcatctacatgcaggaggagcagcggcagcaccccggcctgcagagccaggtgcagacggtgctggtgcgcatgggcggcctcttcgtgctgctgctgactgtgggtcgctggctggacctgctgggcatccttgtctccctactgggcgagctctggtgtctcgtgggcgtccgcaccctgcttgacctctgccagatacaggattttccatcccagaggcctccagtgtcaacaccaagccagcccctgccctcggcaccccagtcccagagttcggccccctcttgacctgcctcagggaggatctggagtctgtctcaagcccactagcctgatctccgaggccttgaccccagggcgatgcctggaggcagagtggcagagctggcctcctgcccagagctcagcacaggccctgggagccccgagaagggaaggcaggatttggggatgggagcctctggagaggggacacctggggacccctggttgaaccctctttttcttggggtgggcaatgatgcagcctctcagacctgccttcctgggcaggggtgggggtgcatcctcaggagggctccccctttactggtctcccttcccttctccatgaacaataaagacgatgtctttctcaa

SEQ ID NO: 48 - protein, 343 aa, Homo sapiens
MFSLPSLPSWLPGLPSLEWGSSLLDSLLQGLIGALGVLVLNSLLKVYFFVGCANDPQRRPEKERLRAQWASLETVHLAGLALFLTVVGSRVAALVVLEFSLRAVSTLLSLGKGSQGAAERLQLYLLCQYSLGCGLTCGLSFLQEGAPHRTLNLLLSLGLATLLGLGARRLHRHVCRLYELHSSQRYCGVCLGLLAHAHGLPQLLGRALAIAFAVGDLAAVALINQDFLTTSEAMRFWTPLTICYTLLVIYMQEEQRQHPGLQSQVQTVLVRMGGLFVLLLTVGRWLDLLGILVSLLGELWCLVGVRTLLDLCQIQDFPSQRPPVSTPSQPLPSAPQSQSSAPS

SEQ ID NO: 49 - DNA, 1521 bp, Homo sapiens
tggcctgaacctccaggacttcagcccttctaggagaatctgatcccaggtgagggaggtcacttggggtgtggcccagcaggcaggcgggactccagactgggaacggaagtcagccctgctggggctgggagctgaagcatctgttccttcctcgcgggtgtgagacaaggaagagtgatcattgccacaccaggagctgaagccatggcctcaaagcctgagaagagggtggcatcgtctgtctttatcaccctggcacccccgcgccgcgatgtggccgtggcggaggaagtgaggcaggcagtttgtgaggcccggcgtggccgcccctgggaggctcctgcccccatgaagacacccgaggctggcttggcggggaggcccagcccctggacaacccctggcagagctgcagccacagtgccggctgcacctatgcagctcttcaatggaggatgcccaccccctcctcctgtcctggatggtgaggacgtgcttcctgacctggacctcctcccaccccctccaccgccccctccagtgcttctgccttctgaagaggaggctcctgctccaatgggggcctcactcattgcagacttagagcagctgcacctgtccccgcccccgcccccaccacaggccccagcggagggaccttcagtccagcccggtcccctcaggcccatggaggaagagctgccacctcccccggcagaacctgttgagaaaggggcatccacagacatctgtgccttctgccacaagaccgtgtccccccgagagctggctgtggaggccatgaagaggcagtaccatgcccagtgcttcacgtgccgcacctgccgccgccagctggctgggcagagcttctaccagaaggatgggcgacccctctgcgaaccctgctaccaggacacactggagaggtgcggcaagtgtggcgaggtggtccgggaccacatcatcagggccctgggccaggccttccacccctcctgcttcacgtgtgtgacctgcgcccggtgcattggggatgagagctttgccctgggcagccagaacgaggtgtactgcctggacgacttctacaggtacgagaagggtttgtgcactgggtggggtgcagggacagggcgagacccaagcagggtgaaggagctgagcttgagtcctgggtgctgggccagagtttcctgtctactggtttattataaagaatattacagggctgggctgggcgcggtggctcacgcctgtaatcccagcactttgggaggccgaggcgggtggatcacgaggtcaggagatcgagatcatcctggctaacatggtgaaaccccgtctctactaaaaatacaaaaaaaattagccaggcatggtggcgggcgcctgtagtcccagctactcgggaggctgaggcaggagaatggcgtgaacctgggaggcagagcttgcagtgagccgagatcacgccactgcactccagcctgggcaacagagtgtgagactccgtct

SEQ ID NO: 50 - protein, 374 aa, Homo sapiens
MASKPEKRVASSVFITLAPPRRDVAVAEEVRQAVCEARRGRPWEAPAPMKTPEAGLAGRPSPWTTPGRAAATVPAAPMQLFNGGCPPPPPVLDGEDVLPDLDLLPPPPPPPPVLLPSEEEAPAPMGASLIADLEQLHLSPPPPPPQAPAEGPSVQPGPLRPMEEELPPPPAEPVEKGASTDICAFCHKTVSPRELAVEAMKRQYHAQCFTCRTCRRQLAGQSFYQKDGRPLCEPCYQDTLERCGKCGEVVRDHIIRALGQAFHPSCFTCVTCARCIGDESFALGSQNEVYCLDDFYRYEKGLCTGWGAGTGRDPSRVKELSLSPGCWARVSCLLVYYKEYYRAGLGAVAHACNPSTLGGRGGWITRSGDRDHPG

SEQ ID NO: 51 - DNA, 2793 bp, Homo sapiens
ccacaccaggagctgaagccatggcctcaaagcctgagaagagggtggcatcgtctgtctttatcaccctggcacccccgcgccgcgatgtggccgtggcggaggaagtgaggcaggcagtttgtgaggcccggcgtggccgcccctgggaggctcctgcccccatgaagacacccgaggctggcttggcggggaggcccagcccctggacaacccctggcagagctgcagccacagtgccggctgcacctatgcagctcttcaatggagacatctgtgccttctgccacaagaccgtgtccccccgagagctggctgtggaggccatgaagaggcagtaccatgcccagtgcttcacgtgccgcacctgccgccgccagctggctgggcagagcttctaccagaaggatgggcgacccctctgcgaaccctgctaccaggacacactggagaggtgcggcaagtgtggcgaggtggtccgggaccacatcatcagggccctgggccaggccttccacccctcctgcttcacgtgtgtgacctgcgcccggtgcattggggatgagagctttgccctgggcagccagaacgaggtgtactgcctggacgacttctacaggaaattcgcccccgtctgcagcatctgtgaaaatcccatcatccctcgggatgggaaagatgccttcaaaatcgaatgcatgggaagaaacttccatgaaaattgctacaggtgtgaggactgcaggatcctcctgtctgtcgagcccacggaccaaggctgctaccccctgaacaaccatctcttctgcaagccatgccatgtgaagcggagtgctgcggggtgctgctgagagtgcccgctgggcagtgaacagaccactagccccggctggggcccttccctgacttggtttcccttcctaacctgctcttgcacactttccttctgagcctccatggagaccagcctgcaagccggcccagcctgtccaggatacagtggggctgagcacccccaggccttccactcctctaccctctgggcaccagaaggctcctggaccatgagcttcacccccagaattccctgctgaccctgccccacttccagggaaaagctgggggaggttggacccctctcactgactagctgtctggtaggggtgctaggaccagcctcgcctgtggggttgagctgtttgaggacaaactccaaggtcccttaaaaagtgccttttagaggctgggcatggtggctcacgcttgtaatcccagcactttgggaggccaaggtgggtggatcacctgaggtcaggagttcaagaccagcctggccaacatggtgaaaccctgtctctactaaaaatacaaaaattagccaggcatggtagcaggtgcctgtaatcccagctactggggaaagctgaggcaggagaattgcttcaatctggaaggcagaggttgcagtgagattgcaccattgcattccagcctgggcaacaagagggaaactccgtctcaaaaaaaaaaaagtgccttttaggccggatgtggtggctcatgcctgtaatcccagcactttgggaggccaaggcaggcagatcacttgaggtcaggagtttgagaccagcctggccaacacggcaaaaccccgtttctactaaaaatacaaaaattagctgggtgtggtggcgtgcgcctgtaatcccagctactcaggaggctgaggcaggagcattgcttgaacccgggaggcagaggttgcagtgagctgagatggcaccactgcactccagcctgggagacacagcgagactctgtctccaaaaaaaaaagtgctttttgaaaatgttgaggttgaaatgatgggaaccaacattctttggatttagtggggagcataatagcaaacacccccttggttcgcacatgtacaggaatgggacccagttggggcacagccatggacttccccgccctggaatgtgtggtgcaaagtggggccagggcccagacccaagaggagagggtggtccgcagacaccccgggatgtcagcatcccccgacctgccttctggcggcacctcccgggtgctgtgttgagtcagcaggcatggggtgagagcctggtatatgctgggaacagggtgcaggggccaagcgttcctccttcagccttgacttgggccatgcaccccctctcccccaaacacaaacaagcacttctccagtatggtgccaggacaggtgtcccttcagtcctctggttatgacctcaagtcctacttgggccctgcagcccagcctgtgttgtaacctctgcgtcctcaagaccacacctggaagattcttcttccctttgaaggagaatcatcattgttgctttatcacttctaagacattttgtacggcacggacaagttaaacagaatgtgcttccctccctggggtctcacacgctcccacgagaatgccacaggggccgtgcactgggcaggcttctctgtagaaccccaggggcttcggcccagaccacagcgtcttgccctgagcctagagcagggagtcccgaacttctgcattcacagaccacctccacaattgttataaccaaaggcctcctgttctgttatttcacttaaatcaacatgctattttgttttcactcacttctgactttagcctcgtgctgagccgtgtatccatgcagtcatgttcacgtgctagttacgtttttcttcttacacatgaaaataaatgcataagtgttagaagctcaaaaaaaaaaaaaa

SEQ ID NO: 52 - protein, 276 aa, Homo sapiens
MASKPEKRVASSVFITLAPPRRDVAVAEEVRQAVCEARRGRPWEAPAPMKTPEAGLAGRPSPWTTPGRAAATVPAAPMQLFNGDICAFCHKTVSPRELAVEAMKRQYHAQCFTCRTCRRQLAGQSFYQKDGRPLCEPCYQDTLERCGKCGEVVRDHIIRALGQAFHPSCFTCVTCARCIGDESFALGSQNEVYCLDDFYRKFAPVCSICENPIIPRDGKDAFKIECMGRNFHENCYRCEDCRILLSVEPTDQGCYPLNNHLFCKPCHVKRSAAGCC

SEQ ID NO: 53 - DNA, 3363 bp, Homo sapiens
ggacgggcggaggggacgggaggcccagcggctccgggctccgctggctcgggcgtcggatcggagccgccggggcgcgggcggcccagagctggcctgaacctccaggacttcagcccttctaggagaatctgatcccaggtgagggaggtcacttggggtgtggcccagcaggcaggcgggactccagactgggaacggaagtcagccctgctggggctgggagctgaagcatctgttccttcctcgcgggtgtgagacaaggaagagtgatcattgccacaccaggagctgaagccatggcctcaaagcctgagaagagggtggcatcgtctgtctttatcaccctggcacccccgcgccgcgatgtggccgtggcggaggaagtgaggcaggcagtttgtgaggcccggcgtggccgcccctgggaggctcctgcccccatgaagacacccgaggctggcttggcggggaggcccagcccctggacaacccctggcagagctgcagccacagtgccggctgcacctatgcagctcttcaatggaggatgcccaccccctcctcctgtcctggatggtgaggacgtgcttcctgacctggacctcctcccaccccctccaccgccccctccagtgcttctgccttctgaagaggaggctcctgctccaatgggggcctcactcattgcagacttagagcagctgcacctgtccccgcccccgcccccaccacaggccccagcggagggaccttcagtccagcccggtcccctcaggcccatggaggaagagctgccacctcccccggcagaacctgttgagaaaggggcatccacagacatctgtgccttctgccacaagaccgtgtccccccgagagctggctgtggaggccatgaagaggcagtaccatgcccagtgcttcacgtgccgcacctgccgccgccagctggctgggcagagcttctaccagaaggatgggcgacccctctgcgaaccctgctaccaggacacactggagaggtgcggcaagtgtggcgaggtggtccgggaccacatcatcagggccctgggccaggccttccacccctcctgcttcacgtgtgtgacctgcgcccggtgcattggggatgagagctttgccctgggcagccagaacgaggtgtactgcctggacgacttctacaggaaattcgcccccgtctgcagcatctgtgaaaatcccatcatccctcgggatgggaaagatgccttcaaaatcgaatgcatgggaagaaacttccatgaaaattgctacaggtgtgaggactgcaggatcctcctgtctgtcgagcccacggaccaaggctgctaccccctgaacaaccatctcttctgcaagccatgccatgtgaagcggagtgctgcggggtgctgctgagagtgcccgctgggcagtgaacagaccactagccccggctggggcccttccctgacttggtttcccttcctaacctgctcttgcacactttccttctgagcctccatggagaccagcctgcaagccggcccagcctgtccaggatacagtggggctgagcacccccaggccttccactcctctaccctctgggcaccagaaggctcctggaccatgagcttcacccccagaattccctgctgaccctgccccacttccagggaaaagctgggggaggttggacccctctcactgactagctgtctggtaggggtgctaggaccagcctcgcctgtggggttgagctgtttgaggacaaactccaaggtcccttaaaaagtgccttttagaggctgggcatggtggctcacgcttgtaatcccagcactttgggaggccaaggtgggtggatcacctgaggtcaggagttcaagaccagcctggccaacatggtgaaaccctgtctctactaaaaatacaaaaattagccaggcatggtagcaggtgcctgtaatcccagctactggggaaagctgaggcaggagaattgcttcaatctggaaggcagaggttgcagtgagattgcaccattgcattccagcctgggcaacaagagggaaactccgtctcaaaaaaaaaaaagtgccttttaggccggatgtggtggctcatgcctgtaatcccagcactttgggaggccaaggcaggcagatcacttgaggtcaggagtttgagaccagcctggccaacacggcaaaaccccgtttctactaaaaatacaaaaattagctgggtgtggtggcgtgcgcctgtaatcccagctactcaggaggctgaggcaggagcattgcttgaacccgggaggcagaggttgcagtgagctgagatggcaccactgcactccagcctgggagacacagcgagactctgtctccaaaaaaaaaagtgctttttgaaaatgttgaggttgaaatgatgggaaccaacattctttggatttagtggggagcataatagcaaacacccccttggttcgcacatgtacaggaatgggacccagttggggcacagccatggacttccccgccctggaatgtgtggtgcaaagtggggccagggcccagacccaagaggagagggtggtccgcagacaccccgggatgtcagcatcccccgacctgccttctggcggcacctcccgggtgctgtgttgagtcagcaggcatggggtgagagcctggtatatgctgggaacagggtgcaggggccaagcgttcctccttcagccttgacttgggccatgcaccccctctcccccaaacacaaacaagcacttctccagtatggtgccaggacaggtgtcccttcagtcctctggttatgacctcaagtcctacttgggccctgcagcccagcctgtgttgtaacctctgcgtcctcaagaccacacctggaagattcttcttccctttgaaggagaatcatcattgttgctttatcacttctaagacattttgtacggcacggacaagttaaacagaatgtgcttccctccctggggtctcacacgctcccacgagaatgccacaggggccgtgcactgggcaggcttctctgtagaaccccaggggcttcggcccagaccacagcgtcttgccctgagcctagagcagggagtcccgaacttctgcattcacagaccacctccacaattgttataaccaaaggcctcctgttctgttatttcacttaaatcaacatgctattttgttttcactcacttctgactttagcctcgtgctgagccgtgtatccatgcagtcatgttcacgtgctagttacgtttttcttcttacacatgaaaataaatgcataagtgttagaagctcaaaaaaaaaaaaaa

SEQ ID NO: 54 - protein, 373 aa, Homo sapiens
MASKPEKRVASSVFITLAPPRRDVAVAEEVRQAVCEARRGRPWEAPAPMKTPEAGLAGRPSPWTTPGRAAATVPAAPMQLFNGGCPPPPPVLDGEDVLPDLDLLPPPPPPPPVLLPSEEEAPAPMGASLIADLEQLHLSPPPPPPQAPAEGPSVQPGPLRPMEEELPPPPAEPVEKGASTDICAFCHKTVSPRELAVEAMKRQYHAQCFTCRTCRRQLAGQSFYQKDGRPLCEPCYQDTLERCGKCGEVVRDHIIRALGQAFHPSCFTCVTCARCIGDESFALGSQNEVYCLDDFYRKFAPVCSICENPIIPRDGKDAFKIECMGRNFHENCYRCEDCRILLSVEPTDQGCYPLNNHLFCKPCHVKRSAAGCC

SEQ ID NO: 55 - DNA, 533 bp, Homo sapiens
tgtaggtgccgctgttgctgctcgtgttaaatctagaaccgtagccagacatgggactggaggacgagcaaaagatgcttaccgaatccggagatcctgaggaggaggaagaggaagaggaggaattagtggatcccctaacaacagtgagagagcaatgcgagcagttggagaaatgtgtaaaggcccgggagcggctagagctctatgatgagcatgtatcctctcgatcacatacagaagaggattgcacggaggagctctttgacttcttgcatgcaaaggaccattgcgtggcccacaaactctttaacaacttgaaataaatgtgtggacttaattcaccccagccttcatcatctgggcatcagaatatttccttatggtttcggatgtaccatttgtttcttatttgtgtaactgtaagttcacatgaacctcgtgggttttggcttaggctggtagcttctatgtaattcgcagtgattccatctaaataaaagttctgtgatctgcaaaaaaaaaaaaaaatt

SEQ ID NO: 56 - protein, 91 aa, Homo sapiens
MGLEDEQKMLTESGDPEEEEEEEEELVDPLTTVREQCEQLEKCVKARERLELYDEHVSSRSHTEEDCTEELFDFLHAKDHCVAHKLFNNLK

SEQ ID NO: 57 - DNA, 2176 bp, Homo sapiens
ctctgtctcaaaaacaaaacaaaacaaaaacagaaagaatcagagtcaacaaatcagtatggatgcagattcctcagatgccaggaatcccaggataaatggcaggggtgaaccaaatacttcccattcttccctcaccaccctcctccatccaataaagaagtaaataaattcctcaagtcccctctgccccagtgcatggaatgtttacctgtggactaggactggtctacatgccaaacaggccttgcctcctgggcggcatgtttgcaggggatccttgctgatgatgttggcctcctcctgcaccctcccactccatggctgtctcacctgagagagctttcttccttttgcattaagtgtgagtcctgataaattcaaaaaagcctccaggtgacatcattttaacaccagttaacaatcacaaatctgggtgaatgagcctcagagtttttcttgacagtagtgtgcgtgcgtgtgtgtgtgcgtgttttccatggaaaaataaaatgtattacacaaactatcagtattaattacagaaaggtggccaggtgcagtgcctcacgcctgtaatcctggcactttgggaggccaaggcgggcagattgcctgagctcaggagtttgagaccagcctggtcaaacatggtgaaaccctgtatctactaaaaatacaaaacattagctgggcgtggtggcgcatgcctgtagtctcaggtactcggaagggtgaggcacaagaatcgcttgagtctggaaggtggaggttgcagtgagccgagaacacgccactaaactccagccggggtgacagagcaagactctgtctcaaaaaacaaacaaacaattaattacagaaaggtaagcctggccaataggtcaggaaaagcagccccactgcagatccacaccactacggaaacttgaggcaccacacacatgactttgctgactgggggcaaaggatgaactagtgagcaaacttgggaggctgagacaggaggatcgcttgaacctgggaggtagaggttgcagtgagccaagatcgcaccactgctctccagccaggtgacagagcgagactccagctcaaaaaaaaaaaaaaagtcaagatattaaatatgaaagcaacactttattttttattttattttattttaagacagggtctctctctgtcacccagactggagtacagtgacatgatctctgctcactgtgatctctgcctcccaggctcaaactatcctcccacatcagcctcccaaatagctgggactacaggggcccaccaccacacctgactaatttttgtatttttggtagagatgcggtttcaccatgttgcccagcctgatcttgaacttctggattcaagtgatccgccctcctcggcctcccaaagtgctgggactacaggcttgagccacctcgcccagctgaaagtgacactttaatactttcaggaaattataggagatgattgttaagagctcaggataaagagaagtttctggccgggaacggtggctcacacctgtaatcccagcactttcagtggcggagcacctgtggccaagagtttgagaccagcctggccaacatggtgaaaccccatctctactaaaaatacaaaaattgaggtgccgctgttgctgctcgtgttaaatctagaaccgtagccagacatgggactggaggacgagcaaaagatgcttaccgaatccggagatcctgaggaggaggaagaggaagaggaggaattagtggatcccctaacaacagtgagagagcaatgcgagcagttggagaaatgtgtaaaggcccgggagcggctagagctctatgatgagcatgtatcctctcgatcacatacagaagaggattgcacggaggagctctttgacttcttgcatgcaaaggaccattgcgtggcccacaaactctttaacaacttgaaataaatgtgtggacttaattcaccccagccttcatcatctgggcatcagaatatttccttatggtttcggatgtaccatttgtttcttatttgtgtaactgtaagttcacatgaacctcgtgggttttggcttaggctggtagcttctatgtaattcgcagtgattccatctaaataaaagttctgtgatctgcaaaaaaaaaaaaaaatt

SEQ ID NO: 58 - protein, 91 aa, Homo sapiens; identical to SEQ ID NO: 56

SEQ ID NO: 59 - DNA, 455 bp, Homo sapiens
ccacgcccgcagccatgccgaccaagggcccgctgcagtcggtgcaggtcttcggacgcaagaagacagccacagctgtggcgcactgcaaacgcggcaatggtctcatcaaggtgaacgggtggcccctggagatgattgagctgcgcatgctacaatacaagctgctggagccagttctgcttctcggcaaggagcggtttgctggtgtggacatctgtgtccgtatgaagggtggtggtcacgtggcccagatttatgctatccatcagtccatctccaaagccctggtggcctactaccagaaatatgtggatgaggcttccaagaaggagatcaaagacatcctcatccagtatgaccagaccctgctggtagctgatcctcgttgccgggagtccaaaaagtttggaggccctggtgcccatgctcgctaccagaaatcctaccgataa

SEQ ID NO: 60 - protein, 146 aa, Homo sapiens [sequence omitted]

SEQ ID NO: 61 - DNA, 465 bp, Homo sapiens
ccacgcccgcagccatgccgaccaagggcccgctgcagtcggtgcaggtcttcggacgcaagaagacagccacagctgtggcgcactgcaaacgcggcaatggtctcatcaagctgctggagccagttctgcttctcggcaaggagcggtttgctggtgtggacatctgtgtccgtatgaagggtggtggtcacgtggcccagatttatgctatccatcagtccatctccaaagccctggtggcctactaccagaaatatgtggatgaggcttccaagaaggagatcaaagacatcctcatccagtatgaccagaccctgctggtagctgatcctcgttgccgggagtccaaaaagtttggaggccctggtgcccatgctcgctaccagaaatcctaccgataagcccatcatgactatcaaaattcacctgtataataaacagtttttgagggattttaaagtt

SEQ ID NO: 62 - protein, 129 aa, Homo sapiens
MPTKGPLQSVQVFGRKKTATAVAHCKRGNGLIKLLEPVLLLGKERFAGVDICVRMKGGGHVAQIYAIHQSISKALVAYYQKYVDEASKKEIKDILIQYDQTLLVADPRCRESKKFGGPGAHARYQKSYR

SEQ ID NO: 63 - DNA, 1100 bp, Homo sapiens
ggcctcccacttggttgctcgtacgcggctagtgggtcctcagtggatgtaggctgggcgccgcgatgttcgacgggacaccggcggagagcgacctcggggttaaggggtggggctggacgtcaggagccaagatggcggcggtggtcgcactctccttgaggcgccggttgccggccacaacccttggcggagcctgcctgcaggcctcccgaggagcccagacagctgcagccacagctccccgtatcaagaaatttgccatctatcgatgggacccagacaaggctggagacaaacctcatatgcagacttataaggttgaccttaataaatgtggccccatggtattggatgctttaatcaagattaagaatgaagttgactctactttgaccttccgaagatcatgcagagaaggcatctgtggctcttgtgcaatgaacatcaatggaggcaacactctagcttgcacccgaaggattgacaccaacctcaataaggtctcaaaaatctaccctcttccacacatgtatgtgataaaggatcttgttcccgatttgagcaacttctatgcacagtacaaatccattgagccttatttgaagaagaaggatgaatctcaggaaggcaagcagcagtatctgcagtccatagaagagcgtgagaaactggacgggctctacgagtgcattctctgtgcctgctgtagcaccagctgccccagctactggtggaacggagacaaatatctggggcctgcagttcttatgcaggcctatcgctggatgattgactccagagatgacttcacagaggagcgcctggccaagctgcaggacccattctctctataccgctgccacaccatcatgaactgcacaaggacctgtcctaagggtctgaatccagggaaagctattgcagagatcaagaaaatgatggcaacctataaggagaagaaagcttcagtttaactgtttccatgctaaacatgatttataaccagctcagagctgaacataatttatatctaatttgagttcctttaaagatcttggttttccatgaatacagcatgtataataaaaattttaaga

SEQ ID NO: 64 - protein, 280 aa, Homo sapiens
MAAVVALSLRRRLPATTLGGACLQASRGAQTAAATAPRIKKFAIYRWDPDKAGDKPHMQTYKVDLNKCGPMVLDALIKIKNEVDSTLTFRRSCREGICGSCAMNINGGNTLACTRRIDTNLNKVSKIYPLPHMYVIKDLVPDLSNFYAQYKSIEPYLKKKDESQEGKQQYLQSIEEREKLDGLYECILCACCSTSCPSYWWNGDKYLGPAVLMQAYRWMIDSRDDFTEERLAKLQDPFSLYRCHTIMNCTRTCPKGLNPGKAIAEIKKMMATYKEKKASV

SEQ ID NO: 65 - DNA, 2348 bp, Homo sapiens
cgcacctgctgcaggtgctcccggccgccccggaccagcgagcgcgggcactgcggcggggaggatgctgcgcgagcggaccgtgcggctgcagtacgggagccgcgtggaggcggtgtacgtgctgggcacctacctctggaccgatgtctacagcgcggccccagccggggcccaaaccttcagcctgaagcactcggaacacgtgtgggtggaggtggtgcgtgatggggaggctgaggaggtggccaccaatggcaagcagcgctggcttctctcgcccagcaccaccctgcgggtcaccatgagccaggcgagcaccgaggccagcagtgacaaggtcaccgtcaactactatgacgaggaagggagcattcccatcgaccaggcggggctcttcctcacagccattgagatctccctggatgtggacgcagaccgggatggtgtggtggagaagaacaacccaaagaaggcatcctggacctggggccccgagggccagggggccatcctgctggtgaactgtgaccgagagacaccctggttgcccaaggaggactgccgtgatgagaaggtctacagcaaggaagatctcaaggacatgtcccagatgatcctgcggaccaaaggccccgaccgcctccccgccggatacgagatagttctgtacatttccatgtcagactcagacaaagtgggcgtgttctacgtggagaacccgttcttcggccaacgctatatccacatcctgggccggcggaagctctaccatgtggtcaagtacacgggtggctccgcggagctgctgttcttcgtggaaggcctctgtttccccgacgagggcttctcaggcctggtctccatccatgtcagcctgctggagtacatggcccaggacattcccctgactcccatcttcacggacaccgtgatattccggattgctccgtggatcatgacccccaacatcctgcctcccgtgtcggtgtttgtgtgctgcatgaaggataattacctgttcctgaaagaggtgaagaaccttgtggagaaaaccaactgtgagctgaaggtctgcttccagtacctaaaccgaggcgatcgctggatccaggatgaaattgagtttggctacatcgaggccccccataaaggcttccccgtggtgctggactctccccgagatggaaacctaaaggacttccctgtgaaggagctcctgggcccagattttggctacgtgacccgggagcccctctttgagtctgtcaccagccttgactcatttggaaacctggaggtcagtcccccagtgaccgtgaacggcaagacatacccgcttggccgcatcctcatcgggagcagctttcctctgtctggtggtcggaggatgaccaaggtggtgcgtgacttcctgaaggcccagcaggtgcaggcacccgtggagctctactcagactggctgactgtgggccacgtggatgagttcatgtcctttgtccccatccccggcacaaagaaattcctgctactcatggccagcacctcggcctgctacaagctcttccgagagaagcagaaggacggccatggagaggccatcatgttcaaaggcttgggtgggatgagcagcaagcgaatcaccatcaacaagattctgtccaacgagagccttgtgcaggagaacctgtacttccagcgctgcctggactggaaccgtgacatcctcaagaaggagctgggactgacagagcaggacatcattgacctgcccgctctgttcaagatggacgaggaccaccgtgccagagccttcttcccaaacatggtgaacatgatcgtgctggacaaggacctgggcatccccaagccattcgggccacaggttgaggaggaatgctgcctggagatgcacgtgcgtggcctcctggagcccctgggcctcgaatgcaccttcatcgacgacatttctgcctaccacaaatttctgggggaagtccactgtggcaccaacgtccgcaggaagcccttcaccttcaagtggttgcacatggtgccctgacctgccaggggccctggcgtttgcctccttcgcttagttctccagaccctccctcacacgcccagagccttctgctgacatggactggacagccccgctgggagacctttgggacgtggggtggaatttggggtatctgtgccttgccctccctgagaggggcctcagtgtcctctgaagccatccccagtgagcctcgactctgtccctgctgaaaatagctgggccagtgtctctgtagccctgacataaggaacagaacacaacaaaacacagcaaaccatgt

SEQ ID NO: 66 - protein, 665 aa, Homo sapiens
MLRERTVRLQYGSRVEAVYVLGTYLWTDVYSAAPAGAQTFSLKHSEHVWVEVVRDGEAEEVATNGKQRWLLSPSTTLRVTMSQASTEASSDKVTVNYYDEEGSIPIDQAGLFLTAIEISLDVDADRDGVVEKNNPKKASWTWGPEGQGAILLVNCDRETPWLPKEDCRDEKVYSKEDLKDMSQMILRTKGPDRLPAGYEIVLYISMSDSDKVGVFYVENPFFGQRYIHILGRRKLYHVVKYTGGSAELLFFVEGLCFPDEGFSGLVSIHVSLLEYMAQDIPLTPIFTDTVIFRIAPWIMTPNILPPVSVFVCCMKDNYLFLKEVKNLVEKTNCELKVCFQYLNRGDRWIQDEIEFGYIEAPHKGFPVVLDSPRDGNLKDFPVKELLGPDFGYVTREPLFESVTSLDSFGNLEVSPPVTVNGKTYPLGRILIGSSFPLSGGRRMTKVVRDFLKAQQVQAPVELYSDWLTVGHVDEFMSFVPIPGTKKFLLLMASTSACYKLFREKQKDGHGEAIMFKGLGGMSSKRITINKILSNESLVQENLYFQRCLDWNRDILKKELGLTEQDIIDLPALFKMDEDHRARAFFPNMVNMIVLDKDLGIPKPFGPQVEEECCLEMHVRGLLEPLGLECTFIDDISAYHKFLGEVHCGTNVRRKPFTFKWLHMVP

SEQ ID NO: 67 - DNA, 2711 bp, Homo sapiens
acacttcttcctggcaaagaagtgcccaggacgggagctggggagccagggctgatctaggaggctgggagccaggtgacaggatggccccaaagagagttgtgcagctgtccctgaagatgcctacccatgccgtgtgtgtggtgggagtcgaggcacatgtggacattcacagtgatgtgcccaagggtgccaacagcttcagggtctctggaagctccggggtggaggtcttcatggtctacaaccgcacacgtgtgaaagagcccataggcaaggcccgttggccgctagacactgatgcagacatggtcgtatctgtgggcacagccagtaaggaattaaaggacttcaaggtgagggtctcctactttggggagcaggaagaccaagctctgggccgcagcgtgctttacctcactggcgtcgatatttcccttgaggttgacacaggccgcacaggcaaggtgaagaggagccaaggggacaagaaaacctggcgctggggccctgagggctatggggctatcttgctggtgaactgtgaccgggacaatcacaggtccgcggagcctgacctcacccacagctggctgatgtcgctggctgacctgcaggacatgtccccaatgctgctgagctgcaatggccccgacaagctcttcgacagccacaagcttgtcttgaacgtgcccttttctgattccaaaagagtgagggtcttctgtgccaggggtgggaattctctctcggactacaaacaggtgctggggccccagtgtctgtcctatgaagttgagcgacagccaggggagcaggagatcaagttctatgtggaggggctgaccttccccgatgccgatttcctagggctggtttccctcagtgtcagcctggtggacccggggaccctgcccgaggtgaccctcttcacagacactgtgggcttccgcatggccccctggatcatgacgcccaacactcagcctcctgaggagctgtatgtgtgcagagtgatggacactcatggctccaatgagaaattcctggaggacatgtcttatctgacattgaaagccaactgcaagctgaccatctgccctcaagttgaaaatcgaaatgaccgctggatccaggacgagatggagtttggctacatcgaggcccctcacaaatccttccccgtggtctttgactcccccaggaacaggggcctgaaagatttcccctataagaggatcctgggtcctgactttggatatgttacccgggagatcccgctccctggtccctccagccttgactccttcggcaacctggacgtcagcccgcccgtcacggggggcggcacggaataccccctgggccggatcctcatcgggagcagcttccccaagtccggtgggcggcagatggccagggcagtgcggaacttcctgaaggcacagcaggtgcaggcacccgtggagctctactcggactggctctctgtgggccatgtggacgagtttctgacctttgtgcctacctctgaccagaagggcttccggctgctcctggctagccccagcgcttgccccaaactcttccaagagaagaaagaagagggttatggggaggcagcccagtttgatgggttaaaacaccaggcaaaaagaagcattaatgagatgctggcagacagacacctccagagagacaatcttcatgcacagaaatgcattgactggaaccgtaatgtgctgaagcgggagctgggcctggcagagagtgacatcgtggacattccccagctcttcttcctgaaaaacttctacgcggaagccttcttcccagacatggttaacatggtggtcttaggcaagtacctgggcatccccaagccctacgggcccatcatcaatggccgctgctgcctggaggagaaggtgcagtccctgctggagcctctgggcctgcactgcatcttcattgatgactacttgtcctaccacgagctgcagggggagatccactgtggcaccaacgtgcgcaggaagccctttcccttcaaatggtggaacatggtgccctgagcctgcccccacccgccatcctctctgccctcttgctagggaaccctgccagggtgaaggcaaggaacaaccacctggcctccattctcttgggggagtcttggcactttgcaaacatcctggccaccatgggcaccaggacacagggatggataccacctaccctcgcctctggaatggcctacccaacccgagaagaatgcacctcattcttccctggcctctttcccacccacagcccccagaggctctagatcaacaatgttagcatgttccagaatggctgtgggaggcctagggaggtgggccccacttagaattgctcccccttcattctgatgcctccctggggaacaaggataatgactttgcatctgcacctggaacggggcctgggggacctggggtctggtgtgccaggcaccaggctgcctctgctcttggaaaactaggaaaggggatcagaaacatcctctccccgctctaggtttcttctcccaaaggggacccaaggctgtgacacttacctccacccccatccagcacccttcagctgtgtgtggacaaacaaggacagaaaaacccagtgtccaagggccaatttaaatagaaaaaaaaaaaaaaaaaaaaaaaaaa

SEQ ID NO: 68 - protein, 663 aa, Homo sapiens
MAPKRVVQLSLKMPTHAVCVVGVEAHVDIHSDVPKGANSFRVSGSSGVEVFMVYNRTRVKEPIGKARWPLDTDADMVVSVGTASKELKDFKVRVSYFGEQEDQALGRSVLYLTGVDISLEVDTGRTGKVKRSQGDKKTWRWGPEGYGAILLVNCDRDNHRSAEPDLTHSWLMSLADLQDMSPMLLSCNGPDKLFDSHKLVLNVPFSDSKRVRVFCARGGNSLSDYKQVLGPQCLSYEVERQPGEQEIKFYVEGLTFPDADFLGLVSLSVSLVDPGTLPEVTLFTDTVGFRMAPWIMTPNTQPPEELYVCRVMDTHGSNEKFLEDMSYLTLKANCKLTICPQVENRNDRWIQDEMEFGYIEAPHKSFPVVFDSPRNRGLKDFPYKRILGPDFGYVTREIPLPGPSSLDSFGNLDVSPPVTGGGTEYPLGRILIGSSFPKSGGRQMARAVRNFLKAQQVQAPVELYSDWLSVGHVDEFLTFVPTSDQKGFRLLLASPSACPKLFQEKKEEGYGEAAQFDGLKHQAKRSINEMLADRHLQRDNLHAQKCIDWNRNVLKRELGLAESDIVDIPQLFFLKNFYAEAFFPDMVNMVVLGKYLGIPKPYGPIINGRCCLEEKVQSLLEPLGLHCIFIDDYLSYHELQGEIHCGTNVRRKPFPFKWWNMVP

SEQ ID NO: 69 - DNA, 3183 bp, Homo sapiens
gagtgttggggttggcggccacagctaagtccaacaccagcatgtcgctgcagagaatcgtgcgtgtgtccctggagcatcccaccagcgcggtgtgtgtggctggcgtggagaccctcgtggacatttatgggtcagtgcctgagggcacagaaatgtttgaggtctatgggacgcctggcgtggacatctacatctctcccaacatggagaggggccgggagcgtgcagacaccaggcggtggcgctttgacgcgactttggagatcatcgtggtcatgaactcccccagcaatgacctcaacgacagccatgttcagatttcctaccactccagccatgagcctctgcccctagcctatgcggtgctctacctcacctgtgttgacatctctctggattgcgacctgaactgtgagggaaggcaggacaggaactttgtagacaagcggcagtgggtctgggggcccagtgggtatggcggcatcttgctggtgaactgtgaccgtgatgatccgagctgtgatgtccaggacaattgtgaccagcacgtgcactgcctgcaagacctggaagacatgtctgtcatggtcctgcggacgcagggccctgcagccctctttgatgaccacaaacttgtcctccatacctccagctatgatgccaaacgggcacaggtcttccacatctgcggtcctgaggatgtgtgtgaggcctataggcatgtgctgggccaagataaggtgtcctatgaggtaccccgcttgcatggggatgaggagcgcttcttcgtggaaggcctgtccttccctgatgccggcttcacaggactcatctccttccatgtcactctgctggacgactccaacgaggatttctcggcatcccctatcttcactgacactgtggtgttccgagtggcaccctggatcatgacgcccagcactctgccacccctagaggtgtatgtgtgccgtgtgaggaacaacacgtgttttgtggatgcggtggcagagctggccaggaaggccggctgcaagctgaccatctgcccacaggccgagaaccgcaacgaccgctggatccaggatgagatggagctgggctacgttcaggcgccgcacaagaccctcccggtggtctttgactccccaaggaatggggaactgcaggatttcccttacaaaagaatcctgggtccagattttggttacgtgactcgggaaccacgcgacaggtctgtgagtggcctggactcctttgggaacctggaggtcagccctccagtggtggccaatgggaaagagtaccccctggggaggatcctcattgggggcaacctgcctgggtcaagtggccgcagggtcacccaggtggtgcgggacttcctccatgcccagaaggtgcagccccccgtggagctctttgtggactggttggccgtgggccatgtggatgagtttctgagctttgtccctgtccccgatgggaagggcttccggatgctcctggccagccctggggcctgcttcaagctcttccaggaaaagcagaagtgtggccacgggagggccctcctgttccagggggttgttgatgatgagcaggtcaagaccatctccatcaaccaggtgctctccaataaagacctcatcaactacaataagtttgtgcagagctgcatcgactggaaccgtgaggtgctgaagcgggagctgggcctggcagagtgtgacatcattgacatcccacagctcttcaagaccgagaggaaaaaagcaacggccttcttccctgacttggtgaacatgctggtgctggggaagcacctgggcatccccaagccctttgggcccatcatcaatggctgctgctgcctggaggagaaggtgcggtccctgctggagcctctgggcctccactgcaccttcattgatgacttcactccataccacatgctgcatggggaggtgcactgtggcaccaatgtgtgcagaaagcccttctctttcaagtggtggaacatggtgccctgagacagctcccacccaccatcctgtccccctggggcgggcattggccaggtggtggagacagagacaggccctgaacgataagcaccaagagacccaaggctccagatggaacactgagggtgaccgtccctctcagaagcttttccctggagtgtcatgcctcacctgcaacccatgtggttctcagacttgaatcttctcggcccccaaaaatgaaggacctcatttcttatagcctctcctgtgattcaacacaacccatggagatgtccccttctcactctgaaatcatccatttggggacaaatccacattggggtctagaaacatccacgtatctcatcagccatcttgtcctgtgcatcctaacagaggaaggatccatgattctgctttggtccaattgcttcctctctgcagaggaacaaccccaaaaccagaccactccacgcaggacaggcaggagagattcttcctaaagcctcccccataaaaagggagctgtggatccacttagatcagggcggaaccatctttcacccggccaagctcctgcccagatgttgaccctcacccagcgtgagctttcacatagtaggagcttctagatgcatgtggaagcaatgagagttgtcccttagccttataaactccccatgatctgacatgcagaaatccagccttgtccagaatcctcctggaattgcttggaggacgaaagtatgctgggggatgggtgggtactagggagactgggtacaagggtgaaaagtagttcccataatacacatggttgactatggtgatccaccttgtgatggttaatattaggtgtctggagaaggttgcttcattggccctgggacttctctctgcaggaggagagaacgctgcctctcctctggattggtctcaggctctctgttggcctttggtcagcgtttccacatcctgctctgctgcaggagagggggctaaggggctggatccaccaaggcagctcacagcgggaaaactctgggactgaaccactgaattcaggggatgggggtgggggcccggttctcgaggtgtgtgccagctacacgtgtgttctgtatgggtccagctgcgtttccatcactcgctaataaatcaacagaaacac

SEQ ID NO: 70 - protein, 664 aa, Homo sapiens
MSLQRIVRVSLEHPTSAVCVAGVETLVDIYGSVPEGTEMFEVYGTPGVDIYISPNMERGRERADTRRWRFDATLEIIVVMNSPSNDLNDSHVQISYHSSHEPLPLAYAVLYLTCVDISLDCDLNCEGRQDRNFVDKRQWVWGPSGYGGILLVNCDRDDPSCDVQDNCDQHVHCLQDLEDMSVMVLRTQGPAALFDDHKLVLHTSSYDAKRAQVFHICGPEDVCEAYRHVLGQDKVSYEVPRLHGDEERFFVEGLSFPDAGFTGLISFHVTLLDDSNEDFSASPIFTDTVVFRVAPWIMTPSTLPPLEVYVCRVRNNTCFVDAVAELARKAGCKLTICPQAENRNDRWIQDEMELGYVQAPHKTLPVVFDSPRNGELQDFPYKRILGPDFGYVTREPRDRSVSGLDSFGNLEVSPPVVANGKEYPLGRILIGGNLPGSSGRRVTQVVRDFLHAQKVQPPVELFVDWLAVGHVDEFLSFVPVPDGKGFRMLLASPGACFKLFQEKQKCGHGRALLFQGVVDDEQVKTISINQVLSNKDLINYNKFVQSCIDWNREVLKRELGLAECDIIDIPQLFKTERKKATAFFPDLVNMLVLGKHLGIPKPFGPIINGCCCLEEKVRSLLEPLGLHCTFIDDFTPYHMLHGEVHCGTNVCRKPFSFKWWNMVP

SEQ ID NO: 71 - DNA, 2263 bp, Homo sapiens
agccagagggacgagctagcccgacgatggcccaggggacattgatccgtgtgaccccagagcagcccacccatgccgtgtgtgtgctgggcaccttgactcagcttgacatctgcagctctgcccctgaggactgcacgtccttcagcatcaacgcctccccaggggtggtcgtggatattgcccacagccctccagccaagaagaaatccacaggttcctccacatggcccctggaccctggggtagaggtgaccctgacgatgaaagcggccagtggtagcacaggcgaccagaaggttcagatttcatactacggacccaagactccaccagtcaaagctctactctacctcaccgcggtggaaatctccctgtgcgcagacatcacccgcaccggcaaagtgaagccaaccagagctgtgaaagatcagaggacctggacctggggcccttgtggacagggtgccatcctgctggtgaactgtgacagagacaatctcgaatcttctgccatggactgcgaggatgatgaagtgcttgacagcgaagacctgcaggacatgtcgctgatgaccctgagcacgaagacccccaaggacttcttcacaaaccatacactggtgctccacgtggccaggtctgagatggacaaagtgagggtgtttcaggccacacggggcaaactgtcctccaagtgcagcgtagtcttgggtcccaagtggccctctcactacctgatggtccccggtggaaagcacaacatggacttctacgtggaggccctcgctttcccggacaccgacttcccggggctcattaccctcaccatctccctgctggacacgtccaacctggagctccccgaggctgtggtgttccaagacagcgtggtcttccgcgtggcgccctggatcatgacccccaacacccagcccccgcaggaggtgtacgcgtgcagtatttttgaaaatgaggacttcctgaagtcagtgactactctggccatgaaagccaagtgcaagctgaccatctgccctgaggaggagaacatggatgaccagtggatgcaggatgaaatggagatcggctacatccaagccccacacaaaacgctgcccgtggtcttcgactctccaaggaacagaggcctgaaggagtttcccatcaaacgagtgatgggtccagattttggctatgtaactcgagggccccaaacagggggtatcagtggactggactcctttgggaacctggaagtgagccccccagtcacagtcaggggcaaggaatacccgctgggcaggattctcttcggggacagctgttatcccagcaatgacagccggcagatgcaccaggccctgcaggacttcctcagtgcccagcaggtgcaggcccctgtgaagctctattctgactggctgtccgtgggccacgtggacgagttcctgagctttgtgccagcacccgacaggaagggcttccggctgctcctggccagccccaggtcctgctacaaactgttccaggagcagcagaatgagggccacggggaggccctgctgttcgaagggatcaagaaaaaaaaacagcagaaaataaagaacattctgtcaaacaagacattgagagaacataattcatttgtggagagatgcatcgactggaaccgcgagctgctgaagcgggagctgggcctggccgagagtgacatcattgacatcccgcagctcttcaagctcaaagagttctctaaggcggaagcttttttccccaacatggtgaacatgctggtgctagggaagcacctgggcatccccaagcccttcgggcccgtcatcaacggccgctgctgcctggaggagaaggtgtgttccctgctggagccactgggcctccagtgcaccttcatcaacgacttcttcacctaccacatcaggcatggggaggtgcactgcggcaccaacgtgcgcagaaagcccttctccttcaagtggtggaacatggtgccctgagcccatcttccctggcgtcctctccctcctggccagatgtcgctgggtcctctgcagtgtggcaagcaagagctcttgtgaatattgtggctccctgggggcggccagccctcccagcagtggcttgctttcttctcctgtgatgtcccagtttcccactctgaagatcccaacatggtcctagcactgcacactcagttctgctctaagaagctgcaataaagtttttttaagtcactttgtac

SEQ ID NO: 72 - protein, 663 aa, Homo sapiens
MAQGTLIRVTPEQPTHAVCVLGTLTQLDICSSAPEDCTSFSINASPGVVVDIAHSPPAKKKSTGSSTWPLDPGVEVTLTMKAASGSTGDQKVQISYYGPKTPPVKALLYLTAVEISLCADITRTGKVKPTRAVKDQRTWTWGPCGQGAILLVNCDRDNLESSAMDCEDDEVLDSEDLQDMSLMTLSTKTPKDFFTNHTLVLHVARSEMDKVRVFQATRGKLSSKCSVVLGPKWPSHYLMVPGGKHNMDFYVEALAFPDTDFPGLITLTISLLDTSNLELPEAVVFQDSVVFRVAPWIMTPNTQPPQEVYACSIFENEDFLKSVTTLAMKAKCKLTICPEEENMDDQWMQDEMEIGYIQAPHKTLPVVFDSPRNRGLKEFPIKRVMGPDFGYVTRGPQTGGISGLDSFGNLEVSPPVTVRGKEYPLGRILFGDSCYPSNDSRQMHQALQDFLSAQQVQAPVKLYSDWLSVGHVDEFLSFVPAPDRKGFRLLLASPRSCYKLFQEQQNEGHGEALLFEGIKKKKQQKIKNILSNKTLREHNSFVERCIDWNRELLKRELGLAESDIIDIPQLFKLKEFSKAEAFFPNMVNMLVLGKHLGIPKPFGPVINGRCCLEEKVCSLLEPLGLQCTFINDFFTYHIRHGEVHCGTNVRRKPFSFKWWNMVP

SEQ ID NO: 73 - DNA, 2397 bp, Homo sapiens
agggcgtctgaggctgctgtgctgagtgagggctgcggtgcaggcctgaggatggtcagcgtggagggccgagccatgtccttccagagtatcatccacctgtccctggacagccctgtccatgccgtttgtgtgttgggcacagaaatctgcttggatctcagcgggtgtgccccccagaagtgccagtgcttcaccatccatggctctgggagggtcttgatcgatgtggccaacacggtgatttctgagaaggaggacgccaccatctggtggcccctgtctgatcccacgtacgccacagtgaagatgacatcgcccagcccttccgtggatgcggataaggtctcggtcacatactatgggcccaacgaggatgcccccgtgggcacagctgtgctgtacctcactggcattgaggtctctctagaggtagacatctaccgcaatgggcaagttgagatgtcaagtgacaaacaggctaagaaaaaatggatctggggtcccagcggttggggtgccatcctgcttgtgaattgcaaccctgctgatgtgggccagcaacttgaggacaagaaaaccaagaaagtgatcttttcagaggaaataacgaatctgtcccagatgactctgaatgtccaaggccccagctgtatcttaaagaaatatcggctagtcctccatacctccaaggaagagtcgaagaaggcgagagtctactggccccaaaaagacaactccagtacctttgagttggtgctggggcccgaccagcacgcctataccttggccctcctcgggaaccacttgaaggagactttctacgttgaagctatagcattcccatctgccgaattctcaggcctcatctcctactctgtgtccctggtggaggagtctcaagacccgtcaattccagagactgtgctgtacaaagacacggtggtgttccgggtggctccctgtgtcttcattccctgtacccaggtgcctctggaggtttacctgtgcagggagctgcagctgcagggttttgtggacacagtgacgaagctgagtgagaagagcaacagccaggtggcatctgtctatgaggaccccaaccgcctgggcaggtggctccaggatgagatggccttctgctacacccaggctccccacaagacaacgtccttgatcctcgacacacctcaggccgccgatctcgatgagttccccatgaagtactcactgagccctggtattggctacatgatccaggacactgaggaccataaagtggccagcatggattccattgggaacctgatggtgtccccacctgtcaaggtccaagggaaagagtacccgctgggcagagtcctcattggcagcagcttttaccccagtgcagagggccgggccatgagtaagaccctccgagacttcctctatgcccagcaggtccaagcgccggtggagctctactcagattggctaatgactggccacgtggatgagttcatgtgctccatccccacagatgacaagaatgagggcaaaaagggcttcctgctgctcctggccagccccagtgcctgctataaactgttccgagagaaccagaaggaaggctatggcgacgctcttctgtttgatgagcttagagcagatcagctcctgtctaatggaagggaagccaaaaccatcgaccaacttctggctgatgaaagcctgaagaagcagaatgaatacgtggagaagtgcattcacctgaaccgtgacatcctgaagacggagctgggcctggtggaacaggacatcatcgagattccccagctgttctgcttggagaagctgactaacatcccctctgaccagcagcccaagaggtcctttgcgaggccatacttccctgacctgttgcggatgattgtgatgggcaagaacctggggatccccaagccttttgggccccaaatcaaggggacctgctgcctggaagaaaagatttgctgcttgctggagcccctgggcttcaagtgcaccttcatcaatgactttgactgttacctgacagaggtcggagacatctgtgcctgtgccaacatccgccgggtgccctttgccttcaaatggtggaagatggtaccttagacccaggccctggagctgccagctctgccccagcgtggatggcccactgtcaccatgcaacagcatgattctttgcccagtagaggaggctggagagtccaggcaacagaaccctttcttccctgtctgccccgaccgaccctcggacccagtaggatggcaaatgccgccagcttgaacccctatggggaaaagatgcaaaagtgttcagccaagtgacgtttactaaatagccaataaagggctggtgggtgtgaatgc

SEQ ID NO: 74 - protein, 694 aa, Homo sapiens
MVSVEGRAMSFQSIIHLSLDSPVHAVCVLGTEICLDLSGCAPQKCQCFTIHGSGRVLIDVANTVISEKEDATIWWPLSDPTYATVKMTSPSPSVDADKVSVTYYGPNEDAPVGTAVLYLTGIEVSLEVDIYRNGQVEMSSDKQAKKKWIWGPSGWGAILLVNCNPADVGQQLEDKKTKKVIFSEEITNLSQMTLNVQGPSCILKKYRLVLHTSKEESKKARVYWPQKDNSSTFELVLGPDQHAYTLALLGNHLKETFYVEAIAFPSAEFSGLISYSVSLVEESQDPSIPETVLYKDTVVFRVAPCVFIPCTQVPLEVYLCRELQLQGFVDTVTKLSEKSNSQVASVYEDPNRLGRWLQDEMAFCYTQAPHKTTSLILDTPQAADLDEFPMKYSLSPGIGYMIQDTEDHKVASMDSIGNLMVSPPVKVQGKEYPLGRVLIGSSFYPSAEGRAMSKTLRDFLYAQQVQAPVELYSDWLMTGHVDEFMCSIPTDDKNEGKKGFLLLLASPSACYKLFRENQKEGYGDALLFDELRADQLLSNGREAKTIDQLLADESLKKQNEYVEKCIHLNRDILKTELGLVEQDIIEIPQLFCLEKLTNIPSDQQPKRSFARPYFPDLLRMIVMGKNLGIPKPFGPQIKGTCCLEEKICCLLEPLGFKCTFINDFDCYLTEVGDICACANIRRVPFAFKWWKMVP

SEQ ID NO: 75 - DNA, 4114 bp, Homo sapiens
ttgatgaaacgcggatccagacgctgcgtttgctggctttgatgaaacgcacatgtgtttctgttttgtgttgtagcatttgttctggaagctcgtatttacattttaagtgtatctggtgagtgggctggagccctcgtctgggccggaaaaaaaaaagccctccgatccgtcttttagttgcttctcttccttttttctctccggtttctcatcactccaaccagccgcgaccatgcccaggaagaaggcggcggcggcggcctgggaggagccgagctcgggcaacggcactgcccgcgccgggcccaggaaacgcggcggcccggcgggcaggaagcgcgagcggcccgagcgctgcagtagcagcagcggcggcggcagcagcggcgacgaggacggcctggagctcgacggggcccccggcgggggcaagcgcgcggcgcggccggcgacagcaggcaaggcgggcggcgcggccgtggtcatcaccgaacccgagcacaccaaggagcgcgtcaaacttgaagggtcaaagtgcaaagggcagcttttgatttttggggcaaccaactgggacttgattggtcgaaaagaagtgcctaaacagcaagctgcttaccgcaatctcggtcagaatttgtgggggccccacagatatgggtgcctggcgggggtccgggtgcggacagtggtctcgggctcgtgtgctgcacacagcctcctcatcaccacggaagggaagctgtggagctggggtcgaaatgagaaggggcagctgggacatggtgacaccaagagagtagaagcccctagactcatcgagggtcttagccacgaagtgattgtgtctgcagcatgtgggcggaaccacaccttggccttgacggaaacgggctccgtgtttgcgtttggggaaaacaagatggggcagctgggccttggcaaccagacagacgctgttcccagccccgcgcagataatgtacaacggccagccaattaccaaaatggcctgtggggctgaattcagtatgataatggactgcaaaggaaacctctattcctttgggtgccctgaatatggtcagctgggacacaactcagatgggaagttcatcgcccgggcacagcggatagagtacgactgtgaactagttccccggcgagtggccatcttcattgagaagacgaaagatggacagattctgcctgtaccaaacgtggttgtacgagacgtggcctgtggcgctaaccacacgctggtcctggactcccagaagcgagtcttctcctggggctttggtggctatggccggctgggccacgcagagcagaaggatgagatggtcccccgcctggtgaagctgtttgacttccctgggcgtggggcttcccagatctatgctggttacacctgctcctttgctgtcagtgaagtgggtggtctgtttttctggggggccaccaacacctcccgtgaatctaccatgtacccaaaagcagtgcaggacctctgcggctggagaattcggagcctggcttgtgggaagagcagcatcattgtggccgccgatgagagcaccatcagctggggtccgtcaccgacctttggggaactgggctacggggaccacaagcccaagtcttccactgcagcccaggaggtaaagactctggatggcattttctcagagcaggtcgccatgggctactcacactccttggtgatagcaagagatgaaagtgagactgagaaagagaagatcaagaaactgccagaatacaacccccgaaccctctgatgctcccggagactcctccgactccacacctctcgcggcagctgtcatttccatgtgcactgggacgggaagtcaaacgaggaatttaaaaaagcaaaagttgaccgaaggtgcatttttgtttagactccctgaggttccgttttacacatgatccaacgttaactacctttttttctgtatgctttccaaagtccttttttttcccttaatgttgaattaaaatacttgctcatagttgatttaccattcctacaaaagaggcagaaactttgagcaatctaggtttttttttttttttttaagttttttctttcttcctttcctgaatacactccccaaaacacccctttccagttacaattagcatcgtgatccaagcagatgccacatggaagaggaatcgccatttactcagaaaaaatgtcccttacaggaaccggcagcagctaggcagtcaccggcccgcctccatccaaaatcacgctcgcgtgcttcggaagcatccgggtcactccttctccgctttttcttgcagatgggcctaggccggtgtcggttctgtttctccccttggctgcctgtacgcccacagccttctggctgcgacattatagaatcggccgtgtcccccctggtgggggattggggatctgtgtttagccatttatatctactttagctgttaaagaggtccaaatgaaaatcaggtgattgtggaaccatggggacttgggggtggggcagaggtgggaacatttgtatcagttgagtcagcttggtggctccctgtggagccagggctgagccttgtcacgcgcactcgccaattaagagatggaccagccagcagtcaagtgcattctccagtccttgcaagaaggatcagccctttctgtgccagcctcgatcgccttgtgctttggtctctttttctcccccccgcctggatcctgcctcgcgcgggccgtcctgttgctgagactcggggtaccgttctgctgacccagctccctttagtcacgtttgcttggctctggtaccaaatagttgggattaccgaagagtccccttccttgcgtgtcagcacggatgctgtgactgccacctgcgtcctcgtcaagtgcccgagctcgccgccgtgtgtgctgcgctgagtgagttatgaggtgcctttcccggaaccctcctctcgcctggacccaagagaggcgacagctgtggctggggctcttggtttccagagggtctggactggtttgggtgctttaaaatagatatttagttcagtggtgcttatgggggagatgggactagaacttaagtgtgagacttgggtggatgggaaagttaaatattggtctcttcaagttttttttttcttttgctttgttaccacttgtcactgtctccatgttaaaatgccaaaaatgatgtagttgttgttgcttttttccctattttccaccccagtcgctccttaccgtgactcctgcccttggagggcatgtagcagtgtctgtcctgccagtcccaaggccctgtgggaggagactggcctgcatctctctaagacttagtctgacgccacgcgcatctcttgttctgtgttcaatcagtagtccaggggagaagcttctgctacttcagagctttgctaaactaacctaatttgtccaaatcaccccaaaaccaccatctctgacgtaagcttccatgcgacagcctgatccgtttccctggacaggtctctttcctggaatgcagcccaggcacctgtgctcctggcacccttgaggtctctcctttgagccgtggtcaccgagagggttgaggacgcagcacccgaggtcccagcctttgcaggagcctccctgggcttagctggacttagatcttcggtggcctcatgtaaacgtggcagccagcctcttctagaaccctagcccagggactggagcaggaaagggaccttcaaagtgaagactgccttgtcccgcagctccttctggcttagattgaaacatgggcttcctaatgggttaaatcctttaaaacaaggagttgtgggggaagggtgtcgtgcactcctagagaaaggtacacagttgcccggttgggaatgtgcttggcgctgaccctgcgggcatctgactggtcttccagctcaggaaaaagaatttgaaagaggcttagcgtgaaggggaatcaaagaggaggttgtgatttggtcgaaggtgcctggtttagtgctgtaattgtcttattattttttttatatatatatttcttggagtaaacattttaaat

SEQ ID NO: 76 - protein, 522 aa, Homo sapiens
MPRKKAAAAAWEEPSSGNGTARAGPRKRGGPAGRKRERPERCSSSSGGGSSGDEDGLELDGAPGGGKRAARPATAGKAGGAAVVITEPEHTKERVKLEGSKCKGQLLIFGATNWDLIGRKEVPKQQAAYRNLGQNLWGPHRYGCLAGVRVRTVVSGSCAAHSLLITTEGKLWSWGRNEKGQLGHGDTKRVEAPRLIEGLSHEVIVSAACGRNHTLALTETGSVFAFGENKMGQLGLGNQTDAVPSPAQIMYNGQPITKMACGAEFSMIMDCKGNLYSFGCPEYGQLGHNSDGKFIARAQRIEYDCELVPRRVAIFIEKTKDGQILPVPNVVVRDVACGANHTLVLDSQKRVFSWGFGGYGRLGHAEQKDEMVPRLVKLFDFPGRGASQIYAGYTCSFAVSEVGGLFFWGATNTSRESTMYPKAVQDLCGWRIRSLACGKSSIIVAADESTISWGPSPTFGELGYGDHKPKSSTAAQEVKTLDGIFSEQVAMGYSHSLVIARDESETEKEKIKKLPEYNPRTL

SEQ ID NO: 77 - DNA, 4269 bp, Homo sapiens
gtgtgtagctgggacggtgctggtctgagctggaccttgtctgatggcttcctccaaccctcctccacagcctgccataggagatcagctggttccaggagtcccaggcccctcctctgaggcagaggacgacccaggagaggcgtttgagtttgatgacagtgatgatgaagaggacaccagcgcagccctgggcgtccccagccttgctcctgagagggacacagaccccccactgatccacttggactccatccctgtcactgacccagacccagcagctgctccacccggcacaggggtgccagcctgggtgagcaatggggatgcagcggacgcagccttctccggggcccggcactccagctggaagcggaagagttcccgtcgcattgaccggttcactttccccgccctggaagaggatgtgatttatgacgacgtcccctgcgagagcccagatgcgcatcagcccggggcagagaggaacctgctctacgaggatgcgcaccgggctggggcccctcggcaggcggaggacctaggctggagctccagtgagttcgagagctacagcgaggactcgggggaggaggccaagccggaggtcgaggtcgagcccgccaagcaccgagtgtccttccagcccaagatgacccagctcatgaaggccgccaagagcgggaccaaggatgggctggagaagacacggatggccgtgatgcgcaaagtctccttcctgcacaggaaggacgtcctcggtgactcggaggaggaggacatggggctcctggaggtcagcgtttcggacatcaagcccccagccccagagctgggccccatgccagagggcctgagccctcagcaggtggtccggaggcatatcctgggctccatcgtgcagagcgaaggcagctacgtggagtctctgaagcggatactccaggactaccgcaaccccctgatggagatggagcccaaggcgctgagcgcccgcaagtgccaggtggtgttcttccgcgtgaaggagatcctgcactgccactccatgttccagatcgccctgtcctcccgcgtggctgagtgggattccaccgagaagatcggggacctcttcgtggcctcgttttccaagtccatggtgctagatgtgtacagtgactacgtgaacaacttcaccagtgccatgtccatcatcaagaaggcctgcctcaccaagcctgccttcctcgagttcctcaagcgacggcaggtgtgcagcccagaccgtgtcaccctctacgggctgatggtcaagcccatccagaggttcccacagttcatactcctgcttcaggacatgctgaagaacacccccaggggccatccggacaggctgtcgctgcagctggccctcacagagctggagacgctggctgagaagctgaacgagcagaagcggctggctgaccaggtggctgagatccagcagctgaccaagagcgtcagtgaccgcagcagcctcaacaagctgttgacctcaggccagcggcagctgctcctgtgtgagacgttgacggagaccgtgtacggtgaccgcgggcagctaattaagtccaaggagcgtcgggtcttcctgctcaacgacatgcttgtctgtgccaacatcaacttcaagcctgccaaccacaggggccagctggagatcagcagcctggtgcccctggggcccaagtatgtggtgaagtggaacacggcgctgccccaggtgcaggtggtggaggtgggccaggacggtggcacctatgacaaggacaatgtgctcatccagcactcaggcgccaagaaggcctctgcctcagggcaggctcagaataaggtgtacctcggccccccacgcctcttccaggagctgcaggacctgcagaaggacctggccgtggtggagcagatcacgcttctcatcagcacgctgcacggcacctaccagaacctgaacatgactgtggctcaagactggtgcctggccctgcagaggctgatgcgggtgaaggaggaagagatccactcggccaacaagtgccgtctcaggctcctgcttcctgggaaacccgacaagtccggccgccccattagcttcatggtggttttcatcacccccaaccccctgagcaagatttcctgggtcaacaggttacatttggccaaaatcggactccgggaggagaaccagccaggctggctatgcccggatgaggacaagaagagcaaagccccattctggtgcccgatcctggcctgctgcatccctgccttctcctcccgggcactcagcctgcagcttggggccctggtccacagtcctgtcaactgtcccctgctgggtttctcagcagtcagcacctcccttccacagggctacctctgggtcgggggcggacaggaaggcgcagggggccaggtggaaatcttttccttgaaccggccctcgccccgcaccgtcaagtccttcccactggcagcccctgtgctctgcatggagtatatcccggagctggaggaggaggcggagagcagagacgagagcccgacagttgctgacccctcggccacggtgcatccaaccatctgcctcgggctccaggatggcagcatcctcctctacagcagtgtggacactggcacccagtgcctggtgagctgcaggagcccaggtctgcagcctgtgctctgcctgcgacacagccccttccacctgctcgctggcctgcaggatgggacccttgctgcttaccctcggaccagcggaggtgtcctgtgggacctggagagccctcccgtgtgcctgactgtggggcccgggcctgtccgcaccctgttgagcctggaggatgccgtgtgggccagctgtgggccccgggtcactgtcctggaagccaccaccctgcagcctcagcaaagcttcgaggcgcaccaggacgaggcagtgagcgtgacacacatggtgaaggcgggcagcggcgtctggatggccttctcctccggcacctccatccgcctcttccacactgagaccctggagcatctgcaagagatcaacatcgccaccaggaccaccttcctcctgccaggccagaagcacttgtgtgtcaccagcctcctgatctgccagggtctgctctgggtgggcactgaccagggtgtcatcgtcctgctgcccgtgcctcggctggaaggcatccccaagatcacagggaaaggcatggtctcactcaacgggcactgtgggcctgtggccttcctggctgtggctaccagcatcctggcccctgacatcctgcggagtgaccaggaggaggctgaggggccccgggctgaggaggacaagccagacgggcaggcacacgagcccatgcccgatagccacgtgggccgagagctgacccgcaagaagggcatcctcttgcagtaccgcctgcgctccaccgcacacctcccgggcccgctgctctccatgcgggagccggcgcctgctgatggcgcagctttggagcacagcgaggaggacggctccatttacgagatggccgacgaccccgacatctgggtgcgcagccggccctgcgcccgcgacgcccaccgcaaggagatttgctctgtggccatcatctccggcgggcagggctaccgcaactttggcagcgctctgggcagcagtgggaggcaggccccgtgtggggagacggacagcaccctcctcatctggcaggtgcccttgatgctatagcgcctcccctctcccctcagagggcacagctgcaggcctgaccaaggccacgcccggctctcgtgctctaggacctgcacgggacttgtggatgggcctggactctccagaaactacttgggcagagcaaaggaaaacctcttgttttaaaaaaatttttttcagagtgttttggggaggagttttagggcttggggagagggaggacacatctggaggaaatggccttctttttaaaagcaaaaaacacaaaacctcacaactgcctggcaagcccagtatcacttgtttgggccctagcgggactccaaggcagccacacgcccctcctggaagggtgtgtgcgtgtgagtgtgtgcgagtgtgtgggctggtgtgtgaatatctataaataagtatatatggtgtatattatatgtgtataaataaagtctgtacatattggagctctgggagatgctggaataaaagacaagagttacatctggacttggaaaaaaaaa

SEQ ID NO: 78 - protein, 1240 aa, Homo sapiens
MASSNPPPQPAIGDQLVPGVPGPSSEAEDDPGEAFEFDDSDDEEDTSAALGVPSLAPERDTDPPLIHLDSIPVTDPDPAAAPPGTGVPAWVSNGDAADAAFSGARHSSWKRKSSRRIDRFTFPALEEDVIYDDVPCESPDAHQPGAERNLLYEDAHRAGAPRQAEDLGWSSSEFESYSEDSGEEAKPEVEVEPAKHRVSFQPKMTQLMKAAKSGTKDGLEKTRMAVMRKVSFLHRKDVLGDSEEEDMGLLEVSVSDIKPPAPELGPMPEGLSPQQVVRRHILGSIVQSEGSYVESLKRILQDYRNPLMEMEPKALSARKCQVVFFRVKEILHCHSMFQIALSSRVAEWDSTEKIGDLFVASFSKSMVLDVYSDYVNNFTSAMSIIKKACLTKPAFLEFLKRRQVCSPDRVTLYGLMVKPIQRFPQFILLLQDMLKNTPRGHPDRLSLQLALTELETLAEKLNEQKRLADQVAEIQQLTKSVSDRSSLNKLLTSGQRQLLLCETLTETVYGDRGQLIKSKERRVFLLNDMLVCANINFKPANHRGQLEISSLVPLGPKYVVKWNTALPQVQVVEVGQDGGTYDKDNVLIQHSGAKKASASGQAQNKVYLGPPRLFQELQDLQKDLAVVEQITLLISTLHGTYQNLNMTVAQDWCLALQRLMRVKEEEIHSANKCRLRLLLPGKPDKSGRPISFMVVFITPNPLSKISWVNRLHLAKIGLREENQPGWLCPDEDKKSKAPFWCPILACCIPAFSSRALSLQLGALVHSPVNCPLLGFSAVSTSLPQGYLWVGGGQEGAGGQVEIFSLNRPSPRTVKSFPLAAPVLCMEYIPELEEEAESRDESPTVADPSATVHPTICLGLQDGSILLYSSVDTGTQCLVSCRSPGLQPVLCLRHSPFHLLAGLQDGTLAAYPRTSGGVLWDLESPPVCLTVGPGPVRTLLSLEDAVWASCGPRVTVLEATTLQPQQSFEAHQDEAVSVTHMVKAGSGVWMAFSSGTSIRLFHTETLEHLQEINIATRTTFLLPGQKHLCVTSLLICQGLLWVGTDQGVIVLLPVPRLEGIPKITGKGMVSLNGHCGPVAFLAVATSILAPDILRSDQEEAEGPRAEEDKPDGQAHEPMPDSHVGRELTRKKGILLQYRLRSTAHLPGPLLSMREPAPADGAALEHSEEDGSIYEMADDPDIWVRSRPCARDAHRKEICSVAIISGGQGYRNFGSALGSSGRQAPCGETDSTLLIWQVPLML

SEQ ID NO: 79 - DNA, 4502 bp, Homo sapiens
gcgccgtcccggccatgggcgcccgcggcggcctgcggagctggaggcgcggcgccggccgccaggcgcctttgtgagcggcgcggacgacaaaggcgcgggcccgggcagccgaggtgtgtagctgggacggtgctggtctgagctggaccttgtctgatggcttcctccaaccctcctccacagcctgccataggagatcagctggttccaggagtcccaggcccctcctctgaggcagaggacgacccaggagaggcgtttgagtttgatgacagtgatgatgaagaggacaccagcgcagccctgggcgtccccagccttgctcctgagagggacacagaccccccactgatccacttggactccatccctgtcactgacccagacccagcagctgctccacccggcacaggggtgccagcctgggtgagcaatggggatgcagcggacgcagccttctccggggcccggcactccagctggaagcggaagagttcccgtcgcattgaccggttcactttccccgccctggaagaggatgtgatttatgacgacgtcccctgcgagagcccagatgcgcatcagcccggggcagagaggaacctgctctacgaggatgcgcaccgggctggggcccctcggcaggcggaggacctaggctggagctccagtgagttcgagagctacagcgaggactcgggggaggaggccaagccggaggtcgaggtcgagcccgccaagcaccgagtgtccttccagcccaagctttctccagacctgactaggctaaaggagagatacgccaggactaagagagacatcttggctttgagagttggggggagagacatgcaggagctgaagcacaagtacgattgtaagatgacccagctcatgaaggccgccaagagcgggaccaaggatgggctggagaagacacggatggccgtgatgcgcaaagtctccttcctgcacaggaaggacgtcctcggtgactcggaggaggaggacatggggctcctggaggtcagcgtttcggacatcaagcccccagccccagagctgggccccatgccagagggcctgagccctcagcaggtggtccggaggcatatcctgggctccatcgtgcagagcgaaggcagctacgtggagtctctgaagcggatactccaggactaccgcaaccccctgatggagatggagcccaaggcgctgagcgcccgcaagtgccaggtggtgttcttccgcgtgaaggagatcctgcactgccactccatgttccagatcgccctgtcctcccgcgtggctgagtgggattccaccgagaagatcggggacctcttcgtggcctcgttttccaagtccatggtgctagatgtgtacagtgactacgtgaacaacttcaccagtgccatgtccatcatcaagaaggcctgcctcaccaagcctgccttcctcgagttcctcaagcgacggcaggtgtgcagcccagaccgtgtcaccctctacgggctgatggtcaagcccatccagaggttcccacagttcatactcctgcttcaggacatgctgaagaacacccccaggggccatccggacaggctgtcgctgcagctggccctcacagagctggagacgctggctgagaagctgaacgagcagaagcggctggctgaccaggtggctgagatccagcagctgaccaagagcgtcagtgaccgcagcagcctcaacaagctgttgacctcaggccagcggcagctgctcctgtgtgagacgttgacggagaccgtgtacggtgaccgcgggcagctaattaagtccaaggagcgtcgggtcttcctgctcaacgacatgcttgtctgtgccaacatcaacttcaagcctgccaaccacaggggccagctggagatcagcagcctggtgcccctggggcccaagtatgtggtgaagtggaacacggcgctgccccaggtgcaggtggtggaggtgggccaggacggtggcacctatgacaaggacaatgtgctcatccagcactcaggcgccaagaaggcctctgcctcagggcaggctcagaataaggtgtacctcggccccccacgcctcttccaggagctgcaggacctgcagaaggacctggccgtggtggagcagatcacgcttctcatcagcacgctgcacggcacctaccagaacctgaacatgactgtggctcaagactggtgcctggccctgcagaggctgatgcgggtgaaggaggaagagatccactcggccaacaagtgccgtctcaggctcctgcttcctgggaaacccgacaagtccggccgccccattagcttcatggtggttttcatcacccccaaccccctgagcaagatttcctgggtcaacaggttacatttggccaaaatcggactccgggaggagaaccagccaggctggctatgcccggatgaggacaagaagagcaaagccccattctggtgcccgatcctggcctgctgcatccctgccttctcctcccgggcactcagcctgcagcttggggccctggtccacagtcctgtcaactgtcccctgctgggtttctcagcagtcagcacctcccttccacagggctacctctgggtcgggggcggacaggaaggcgcagggggccaggtggaaatcttttccttgaaccggccctcgccccgcaccgtcaagtccttcccactggcagcccctgtgctctgcatggagtatatcccggagctggaggaggaggcggagagcagagacgagagcccgacagttgctgacccctcggccacggtgcatccaaccatctgcctcgggctccaggatggcagcatcctcctctacagcagtgtggacactggcacccagtgcctggtgagctgcaggagcccaggtctgcagcctgtgctctgcctgcgacacagccccttccacctgctcgctggcctgcaggatgggacccttgctgcttaccctcggaccagcggaggtgtcctgtgggacctggagagccctcccgtgtgcctgactgtggggcccgggcctgtccgcaccctgttgagcctggaggatgccgtgtgggccagctgtgggccccgggtcactgtcctggaagccaccaccctgcagcctcagcaaagcttcgaggcgcaccaggacgaggcagtgagcgtgacacacatggtgaaggcgggcagcggcgtctggatggccttctcctccggcacctccatccgcctcttccacactgagaccctggagcatctgcaagagatcaacatcgccaccaggaccaccttcctcctgccaggccagaagcacttgtgtgtcaccagcctcctgatctgccagggtctgctctgggtgggcactgaccagggtgtcatcgtcctgctgcccgtgcctcggctggaaggcatccccaagatcacagggaaaggcatggtctcactcaacgggcactgtgggcctgtggccttcctggctgtggctaccagcatcctggcccctgacatcctgcggagtgaccaggaggaggctgaggggccccgggctgaggaggacaagccagacgggcaggcacacgagcccatgcccgatagccacgtgggccgagagctgacccgcaagaagggcatcctcttgcagtaccgcctgcgctccaccgcacacctcccgggcccgctgctctccatgcgggagccggcgcctgctgatggcgcagctttggagcacagcgaggaggacggctccatttacgagatggccgacgaccccgacatctgggtgcgcagccggccctgcgcccgcgacgcccaccgcaaggagatttgctctgtggccatcatctccggcgggcagggctaccgcaactttggcagcgctctgggcagcagtgggaggcaggccccgtgtggggagacggacagcaccctcctcatctggcaggtgcccttgatgctatagcgcctcccctctcccctcagagggcacagctgcaggcctgaccaaggccacgcccggctctcgtgctctaggacctgcacgggacttgtggatgggcctggactctccagaaactacttgggcagagcaaaggaaaacctcttgttttaaaaaaatttttttcagagtgttttggggaggagttttagggcttggggagagggaggacacatctggaggaaatggccttctttttaaaagcaaaaaacacaaaacctcacaactgcctggcaagcccagtatcacttgtttgggccctagcgggactccaaggcagccacacgcccctcctggaagggtgtgtgcgtgtgagtgtgtgcgagtgtgtgggctggtgtgtgaatatctataaataagtatatatggtgtatattatatgtgtataaataaagtctgtacatattggagctctgggagatgctggaataaaagacaagagttacatctggacttggaaaaaaaaa

SEQ ID NO: 80 - protein, 1279 aa, Homo sapiens
MASSNPPPQPAIGDQLVPGVPGPSSEAEDDPGEAFEFDDSDDEEDTSAALGVPSLAPERDTDPPLIHLDSIPVTDPDPAAAPPGTGVPAWVSNGDAADAAFSGARHSSWKRKSSRRIDRFTFPALEEDVIYDDVPCESPDAHQPGAERNLLYEDAHRAGAPRQAEDLGWSSSEFESYSEDSGEEAKPEVEVEPAKHRVSFQPKLSPDLTRLKERYARTKRDILALRVGGRDMQELKHKYDCKMTQLMKAAKSGTKDGLEKTRMAVMRKVSFLHRKDVLGDSEEEDMGLLEVSVSDIKPPAPELGPMPEGLSPQQVVRRHILGSIVQSEGSYVESLKRILQDYRNPLMEMEPKALSARKCQVVFFRVKEILHCHSMFQIALSSRVAEWDSTEKIGDLFVASFSKSMVLDVYSDYVNNFTSAMSIIKKACLTKPAFLEFLKRRQVCSPDRVTLYGLMVKPIQRFPQFILLLQDMLKNTPRGHPDRLSLQLALTELETLAEKLNEQKRLADQVAEIQQLTKSVSDRSSLNKLLTSGQRQLLLCETLTETVYGDRGQLIKSKERRVFLLNDMLVCANINFKPANHRGQLEISSLVPLGPKYVVKWNTALPQVQVVEVGQDGGTYDKDNVLIQHSGAKKASASGQAQNKVYLGPPRLFQELQDLQKDLAVVEQITLLISTLHGTYQNLNMTVAQDWCLALQRLMRVKEEEIHSANKCRLRLLLPGKPDKSGRPISFMVVFITPNPLSKISWVNRLHLAKIGLREENQPGWLCPDEDKKSKAPFWCPILACCIPAFSSRALSLQLGALVHSPVNCPLLGFSAVSTSLPQGYLWVGGGQEGAGGQVEIFSLNRPSPRTVKSFPLAAPVLCMEYIPELEEEAESRDESPTVADPSATVHPTICLGLQDGSILLYSSVDTGTQCLVSCRSPGLQPVLCLRHSPFHLLAGLQDGTLAAYPRTSGGVLWDLESPPVCLTVGPGPVRTLLSLEDAVWASCGPRVTVLEATTLQPQQSFEAHQDEAVSVTHMVKAGSGVWMAFSSGTSIRLFHTETLEHLQEINIATRTTFLLPGQKHLCVTSLLICQGLLWVGTDQGVIVLLPVPRLEGIPKITGKGMVSLNGHCGPVAFLAVATSILAPDILRSDQEEAEGPRAEEDKPDGQAHEPMPDSHVGRELTRKKGILLQYRLRSTAHLPGPLLSMREPAPADGAALEHSEEDGSIYEMADDPDIWVRSRPCARDAHRKEICSVAIISGGQGYRNFGSALGSSGRQAPCGETDSTLLIWQVPLML

SEQ ID NO: 81 - DNA, 2547 bp, Homo sapiens
ccacgcgtccgcggacgcgtgggcgagaagtgcttccaagcgtccattttgagccttggaaactacgacgaccaaagggccacgggttcctgggtcgtttctcatttccgtcgagttaaacgtctggggctgcttctgaggaatcagcttggctggccagcaagttcagctccggcaagtcatttgattcacccggtgatgaaatgggggtcaaccagtctgtgggctttccacctgtcacaggaccccacctcgtaggctgtggggatgtgatggagggtcagaatctccaggggagcttctttcgactcttctacccctgccaaaaggcagaggagaccatggagcagcccctgtggattccccgctatgagtactgcactggcctggccgagtacctgcagtttaataagcgctgcgggggcttgctgttcaacctggcggtgggatcttgtcgcctgcctgttagctggaatggcccctttaagacaaaggactctggataccccttgatcatcttctcccatggcctaggagccttcaggactttgtattcagccttctgcatggagctggcctcacgtggctttgtggttgctgtgccagagcacagggaccggtcagcggcaaccacctatttctgcaagcaggccccagaagagaaccagcccaccaatgaatcgctgcaggaggaatggatccctttccgtcgagttgaggaaggggagaaggaatttcatgttcggaatccccaggtgcatcagcgggtaagcgagtgtttacgggtgttgaagatcctgcaagaggtcactgctgggcagactgtcttcaacatcttgcctggtggcttggatctgatgactttgaagggcaacattgacatgagccgtgtggctgtgatgggacattcatttggaggggccacagctattctggctttggccaaggagacccaatttcggtgtgcggtggctctggatgcttggatgtttcctctggaacgtgacttttaccccaaggcccgaggacctgtgttctttatcaatactgagaaattccagacaatggagagtgtcaatttgatgaagaagatatgtgcccagcatgaacagtctaggatcataaccgttcttggttctgttcatcggagtcaaactgactttgcttttgtgactggcaacttgattggtaaattcttctccactgaaacccgtgggagcctggacccctatgaagggcaggaggttatggtacgggccatgttggccttcctgcagaagcacctcgacctgaaagaagactataatcaatggaacaaccttattgaaggcattggaccgtcgctcaccccaggggccccccaccatctgtccagcctgtaggcacaactggccatttgtaaagtcacttcagccaagttttcatttgggagctacccaagggcacccatgagctcctatcaagaagtgatcaacgtgaccccttttcacagattgaaaggtgtaatcacactgctgcttggataactgggtactttgatcttagatttgatcttaaaatcactttgggactgggatcccttgctgattgacaaacagactttctgggaccttgatggagtggggaacaagcagtagagtgggactgggggagacccaggccccgggctgagcactgtgaggcctggatgtgaagactcagcccagcgaagctcattcccttacccccggccagtgctgctgcttcagtggaagagatgaagccaaaggacagaatgaaaatccctaccttcagagactctagcccagcccaacaccatctcttcctacctctcagccttctccctccccagggccacttgttgaagtctgagcactttatgtaaatttctaggtgtgagccgtgatcacattttctatttatttccaagtcttctcattgtatggaacatagtactacttatacttacagtagtaagttatacttgtgagcccacagagtggcagacagcatggctctcacagcacagggagaaaaactgaggtacacagaggtacctcagaagctctggatgtctttgggggttttgctaagtgtatcttgataggaaacaacaaaagcaggttgagatggggaagatgacagaacaacagtgttaaatggccatttgcacaggcctttgccacaacagagaagtagtttggtcagctaaaactcagctgcagcctggacagtagagcgagaccccatcttaaaaataaagaaggctgggcgtggtggctcatgcctgtaatcccagcactttgggaggccaaggcaggcagatcacttaaggccaggagttcaagaccacctggccaacatggtgaaaccccgtctctactaaaaatacaaaaaattagcctggcgtaatggcaggcgcctataatcccagctactcaggaggctgaagcagaagaatcacttgaacctaggaggcggaggttgcagtgagtcaagatcgcgccactgcactccagcctgggtgacagagcaagactctgtctt

SEQ ID NO: 82 - protein, 392 aa, Homo sapiens
MGVNQSVGFPPVTGPHLVGCGDVMEGQNLQGSFFRLFYPCQKAEETMEQPLWIPRYEYCTGLAEYLQFNKRCGGLLFNLAVGSCRLPVSWNGPFKTKDSGYPLIIFSHGLGAFRTLYSAFCMELASRGFVVAVPEHRDRSAATTYFCKQAPEENQPTNESLQEEWIPFRRVEEGEKEFHVRNPQVHQRVSECLRVLKILQEVTAGQTVFNILPGGLDLMTLKGNIDMSRVAVMGHSFGGATAILALAKETQFRCAVALDAWMFPLERDFYPKARGPVFFINTEKFQTMESVNLMKKICAQHEQSRIITVLGSVHRSQTDFAFVTGNLIGKFFSTETRGSLDPYEGQEVMVRAMLAFLQKHLDLKEDYNQWNNLIEGIGPSLTPGAPHHLSSL

SEQ ID NO: 83 - DNA, 4009 bp, Homo sapiens
ccgactggaaagggatgggagtgataccatagggtttggggggcttggcacaacggccctggcctctgcactgtgatagctccaagccaaatggtgcaaggcagctgctgggctgcggggaagaggggctgcacttcctgagctggtgcagcggcagagtggataaggatcaggaccccgagccctcctggccctccaaggcggggggacaccggctgcacccaggctgtgacctcagctgacgccgatgatccacatgggatgcagggtctaattttagctccagccacaggggccacagcccagaagcgtctgccagcgggcacaggggcagccagggctgctcaggcaaggggaggagtgggaagaccagcccagctccctccagcctgtccctggccaagccgcctcctgtgggagctctgactggtccccatggcctggcagacagccctcctctcagttgagggcaaggtcaaggggtgcagccaggagggcagggggacacggccctgcattctggacaggggttgcgtcagccagagcagtgcccaggggcaggggtccctgctgggagggaaaaggctggcttggttgtccaaaggccgagaaggcagagtcctgagagcaggggggccaggccagcaagctgggtcccacctggcctcctcctgcctggctggtgactcactatctgaccttagacaggcggcctggtctcgatgggcctcagtcttcccatctgtacaatgacagcacaggactagcaggtcggtcccagctctggtctcccgccccaggccctgctcttcctgcttgctggcagaggcctcccagcttccctagccctgactgtgggtggccacatgcagtcgtggaggagaagaaagtccctgtggctggcactgtcagcctcctggctcctgcttgtcctgctgggaggcttctcccttctccgcctggcgttgcctcccagacctcggcccggggcttcccaaggctggccccgctggctggatgcagagctcctgcagagcttctcccagcctggagagctcccagaagatgccgtttcacctcctcaagcccctcatggtggcagctgcaactgggaatcttgctttgatacctcaaagtgcaggggcgatggccttaaggtattcgtgtacccagcggttggaaccatctctgagactcatcgcaggatcctggcttccattgagggctctcgcttctacacattcagccctgctggggcctgcctcctcctcctcctcagcctggacgcccagactggagagtgcagctcaatgcctctgcaatggaacaggggcaggaaccatctggtcctccgtctccacccggctccctgccccaggaccttccagctgggacaggctatggtggctgaggccagccccacggtggactccttccggcccggctttgatgtggccctcccttttctccctgaagcccacccgttgcgaggtggggctcctggccagctgcggcaacacagcccccagcccggggtagccctgctagccctggaagaggagaggggtgggtggcgcacagcagacactggctcctctgcctgcccctgggatgggcgctgtgagcaagaccctggacctgggcagacccagcgccaggagacgctgcccaatgccaccttctgcctcatctctggccaccgtcccgaggctgcctcgcgcttcctccaagccctgcaggccggctgcatcccagtgcttctcagcccccgctgggagctgcccttctccgaggtcatcgactggaccaaggcagccatcgtagctgatgagaggctcccacttcaggtcctggctgccctccaggagatgtcccctgcacgggtcctcgccctgcgtcagcagacccagtttctatgggatgcctacttctcctcagtggagaaggtcatccataccactctggaggttattcaggaccggatttttggaacatcagctaacccctcactgctgtggaacagccccccaggggcactcctggccctgtctactttttccacaagcccccaggacttccccttctactacctgcaacagggctcccgccctgagggcagattcagcgccctgatctgggtggggcccccaggccagccccctctgaagctcatccaggcggtggcaggctcccagcactgtgcccagatcttggttctctggagcaatgagaggccactcccatccaggtggccggagacagctgtgcccttgacagtcattgatgggcacaggaaggttagtgatcgcttctacccatatagcaccatcagaacagatgccatcctcagcctcgatgcccgcagcagtctttccacaagtgaggtggactttgcctttctggtgtggcagagcttcccagagcggatggtgggcttcctgacgtcgagccatttctgggacgaggcccatggtggctggggctacactgctgagaggaccaacgaattctccatggttctcaccacagccgccttctaccataggtattaccacactctcttcacccactccctgcccaaggctctgaggaccctggcagatgaggcacccacctgtgtggacgtcctgatgaatttcatagtagcagcagtcaccaagctgccccctatcaaggtgccctatggcaagcagcgccaggaggctgctccactggcgcctgggggcccggggcccaggccaaagccgcctgccccagcccccgactgcatcaaccagatagcggcagcgttcggccacatgcccttgctgtcctctcgtctgcgtctggacccggtgctgtttaaggacccggtgtccgtgcagcgcaagaagtaccgcagcctggagaagccctaggggggcgacccgcggagaccccatcaaaggtctcagcccagctcccagggggcccggcgcctgccggcgggctccgctcttgggacaccggtaaaacctatcatgtcagccagcgggcccacacgtcggaccccggttggccaatcacaacaggggggcgtggccttaccttctcctgctcgccctcagccgcggagcctctgcggaggctgagccccgcgaccggagcgccgctctccgcttctccacccagctaacttctgctcgtctttcagagcattgtctcctccagggacttgcctggccctcctccccctccgcccccaatgggttcggtctcctttgcgctttcgcagcccagtgtttgccgcggttcccgcacggtcaggccccaggactggcttgcgagccccggggggcgggtcgtgtcgtgtccttttctctctggctaggcaggtgtgccgcaaatatttgacgaatagatggatggcagacattaactgcgtgcctggccctatgagggcggcggcgggacagggtgagcggagagacagaactgtccccgccccaccccgccacccattcctagggttcctagtcccgggaaggcaactacccaaagacgcctgggttgtcaggctcaatccttgagcctcaaccaaggagcagaggggtgcgggtaaacgaggagtggggcgaggaaagcgggatgggaacaagtggcctgtccccgcacggcccgcggctcagcctcggccgtctgccctgcactaccaaggccgaccactagaggtcagcgtcgcgccgcactcttcacccgcatgcccagagggcggccgggatgtggagggtgaacgctgtgggcagctcgggggctgaaagctgggaagagaaatctgaagaacagccccatctctttcgcctgcacacttggaactcagcaagaagggactgtttctaggtgggctgggcgcgagcagggactgtcccgagctggtataggtgagaatggagttggggggggacactaggtctccggggttcacccacctggagctggaattatcacttccgaaataaagcgcgtgtccttgcaaaaaaaaaaaaaaaaa

SEQ ID NO: 84 - protein, 676 aa, Homo sapiens
MQSWRRRKSLWLALSASWLLLVLLGGFSLLRLALPPRPRPGASQGWPRWLDAELLQSFSQPGELPEDAVSPPQAPHGGSCNWESCFDTSKCRGDGLKVFVYPAVGTISETHRRILASIEGSRFYTFSPAGACLLLLLSLDAQTGECSSMPLQWNRGRNHLVLRLHPAPCPRTFQLGQAMVAEASPTVDSFRPGFDVALPFLPEAHPLRGGAPGQLRQHSPQPGVALLALEEERGGWRTADTGSSACPWDGRCEQDPGPGQTQRQETLPNATFCLISGHRPEAASRFLQALQAGCIPVLLSPRWELPFSEVIDWTKAAIVADERLPLQVLAALQEMSPARVLALRQQTQFLWDAYFSSVEKVIHTTLEVIQDRIFGTSANPSLLWNSPPGALLALSTFSTSPQDFPFYYLQQGSRPEGRFSALIWVGPPGQPPLKLIQAVAGSQHCAQILVLWSNERPLPSRWPETAVPLTVIDGHRKVSDRFYPYSTIRTDAILSLDARSSLSTSEVDFAFLVWQSFPERMVGFLTSSHFWDEAHGGWGYTAERTNEFSMVLTTAAFYHRYYHTLFTHSLPKALRTLADEAPTCVDVLMNFIVAAVTKLPPIKVPYGKQRQEAAPLAPGGPGPRPKPPAPAPDCINQIAAAFGHMPLLSSRLRLDPVLFKDPVSVQRKKYRSLEKP

SEQ ID NO: 85 - DNA, 2473 bp, Homo sapiens
gagacacgggagcgcttggcacgcggagccagagccggagctgcagccgcagcgggagccgggggagctcaggggccgcaggagccgggccggagtgagcgcacctcgcggggccctcggggcaggtgggtgagcgccacccggagtcccgcgcgcaactttcagggcgcactcggcggggcggctgcgcggctgccgggactcggcgcgggactgcatggaggccaaggagaagcagcatctgttggacgccaggccggcaatccggtcatacacgggatctctgtggcaggaaggggctggctggattcctctgccccgacctggcctggacttgcaggccattgagctggctgcccagagcaaccatcactgccatgctcagaagggtcctgacagtcactgtgaccccaagaaggggaaggcccagcgccagctgtatgtagcctctgccatctgcctgttgttcatgatcggagaagtcgttggtgggtacctggcacacagcttggctgtcatgactgacgcagcacacctgctcactgactttgccagcatgctcatcagcctcttctccctctggatgtcctcccggccagccaccaagaccatgaactttggctggcagagagctgagatcttgggagccctggtctctgtactgtccatctgggtcgtgacgggggtactggtgtacctggctgtggagcggctgatctctggggactatgaaattgacggggggaccatgctgatcacgtcgggctgcgctgtggctgtgaacatcataatggggttgacccttcaccagtctggccatgggcacagccacggcaccaccaaccagcaggaggagaaccccagcgtccgagctgccttcatccatgtgatcggcgactttatgcagagcatgggtgtcctagtggcagcctatattttatacttcaagccagaatacaagtatgtagaccccatctgcaccttcgtcttctccatcctggtcctggggacaaccttgaccatcctgagagatgtgatcctggtgttgatggaagggacccccaagggcgttgacttcacagctgttcgtgatctgctgctgtcggtggagggggtagaagccctgcacagcctgcatatctgggcactgacggtggcccagcctgttctgtctgtccacatcgccattgctcagaatacagacgcccaggctgtgctgaagacagccagcagccgcctccaagggaagttccacttccacaccgtgaccatccagatcgaggactactcggaggacatgaaggactgtcaggcatgccagggcccctcagactgactgctcagccaggcaccaactggggcatgaacaggacctgcaggtggctggactgagtgtcccccaggcccagccaggactttgcctaccccagctgtgttgtaaaccaggtccccctcctgacctctgccccactccaggaatggagctcttcccagcctcccatctgactacagccagggtggggactcagcgggtataaagctagtgtgaccctgctcttccagctcctgggccagctctggaagggctgtatttgggcctaatcctcagcaactgttctaccactcgcaggggcaaaggtggtgagccacgggacgtccaaggggaggctggccccagcgcgcccatactgcctgcctcatgccccattctcagcctggctggcctttgcctttatgaatctgagcccctccatctgcctatagcaataggcacgggggtgaggaccctcacactctcatttgagcctccctgaggcagggagccaggaggcacctgaggcctatctgtgccttagtcacttcagctatgagccaaatgttccctttcctggaggggagaggcttcttactaggtaagagacaggtttcctctttccttatttcctcagctgtgccaacacaaaaaacaactttggcacaggtggtgggcagggggtagagagatttcagcttgggttctgcactaacagcctccaagccccctggcacttctgttgccctgagagtgtcccaggggattcagagtctccagaaagatatggctgggccaactctgttgcctacctggcctgacccagtcggagcctgacatggtggagggaaagggagacaagtggggctgcactcggtccagaggccagctaggagggaaaccgcagcttcctggggcttgtgtgtgaagattcctgacttaggggtggcttttgtttacaagatgcaagaggggaaacctgtccccgactcatcgagacaacatgcccagttatcagggagtcctgtgtcacaaggtctgtctctgccattgtaagcaagtgccttgggcgagctggcctctgccccacagtctcatctgtacaccgacagggttgatgcctccctcacagggttgagaacaagagccagttggccaagt

SEQ ID NO: 86 - protein, 372 aa, Homo sapiens
MEAKEKQHLLDARPAIRSYTGSLWQEGAGWIPLPRPGLDLQAIELAAQSNHHCHAQKGPDSHCDPKKGKAQRQLYVASAICLLFMIGEVVGGYLAHSLAVMTDAAHLLTDFASMLISLFSLWMSSRPATKTMNFGWQRAEILGALVSVLSIWVVTGVLVYLAVERLISGDYEIDGGTMLITSGCAVAVNIIMGLTLHQSGHGHSHGTTNQQEENPSVRAAFIHVIGDFMQSMGVLVAAYILYFKPEYKYVDPICTFVFSILVLGTTLTILRDVILVLMEGTPKGVDFTAVRDLLLSVEGVEALHSLHIWALTVAQPVLSVHIAIAQNTDAQAVLKTASSRLQGKFHFHTVTIQIEDYSEDMKDCQACQGPSD

SEQ ID NO: 87 - DNA, 2326 bp, Homo sapiens
gagacacgggagcgcttggcacgcggagccagagccggagctgcagccgcagcgggagccgggggagctcaggggccgcaggagccgggccggagtgagcgcacctcgcggggccctcggggcaggtgggtgagcgccacccggagtcccgcgcgcaactttcagggcgcactcggcggggcggctgcgcggctgccgggactcggcgcgggactgcatggaggccaaggagaagcagcatctgttggacgccaggccggcaatccggtcatacacgggatctctgtggcaggaaggggctggctggattcctctgccccgacctggcctggacttgcaggccattgagctggctgcccagagcaaccatcactgccatgctcagaagggtcctgacagtcactgtgaccccaagaaggggaaggcccagcgccagctgtatgtagcctctgccatctgcctgttgttcatgatcggagaagtcgttgagatcttgggagccctggtctctgtactgtccatctgggtcgtgacgggggtactggtgtacctggctgtggagcggctgatctctggggactatgaaattgacggggggaccatgctgatcacgtcgggctgcgctgtggctgtgaacatcataatggggttgacccttcaccagtctggccatgggcacagccacggcaccaccaaccagcaggaggagaaccccagcgtccgagctgccttcatccatgtgatcggcgactttatgcagagcatgggtgtcctagtggcagcctatattttatacttcaagccagaatacaagtatgtagaccccatctgcaccttcgtcttctccatcctggtcctggggacaaccttgaccatcctgagagatgtgatcctggtgttgatggaagggacccccaagggcgttgacttcacagctgttcgtgatctgctgctgtcggtggagggggtagaagccctgcacagcctgcatatctgggcactgacggtggcccagcctgttctgtctgtccacatcgccattgctcagaatacagacgcccaggctgtgctgaagacagccagcagccgcctccaagggaagttccacttccacaccgtgaccatccagatcgaggactactcggaggacatgaaggactgtcaggcatgccagggcccctcagactgactgctcagccaggcaccaactggggcatgaacaggacctgcaggtggctggactgagtgtcccccaggcccagccaggactttgcctaccccagctgtgttgtaaaccaggtccccctcctgacctctgccccactccaggaatggagctcttcccagcctcccatctgactacagccagggtggggactcagcgggtataaagctagtgtgaccctgctcttccagctcctgggccagctctggaagggctgtatttgggcctaatcctcagcaactgttctaccactcgcaggggcaaaggtggtgagccacgggacgtccaaggggaggctggccccagcgcgcccatactgcctgcctcatgccccattctcagcctggctggcctttgcctttatgaatctgagcccctccatctgcctatagcaataggcacgggggtgaggaccctcacactctcatttgagcctccctgaggcagggagccaggaggcacctgaggcctatctgtgccttagtcacttcagctatgagccaaatgttccctttcctggaggggagaggcttcttactaggtaagagacaggtttcctctttccttatttcctcagctgtgccaacacaaaaaacaactttggcacaggtggtgggcagggggtagagagatttcagcttgggttctgcactaacagcctccaagccccctggcacttctgttgccctgagagtgtcccaggggattcagagtctccagaaagatatggctgggccaactctgttgcctacctggcctgacccagtcggagcctgacatggtggagggaaagggagacaagtggggctgcactcggtccagaggccagctaggagggaaaccgcagcttcctggggcttgtgtgtgaagattcctgacttaggggtggcttttgtttacaagatgcaagaggggaaacctgtccccgactcatcgagacaacatgcccagttatcagggagtcctgtgtcacaaggtctgtctctgccattgtaagcaagtgccttgggcgagctggcctctgccccacagtctcatctgtacaccgacagggttgatgcctccctcacagggttgagaacaagagccagttggccaagt

SEQ ID NO: 88 - protein, 323 aa, Homo sapiens
MEAKEKQHLLDARPAIRSYTGSLWQEGAGWIPLPRPGLDLQAIELAAQSNHHCHAQKGPDSHCDPKKGKAQRQLYVASAICLLFMIGEVVEILGALVSVLSIWVVTGVLVYLAVERLISGDYEIDGGTMLITSGCAVAVNIIMGLTLHQSGHGHSHGTTNQQEENPSVRAAFIHVIGDFMQSMGVLVAAYILYFKPEYKYVDPICTFVFSILVLGTTLTILRDVILVLMEGTPKGVDFTAVRDLLLSVEGVEALHSLHIWALTVAQPVLSVHIAIAQNTDAQAVLKTASSRLQGKFHFHTVTIQIEDYSEDMKDCQACQGPSD

SEQ ID NO: 89 - DNA, 1764 bp, Homo sapiens
agaattcgggcaccaggagaaggaagccaacaggatccgacccggtgttttgtgacaaaggcaagacccccaggtctacttagagcaaagttagtagaggaggcagctaggcgtggctctcattccttcccacagaatggattataagtcgagcctgatccaggatgggaatcccatggagaacttggagaagcagctgatctgccctatctgcctggagatgtttaccaagccagtggtcatcttgccgtgccagcacaacctgtgccggaagtgtgccaatgacatcttccaggctgcaaatccctactggaccagccggggcagctcagtgtccatgtctggaggccgtttccgctgccccacctgccgccacgaggtgatcatggatcgtcacggagtgtacggcctgcagaggaacctgctggtggagaacatcatcgacatctacaaacaggagtgctccagtcggccgctgcagaagggcagtcaccccatgtgcaaggagcacgaagatgagaaaatcaacatctactgtctcacgtgtgaggtgcccacctgctccatgtgcaaggtgtttgggatccacaaggcctgcgaggtggccccattgcagagtgtcttccagggacaaaagactgaactgaataactgtatctccatgctggtggcggggaatgaccgtgtgcagaccatcatcactcagctggaggattcccgtcgagtgaccaaggagaacagtcaccaggtaaaggaagagctgagccagaagtttgacacgttgtatgccatcctggatgagaagaaaagtgagttgctgcagcggatcacgcaggagcaggagaaaaagcttagcttcatcgaggccctcatccagcagtaccaggagcagctggacaagtccacaaagctggtggaaactgccatccagtccctggacgagcctgggggagccaccttcctcttgactgccaagcaactcatcaaaagcattgtggaagcttccaagggctgccagctggggaagacagagcagggctttgagaacatggacttctttactttggatttagagcacatagcagacgccctgagagccattgactttgggacagatgaggaagaggaagaattcattgaagaagaagatcaggaagaggaagagtccacagaagggaaggaagaaggacaccagtaaggagctggatgaatgagaggcccccagatgcagagagactggagagggtggggaggggcccagcggccttggtgacaggcccagggtgggaggggtcggggcccctggaggggcaatggggaggtgatgtcttctctctgctcagagagcagggactagggtaggaccctcaccgctgcgtccagcagacactgaaccagaattggaaacgtgcttgaaacaatcacacaggacacttttctacattggtgcaaaatggaatattttgtacatttttaaaatgtgatttttgtatatacttgtatatgtatgccaatttggtgctttttgtaaaggaacttttgtataataatgcctggtcattgggtgacctgcgattgtcagaaagaggggaaggaagccaggttgatacagctgcccacttcctttcctgagcaggaggatggggtagcactcacagggacgatgtgctgtatttcagtgtctatcccagacatacggggtggtaactgagtttgtgttatatgttgttttaataaatgcacaatgctctcttcctgttcttc

SEQ ID NO: 90 - protein, 353 aa, Homo sapiens
MDYKSSLIQDGNPMENLEKQLICPICLEMFTKPVVILPCQHNLCRKCANDIFQAANPYWTSRGSSVSMSGGRFRCPTCRHEVIMDRHGVYGLQRNLLVENIIDIYKQECSSRPLQKGSHPMCKEHEDEKINIYCLTCEVPTCSMCKVFGIHKACEVAPLQSVFQGQKTELNNCISMLVAGNDRVQTIITQLEDSRRVTKENSHQVKEELSQKFDTLYAILDEKKSELLQRITQEQEKKLSFIEALIQQYQEQLDKSTKLVETAIQSLDEPGGATFLLTAKQLIKSIVEASKGCQLGKTEQGFENMDFFTLDLEHIADALRAIDFGTDEEEEEFIEEEDQEEEESTEGKEEGHQ

SEQ ID NO: 91 - DNA, 4299 bp, Homo sapiens
agcggagcgaaggcgcgagctgcccgataatggcggcctgcagagcccatgagagggagaagcggcagcgtctaccctgaggaaggtgctcttccccatggggactgtaccaggctggagaggacatggcactgcttcagagacacgaaccaccttgagtggatgtgattggcgatccccgtagagcaggaaagctcgtctgctgtgcagccggcgcagaggattctgtggcaggaaattagacactaggaaattcagtagcgatttgaaggaaacctcgaccttgaagatggtgagtagccagccaaagtacgatctaatacgggaggtaggccgaggtagttacggtgttgtgtatgaagcagtcatcagaaagacctctgcacgggtggcagtgaagaaaattcgatgtcacgcacctgaaaatgttgaactagcccttcgtgagttctgggcactaagcagtatcaagagccaacatccaaatgtgattcacttggaggaatgcatcctacaaaaggatgggatggtgcaaaagatgtcccacggctctaattcttccctttatttacagcttgtagaaacttcattaaaaggagaaattgcctttgatcccagaagcgcctattatttgtggtttgtgatggatttttgtgacggaggagatatgaatgagtatctgttgtccaggaaacccaatcgtaaaactaacaccagcttcatgcttcagctgagcagtgccctggctttcttgcataaaaaccagatcatccaccgagatcttaagcctgataacatcctgatttctcaaaccaggttggataccagtgacttggaacctaccctcaaggtggctgattttggtctaagtaaagtttgttcagcctctgggcagaacccagaagaacctgtcagtgtaaacaagtgtttcctttccacagcatgtggaacagatttttacatggctcctgaagtttgggaaggacattacacagcaaaagctgacatctttgctctggggattatcatctgggcaatgctggaaaggatcacattcatagacacagagacaaagaaggaactcttggggagttatgtaaaacaaggaactgagattgtgcctgttggggaggcacttctggaaaatcccaaaatggaacttctcattcctgtgaagaaaaaatctatgaatgggcgaatgaaacaactgattaaggaaatgctggctgcaaaccctcaggatcgtccagatgcttttgaactagaactcagattagtacaaattgcatttaaagatagcagctgggaaacgtgacacatattatttgcaaataccatggatgatatgctgcttctgtttaacagtgatgcaacattatgtggctgaaaaagaatataaaaagctagactctaccctctaagggtttagattttttgtgggatttttttttttcctcatttttcttaaatccaagttggccgttttattagtatgtttcaaatgtgtattaccaatgtgggtgtaaatttttaaaaaatgattattgatagaagtttggcaggaaaattctttaagagctaacaagagaagagagtccagttttctggaaatatgtctttaagtattttagacattcctcgtcagtattaggaatttccatgggaaaagaggtttgcatgctggtaatgcaacctttgaaactttgtaaaggaaacatatatgtatatatttatgtatatgtaagtatgtgaatgtgcgcattttgcattccatatgaaaaaaatgccacgtctgtttaaattatttgatgtaggtttgggtttttgagatttgctggtgaagtcagtgacgaaaaataaaccttcccttatcttcctactctgcccctccccctaatgaaatcatattaagttgtttttttttttttgtaatatacagctttttttttaaggcatcattttcgagggtctaaaattatctggtaaaacaaatgaaattaagtgatccaaagctgctgaagtatgtttgaactctccagtgccctatagctgcaagagttgaattagtcatgcagtcatatggcagcaggttggtgattcagtccgaccttctttaggtaaccgagcatttatttaaccaactataccactgcattgggacgtctgcacttgagcttctacaatctgatataaatctgaatacaggattattctgtttgaaaactttgctatgtgtgaactgtaatacttgatacatttttggtttgaagactttgtctaagcctcattatactgaagttgaagaaaccaaatgagctccaccctcactttgcctgccctgatatgatcacttgttgagtcactggagttcctttcattttggcactgatgctgttttctcttgtctgatttgaaacagtactggtaataatatggttgttgaaaatgtgatcacctttatctaaagtgggagaagatacatacacagtatggcaaatggataaaatattgtggcatcaactacttttaaagtagaaaagctatccattttatacaatcactgatacagtctatgtcaaaaaaccaacagaccattattcctcttgaagttagtttgattttatctttgtatggttgtctacaatttgttttcctgtaaatgcagatagttaaaatctaaaggatagaatgctttcctaaaacagaacattagcctttaaggttaaatagactttacattgtatctaagttaatctttataaagcactagaatttttggtcaaaagtcaaaatagtattagaatattgaaattattgatagctttcataatctcagcttttttgaacttccacaatttttggaatatgtcataatttttttccctgtttcaaatgtgttcagaggaaatagaatgtaaaacatcacaaaaaaaattgcagtacataaaatttctggactatgttagttacttgatctggaagtttaaaatttggactaaaaggttttattgaaataaagcctcttaaaatgaaaaatcatatacttttaacatcacttttaagctaataaatataagaattcttttggaaattagaggtggaaacacactggaacctcatgataattgaccctctggatcaccagattagtttaatttaacagatatgtccaaggaagttgagctatagggagtaagaaaaagcatcatgataacgtctagtcaataacatggcacttcagcagagattcatagatgatggtatgcccatgcatcatttgctcttcaaatatctatgtgcttggagccacagtttcctaagcgcatagtttttggtcctgcctcatgtaaaatagttaatgattatcatttacttggaaagattttacctgtgaagtgaaattctttcattgggggtaagggtatgaggtgatcaggaagtttcttctggaattttatcaagtccttgtattctaaaatagccaagcaaaatgatagtaaattctttgtctttgttctttcagtcagaggtatttattaagtacctactgtgtgctcagcactaaaggtttgttgataaaatgacaattaaaaaatggcatttagccaaaggccttttcagccaggagtaagaaaagatggttagtgatatttggaaatacctggatatttgctagaggaaaaatgaaagcaaaacttcgtacacagtgccttgcccataataggtactcaataagcaattgttcctcatagagtcttttgccatgatttatggtgttttttgaaatttgtcttaattgaaaaaagaccaaatatttcaaatgagcttataggcagctgtggccagtgaaaatatggggttgtacagttagttcctagaatgttattttgcactagttgtcacttagaaagatggggttcctgtagattttttggtgctaagggatactttgtcattatgatgaagtaagtgttaagtgtcagataaatagcacacagaatagttctttctgctggtctgttttttctcttcgttgttgttgtttttaattgtaaattgttatcaatcaaactattgtagcagctacaaagtaattcaccagcatgacaaaatggtcaaaaaataagtcatcagcacttaagaaatgaaagcaacttttgaaattttctgttaaaattgtcaaatatattttatgaagaatttataaaaggggaaaatgattgtaatttattgttcatgacttttttttttaaataaagtgagtttcaacaaaaaaaaaaccgaaaaaaaaaaaaaaaa

SEQ ID NO: 92 - protein, 341 aa, Homo sapiens
MVSSQPKYDLIREVGRGSYGVVYEAVIRKTSARVAVKKIRCHAPENVELALREFWALSSIKSQHPNVIHLEECILQKDGMVQKMSHGSNSSLYLQLVETSLKGEIAFDPRSAYYLWFVMDFCDGGDMNEYLLSRKPNRKTNTSFMLQLSSALAFLHKNQIIHRDLKPDNILISQTRLDTSDLEPTLKVADFGLSKVCSASGQNPEEPVSVNKCFLSTACGTDFYMAPEVWEGHYTAKADIFALGIIIWAMLERITFIDTETKKELLGSYVKQGTEIVPVGEALLENPKMELLIPVKKKSMNGRMKQLIKEMLAANPQDRPDAFELELRLVQIAFKDSSWET

SEQ ID NO: 93 - DNA, 1512 bp, Homo sapiens
gagtgaggtttggctgccaccaaagttacttctagtccttgctgtccactcctgccctcagtctggacctgcccaaggacccctgcaattaggcctcccatgcagaggtcagtgagagcccaagccaattgctctaggccccgtggctggctacttatggggcactgtcctgaccagctctgctaagatgctcctggcccctccctccaccccgtccagaggacggacccccagcgccgtggagaggctggaagccgacaaagccaagtatgtcaagacgcaccaggtgatagctaggcgacaggagccagccctgcgtgggagtcctgggccgctcacgccgcacccctgcaacgagctggggccccctgcatcgcccaggacgcccaggccggtccgccggggaagcggcaggcggctgccgaggcctgattccctcatcttctaccgccagcaaggcttcggtgaacaaagagaacgccaagggccagggtctggtgcggcgcctctttctgggtgccccgcgggacgctgccccgagcagcccggcctccacagagcgacctgcggcttcagggggttgggctgcgccccaggatgccccggaagcggcgggaaagcgggcgctgtgtcccacgtgctcgctgcccctgtcggagaaggagcgcttcttcaactactgcggcctggagcgcgcgctggtggaggtgctgggcgcagagcgcttctccccgcagagctggggagccgacgccagcccgcaggccggaacttcgccgccgcccggctccggggacgccagcgactggacatccagcgacaggggcgtggacagcccgggcggcgcgggcggcggcggcggctcggaggcagcgggctcggcgcgggaccggcgccccccggtgtcggtggtggagcgcaacgcgcgcgtcatccagtggctgtacggctgccagcgcgcccgcggaccgccgcgcgagtccgaggtgtgaccgccgcggctccggactggccccgggactggccccgggcacggaaaaggacacccctcttctggcgcgctgggtgcctttgcgtaagcccttccttctggaactcagtttagcgtctgaaccttggggaggtggaacaagttgctgccgaaggcccttccctgctcccgcggcgaagggggagggagaggcctcttggtccctgtggagacccggtctggggagtcacgattggggtgggagatgagcaaacctgctgaataaagttaaaacgttatttaaatggggagctgaggaaggagcaaacgggttttcgcggttaaacccgtgggttttggaatgtgtgttcccggctgtgtgatcctgggcaagaacttgacctccctggacgcagcggcacccctcggttattaaggagggaggagtaggggatagaagtatttcaaaatagttgtaatgcgcatggcaaagtgcccagcatatagaaagtgctcaataaacgataactgctgtgacttct

SEQ ID NO: 94 - protein, 305 aa, Homo sapiens
MLLAPPSTPSRGRTPSAVERLEADKAKYVKTHQVIARRQEPALRGSPGPLTPHPCNELGPPASPRTPRPVRRGSGRRLPRPDSLIFYRQQGFGEQRERQGPGSGAAPLSGCPAGRCPEQPGLHRATCGFRGLGCAPGCPGSGGKAGAVSHVLAAPVGEGALLQLLRPGARAGGGAGRRALLPAELGSRRQPAGRNFAAARLRGRQRLDIQRQGRGQPGRRGRRRRLGGSGLGAGPAPPGVGGGAQRARHPVAVRLPARPRTAARVRGVTAAAPDWPRDWPRARKRTPLFWRAGCLCVSPSFWNSV

SEQ ID NO: 95 - DNA, 649 bp, Homo sapiens
cgtgtcagtggtggacctgacctgctcctggccccttggctggccgggctgtttctggccatgggtcgctcccgccggacaggcgcgcaccgagcgcactctctagcccggcagatgaaggcgaagcggcggcggccggacttggatgagattcaccgcgagctgcggcctcagggatccgcacgaccccagcccgacccaaacgccgagttcgaccccgacctgccagggggcggtctgcaccgctgtctggcctgcgcgaggtacttcatcgattccaccaacctgaagacccacttccgatccaaagaccacaagaaaaggctgaagcagctgagcgtcgagccctacagtcaggaagaggcggagagggcagcgggtatgggatcctatgtgccccccaggcggctggcagtgcccacggaagtgtccactgaggtccctgagatggatacctctacctgacatggcctgaagatgcagggcagaggaattgcccatggacagtgacgcaaggactaggctgggagggagcgtgccaaccccttttgcctctgggtttggggagcggagggcctcttcttggtgccctgcccccaataaaggaactggacaaagagaaaaaaaaaaaaaaaaaaaaaaaaaaaaa

SEQ ID NO: 96 - protein, 116 aa, Homo sapiens
MKAKRRRPDLDEIHRELRPQGSARPQPDPNAEFDPDLPGGGLHRCLACARYFIDSTNLKTHFRSKDHKKRLKQLSVEPYSQEEAERAAGMGSYVPPRRLAVPTEVSTEVPEMDTST

SEQ ID NO: 97 - DNA, 2530 bp, Homo sapiens
aaaacaggagctgattcgagctggcagagctgggccatggaaccggtagagacctggacccccggaaaggtggcaacttggctgagaggtcttgacgactccctgcaggactatccctttgaggactggcagctgcctggcaagaacctgctccagctctgcccccaaagcctcgaggctctggctgtgcggtctctgggacaccaggagctcatcctgggcggggtggaacagctccaggccctgagctccaggctacagacagagaacctgcaaagcctgacagagggacttctgggggcaacccatgacttccagagcatagtccaaggctgcctgggggactgtgccaagacccctattgatgtcctctgtgcagctgtggagctgttgcatgaagctgacgccctcctcttctggctcagcaggtacctcttctcccacttaaatgatttctcagcatgccaggagatccgagacttgttggaggagctgagccaggtcttgcatgaggatggtccagcggctgagaaggagggcacagtcctgaggatctgcagccacgtggctgggatctgccacaacatcctggtctgctgccccaaggagctgctggaacagaaggccgtgctcgagcaggtgcagctggacagtccattgggcctagaaattcacaccaccagcaattgccagcactttgtgtcccaagtggacacccaggttcccactgactcccgactgcagatccagcctggagacgaggttgtccagatcaacgagcaggtggtggtgggatggccccgtaagaacatggtgagggaactgctgcgggagccagccggactcagcttagtgctgaagaagatcccgataccggagacccccccacagacgccccctcaggtcctggactccccgcaccagaggagcccatcactgtctctggccccactgtctcccagggccccatctgaagacgtctttgcctttgacctgtcttcaaaccccagtcccggacccagccctgcctggacagactctgcctcccttggccctgagcccctgcccatccccccggaacccccagccatactcccagcaggggtagcagggactccagggctccctgaatcccctgacaagagtcctgttggtcggaagaaatcaaaaggcctggcgacccggctgagccgccggcgggtgtcatgccgtgagctgggccggccggactgtgacggctggctcctgttgcgaaaggcaccgggcggcttcatgggcccgcgctggcgccgccgctggtttgtgctcaagggacacacgctctactggtaccgccagccccaggatgagaaggctgagggcctcatcaatgtctccaactatagtctggaaagtggacatgatcagaagaagaaatatgtgtttcagctcacccatgatgtgtacaaacccttcatcttcgctgctgataccctgacagatctgagcatgtgggtgcgtcatctcattacctgcatctccaagtaccagtctccaggccgggcccccccaccccgagaggaagactgctacagtgagaccgaagcagaggacccggacgatgaggctgggtcccactcagcctcgcccagccctgctcaagctgggagtcccctccatggagacacatcacctgcagccacccccacacagcgcagcccacggacctcctttggctctctgacagacagcagtgaagaggcactggaaggaatggtacgggggctgaggcagggtggcgtgtccctcctaggccagccacagcccctgacccaggaacagtggcggagctctttcatgcggcgcaaccgagaccctcagctcaatgagcgagtgcaccgtgtgcgggcgctacagagcacactcaaggcaaagctgcaggagctgcaggtcctagaagaagtgctgggtgaccctgagctgacaggagagaagttccgccagtggaaggagcagaaccgggagctgtactcagagggcctgggggcctggggagtggcacaggctgaaggcagctcccacatcttgacctctgactccacagaacagtcccccaactccctgccctctgaccctgaagagcactcccatctctgccccctgacctcagagagcagcctccgacctcctgacctctgaccctggccagcactctagctcctgacctttgacccgagggccacctcaaccccagcttctgacgtgtccaggacagagcatccctggattctgttcagggtgggaagtagtactgctagtcatggtctcaccccgagctgacccctctgcctgggctttgtgccaccctctcccttgccaaagaagaaactctccccccaaatcctccaacctctggggccacagccctgcccctccagttccttggcagttctcccccaaaccaggtctgtacaggtgttctttattttacatgagggctactttccaaccaaataaagtcaatttttctaagaaaaaaaaaaaaaaaaaa

SEQ ID NO: 98 - protein, 713 aa, Homo sapiens
MEPVETWTPGKVATWLRGLDDSLQDYPFEDWQLPGKNLLQLCPQSLEALAVRSLGHQELILGGVEQLQALSSRLQTENLQSLTEGLLGATHDFQSIVQGCLGDCAKTPIDVLCAAVELLHEADALLFWLSRYLFSHLNDFSACQEIRDLLEELSQVLHEDGPAAEKEGTVLRICSHVAGICHNILVCCPKELLEQKAVLEQVQLDSPLGLEIHTTSNCQHFVSQVDTQVPTDSRLQIQPGDEVVQINEQVVVGWPRKNMVRELLREPAGLSLVLKKIPIPETPPQTPPQVLDSPHQRSPSLSLAPLSPRAPSEDVFAFDLSSNPSPGPSPAWTDSASLGPEPLPIPPEPPAILPAGVAGTPGLPESPDKSPVGRKKSKGLATRLSRRRVSCRELGRPDCDGWLLLRKAPGGFMGPRWRRRWFVLKGHTLYWYRQPQDEKAEGLINVSNYSLESGHDQKKKYVFQLTHDVYKPFIFAADTLTDLSMWVRHLITCISKYQSPGRAPPPREEDCYSETEAEDPDDEAGSHSASPSPAQAGSPLHGDTSPAATPTQRSPRTSFGSLTDSSEEALEGMVRGLRQGGVSLLGQPQPLTQEQWRSSFMRRNRDPQLNERVHRVRALQSTLKAKLQELQVLEEVLGDPELTGEKFRQWKEQNRELYSEGLGAWGVAQAEGSSHILTSDSTEQSPNSLPSDPEEHSHLCPLTSESSLRPPDL

SEQ ID NO: 99 - DNA, 1419 bp, Homo sapiens
atgagggataatgaaaaggcctggtggcagcaatggacctcccatacaggcctcgaggggtggggcgggactcaggaggaccgtatggggtttggaggggcagtagctgcactgaggggccgcccctctcccctgcagagtaccattcacgagtcctacggtcggccagaggagcaagtgctcatcaaccgccaggaaatcacgaacaaagcggacgcctgggacatgcaggagttcatcactcacatgtacatcaagcagctgctccgacaccccgccttccaactgctgctggccctgctgctggtgatcaatgccatcaccatcgctctccgtaccaactcctacctggaccagaaacactatgagttgttctctaccatagatgacattgtgctgaccatccttctttgtgaggttctccttggctggctcaatggcttctggattttctggaaggacggctggaacatcctcaacttcattatcgtctttatcttgctcttgcggttcttcattaatgaaatcaatattccctccatcaactacactctcagggcgcttcgtctggtgcatgtgtgcatggcggtggagcccctcgcccggatcatccgcgtcatcctgcagtcggtgcctgacatggccaatatcatggtcctcatcctcttcttcatgctggttttttccgtgtttggagtaacactctttggtgcattcgtgcccaagcatttccagaacatacaggttgcgctgtacaccctcttcatctgcatcacccaggacggctgggtggacatctacagtgacttccagacagagaagagggaatatgcaatggagattgggggtgccatctactttaccatcttcatcaccatcggtgccttcattggcatcaacctgttcgtcatcgtggtgaccaccaacctggagcaaatgatgaaggcaggagagcagggacaacagcaacgaataacctttagtgagacaggcgcagaggaagaggaggagaatgaccagctgccactggtgcattgtgtggtcgcccgctcggagaaatctggtctcctccaggaaccccttgcgggaggccccctgtcgaacctctcagaaaacacgtgtgacaacttttgcttggtgcttgaggcaatacaggagaacctgaggcagtacaaggagatccgagatgaactcaacatgattgtggaggaggtgcgcgcaatccgcttcaaccaggagcaggagtcagaggtgttgaacaggcgctcgtcgacgagcgggtcgttggagactacgtcatccaaggacatccgccagatgtctcaacagcaagacttgctcagtgcgctcgttagcatggaaaaggttcatgactctagctcacaaatactccttaaaaaacacaagagcagccactga

SEQ ID NO: 100 - protein, 472 aa, Homo sapiens
MRDNEKAWWQQWTSHTGLEGWGGTQEDRMGFGGAVAALRGRPSPLQSTIHESYGRPEEQVLINRQEITNKADAWDMQEFITHMYIKQLLRHPAFQLLLALLLVINAITIALRTNSYLDQKHYELFSTIDDIVLTILLCEVLLGWLNGFWIFWKDGWNILNFIIVFILLLRFFINEINIPSINYTLRALRLVHVCMAVEPLARIIRVILQSVPDMANIMVLILFFMLVFSVFGVTLFGAFVPKHFQNIQVALYTLFICITQDGWVDIYSDFQTEKREYAMEIGGAIYFTIFITIGAFIGINLFVIVVTTNLEQMMKAGEQGQQQRITFSETGAEEEEENDQLPLVHCVVARSEKSGLLQEPLAGGPLSNLSENTCDNFCLVLEAIQENLRQYKEIRDELNMIVEEVRAIRFNQEQESEVLNRRSSTSGSLETTSSKDIRQMSQQQDLLSALVSMEKVHDSSSQILLKKHKSSH

SEQ ID NO: 101 - DNA, 3961 bp, Homo sapiens
gcaacggccgttagaggagctgagggagggaaccaccgctcaccgcagacgtggtggctgcagtcagtcttcccgagtgagggatttcgccgcccgctttcaggcccgtttggcttaaataactgtgattgatggccatgcaggagaaatatccaactgaggggatctctcacgtcacttcaccgagttccgatgtgattcagaagggcagttccctggggactgaatggcagaccccagttatctcggagccctttcggagccgcttcagccgctgttcaagtgtagccgacagtggggacacagccattggtacatcatgctcagatattgcggaggatttttgcagctcaagtggcagtcctcctttccagcccatcaaaagccacgtaaccattccaacagcccatgtgatgccttctactttagggacctctcctgccaagccaaattctacacctgttggaccctcttcctctaaactccctttgtcagggttggctgaaagtgtgggaatgacaagaaatggagacctcggtgcaatgaaacattctccaggcctatctagagatctcatgtatttctctggtgctactggagaaaatggaattgagcagtcctggtttccagcagtgggccatgaaagacaagaagaggcgaggaagtttgatattcctagcatggaatctaccctcaatcagtcggcaatgatggagacactttattcagatcctcaccaccgagtccgcttccacaacccaagaaccagcacaagtaaggagttgtacagagtgttgcctgaggccaagaaggcaccgggcagcggggcagtgtttgagcggaatggaccacattctaatagcagtggggtcctccctttgggactccagcctgctcccgggctctccaagcctctgccctctcaggtgtggcagccgagtcctgacacttggcatccccgagagcaatcttgtgaactcagcacttgtcggcagcagctggaattgattcgtttacagatggagcaaatgcagcttcagaatggagccatctgccaccatcctgctgcttttggtccttcactgcccatcttagagccagcacagtggatcagcatcttgaacagtaatgaacaccttctgaaggaaaaagagcttctcattgacaagcagaggaaacacatctctcagctggagcagaaagtgcgagagagcgaactgcaagtccacagtgccctcttgggccgccctgccccctttggtgatgtctgcttgctgaggctacaggaattgcagcgagaaaacactttcttacgtgcacagtttgcacagaagacagaagccttgagcagagaaaagattgaccttgaaaagaaactctctgcttctgaagttgaagtccagctcatcagagagtcgctcaaagtggcgttgcagaagcattctgaggaagtgaagaaacaggaagaaagggtcaaaggtcgtgataaacatatcaataatttgaaaaagaaatgccagaaggaatcagagcagaaccgggagaagcagcagcgtattgagaccttggagcgctacctggctgacctgcccacactggaagaccatcagaagcagagccagcagcttaaggattctgagttgaagagcacagagctgcaggagaaagtgactgagctggagagtttgctggaggagacccaggcaatctgcagagagaaggagattcaactggaaagcctgaggcagagagaagcagaattctcctccgctggacatagcctgcaagataaacagtctgtggaggagaccagtggagaaggtccagaagtggaaatggagtcctggcagaagcgatacgattcgctccaaaagattgtggagaagcagcagcagaagatggatcagttgcgctcacaagtacagagcctagagcaggaagtggctcaagaagaaggaacaagccaggccctgagagaggaggcccagcgaagggattcagccctgcagcagctgcgcacagccgtgaaggagctttcagtgcaaaaccaggacttgattgagaagaatctgacactccaggaacacctgcgccaggcccaaccagggtctccaccttcaccagacacggcccagctggcacttgagctgcaccaggagttggccagttgccttcaagatctgcaggctgtctgtagcattgtgacccagagggcccagggccatgaccccaatctctccctgctcctgggcattcactcagcacagcacccagagactcagctagatttgcagaagccagatgtgatcaagaggaaactagaagaggttcaacagctgcgtcgtgacattgaggacttaaggaccaccatgtcagacagatatgcccaggacatgggagaaaactgtgtcacacagtgaggaattctgggggattcccccagggaggagctgggctgctgagagcctagtccagcaggtttctgccctgacattctcttgtctgctattcccagagaggtctcagaggggaggggagagcctgcatctgggggccaagggctgattagggaactgtgtcctacccacactggcatgttggattacgtttgtcctgttaattcactctcgacggtgagttactaattaacttttggcaggtacaacagataagtcctcacaaactgttcccagccctaggctgacatgagagacgaacaggctgtccacctttcttctccatccaatgggatggatccatgttcattcccacttcacaccttggtcctgctgattagagagctcatcagaggggcctggaaaggctgagcaagtaccagtgacaatggccatttaagaattctcaggccccatgtgccagccttcttgggaactgagctggctttctgggttttctcatgcctggtcttactgcttcttcctcagggctcttgttctcccagaagcctcagggtaatgtgttggttagcacgtaactactaggattggggccctagggattatagccaggactctaatctgcctaccatgccatttaacaagagatcccactctccagctgccttgtgtccctagggtcctggccatgtgtttagtgtgctaaactttctcctttgttctcaggccttccaggtagtccccttcctggacttaagagtgcaaactcttctctgtggttctagccttgggcagaattatatcccagagaccacagagcaactgtcaagctgcttaccccctcacccagggctacagcctgtgcccagccctctaatttgtgcctctcttgtgttgggggtggtgggggttattcctttccctttcctgctctggcctccttgaaagttcagagtacccagtacaagtcagctttaaagtacagcttttagtgtttcctgggttgtttctctggggctttagtgagggacctttgccctctggtttttcttgcctcctggtttagggagcatctcacacttgttagtatctggttgttgggccagccgtgcctcctctagatctggagccaggccaggcaggggccacgtgtgggccagtcagccactacaagatttttgctaagctttgggctgttggcagcatcttggacctcatgcctgggcctgaatgaggctctttcttaagtgtttttacaagtttgtgttttatttatggagtgacttatcccttccattcagagcagccccacccagccagcccttcagcctctgggctcctgctgcttaaaggcagagccgcctggttggtctccaccctgtgcattgggagcccagccaccatgctgacgggtatttttcctcataaagtttataaccagttatttatatgaatctttgttatgtccatttgtttgtattgcgtattttgattataaaataaagtatcttaacagacaaaaaaaaaaaaaaaaaaaaaaaaaa

SEQ ID NO: 102 - protein, 762 aa, Homo sapiens
MAMQEKYPTEGISHVTSPSSDVIQKGSSLGTEWQTPVISEPFRSRFSRCSSVADSGDTAIGTSCSDIAEDFCSSSGSPPFQPIKSHVTIPTAHVMPSTLGTSPAKPNSTPVGPSSSKLPLSGLAESVGMTRNGDLGAMKHSPGLSRDLMYFSGATGENGIEQSWFPAVGHERQEEARKFDIPSMESTLNQSAMMETLYSDPHHRVRFHNPRTSTSKELYRVLPEAKKAPGSGAVFERNGPHSNSSGVLPLGLQPAPGLSKPLPSQVWQPSPDTWHPREQSCELSTCRQQLELIRLQMEQMQLQNGAICHHPAAFGPSLPILEPAQWISILNSNEHLLKEKELLIDKQRKHISQLEQKVRESELQVHSALLGRPAPFGDVCLLRLQELQRENTFLRAQFAQKTEALSREKIDLEKKLSASEVEVQLIRESLKVALQKHSEEVKKQEERVKGRDKHINNLKKKCQKESEQNREKQQRIETLERYLADLPTLEDHQKQSQQLKDSELKSTELQEKVTELESLLEETQAICREKEIQLESLRQREAEFSSAGHSLQDKQSVEETSGEGPEVEMESWQKRYDSLQKIVEKQQQKMDQLRSQVQSLEQEVAQEEGTSQALREEAQRRDSALQQLRTAVKELSVQNQDLIEKNLTLQEHLRQAQPGSPPSPDTAQLALELHQELASCLQDLQAVCSIVTQRAQGHDPNLSLLLGIHSAQHPETQLDLQKPDVIKRKLEEVQQLRRDIEDLRTTMSDRYAQDMGENCVTQ

SEQ ID NO: 103 - DNA, 1131 bp, Homo sapiens
tggagagagcggctctcgtggctggggagttggatgcaccaaacctgtgtgcggctggagagggaggcttctgccagaccctctcccgggcctgtcctgccacccaggcccctccccagtctcacactgagctccagatcagggaagggccgaaaaggacgatcagggcagccgcagaaggggcgccctgcgtgggacgggtccgttgcgcgcctggtaaccgagggggaagggaaggggcctctggcgtgcggggcggtgtcgcgcaggtcccaccccgcctgcccgcgccgcccattggtcccgagcgcgatgacttggcgggcggagcaggaaggaaaccgctcccgagcacggcggcggcgtcgtctcccggcagtgcagctgccgctaccgccgccctctgcccgccggcccgtctgtctacccccagcatgagcggcctgcgcgtctacagcacgtcggtcaccggctcccgcgaaatcaagtcccagcagagcgaggtgacccgaatcctggatgggaagcgcatccaataccagctagtggacatctcccaggacaacgccctgagggatgagatgcgagccttggcaggcaaccccaaggccaccccaccccagattgtcaacggggaccagtactgtggggactatgagctcttcgtggaggctgtggaacaaaacacgctgcaggagttcctgaagctggcttgagtcaagcctgtccagagttcccctgctggactccatcaccacactccccccagccttcacctggccatgaaggaccttttgaccaactccctgtcattcctaacctaaccttagagtccctcccccaatgcaggccacttctcctccctcctctctaaatgtagtcccctctcctccatctaaaggcaacattccttacccattagtctcagaaattgtcttaagcaacagccccaaatgctggctgcccccagccaagcattggggccgccatcctgcctggcactggctgatgggcacctctgttggttccatcagccagagctctgccaaaggccccgcagtccctctcccaggaggaccctagaggcaattaaatgatgtcctgttccattggcaaaaaaaaaaaaaaaaa

SEQ ID NO: 104 - protein, 93 aa, Homo sapiens
MSGLRVYSTSVTGSREIKSQQSEVTRILDGKRIQYQLVDISQDNALRDEMRALAGNPKATPPQIVNGDQYCGDYELFVEAVEQNTLQEFLKLA

SEQ ID NO: 105 - DNA, 1514 bp, Homo sapiens
cacaagatggcggcgctgcgggacggctagcggccctgcgtgggagttcctgacagctggattctagaagtagaactatgagctcacctttggcctcccttagcaagacccgaaaagtgcccctgccctcggagcctatgaatcctgggaggcgaggaatccgcatctatggagatgtccctgcatcccatgactcggagctgatggccttcatgacgaggaagttgtgggacctggagcagcaggtgaaggcccagactgatgagatactgtccaaggatcagaagatagcggccctagaggacctggtgcagaccctccggccacacccagccgaggcaaccctgcagcggcaggaggaactggagacgatgtgtgtgcagctgcagcggcaggtcagggagatggagcggttcctcagtgactatggcctgcagtgggtgggcgagcccatggaccaggaggactcagagagcaagacagtctcagagcatggcgagagggactggatgacagccaagaagttctggaagccaggggactcattggcgccccctgaggtggactttgacaggctgctggccagcctgcaggatcttagtgagctggtggtagagggtgacacccaagtgacaccagtgcccggcggggcacggctgcgtaccctcgagcccatcccgctgaagctctaccggaatggcatcatgatgttcgacgggcccttccagcccttctacgatccctccacacagcgctgcctccgagacatattggatggcttctttccctcagagctccagcgactgtaccccaatggggtcccctttaaggtgagtgacttgcgcaatcaggtctacctggaggatggactggaccccttcccaggcgagggccgtgtggtgggcaggcagcggatgcacaaggccttggacagggtggaggagcacccaggctccaggatgactgctgagaaatttctgaacaggctccccaagtttgtgatccggcaaggcgaggtgattgacatccggggccccatcagggacaccttgcagaactgctgcccattgcctgcccggatccaggagattgtggtggagacgcccaccttggccgctgagcgagagaggagccaggagtcacccaacacgccggcacccccgctctccatgctgcgcatcaagtctgagaatggggaacaggccttcctactgatgatgcagcctgacaacaccattggggacgtgcgagctctgctagcgcaggccagggtcatggatgcctctgcctttgagatcttcagcacattcccgcccaccctctaccaggacgatacactcacgctgcaggctgcaggccttgtgcccaaagcagcactgctgctgcgggcacgccgagccccgaagtccagcctgaaattcagtcctggtccctgtccccccggtcccggtcccggccccagtccctgtcctggacccagtcccagcccccaataaagcacccgccccctcaaa

SEQ ID NO: 106 - protein, 472 aa, Homo sapiens
MSSPLASLSKTRKVPLPSEPMNPGRRGIRIYGDVPASHDSELMAFMTRKLWDLEQQVKAQTDEILSKDQKIAALEDLVQTLRPHPAEATLQRQEELETMCVQLQRQVREMERFLSDYGLQWVGEPMDQEDSESKTVSEHGERDWMTAKKFWKPGDSLAPPEVDFDRLLASLQDLSELVVEGDTQVTPVPGGARLRTLEPIPLKLYRNGIMMFDGPFQPFYDPSTQRCLRDILDGFFPSELQRLYPNGVPFKVSDLRNQVYLEDGLDPFPGEGRVVGRQRMHKALDRVEEHPGSRMTAEKFLNRLPKFVIRQGEVIDIRGPIRDTLQNCCPLPARIQEIVVETPTLAAERERSQESPNTPAPPLSMLRIKSENGEQAFLLMMQPDNTIGDVRALLAQARVMDASAFEIFSTFPPTLYQDDTLTLQAAGLVPKAALLLRARRAPKSSLKFSPGPCPPGPGPGPSPCPGPSPSPQ

SEQ ID NO: 107 - DNA, 1771 bp, Homo sapiens
aaaaaaccgcgtgacaacaagatggcggcgctgcgggacggctagcggccctgcgtgtactttcccaagcaccaccaggccaaaggtctctcagttcagagcagaaagccgtatacccagaggagcaggcagataacagaaacttccagaaacctctgtggagacagtggaagaggcaaaagggagttcctgacagctggattctagaagtagaactatgagctcacctttggcctcccttagcaagacccgaaaagtgcccctgccctcggagcctatgaatcctgggaggcgaggaatccgcatctatggagatgaagatgaggtggacatgttgagtgatgggtgtggctcggaagaaaagatctcagtcccttcctgctatggcggcataggtgcccctgtgagtcggcaagtccctgcatcccatgactcggagctgatggccttcatgacgaggaagttgtgggacctggagcagcaggtgaaggcccagactgatgagatactgtccaaggatcagaagatagcggccctagaggacctggtgcagaccctccggccacacccagccgaggcaaccctgcagcggcaggaggaactggagacgatgtgtgtgcagctgcagcggcaggtcagggagatggagcggttcctcagtgactatggcctgcagtgggtgggcgagcccatggaccaggaggactcagagagcaagacagtctcagagcatggcgagagggactggatgacagccaagaagttctggaagccaggggactcattggcgccccctgaggtggactttgacaggctgctggccagcctgcaggatcttagtgagctggtggtagagggtgacacccaagtgacaccagtgcccggcggggcacggctgcgtaccctcgagcccatcccgctgaagctctaccggaatggcatcatgatgttcgacgggcccttccagcccttctacgatccctccacacagcgctgcctccgagacatattggatggcttctttccctcagagctccagcgactgtaccccaatggggtcccctttaaggtgagtgacttgcgcaatcaggtctacctggaggatggactggaccccttcccaggcgagggccgtgtggtgggcaggcagcggatgcacaaggccttggacagggtggaggagcacccaggctccaggatgactgctgagaaatttctgaacaggctccccaagtttgtgatccggcaaggcgaggtgattgacatccggggccccatcagggacaccttgcagaactgctgcccattgcctgcccggatccaggagattgtggtggagacgcccaccttggccgctgagcgagagaggagccaggagtcacccaacacaccggcacccccgctctccatgctgcgcatcaagtctgagaatggggaacaggccttcctactgatgatgcagcctgacaacaccattggggacgtgcgagctctgctagcgcaggccagggtcatggatgcctctgcctttgagatcttcagcacattcccgcccaccctctaccaggacgatacactcacgctgcaggctgcaggccttgtgcccaaagcagcactgctgctgcgggcacgccgagccccgaagtccagcctgaaattcagtcctggtccctgtcccggtcccggtcccggccccagtcccggtcccggtcccggctccagtccctgtcccggacccagtcccagcccccaataaagcacccgccccctc

SEQ ID NO: 108 - protein, 512 aa, Homo sapiens
MSSPLASLSKTRKVPLPSEPMNPGRRGIRIYGDEDEVDMLSDGCGSEEKISVPSCYGGIGAPVSRQVPASHDSELMAFMTRKLWDLEQQVKAQTDEILSKDQKIAALEDLVQTLRPHPAEATLQRQEELETMCVQLQRQVREMERFLSDYGLQWVGEPMDQEDSESKTVSEHGERDWMTAKKFWKPGDSLAPPEVDFDRLLASLQDLSELVVEGDTQVTPVPGGARLRTLEPIPLKLYRNGIMMFDGPFQPFYDPSTQRCLRDILDGFFPSELQRLYPNGVPFKVSDLRNQVYLEDGLDPFPGEGRVVGRQRMHKALDRVEEHPGSRMTAEKFLNRLPKFVIRQGEVIDIRGPIRDTLQNCCPLPARIQEIVVETPTLAAERERSQESPNTPAPPLSMLRIKSENGEQAFLLMMQPDNTIGDVRALLAQARVMDASAFEIFSTFPPTLYQDDTLTLQAAGLVPKAALLLRARRAPKSSLKFSPGPCPGPGPGPSPGPGPGSSPCPGPSPSPQ

SEQ ID NO: 109 - DNA, 2532 bp, Homo sapiens
aagggacttccgtgctcccggcgagcgggcggagagcgggggccgcactggggagtgtgggctgggccgcagatgtcatgtggcctgtgttttggaccgtggttcgtacctatgctccttatgtcacattccctgttgccttcgtggtcggggctgtgggttaccacctggaatggttcatcaggggaaaggacccccagcccgtggaggaggaaaagagcatctcagagcgccgggaggatcgcaagctggatgagcttctaggcaaggaccacacgcaggtggtgagccttaaggacaagctagaatttgccccgaaagctgtgctgaacagaaaccgcccagagaagaattaatggaggacacagggccctatggtcctactgtgggtggtgacttgtcctgctaccatgttgacagagccccagaacccacatctaattggctttgttgcttattctggcccttcccacaccacacagccacacaaatactggctgctccttgatggccaggcagacccagcagcagccgaggggccagtgaagaggaaggccgcatctgttgtgtggtggccacaagcactcaggcatctgagtttactggtgcactgctgggaggagagttatgagatgaacattggctgtcaatctctgtgggcaggcggtttggcctctagtgggaatggctgggatttgggcgttgcctttaggagggatacctgcatgtctagttccagtctgcactggaaagaattcaaatatgcacctggctcccttcactattttgccctatcctttgtgctcattcttactgaaatctgtcttgtcagctcaggaatgggattcccccaggaaggaaagcacttttctgttctgggaagcccagactgttcactttggggcagggacgaacatgtgcctcgtgaatttgcttgaaaacagtcaccatcttctacccccatcactgtatagtgaaaaacctgattaaagtggtatctgagaaccataatgatcgaatcttatcatccaggtggtatttgggggtcttcttaggagttaggcaagtacaggcattttagagcaggataacattggtattaaagggtgccaaggagccctggaaactgctttactagtgcggttgcactgaaccctggaggcacagattcccaggaacctttttaccattattacaattggctgcagcaccttcaagtctaaatggaggtagacctcacatacacacacatagacgcctttccctataaaagtatatacgcacattcaagaaaatttggtagggattttaaaaaggtcacccatgttcccagctcgttaataacaaccgttaacattttgttgtcttttactaattctctgcataggttttagagatagttatcattactgtacatttaattttatatacttttctcactattatcattttcccattttacatggtcatcataattggttttttggagacagggtctcactctgtcacacaggctggagtgcagtacaattacggctcagtgcaaccttgacctcctgggctcaagtgatcctctcacttcagctcctcaagtagatgggactacaggagtatgccaccatgcccagctaatttttttatttttttgtagaaccaggtctcactatgttgcccaggctagtctcaaactcctgggctcaagtgatcctccggccttggcctgtagtttcttttttctttttttttggagatggactctcattctgtcacccgggctggagtgcagtggcgtgatcttggctgactgcaacttctgcctcctgggttcaagcgattctcctacctcagcttcctaagtagctgggattacaggcgtgcgccatcgtgcctggctagtttttgtgtttttagtaaagacaggggtttcaccatcttggccaggctggtctcgaactcctgacctcaagcgatcccatctgcctcggcctcccaaagtgctgggattacaggtgtgaggcaccgtgcctggcagtctgtagtttttttttgttgttgttgttgttgttgttttaaatatggagtctcgctgtattgcccaggctggagtgcagtggcgcgatcttggttcactgcaacctccacctcttgggttcaagcgattctcctgcctcagcctcctgagtagctgggattacaggtgtgcgccgctacgcctggctaatttttgtatttttagtagagacagggtttcaccatgttggtcaggctggtctcaaacttctgaccttgtgatctgcctgccttggcctcctaaagtgctgggattacaggcgtgagccaccgtgcctggctgtagttgtttataatagcaacataattgtctatcaagtgggagtatgacataagtttatcctggacaatttccatattgctggacatttgaattgtttctggttggtcactcgtttagatactgcaacgaatatcttatatgaagcttttcctgcgttttggaataaacagtaaaaatag

SEQ ID NO: 110 - protein, 187 aa, Homo sapiens
MVLLWVVTCPATMLTEPQNPHLIGFVAYSGPSHTTQPHKYWLLLDGQADPAAAEGPVKRKAASVVWWPQALRHLSLLVHCWEESYEMNIGCQSLWAGGLASSGNGWDLGVAFRRDTCMSSSSLHWKEFKYAPGSLHYFALSFVLILTEICLVSSGMGFPQEGKHFSVLGSPDCSLWGRDEHVPREFA

SEQ ID NO: 111 - DNA, 3581 bp, Homo sapiens
atgaggggttaccatggcgaccgaggcagccatccccgcccagcccgctttgctgaccaacagcatatggacgtgggccctgctgccagggccccatacctgctgggctccagggaggccttctccaccgagccccgcttctgtgccccgagagctggcctgggacacatttctcctgaagggcccctgagcctgagtgaggggccgtcggtaggccctgagggagggccagcgggggccggggttggggggggtagcagcaccttccccaggatgtaccctggccagggccccttcgacacctgtgaagactgtgtgggccacccacagggcaagggtgccccccgcctgcctcctacactcctggatcagtttgaaaagcagttgccagttcaacaagatggcttccacacactaccataccagcgagggccagcaggggcagggcccgggccagcgccagggacgggcactgccccagagccccgcagtgagagccctagccgcatccggcacctggttcattctgtgcagaagctctttgccaagtcccactctctggaggcgccggggaagcgggactataatgggcccaaggctgagggaagaggtggctctggaggagacagctaccccggcccgggctctggaggcccccacacctcccatcaccaccatcaccaccaccatcaccaccaccaccagtcccggcacggcaagaggagcaagagcaaggaccgcaagggggatgggcggcaccaggccaagtccacaggctggtggagttccgatgacaacttggacagtgatagcggcttcctggcgggtgggaggccccctggggagcctggtggtcccttctgcctggagggtccagatgggtcctaccgggacttgagcttcaaggggcgctcgggcgggtcggaaggccgctgccttgcctgcactggcatgtccatgtcactggatggacagtcggtcaagcgaagtgcctggcataccatgatggtcagccagggccgggatggatacccgggggccgggccaggcaaggggctcctgggtccggagaccaaggccaaagccaggacttatcactatctgcaggtgccgcaagatgactgggggggttaccccaccggtggcaaggatggggagatcccctgccgcaggatgcggagcggcagctacatcaaagccatgggggatgaggagagcggagactcagacggcagccccaagacatctcccaaagcagtcgcccgacgcttcaccacccgtcgctcctccagcgtggaccaggccaggatcaactgctgtgtcccaccccggatccacccccggagctccatccctggctacagccgttccctcaccactggacagctcagcgatgagttgaaccagcagctggaggccgtgtgcgggtcggtgtttggggagctggagtcccaggccgtggacgccctggacctgcccggctgtttccgcatgcggagccacagctacctccgggccatccaggccggctgctctcaagacgacgactgcctgcccctcctcgctacccctgccgctgtctcagggaggcccggctcctccttcaacttcagaaaggccccgccccccatcccgccgggaagccaggccccgccccgcatctccatcaccgcccagagcagcaccgactccgcgcacgagagcttcacggcggccgagggccccgcccggcgctgcagctccgccgacgggctggacggccccgccatgggtgcgcgcacactggagttggcgccggtgccgccccgggccagccccaagccccccacactcatcatcaagaccatccctggcagggaggagctgcggagcctggcgcggcagcggaagtggcggccgtccattggggtgcaggtggagacgatctcagattcggacaccgagaacaggagccggagggagttccactctattggcgtgcaggtggaagaggacaagaggcgagcaaggttcaagcgctccaatagtgtgacggctggcgtgcaggcagacctggagctggagggcctggcaggcctggccacggtggccacagaagacaaggccctgcagtttggacgctccttccagaggcacgcctctgagccccagcctgggccccgggcccccacctactcagtcttccgcacggtccacacgcagggccagtgggcctaccgcgagggctacccactgccgtacgagccgccggccaccgatgggtcgcccggccctgcccccgcccccacccccggccctggggccggccgccgtgactcctggatagagcgcggttcacgtagcctccccgactcaggccgcgcatccccctgcccacgcgacggcgagtggttcatcaagatgctgcgggcagaggtggagaagctggagcactggtgccagcagatggagcgtgaggcggaggactatgagctacccgaggagatcctggagaagatccgcagtgctgtgggcagcacacaacttctcctgtcccagaaggttcagcagttcttccggctgtgtcagcaaagcatggatcccactgcgttccctgtgcccaccttccaggacctggcgggtttctgggacctcctacagctctccatcgaggatgtgaccctcaagttcctggagctacagcaactcaaggccaacagctggaaactcctggagcctaaggaggagaagaaggtccctccgccgataccaaagaagcccctgcggggccggggcgtgccggtgaaggagcgctccctggactccgtggaccggcagcggcaggaagcgcgcaagcggctcctggcggccaagcgcgccgcttccttccgccacagctcggccaccgagagcgccgacagcatcgagatctacatccccgaggcccagaccaggctgtgaccggtccggcccgcccagcccggcccgggcccgcggttctccacccgtactgtacacccagcgtcgaggtcactgtgaacgcgggccgccccgtgcgcccgccccaccggcaccggacgccccggcccccgggcccgtcacactctcgtgggttttttaccttcctgatcccacgcgaaggcgcccgggctgggcagggggccgtgcctctccgccctgcgcccctcacctggatcccctgcccacctggtccgacgctttgtccccacctcctccccatgggcaccatctctgccattctttcccccacgggccaggccgggccgggtccctcatctgggctctgcgtccccccctcccccaccccgcggggctgggcttcgtggggatcaagcttcgtggctttttatgaagaatcccgaaccctgcctaggagcccgccccaccctcccaggggctccatcctcagccctctgcccactgggcccagggaccacagtggctggaccaacccaggaccagggcgcctgggcctctcccctttcccagcggctggggaggggagatgggggcttcccctcaccacacctgtggctgttcccacatccccttgaatatcccaggaaaaataaaacggcaga

SEQ ID NO: 112 - protein, 979 aa, Homo sapiens
MRGYHGDRGSHPRPARFADQQHMDVGPAARAPYLLGSREAFSTEPRFCAPRAGLGHISPEGPLSLSEGPSVGPEGGPAGAGVGGGSSTFPRMYPGQGPFDTCEDCVGHPQGKGAPRLPPTLLDQFEKQLPVQQDGFHTLPYQRGPAGAGPGPAPGTGTAPEPRSESPSRIRHLVHSVQKLFAKSHSLEAPGKRDYNGPKAEGRGGSGGDSYPGPGSGGPHTSHHHHHHHHHHHHQSRHGKRSKSKDRKGDGRHQAKSTGWWSSDDNLDSDSGFLAGGRPPGEPGGPFCLEGPDGSYRDLSFKGRSGGSEGRCLACTGMSMSLDGQSVKRSAWHTMMVSQGRDGYPGAGPGKGLLGPETKAKARTYHYLQVPQDDWGGYPTGGKDGEIPCRRMRSGSYIKAMGDEESGDSDGSPKTSPKAVARRFTTRRSSSVDQARINCCVPPRIHPRSSIPGYSRSLTTGQLSDELNQQLEAVCGSVFGELESQAVDALDLPGCFRMRSHSYLRAIQAGCSQDDDCLPLLATPAAVSGRPGSSFNFRKAPPPIPPGSQAPPRISITAQSSTDSAHESFTAAEGPARRCSSADGLDGPAMGARTLELAPVPPRASPKPPTLIIKTIPGREELRSLARQRKWRPSIGVQVETISDSDTENRSRREFHSIGVQVEEDKRRARFKRSNSVTAGVQADLELEGLAGLATVATEDKALQFGRSFQRHASEPQPGPRAPTYSVFRTVHTQGQWAYREGYPLPYEPPATDGSPGPAPAPTPGPGAGRRDSWIERGSRSLPDSGRASPCPRDGEWFIKMLRAEVEKLEHWCQQMEREAEDYELPEEILEKIRSAVGSTQLLLSQKVQQFFRLCQQSMDPTAFPVPTFQDLAGFWDLLQLSIEDVTLKFLELQQLKANSWKLLEPKEEKKVPPPIPKKPLRGRGVPVKERSLDSVDRQRQEARKRLLAAKRAASFRHSSATESADSIEIYIPEAQTRL

SEQ ID NO: 113 - DNA, 3105 bp, Homo sapiens
cggtgccaggtgggctacgcggctggggcggctgcggatatcgccttagggacgcgttgacattcactggctagtccaccgctctcagtcggagaccacattgcctcgtgtccaactatccattaccaagaagaaatctattcgtttgagcctgagacactctttgaggtaaaaaattagaatgaaagaacctttggatggtgaatgtggcaaagcagtggtaccacagcaggagcttctggacaaaattaaagaagaaccagacaatgctcaagagtatggatgtgtccaacagccaaaaactcaagaaagtaaattgaaaattggtggtgtgtcttcagttaatgagagacctattgcccagcagttgaacccaggctttcagctttcttttgcatcatctggcccaagtgtgttgcttccttcagttccagctgttgctattaaggttttttgttctggttgtaaaaaaatgctttataagggccaaactgcatatcataagacaggatctactcagctcttctgctccacacgatgcatcaccagacattcttcacctgcctgcctgccacctcctcccaagaaaacctgcacaaactgctcgaaagacattttaaatcctaaggatgtgatcacaactcgctttgagaattcctatcctagcaaagatttctgcagccaatcatgcttgtcatcttatgagctaaagaaaaaacctgttgttaccatatataccaaaagcatttcaactaagtgcagtatgtgtcagaagaatgctgatactcgatttgaagttaaatatcaaaatgtggtacatggtctttgtagtgatgcctgtttttcaaaatttcactctacaaacaacctcaccatgaactgttgtgagaactgtgggagctattgctatagtagctctggtccttgccaatcccagaaggtttttagttcaacaagtgtcacggcatacaagcagaattctgcccaaattcctccatatgccctggggaagtcattgaggccctcagctgaaatgattgagactacaaatgattcaggaaaaacagagcttttctgctctattaattgcttatctgcttacagagttaagactgttacttcttcaggtgtccaggtttcatgtcatagttgtaaaacctcagcaatccctcagtatcacctagccatgtcaaatggaactatatacagcttctgcagctccagttgtgtggttgctttccagaatgtatttagcaagccaaaaggaacaaactcttcggcggtgcccctgtctcagggccaagtggttgtaagcccgccctcctccaggtcagcagtgtcaataggaggaggtaacacctctgccgtttcccccagctccatccgtggctctgctgcagccagcctccaacctcttgctgaacaatcccagcaagttgctttaacccatacagttgttaaactcaagtgtcagcactgtaaccatctatttgccacaaaaccagaacttcttttttacaagggtaaaatgtttctgttttgtggcaagaattgctctgatgaatacaagaagaaaaataaagttgtggcaatgtgtgactactgtaaactgcagaaaattataaaggagactgtgcgattctcaggggttgataagccattctgtagtgaagtttgcaaattcctctctgcccgtgactttggagaacgatggggaaactactgtaagatgtgcagctactgttcacagacatccccaaatttggtagaaaatcgattggagggcaagttagaagagttttgttgtgaagattgtatgtccaaatttacagttctgttttatcagatggccaagtgtgatggttgtaaacgacagggtaaactaagcgagtccataaagtggcgaggcaacattaaacatttctgtaacctattttgtgtcttggagttttgtcatcagcaaattatgaatgactgtcttccacaaaataaagtaaatatttctaaagcaaaaactgctgtgacggagctcccttctgcaaggacagatacaacaccagttataaccagtgtgatgtcattggcaaaaatacctgctaccttatctacagggaacactaacagtgttttaaaaggtgcagttactaaagaggcagcaaagatcattcaagatgaaagtacacaggaagatgctatgaaatttccatcttcccaatcttcccagccttccaggcttttaaagaacaaaggcatatcatgcaaacccgtcacacagaccaaggccacttcttgcaaaccacatacacagcacaaagaatgtcagacagaatgccctgttcgtgcagtttgctgaggtgttcccgctgaaggtatttggctaccagccagatcccctgaactaccaaatagctgtgggctttctggaactgctggctgggttgctgctggtcatgggcccaccgatgctgcaagagatcagtaacttgttcttgattctgctcatgatgggggctatcttcaccttggcagctctgaaagagtcactaagcacctgtatcccagccattgtctgcctggggttcctgctgctgctgaatgtcggccagctcttagcccagactaagaaggtggtcagacccactaggaagaagactctaagtacattcaaggaatcctggaagtagagcatctctgtctctttatgccatgcagctgtcacagcaggaacatggtagaacacagagtctatcatcttgttaccagtataatatccagggtcagccagtgttgaaagagacattttgtctacctggcactgctttctctttttagctttactactcttttgtgaggagtacatgttatgcatattaacattcctcatgtcatatgaaaatacaaaataagcagaaaagaaatttaaatcaaccaaaattctgatgccccaaataaccacttttaatgccttggtgtaagtatacctctgaacttttttctgtgcctttaaacagatatatattttttttaaatgaaaataaaaccatatatcctattttatttcctccttttaaaaccttataaactataacactgttaaaaaaaaaa

SEQ ID NO: 114 - protein, 723 aa, Homo sapiens
MKEPLDGECGKAVVPQQELLDKIKEEPDNAQEYGCVQQPKTQESKLKIGGVSSVNERPIAQQLNPGFQLSFASSGPSVLLPSVPAVAIKVFCSGCKKMLYKGQTAYHKTGSTQLFCSTRCITRHSSPACLPPPPKKTCTNCSKDILNPKDVITTRFENSYPSKDFCSQSCLSSYELKKKPVVTIYTKSISTKCSMCQKNADTRFEVKYQNVVHGLCSDACFSKFHSTNNLTMNCCENCGSYCYSSSGPCQSQKVFSSTSVTAYKQNSAQIPPYALGKSLRPSAEMIETTNDSGKTELFCSINCLSAYRVKTVTSSGVQVSCHSCKTSAIPQYHLAMSNGTIYSFCSSSCVVAFQNVFSKPKGTNSSAVPLSQGQVVVSPPSSRSAVSIGGGNTSAVSPSSIRGSAAASLQPLAEQSQQVALTHTVVKLKCQHCNHLFATKPELLFYKGKMFLFCGKNCSDEYKKKNKVVAMCDYCKLQKIIKETVRFSGVDKPFCSEVCKFLSARDFGERWGNYCKMCSYCSQTSPNLVENRLEGKLEEFCCEDCMSKFTVLFYQMAKCDGCKRQGKLSESIKWRGNIKHFCNLFCVLEFCHQQIMNDCLPQNKVNISKAKTAVTELPSARTDTTPVITSVMSLAKIPATLSTGNTNSVLKGAVTKEAAKIIQDESTQEDAMKFPSSQSSQPSRLLKNKGISCKPVTQTKATSCKPHTQHKECQTECPVRAVC

SEQ ID NO: 115 - DNA, 4250 bp, Homo sapiens
agcgtggcttcgaagattgtttcagaagcgttgggcggcgggcgtccctgagagaaattagttcaagcgattctcgtgcctcagcctcccgagtagctgggattacaggaatctggaaactgttcttcaggaagaaaccaattagtttggaactggagaattcctttgcatcagatactaaaatgaaagaaccacttttaggtggtgagtgtgacaaggcagtggcatcacagctggggctgctagatgaaattaagacagaacccgacaatgctcaagagtattgtcataggcaacagtccagaactcaggagaatgaactgaaaataaatgctgtgttttcagagagtgcttcacagttgactgcaggcattcagctttctctggcatcatctggcgtgaataaaatgcttccttcagtttcaaccacagctattcaggtttcctgtgctggttgtaaaaaaattctccagaaggggcaaactgcttatcagaggaaaggatctgctcaacttttctgctccataccatgcatcactgaatacatttcatctgccagttcaccagttccttctaagagaacttgttcaaactgctcaaaagacattttaaatccaaaggatgtgattagtgtccagctggaagacactacctcttgcaaaactttttgcagcctatcttgtctttcatcatatgaagaaaaaagaaaaccatttgttaccatatgtactaatagcattttgaccaagtgcagcatgtgccagaagactgctattattcagtatgaagtaaaataccaaaatgtgaaacataatctttgcagtaatgcctgcctttcaaagtttcactctgctaacaacttcatcatgaactgctgtgagaactgtggcacttactgttacaccagctctagtctgtcccacatacttcagatggaaggacagtctcattactttaatagttcaaagagtattacagcatataagcagaaacctgccaaaccacttatatctgttccttgcaaaccattgaagccctcagatgaaatgattgagactacgagtgatttggggaagacagagcttttctgctctattaattgtttctctgcatacagtaaagctaagatggaatcttcttcagtaagtgttgtttctgtggtgcatgatacttcaacagagcttctttctccaaagaaagatacgactccagttataagcaatatagtgtcattggcagacaccgatgttgccttgcccatcatgaacactgatgtcttacaagatacagtttcttcagtaacagcaacagcagatgtcattgtggatctttctaagagttcacctagtgaacccagtaatgctgttgctagtagtagtacggaacagccaagcgtttcaccatcttcatcagtattcagtcagcatgcaattggttccagtacagaagtacaaaaagacaatatgaaatctatgaaaataagtgatgaactatgtcacccaaaatgtacatccaaagtacaaaaagttaaaggtaaatcacgaagtattaaaaaatcttgttgtgcagattttgagtgtttggaaaacagtaaaaaagatgtggcattctgttattcatgccagttgttctgccaaaaatattttagctgtggaagagagtcatttgcaacccacggaacttctaattggaaaaaaaccctggaaaaattcagaaagcatgaaaaaagtgaaatgcatttgaagtcattggaattttggagagaataccaattttgtgatggagctgtcagtgacgatttatctattcattcgaaacagattgagggaaataaaaagtacctaaagcttataattgaaaatattttatttcttggaaagcagtgtttacccttaagaggaaacgaccagtcagtttcatctgtgaataaaggcaattttttagaattgttagaaatgagagcaaaagataaaggagaagaaacatttcgacttatgaattcacaagttgacttctataacagtacacaaattcaaagtgatattatcgaaataataaagactgaaatgttgcaggatattgtgaatgagatcaatgactcctcagcattttcaatcatatgtgatgagacaatcaatagtgccatgaaagaacagctttcaatttgtgtaagatacccacaaaaatcatcaaaggctatcttaattaaggaaagattcttgggttttgttgatactgaggagatgactgggacccacttacataggactatcaaaacttatctgcagcaaattggagttgatatggataaaatacatggccaggcctatgatagcaccactaatttgaagataaaatttaataaaatagcagcagaattcaagaaagaagaaccaagagctttatacatacattgttatgcacactttttggatttatcaataattaggttttgtaaagaagtaaaagaactccgaagtgctctaaaaactctcagttctttgttcaacactatttgtatgtctggggaaatgttggcaaattttcgaaacatttataggctaagtcaaaacaaaacatgcaagaaacatatatcacaatcatgttggacagtccatgatcgtacattactatctgtgattgacagtcttccagagattattgaaacattggaagttatagcaagccattcttcaaatacaagtttcgccgatgaattgagtcatttgctgacattggtttccaaatttgaatttgtcttttgtttgaaattcctgtatcgagtgctgagtgttacaggaattctttccaaagagcttcaaaataaaaccatagacattttttctttgtcttcaaaaatagaagcaattttggaatgttttatcatctgaaagaaatgacgtatactttaaaacaatctgggatggaacagaggaaatatgtcaaaaaataacctgtaaaggttttaaagttgaaaaaccttctcttcagaaaagaagaaaaattcagaaatcagtagatcttggcaattcagataatatgttttttcctacttcaacagaagaacaatataaaattaatatctattaccaaggattagatactatattacaaaatttaaagttatgtttttcggagtttgattattgcaaaataaagcaaatttcagaactgttatttaaatggaatgaaccattaaatgaaacaacagcaaaacatgttcaggaattttataaacttgatgaggacattatcccagaacttagattttatcgacattatgcaaagcttaactttgtcatagatgatagttgcataaacttcgtcagtctcggctgtttgtttattcagcatggtcttcacagtaatattccttgtctctcaaagctattatatattgctttgtcttggccaattacttcagcaagtactgagaactcattttctaccctgcctcgtcttaagacatatttatgtaataccatgggacaagagaagcttactggcccagccctaatggctgttgagcaggagttggtaaataaactaatggagcctgaaagactcaatgaaattgtggaaaagtttatcagtcagatgaaagaaatataatacatgctcatttgaacttacctaaaagacttgtatttccattgggatgttttcatttcaaaattgttcaaaattcaaaagacacagaacgataaacagtgaagtctccttccctcctttagaactcattttctcttcccaaaaagtgttatcttttccttaaatatccctctagaggtatttttcctaagtggtattgtacggtgtatactgttcttcagcttgtcttctctgtgtaacatatttttgagattgtcccatgtcgttacatgaagagtttcttgattcttggtctataattgcagatgttattgtatgaatgtaccataatatatttgagcagtccctgctgacatttttttcctaaccttttgctattataaataatgattcattttataaccttttatataggtcacattgcacatgagtgagtttactgtaagctggaaatctaaagttagaattactaggttaagatatgtgcatttttacttttgatagatattggcaagttgccatctataaggattgtgccagtttacagtcccacccacaatgcatgagagtgcctattaaatctttgtaagtgttaaaaaaaaaaaaaaaaaaaaaaaaaaaaataaaaaaaaaaaaaa

SEQ ID NO: 116 - protein, 902 aa, Homo sapiens
MKEPLLGGECDKAVASQLGLLDEIKTEPDNAQEYCHRQQSRTQENELKINAVFSESASQLTAGIQLSLASSGVNKMLPSVSTTAIQVSCAGCKKILQKGQTAYQRKGSAQLFCSIPCITEYISSASSPVPSKRTCSNCSKDILNPKDVISVQLEDTTSCKTFCSLSCLSSYEEKRKPFVTICTNSILTKCSMCQKTAIIQYEVKYQNVKHNLCSNACLSKFHSANNFIMNCCENCGTYCYTSSSLSHILQMEGQSHYFNSSKSITAYKQKPAKPLISVPCKPLKPSDEMIETTSDLGKTELFCSINCFSAYSKAKMESSSVSVVSVVHDTSTELLSPKKDTTPVISNIVSLADTDVALPIMNTDVLQDTVSSVTATADVIVDLSKSSPSEPSNAVASSSTEQPSVSPSSSVFSQHAIGSSTEVQKDNMKSMKISDELCHPKCTSKVQKVKGKSRSIKKSCCADFECLENSKKDVAFCYSCQLFCQKYFSCGRESFATHGTSNWKKTLEKFRKHEKSEMHLKSLEFWREYQFCDGAVSDDLSIHSKQIEGNKKYLKLIIENILFLGKQCLPLRGNDQSVSSVNKGNFLELLEMRAKDKGEETFRLMNSQVDFYNSTQIQSDIIEIIKTEMLQDIVNEINDSSAFSIICDETINSAMKEQLSICVRYPQKSSKAILIKERFLGFVDTEEMTGTHLHRTIKTYLQQIGVDMDKIHGQAYDSTTNLKIKFNKIAAEFKKEEPRALYIHCYAHFLDLSIIRFCKEVKELRSALKTLSSLFNTICMSGEMLANFRNIYRLSQNKTCKKHISQSCWTVHDRTLLSVIDSLPEIIETLEVIASHSSNTSFADELSHLLTLVSKFEFVFCLKFLYRVLSVTGILSKELQNKTIDIFSLSSKIEAILECFII

SEQ ID NO: 117 - DNA, 3071 bp, Homo sapiens
ccgccattttgtgagaagcaaggtggcctccacgtttcctgagcgtcttcttcgcttttgcctcgaccgccccttgaccacagacatgtctcgggatcggttccggagtcgtggcggtggcggtggtggcttccacaggcgtggaggaggcggcggccgcggcggcctccacgacttccgttctccgccgcccggcatgggcctcaatcagaatcgcggccccatgggtcctggcccgggccagagcggccctaagcctccgatcccgccaccgcctccacaccaacagcagcaacagccaccaccgcagcagccaccgccgcagcagccgccaccgcatcagccgccgccgcatccacagccgcatcagcagcagcagccgccgccaccgccgcaggactcttccaagcccgtcgttgctcagggacccggccccgctcccggagtaggcagcgcaccaccagcctccagctcggccccgcccgccactccaccaacctcgggggccccgccagggtccgggccaggcccgactccgaccccgccgcctgcagtcacctcggcccctcccggggcgccgccacccaccccgccaagcagcggggtccctaccacacctcctcaggccggaggcccgccgcctccgcccgcggcagtcccgggcccgggtccagggcctaagcagggcccaggtccgggtggtcccaaaggcggcaaaatgcctggcgggccgaagccaggtggcggcccgggcctaagtacgcctggcggccaccccaagccgccgcatcgaggcggcggggagccccgcgggggccgccagcaccacccgccctaccaccagcagcatcaccaggggcccccgcccggcgggcccggcggccgcagcgaggagaagatctcggactcggaggggtttaaagccaatttgtctctcttgaggaggcctggagagaaaacttacacacagcgatgtcggttgtttgttgggaatctacctgctgatatcacggaggatgaattcaaaagactatttgctaaatatggagaaccaggagaagtttttatcaacaaaggcaaaggattcggatttattaagcttgaatctagagctttggctgaaattgccaaagccgaactggatgatacacccatgagaggtagacagcttcgagttcgctttgccacacatgctgctgccctttctgttcgtaatctttcaccttatgtttccaatgaactgttggaagaagcctttagccaatttggtcctattgaaagggctgttgtaatagtggatgatcgtggaagatctacagggaaaggcattgttgaatttgcttctaagccagcagcaagaaaggcatttgaacgatgcagtgaaggtgttttcttactgacgacaactcctcgtccagtcattgtggaaccacttgaacaactagatgatgaagatggtcttcctgaaaaacttgcccagaagaatccaatgtatcaaaaggagagagaaacccctcctcgttttgcccagcatggcacgtttgagtacgaatattctcagcgatggaagtctttggatgaaatggaaaaacagcaaagggaacaagttgaaaaaaacatgaaagatgcaaaagacaaattggaaagtgaaatggaagatgcctatcatgaacatcaggcaaatcttttgcgccaagatctgatgagacgacaggaagaattaagacgcatggaagaacttcacaatcaagaaatgcagaaacgtaaagaaatgcaattgaggcaagaggaggaacgacgtagaagagaggaagagatgatgattcgtcaacgtgagatggaagaacaaatgaggcgccaaagagaggaaagttacagccgaatgggctacatggatccacgggaaagagacatgcgaatgggtggcggaggagcaatgaacatgggagatccctatggttcaggaggccagaaatttccacctctaggaggtggtggtggcataggttatgaagctaatcctggcgttccaccagcaaccatgagtggttccatgatgggaagtgacatgcgtactgagcgctttgggcagggaggtgcggggcctgtgggtggacagggtcctagaggaatggggcctggaactccagcaggatatggtagagggagagaagagtacgaaggcccaaacaaaaaaccccgattttagatgtgatatttaggctttcattccagtttgttttgtttttttgtttagataccaatcttttaaattcttgcattttagtaagaaagctatctttttatggatgttagcagtttattgacctaatatttgtaaatggtctgtttgggcaggtaaaattatgtaatgcagtgtttggaacaggagaatttttttttcctttttatttctttattttttcttttttactgtataatgtccctcaagtttatggcagtgtaccttgtgccactgaatttccaaagtgtaccaatttttttttttttactgtgcttcaaataaatagaaaaatagttataatattggatcttcaactttgccattcatgcttctatgcatattaggctacgtattccacattgaaagcatgagagtgtctaggcctttgaatggcatatgccatttctgggaaatgcatctggaggctaagtattgctttctacaaataattgccccctttgttttaaaaagaagaaatgcatattgaagtagtttgatgatttgtttggcatataggaagcacgctggtgctaagtattttttaaatggttatgtaagcaaagctgaactgtaaatcttcaggaatatgtattaagattgtggaatgggtgtaagacaattggtagggggtgaaagtgggtttgattaaatggatcttttatggccctatgatctatcctttacttgaaagcttttgaaaagtggaaaggtcattttgttgcatttccccatttcttgtttttaaaagaccaacaaatctcaagccctataaatggcttgtattgaacttttacatttgaattaaagatgttaaacatgaaaaaaa

SEQ ID NO: 118 - protein, 707 aa, Homo sapiens
MSRDRFRSRGGGGGGFHRRGGGGGRGGLHDFRSPPPGMGLNQNRGPMGPGPGQSGPKPPIPPPPPHQQQQQPPPQQPPPQQPPPHQPPPHPQPHQQQQPPPPPQDSSKPVVAQGPGPAPGVGSAPPASSSAPPATPPTSGAPPGSGPGPTPTPPPAVTSAPPGAPPPTPPSSGVPTTPPQAGGPPPPPAAVPGPGPGPKQGPGPGGPKGGKMPGGPKPGGGPGLSTPGGHPKPPHRGGGEPRGGRQHHPPYHQQHHQGPPPGGPGGRSEEKISDSEGFKANLSLLRRPGEKTYTQRCRLFVGNLPADITEDEFKRLFAKYGEPGEVFINKGKGFGFIKLESRALAEIAKAELDDTPMRGRQLRVRFATHAAALSVRNLSPYVSNELLEEAFSQFGPIERAVVIVDDRGRSTGKGIVEFASKPAARKAFERCSEGVFLLTTTPRPVIVEPLEQLDDEDGLPEKLAQKNPMYQKERETPPRFAQHGTFEYEYSQRWKSLDEMEKQQREQVEKNMKDAKDKLESEMEDAYHEHQANLLRQDLMRRQEELRRMEELHNQEMQKRKEMQLRQEEERRRREEEMMIRQREMEEQMRRQREESYSRMGYMDPRERDMRMGGGGAMNMGDPYGSGGQKFPPLGGGGGIGYEANPGVPPATMSGSMMGSDMRTERFGQGGAGPVGGQGPRGMGPGTPAGYGRGREEYEGPNKKPRF

SEQ ID NO: 119 - DNA, 7011 bp, Homo sapiens
agtgtgggcgggggccggggggccgagaggtaccgccgccaccgcgcggggagccgcagcggttccgagcggggcccaacatggcggagagagaggtggagtccggcccccgaaagaggtttgaacaaaaaagtggtgcagtttttgatgaaattgtagagaactgtggtggtatcatggatacagaaatgtctgaagatatagaccacaacttaactcctacccttgacagcatgtcttatggaatgccgaatcaaacaggatctgaaaattcattgctggatgaagatgattattttttgaactctggggatcttgcaggaattccagtcgttggtagtgacaatgaggatgaacaggattttagttcaaaggacaatcttgtttcttcaattcatactgatgatagcttggaagtagagagaagagtcacacagcatgaatcagacaatgaaaatgaaatacaaattcaaaataagttaaaaaaagactttcctaaacaatttgatcaggtttctgtctttaaatcaatacggaaagattttagtctagtaagagaaaacagcaaagagacattttctggaaaggagaaaaatagagacctaacttatgaacgtgaaaaacggttggataaaccccataaagatttggattcaaggttgaaaagcagtttttttgataaagcagctaatcaagttgaagaaacattacatacccatttaccacaaaccccagaaacaaactttagggattccagctacccatttgccaataaagaatccattggttcggaactggggaattcctttgcatcaaatattagaattaaagaagaacctttggatgatgagtatgacaaagcaatggcaccacagcagggactactagacaaaataaaagatgaacctgacaatgctcaagagtatagtcatggccaacagcaaaaaactcaagagggggaactgaaaattagtgctgtgttttcagtcagtggcagccctcttgctccacagttgactactggctttcagccctcactggcgtcatctggcatgaataaaatgcttccttcagttccagccacagctgttcgagtttcctgttctggttgtaaaaaaatcctccagaaggggcaaactgcttatcagaggaaagggtctactcagctattctgctccacactgtgcctcactggatatacagttccacctgcccgcccaccgcctcctctcaccaagaaaacttgttcaagttgctcaaaagacattttaaatccaaaggatgtgatcagtgcccagtttgaaaacaccaccactagtaaagatttttgcagtcagtcatgtttgtcaacatatgaactgaaaaaaaaacctattgttaccataaatacaaatagtatttcaaccaaatgcagcatgtgtcagaagaatgctgttattcgacatgaagttaattaccagaatgtggtccataaactttgcagtgatgcctgcttctctaagtttcgttctgctaacaacctcaccatgaactgttgtgagaactgtgggggttactgttacagtgggtcgggacaatgccacatgcttcagatagagggacagtctaagaagttttgtagttcatcgtgtatcacggcatacaagcagaaatcagccaaaattacaccgtgtgcgctttgcaaatcattgagatcctcagcagaaatgattgaaaataccaatagcttggggaagacagagcttttctgttctgttaattgcttatctgcttacagagttaaaatggttacttctgcaggtgtacaagttcagtgtaacagttgtaaaacctcagcaattcctcagtatcacctagccatgtcagatggaagtatacgcaacttctgcagctacagctgtgtggtagctttccagaatttattcaacaaaccaactggaatgaattcttcagtagtgcccttgtctcagggccaagtaattgtaagcatccccacaggttccacagtgtcagccggaggaggtagcacatctgctgtttctcccacctccatcagtagctctgctgcagctggtctccagcgtctcgctgcccagtcccagcatgttgggtttgcacgaagtgttgtgaaactcaaatgtcaacactgtaaccgtctttttgccacaaaaccagaacttcttgactataagggcaaaatgtttcagttctgtggcaagaattgttctgatgaatataagaaaataaataatgtaatggcaatgtgtgaatattgtaaaattgagaaaattgtaaaggagactgttcggttctcaggtgctgacaagtcattctgtagtgaaggttgcaaattgctttataaacatgacttggcaaaacgctggggaaatcactgtaaaatgtgcagttattgtttacagacatctcccaaattggtacagaataatttaggagggaaagtggaagagttctgttgtgaagaatgcatgtccaaatatacagttttgttctatcagatggccaaatgtgatgcttgtaagcgacagggtaaactcagtgagtccttgaaatggcgaggggaaatgaaacatttctgtaacctgctttgtatcttgatgttctgtaatcagcaaagtgtatgtgacccgccttcacaaaataatgcagcaaatatttccatggttcaagctgcttcagcaggacccccatctctgagaaaagattcgactccagttatagccaatgtagtatcattggcaagtgcccctgctgctcagcctacagtgaattctaacagtgtcttacaaggtgcagttccaacagtaacagcgaaaatcatcggtgatgcaagtactcaaacagatgccctgaaactgccaccttcccaacctccaaggcttttgaagaacaaagctttattatgcaaacccatcacacagactaaagccacctcttgcaaaccacatacccaaaacaaagaatgccagacagaagacactccaagtcagccccagattattgtggtgccagttcccgtaccagtgtttgttcccatacctcttcacctttatactcaatatgctccagtcccatttggaattccagttccaatgcctgtccctatgcttattccatcttcaatggatagtgaagataaagtcacagagagtattgaagacattaaagaaaagcttcccacacatccatttgaagctgatctccttgagatggcagaaatgattgcagaagatgaagagaagaagactctatctcagggagagtcccaaacttctgaacacgaactctttctagacaccaagatatttgaaaaagaccaaggaagtacatacagtggtgatcttgaatcagaggcagtatctactccacatagctgggaggaagagctgaatcactatgccttaaagtcaaatgctgtgcaagaggctgattcagaattgaagcagttctcaaaaggggaaactgaacaggacctggaagcagattttccatcagactcctttgacccacttaataaaggacagggaatccaggcacgttcccgaacaagacgacgacacagagatggcttcccccaacccagacgaagaggacggaagaagtctatagtggctgtggagcccaggagtcttattcaaggagcctttcaaggctgctcagtgtccgggatgacactgaaatacatgtatggggtaaatgcttggaagaactgggttcagtggaaaaatgccaaggaagagcagggggatctaaaatgtggaggggttgaacaggcctcatctagcccacgttctgaccccttaggaagtactcaagaccatgcactctctcaagaatcctcagagccaggctgtagagtccgctctatcaagctgaaggaagacattctgtcctgcacttttgctgagttgagtttgggcttatgccagtttatccaagaggtgcggagaccaaatggtgaaaaatatgatccagacagtatcttatacttgtgccttggaattcaacagtacctgtttgaaaatggtagaatagataacatttttactgagccctattccagatttatgattgaacttaccaaactcttgaaaatatgggaacctacaatacttcctaatggttacatgttctctcgcattgaggaagagcatttgtgggagtgcaaacagctgggcgcttactcaccaatcgtccttttaaacaccctccttttcttcaataccaaatacttccaactaaagaatgttactgagcacttgaagctttcctttgcccatgtgatgagacggaccaggactctgaagtacagtaccaagatgacatatctgaggttcttcccacctttacagaagcaggagtcagaaccagataaactgactgttggcaagaggaaacgaaatgaagatgatgaggttccagtgggggtggagatggcagagaatactgacaatccactaagatgcccagtccgactttatgagttttacctgtcaaaatgttctgaaagtgtgaagcaaaggaatgatgtgttttaccttcaacctgagcgctcctgtgtcccgaatagccccatgtggtactccacattcccgatagaccctggaaccctggacaccatgttaacacgtattctcatggtgagggaggtacatgaagaacttgccaaagccaaatctgaagactctgatgttgaattatcagattaaaacggaagtgaggttcttattttcatacatattggtatgcaccaaactgtgaatgcatccagctgttggaaaatgatgtataagtctaagtcctcttgacttgaccataagatcatggaaaacagatgacttgtgaaccccacagtgtggatgtgcaaatgaaaattgaaggaaagaatatgaactgagaaatgttctttggcagtgatatagttcttagacatcttcagaatgactaatttctccgagtggtgcataatcttattttgtttgggagtaacaaatcgtggaatatttttaaggaaaactgttgtataaaactttaccatagtaaccttagaccttagagaggtagctttggagtgaaactttggctgcaataggctactttggcaagccctccgtaaaagtcagaggagagatcagtacagagctaagagtgacatcaaatgaggactgtgggacccagatttgaagacccaataaaaatactcaactttttaaaaaagatagtgaagtggtcttgattgattttgattttcactgccaagccaatcatgtgaaggacagaagcttttgccatgggcccctcacatcagggaaaatgaccttcactgctgttaacagtaatgtgtccctttcattttctggatcaagccttctcagcggtgggtctggatgtgggtaaactaaggtaaaggggatgatattccacaaactaattatgcacacagaaaatctgtggagcctatcagaccccaagtgtcttgaaatgtttgtagaaacccactaaaatgccccttctctgggtgtgggcccttattgcagctgtctcacagcctgagctgtggtacagagaaatgggggttctccttttattttcattttttttccccaatggcagcttttctcccgttgttttaccttcctatttcccaaacagttcctcttattttgtcttttgcaccagtttctggaggcccttgtcatttcaaaaaggatagtctcttttcttactctggcaaacctgtgagtgattccacaaagatacagtattacttagctatctgaattatgatagaaaaggtcctagttaggttcctatataaagcatttggaagatgaccttgttgcccttgaaacttgaaaatagggattctggggtgaggatacaaagacattgtcttgcatatccataagcaggtcttagagcattattccaaactctagctgtttcagtagttctatgaggattgcaagtcataggtgtgtgtggcatatcagtccatctccctcatctccattctcagtttcttccccacaaaatttggaatcaaagcttttatgacgtttgccaattgcagaacttcttcagctaaggttaatttgacgctatgataaaactgagagatgtcaaaaagcctcttagaaattttaatcttgaaagacttttcagggtatctcattttttaggtgggggtggcaggtgtatttcttttttaacaaataaaaggcatttaagtaaaactaaaatgaaaaaagtaggccttctgacattgtgtacttggtggttctgtccctctgcctgtaacaaatctcatttttgttaccaagaactgtatgaaagaagtaaatccaccccgattctgtatgattaattccatctgtgtttgtcatttctgactggaaaacttcttactccataccttgttcgatatggaggacaaataattggattgtctgataagtctgccaataaactatccagaaatagcaagtgtaatagtccccactatacgaattttatggtttgtataaacactaacattttccccttctgtagttgtatgaaaaaacaaatattgttagcatagtagataaattgttatgaaataccagaaaaaaaaatctgtatcttttactgagaacacccaatacccagataaatgactgtatcaggatttcatttgcatgttagtccacagagttgcccagaaccctaaatttattcataagagaaaatattgattaattattggtcattcctcataagtgtagctgttgatgtgtgcgtctgattattgcttttttaattttatgaaaattgtgtaaaattacattttttttccaggggagaaaaaaacatcaaacaaaaacatctaaatcatcctttttgttctttttcagtttttaaccacttttaggttttccccttacagaaaccacagaaatattcccttagaataaaatagtatatttgtatttgaaaaaaaaaaaaaaaaaa

SEQ ID NO: 120 - protein, 1548 aa, Homo sapiens
MAEREVESGPRKRFEQKSGAVFDEIVENCGGIMDTEMSEDIDHNLTPTLDSMSYGMPNQTGSENSLLDEDDYFLNSGDLAGIPVVGSDNEDEQDFSSKDNLVSSIHTDDSLEVERRVTQHESDNENEIQIQNKLKKDFPKQFDQVSVFKSIRKDFSLVRENSKETFSGKEKNRDLTYEREKRLDKPHKDLDSRLKSSFFDKAANQVEETLHTHLPQTPETNFRDSSYPFANKESIGSELGNSFASNIRIKEEPLDDEYDKAMAPQQGLLDKIKDEPDNAQEYSHGQQQKTQEGELKISAVFSVSGSPLAPQLTTGFQPSLASSGMNKMLPSVPATAVRVSCSGCKKILQKGQTAYQRKGSTQLFCSTLCLTGYTVPPARPPPPLTKKTCSSCSKDILNPKDVISAQFENTTTSKDFCSQSCLSTYELKKKPIVTINTNSISTKCSMCQKNAVIRHEVNYQNVVHKLCSDACFSKFRSANNLTMNCCENCGGYCYSGSGQCHMLQIEGQSKKFCSSSCITAYKQKSAKITPCALCKSLRSSAEMIENTNSLGKTELFCSVNCLSAYRVKMVTSAGVQVQCNSCKTSAIPQYHLAMSDGSIRNFCSYSCVVAFQNLFNKPTGMNSSVVPLSQGQVIVSIPTGSTVSAGGGSTSAVSPTSISSSAAAGLQRLAAQSQHVGFARSVVKLKCQHCNRLFATKPELLDYKGKMFQFCGKNCSDEYKKINNVMAMCEYCKIEKIVKETVRFSGADKSFCSEGCKLLYKHDLAKRWGNHCKMCSYCLQTSPKLVQNNLGGKVEEFCCEECMSKYTVLFYQMAKCDACKRQGKLSESLKWRGEMKHFCNLLCILMFCNQQSVCDPPSQNNAANISMVQAASAGPPSLRKDSTPVIANVVSLASAPAAQPTVNSNSVLQGAVPTVTAKIIGDASTQTDALKLPPSQPPRLLKNKALLCKPITQTKATSCKPHTQNKECQTEDTPSQPQIIVVPVPVPVFVPIPLHLYTQYAPVPFGIPVPMPVPMLIPSSMDSEDKVTESIEDIKEKLPTHPFEADLLEMAEMIAEDEEKKTLSQGESQTSEHELFLDTKIFEKDQGSTYSGDLESEAVSTPHSWEEELNHYALKSNAVQEADSELKQFSKGETEQDLEADFPSDSFDPLNKGQGIQARSRTRRRHRDGFPQPRRRGRKKSIVAVEPRSLIQGAFQGCSVSGMTLKYMYGVNAWKNWVQWKNAKEEQGDLKCGGVEQASSSPRSDPLGSTQDHALSQESSEPGCRVRSIKLKEDILSCTFAELSLGLCQFIQEVRRPNGEKYDPDSILYLCLGIQQYLFENGRIDNIFTEPYSRFMIELTKLLKIWEPTILPNGYMFSRIEEEHLWECKQLGAYSPIVLLNTLLFFNTKYFQLKNVTEHLKLSFAHVMRRTRTLKYSTKMTYLRFFPPLQKQESEPDKLTVGKRKRNEDDEVPVGVEMAENTDNPLRCPVRLYEFYLSKCSESVKQRNDVFYLQPERSCVPNSPMWYSTFPIDPGTLDTMLTRILMVREVHEELAKAKSEDSDVELSD

SEQ ID NO: 121 - DNA, 4804 bp, Homo sapiens
gtttccggccgccgtcgctgtccagggaggctgaggcgagaggtagctgtccgggtggggagcccgcactaccttcttcctcttcctcctcctcctccgggtgaggggagcgaaggttgggggtccccgagcccatggaccaggaggaggcggaggccgccgagagccggggccccgctatgtggccctgagccccgtgtactggttctgcctgtctggagggccatggagaagaggctgggagtcaagccaaatcctgcttcctggattttatcaggatattattggcagacatctgcgaagtggttgagaagcctgtacctgttttatacttgcttttgcttcagcgttctgtggttgtcaacagatgccagtgagagcaggtgccagcaggggaagacacaatttggagttggcctgagatctgggggagaaaatcacctctggcttcttgaaggaaccccctctctccagtcatgttgggctgcctgctgccaggactctgcctgccatgtcttttggtggctagaagggatgtgcattcaggcagactgcagcaggccccagagctgccgggcttttaggacacactcctccaattccatgctggtgtttttaaaaaaattccaaactgcagatgatttgggctttctacctgaagatgatgtaccacatcttctggggctaggttggaactgggcatcttggaggcagagcccacccagagctgcactcagacctgctgtatcttccagtgaccagcagagcttaatcaggaagcttcagaagagaggtagtcccagtgacgtagttacacctatagtgacacagcattctaaagtgaatgactccaacgaattaggtggtctgactaccagtggctctgcagaggtccacaaggcgattacaatttccagtcccctaaccacagacctgactgcagagctgtctggtgggccaaagaatgtatcagtgcaacctgaaatatcagagggtcttgctactacgcccagcactcaacaagtaaaaagttctgagaaaacccagattgctgtcccccagccagtggctccctcctacagttatgctacccctaccccccaggcctctttccagagcacctcagcaccatacccagttataaaggaactggtggtatctgctggagagagtgtccagataaccctgcctaagaatgaagttcaattaaatgcatatgttctccaagaaccacctaaaggagaaacctacacctacgactggcagctgattactcatcctagagactacagtggagaaatggaagggaaacattcccagatcctcaaactatcgaagctcactccaggcctgtatgaattcaaagtgattgtagagggtcaaaatgcccatggggaaggctatgtgaacgtgacagtcaagccagagccccgtaagaatcggccccccattgctattgtgtcacctcagttccaggagatctctttgccaaccacttctacagtcattgatggcagtcaaagcactgatgatgataaaatcgttcagtaccattgggaagaacttaaggggcctctaagagaagagaagatttctgaagatacagccatattaaaactaagtaaactcgtccctgggaactacactttcagcttgactgtagtagactctgatggagctaccaactctactactgcaaacctgacagtgaacaaagctgtggattacccccctgtggccaacgcaggccccaaccaagtgatcaccctgccccaaaactccatcaccctctttgggaaccagagcactgatgatcatggcatcaccagctatgagtggtcactcagcccaagcagcaaagggaaagtggtggagatgcagggtgttagaacaccaaccttacagctctctgcgatgcaagaaggagactacacttaccagctcacagtgactgacacaataggacagcaggccactgctcaagtgactgttattgtgcaacctgaaaacaataagcctcctcaggcagatgcaggcccagataaagagctgacccttcctgtggatagcacaaccctggatggcagcaagagctcagatgatcagaaaattatctcatatctctgggaaaaaacacagggacctgatggggtgcagctcgagaatgctaacagcagtgttgctactgtgactgggctgcaagtggggacctatgtgttcaccttgactgtcaaagatgagaggaacctgcaaagccagagctctgtgaatgtcattgtcaaagaagaaataaacaaaccacctatagccaagataactgggaatgtggtgattaccctacccacgagcacagcagagctggatggctctaagtcctcagatgacaagggaatagtcagctacctctggactcgagatgaggggagcccagcagcaggggaggtgttaaatcactctgaccatcaccctatcctttttctttcaaacctggttgagggaacctacacttttcacctgaaagtgaccgatgcaaagggtgagagtgacacagaccggaccactgtggaggtgaaacctgatcccaggaaaaacaacctggtggagatcatcttggatatcaacgtcagtcagctaactgagaggctgaaggggatgttcatccgccagattggggtcctcctgggggtgctggattccgacatcattgtgcaaaagattcagccgtacacggagcagagcaccaaaatggtattttttgttcaaaacgagcctccccaccagatcttcaaaggccatgaggtggcagcgatgctcaagagtgagctgcggaagcaaaaggcagactttttgatattcagagccttggaagtcaacactgtcacatgtcagctgaactgttccgaccatggccactgtgactcgttcaccaaacgctgtatctgtgaccctttttggatggagaatttcatcaaggtgcagctgagggatggagacagcaactgtgagtggagcgtgttatatgttatcattgctacctttgtcattgttgttgccttgggaatcctgtcttggactgtgatctgttgttgtaagaggcaaaaaggaaaacccaagaggaaaagcaagtacaagatcctggatgccacggatcaggaaagcctggagctgaagccaacctcccgagcaggcatcaaacagaaaggccttttgctaagtagcagcctgatgcactccgagtcagagctggacagcgatgatgccatctttacatggccagaccgagagaagggcaaactcctgcatggtcagaatggctctgtacccaacgggcagacccctctgaaggccaggagcccgcgggaggagatcctgtagccacctggtctgtctcctcagggcagggcccagcacactgcccggccagtcctcctacctcccgagtctgcgggcagctgctgtcccagcatctgctggtcatttcgccctgacagtcccaaccagaacccctgggacttgaatccagagacgtcctccaggaacccctcaacgaagctgtgaatgaagaggtttcctctttaaacctgtctggtgggcccccagatatcctcacctcagggcctcctttttttgcaaactcctcccctcccccgagggcagacccagccagctgctaagctctgcagctccccagtggacagtgtcattgtgcccagagtgctgcaaggtgaggcctgctgtgctgcccgcacacctgagtgcaaaaccaagcactgtgggcatggtgtttccctctctggggtagagtacgccctctcgctgggcaaagaggaagtggcacccctcccctcaccacagatgctgagatggtagcatagaaatgatggccgggcgcggtggctcacgcctgtaatcccagcactttgggaggccgaggcgggcggatcatgaggtcaggagatcaagaccaccctggctaacacggtgaaaccccatctctactaaaaataaaaaaaaaaattagccgggtttggtggcgtatgcctgtaatcccagctactcgggaggctgaggcaggagaattgcttaaacctgggaggtggaggctgcagtgagccaagatcgtgccactgcactccagcctgagtgacagagcaagactccgtcaaaaaaaaaaaaaaaaaaaaagaaatgatatctggcccccccttaacactggagccccactcccttctcccatccggcccgagattagggaggattgactgtgtcagggatggcgggtggcctctctcgctgccagggcccttgtcagagcagccaggctggacagacggcctccctcctctccatctgaccggcacctgctgcttcggggcttaggccaccgctccctgtccccagaggagatagccccagatggactggaatgttgtggcatgagagcgcatgtgtgcgatggccccgctgtggtcccctctctgtccctccatctgtatgtgttctgtgtcccttgcatgtgtgcgtgttagagtgagcgcgtatgcatcaactcattgggctcttggctgctcacaaggcaaatttgacttggaaagactttcatctccttggaaccaagacttcctgagtccccctcaccctggccctgttccaccatggttatctgggtattggggaatggaaactttgggggagtgactttttaaagagacacttataatttctactactgcactactgtccattgtgggatgattaaacatggtatttaactgtgcaaaaaaaaaaaaaaaaaaaaaaaaaa

SEQ ID NO: 122 - protein, 1049 aa, Homo sapiens
MEKRLGVKPNPASWILSGYYWQTSAKWLRSLYLFYTCFCFSVLWLSTDASESRCQQGKTQFGVGLRSGGENHLWLLEGTPSLQSCWAACCQDSACHVFWWLEGMCIQADCSRPQSCRAFRTHSSNSMLVFLKKFQTADDLGFLPEDDVPHLLGLGWNWASWRQSPPRAALRPAVSSSDQQSLIRKLQKRGSPSDVVTPIVTQHSKVNDSNELGGLTTSGSAEVHKAITISSPLTTDLTAELSGGPKNVSVQPEISEGLATTPSTQQVKSSEKTQIAVPQPVAPSYSYATPTPQASFQSTSAPYPVIKELVVSAGESVQITLPKNEVQLNAYVLQEPPKGETYTYDWQLITHPRDYSGEMEGKHSQILKLSKLTPGLYEFKVIVEGQNAHGEGYVNVTVKPEPRKNRPPIAIVSPQFQEISLPTTSTVIDGSQSTDDDKIVQYHWEELKGPLREEKISEDTAILKLSKLVPGNYTFSLTVVDSDGATNSTTANLTVNKAVDYPPVANAGPNQVITLPQNSITLFGNQSTDDHGITSYEWSLSPSSKGKVVEMQGVRTPTLQLSAMQEGDYTYQLTVTDTIGQQATAQVTVIVQPENNKPPQADAGPDKELTLPVDSTTLDGSKSSDDQKIISYLWEKTQGPDGVQLENANSSVATVTGLQVGTYVFTLTVKDERNLQSQSSVNVIVKEEINKPPIAKITGNVVITLPTSTAELDGSKSSDDKGIVSYLWTRDEGSPAAGEVLNHSDHHPILFLSNLVEGTYTFHLKVTDAKGESDTDRTTVEVKPDPRKNNLVEIILDINVSQLTERLKGMFIRQIGVLLGVLDSDIIVQKIQPYTEQSTKMVFFVQNEPPHQIFKGHEVAAMLKSELRKQKADFLIFRALEVNTVTCQLNCSDHGHCDSFTKRCICDPFWMENFIKVQLRDGDSNCEWSVLYVIIATFVIVVALGILSWTVICCCKRQKGKPKRKSKYKILDATDQESLELKPTSRAGIKQKGLLLSSSLMHSESELDSDDAIFTWPDREKGKLLHGQNGSVPNGQTPLKARSPREEIL

SEQ ID NO: 123 - DNA, 5692 bp, Homo sapiens
gtttccggccgccgtcgctgtccagggaggctgaggcgagaggtagctgtccgggtggggagcccgcactaccttcttcctcttcctcctcctcctccgggtgaggggagcgaaggttgggggtccccgagcccatggaccaggaggaggcggaggccgccgagagccggggccccgctatgtggccctgagccccgtgtactggttctgcctgtctggagggccatggagaagaggctgggagtcaagccaaatcctgcttcctggattttatcaggatattattggcagacatctgcgaagtggttgagaagcctgtacctgttttatacttgcttttgcttcagcgttctgtggttgtcaacagatgccagtgagagcaggtgccagcaggggaagacacaatttggagttggcctgagatctgggggagaaaatcacctctggcttcttgaaggaaccccctctctccagtcatgttgggctgcctgctgccaggactctgcctgccatgtcttttggtggctagaagggatgtgcattcaggcagactgcagcaggccccagagctgccgggcttttaggacacactcctccaattccatgctggtgtttttaaaaaaattccaaactgcagatgatttgggctttctacctgaagatgatgtaccacatcttctggggctaggttggaactgggcatcttggaggcagagcccacccagagctgcactcagacctgctgtatcttccagtgaccagcagagcttaatcaggaagcttcagaagagaggtagtcccagtgacgtagttacacctatagtgacacagcattctaaagtgaatgactccaacgaattaggtggtctgactaccagtggctctgcagaggtccacaaggcgattacaatttccagtcccctaaccacagacctgactgcagagctgtctggtgggccaaagaatgtatcagtgcaacctgaaatatcagagggtcttgctactacgcccagcactcaacaagtaaaaagttctgagaaaacccagattgctgtcccccagccagtggctccctcctacagttatgctacccctaccccccaggcctctttccagagcacctcagcaccatacccagttataaaggaactggtggtatctgctggagagagtgtccagataaccctgcctaagaatgaagttcaattaaatgcatatgttctccaagaaccacctaaaggagaaacctacacctacgactggcagctgattactcatcctagagactacagtggagaaatggaagggaaacattcccagatcctcaaactatcgaagctcactccaggcctgtatgaattcaaagtgattgtagagggtcaaaatgcccatggggaaggctatgtgaacgtgacagtcaagccagagccccgtaagaatcggccccccattgctattgtgtcacctcagttccaggagatctctttgccaaccacttctacagtcattgatggcagtcaaagcactgatgatgataaaatcgttcagtaccattgggaagaacttaaggggcctctaagagaagagaagatttctgaagatacagccatattaaaactaagtaaactcgtccctgggaactacactttcagcttgactgtagtagactctgatggagctaccaactctactactgcaaacctgacagtgaacaaagctgtggattacccccctgtggccaacgcaggccccaaccaagtgatcaccctgccccaaaactccatcaccctctttgggaaccagagcactgatgatcatggcatcaccagctatgagtggtcactcagcccaagcagcaaagggaaagtggtggagatgcagggtgttagaacaccaaccttacagctctctgcgatgcaagaaggagactacacttaccagctcacagtgactgacacaataggacagcaggccactgctcaagtgactgttattgtgcaacctgaaaacaataagcctcctcaggcagatgcaggcccagataaagagctgacccttcctgtggatagcacaaccctggatggcagcaagagctcagatgatcagaaaattatctcatatctctgggaaaaaacacagggacctgatggggtgcagctcgagaatgctaacagcagtgttgctactgtgactgggctgcaagtggggacctatgtgttcaccttgactgtcaaagatgagaggaacctgcaaagccagagctctgtgaatgtcattgtcaaagaagaaataaacaaaccacctatagccaagataactgggaatgtggtgattaccctacccacgagcacagcagagctggatggctctaagtcctcagatgacaagggaatagtcagctacctctggactcgagatgaggggagcccagcagcaggggaggtgttaaatcactctgaccatcaccctatcctttttctttcaaacctggttgagggaacctacacttttcacctgaaagtgaccgatgcaaagggtgagagtgacacagaccggaccactgtggaggtgaaacctgatcccaggaaaaacaacctggtggagatcatcttggatatcaacgtcagtcagctaactgagaggctgaaggggatgttcatccgccagattggggtcctcctgggggtgctggattccgacatcattgtgcaaaagattcagccgtacacggagcagagcaccaaaatggtattttttgttcaaaacgagcctccccaccagatcttcaaaggccatgaggtggcagcgatgctcaagagtgagctgcggaagcaaaaggcagactttttgatattcagagccttggaagtcaacactgtcacatgtcagctgaactgttccgaccatggccactgtgactcgttcaccaaacgctgtatctgtgaccctttttggatggagaatttcatcaaggtgcagctgagggatggagacagcaactgtgagtggagcgtgttatatgttatcattgctacctttgtcattgttgttgccttgggaatcctgtcttggactgtgatctgttgttgtaagaggcaaaaaggaaaacccaagaggaaaagcaagtacaagatcctggatgccacggatcaggaaagcctggagctgaagccaacctcccgagcaggtaggggccctgggtgccagagcttctaggtctgtgcactctctctgtggaaggctgctgtcactagcccctcctgagtgtgtcactaacagcccactgtgcttgcaaagcattttgttcccttttgcctgatgaagactgagggtcagatttgccctgagctgcactggacaaaatgcctccaggacccacttcgcgtgctacttccgcttggcgggggtgctgggcctgttgttttcctttgcctgggcattctcctcatgtttcccacctggagttccgcttttccaactgccccaggtagtcagggtcagggaccttggacttgtctcttactgctgaccagtctgtgctttatgggcagagatgagacccaggcccgtgtctgccagctgaccacctttcagccagccttgttctcctgtcttcctatctttatcatttggcaagtcctcagcttctgtcagtgtcttagggcagataggagggcatttccttgcacaaacagtaagatgactttgagtgatggcactgggagatcagggcaggtagtaggccttccttcctccgctgggctgggtcacctggcgagggtttcactcatcatggatgccatgggacaggtatcattggtttatgagagctagactctataaagcgattcctaaacactctgcaagtagaactatttttatataaagcatttattaaacacttttcatgcttaaagctttgtgttagggagaggctatgggggtatagggagtcatcagacacaggctgtgctctcagtctagtgagggagaaaagacacacagtagcagaagagaacaggctcacagcagtctggactctgcaccaagcagctcgatccaccaacactgtcaaggtggagactggaggtggtggggcttgaaatgagcccaggaaaccagagcagtgagggcgggcggggcatttcacccaggaatattgagaatgagggcctggaggtgaaatgtgcaaaacccacccctcacactgcagccaaggtttttatcatgttactctgatcatgtttttcaccccctgacattcttcaatgacttactatttctagcacaaaaagctagaacttttggtctggtagatgtggcctttgtgagcttacatcagtttgcttttctggaatctttctctttgctgatctccctcttttctaaacaagttcttctggttcatccagtaatctctttcttttttaaaaatgtggcgacaaggtcttgctctgtcacccaggctggagtgcagtggtatagtcatagctcactgcaacctccagctcctgagctcaagtggtcctcctgcttcagcctcccaaagcagctgggactacaggcatgcaccaccatacccagccctagaaagctctttcttatccctcccttaacctcctcaagttgtgctcacctttctctcacatgcctgggtcggcatttctctcgctgtctcatgattagttatgtttgcctgtctccccacccatcagtgaaatccctgagggcaggggctgtctcattcatctgtggatatggagcgggaccactatgtgccaggccctgtgccagacactgcttatattgtggtgaatcaaacggacagacttcactcttgtgtagcttatgtcagacagacattaagcaaactcacaaatacataaaatatgctcataaaaggcctttatgaagaaaaacacttaagctgagacctggataagtgggagctagccagataaagctgcaggaaatagcattccaggcaaaggaacaaaactggtgcagacccagctgctagaaggagcagagagcatttgaggaggtagaagaaggtgacatgatggacaggttcaccttcccacagagtaaggggtgagtgacccaaggctcaatggatgagcagggtccctgctgaggacttctcttgagtacaatggggagccactgatagctttttaaggggatgaatggtgggatttggtttacatttattattatttgagacagagtctcactcttatcacccaggcaggagtgcagtggtgcgatcaaggcccactgcagtcttgacctcctgggctcaggtgatccttccacctcagcttcctaagtagctgggaccacaggcatgcgccaccatccccaggtttttttgttgttgttgttgttgttttgtatttttggtagagacggggtttcatcatgttgcctaggctgttcttgaactcctgggcttaagtgatctgcctgccttggtctcctaaagtgctgggattataggtgtgagccatggcacccggtcttggtttatattttaaaaagacaactgtgtagctgggcgtggtggtgggtgcctgtaatcccagctactcgagaggccaaggcaggagaattgctagaacctgggggtgtgaaggtttcagtgaactgagatcactccaacctgggcaataaagccagactctgtctc

SEQ ID NO: 124 - protein, 996 aa, Homo sapiens
MEKRLGVKPNPASWILSGYYWQTSAKWLRSLYLFYTCFCFSVLWLSTDASESRCQQGKTQFGVGLRSGGENHLWLLEGTPSLQSCWAACCQDSACHVFWWLEGMCIQADCSRPQSCRAFRTHSSNSMLVFLKKFQTADDLGFLPEDDVPHLLGLGWNWASWRQSPPRAALRPAVSSSDQQSLIRKLQKRGSPSDVVTPIVTQHSKVNDSNELGGLTTSGSAEVHKAITISSPLTTDLTAELSGGPKNVSVQPEISEGLATTPSTQQVKSSEKTQIAVPQPVAPSYSYATPTPQASFQSTSAPYPVIKELVVSAGESVQITLPKNEVQLNAYVLQEPPKGETYTYDWQLITHPRDYSGEMEGKHSQILKLSKLTPGLYEFKVIVEGQNAHGEGYVNVTVKPEPRKNRPPIAIVSPQFQEISLPTTSTVIDGSQSTDDDKIVQYHWEELKGPLREEKISEDTAILKLSKLVPGNYTFSLTVVDSDGATNSTTANLTVNKAVDYPPVANAGPNQVITLPQNSITLFGNQSTDDHGITSYEWSLSPSSKGKVVEMQGVRTPTLQLSAMQEGDYTYQLTVTDTIGQQATAQVTVIVQPENNKPPQADAGPDKELTLPVDSTTLDGSKSSDDQKIISYLWEKTQGPDGVQLENANSSVATVTGLQVGTYVFTLTVKDERNLQSQSSVNVIVKEEINKPPIAKITGNVVITLPTSTAELDGSKSSDDKGIVSYLWTRDEGSPAAGEVLNHSDHHPILFLSNLVEGTYTFHLKVTDAKGESDTDRTTVEVKPDPRKNNLVEIILDINVSQLTERLKGMFIRQIGVLLGVLDSDIIVQKIQPYTEQSTKMVFFVQNEPPHQIFKGHEVAAMLKSELRKQKADFLIFRALEVNTVTCQLNCSDHGHCDSFTKRCICDPFWMENFIKVQLRDGDSNCEWSVLYVIIATFVIVVALGILSWTVICCCKRQKGKPKRKSKYKILDATDQESLELKPTSRAGRGPGCQSF

SEQ ID NO: 125 - DNA, 3446 bp, Homo sapiens
agccaggagtgggcaacgcggcgtgagcagcggcccgaggctcccggagcatcgcgctgggagaagacttcgccgctcggggccgcagcctgtgtgatctcatcgccgccctgtcgtgacttcatcaatgtcgtgttgtgacctggctgcggcgggacagttgggcaaggcgagcatcatggcctcggattgcgagccagctctgaaccaggcagagggccgaaaccccaccctggagcgctacctgggagccctccgtgaggccaagaatgacagcgagcagtttgcagccctgctgctagtgaccaaggcagtcaaagcaggtgacatagatgccaaaactcggcggcggatcttcgatgctgtcggcttcaccttccccaatcgtctcctgaccaccaaggaggcgccggatggctgccctgaccatgttctgcgggctttgggtgtggccctgctggcctgcttctgcagtgaccctgaactggccgcccatccccaagtcctgaacaagattcccattcttagcaccttcctcacagcccggggggacccggacgatgctgcccgccgctccatgattgatgacacctaccagtgcctgacggctgtagcaggcacacccagagggcctcggcacctcattgctggtggcaccgtgtctgccctatgccaggcatacctggggcacggctatggctttgaccaggccctggcactcctggtggggctgctggctgctgccgagacacagtgctggaaggaggcggagcccgacctgctggccgtgttgcggggcctcagtgaggatttccagaaagctgaggatgccagcaagtttgagctctgccagctgctgcccctctttttgcccccgacaaccgtgccccctgaatgctaccgggatctgcaggccgggctggcacgcatcctgggaagcaagctgagctcctggcagcgcaaccctgcactgaagctggcagcccgcctggcacacgcctgcggctccgactggatcccggcgggcagctccgggagcaagttcctggccctgctggtgaatctggcgtgcgtggaagtgcggctggcactggaggagacgggcacggaggtgaaagaggatgtggtgaccgcctgctatgccctcatggagttggggatccaggaatgcactcgctgtgagcagtcactgcttaaggagccacagaaggtgcagctcgtgagcgtcatgaaggaggccataggggctgttatccactacctgctgcaggtggggtcagagaagcagaaggagccctttgtgtttgcctcggtgcggatcctgggtgcctggctggccgaggagacctcatccttgcgtaaggaggtgtgccagctgctgcccttcctcgtccgctatgccaagaccctctacgaggaggccgaggaggccaatgacctttcccagcaggtggccaacctggccatctcccccaccaccccagggcccacctggccaggagacgctctccggctcctcctgcctggctggtgccacctgaccgttgaagatgggccccgggagatcctgatcaaggaaggggccccctcgcttctgtgcaagtatttcctgcagcagtgggaactcacatcccctggccacgacacctcggtgctgcctgacagcgtggagattggcctgcagacctgctgccacatcttcctcaacctcgtggtcaccgcaccggggctgatcaagcgtgacgcctgcttcacatctctaatgaacaccctcatgacgtcgctaccagcactagtgcagcaacagggaaggctgcttctggctgctaatgtggccaccctggggctcctcatggcccggctccttagcacctctccagctcttcagggaacaccagcatcccgagggttcttcgcagctgccatcctcttcctatcacagtcccacgtggcgcgggccaccccgggctcagaccaggcagtgctagccctgtcccctgagtatgagggcatctgggccgacctgcaggagctctggttcctgggcatgcaggccttcaccggctgtgtgcctctgctgccctggctggcccccgctgccctgcgctcccgctggccgcaggagctgctccagctgctaggcagtgtcagccccaactctgtcaagcccgagatggtggccgcctatcagggtgtcctggtggagctggcgcgggccaaccggctgtgccgggaggccatgaggctgcaggcgggcgaggagacggccagccactaccgcatggctgccttggagcagtgcctgtcagagccctgaggggtgtccaccggggacagacccaggggcgggcagagagggaaggagggaggaggcatcttccctgaagcccccaatctggcccccccctccccagacttcctccccaaaacaccccagctttctggcttttctgagggcaagggcatggtgcccacccctcaagtgtaaggaactgcgttccgcccctcaggcccccatgggggcagggatcggcttggaaatcaacgtggttgtccccgccaggccggggaaggttggagcagcccccagggaggggggcactaggtgtcattgtgcccgatgtctggctcccctgcaggagggaggctccagggtaagacagggctggcaggagcagactgcctcagcccatgtgccctgccggccagggcgtgggctcccctcggctgtggtgcctcctctggccccccaggtccacgtcctttaaattggccctttggctcttgcccttggctcccttgggcagacagcaggcttaggccattgatatcgcagttcttcctatcagcttcagtgacccagggtctgaactgcctccatcctagggcaacctggggcagacaggcctggtggggggtggggaaacctccttccacctgagcttgcttgaagggacccagagtctttgggcccagatctttaaacctttgtgtcgtgttgcagcagagtgacgatgggggttggggggttatttattttgcctgtccttatccctgcttggacacctgagcatctgattcctgtccccctggtgccatctggcctggctggagccaggaacaggagggacacttccccagaatccgcatgtttccccagtgattacactccactgccaccgtggtgcctggctttaactcccacccctgctatgactcctctctgcagagacgcgactggcggctccagcagggactacctttcttataaacccagggggaccacacacacacacacacacacacacacacacacacacacacacacacacactcttgatcccttgcttccctcccccagtgcgttctgtgatcgccaagttcaaagctgtgcacatgtggacactcaataaatgttcattggtgacgagaaaaaaaaaaaaaaa

SEQ ID NO: 126 - protein, 729 aa, Homo sapiens
MSCCDLAAAGQLGKASIMASDCEPALNQAEGRNPTLERYLGALREAKNDSEQFAALLLVTKAVKAGDIDAKTRRRIFDAVGFTFPNRLLTTKEAPDGCPDHVLRALGVALLACFCSDPELAAHPQVLNKIPILSTFLTARGDPDDAARRSMIDDTYQCLTAVAGTPRGPRHLIAGGTVSALCQAYLGHGYGFDQALALLVGLLAAAETQCWKEAEPDLLAVLRGLSEDFQKAEDASKFELCQLLPLFLPPTTVPPECYRDLQAGLARILGSKLSSWQRNPALKLAARLAHACGSDWIPAGSSGSKFLALLVNLACVEVRLALEETGTEVKEDVVTACYALMELGIQECTRCEQSLLKEPQKVQLVSVMKEAIGAVIHYLLQVGSEKQKEPFVFASVRILGAWLAEETSSLRKEVCQLLPFLVRYAKTLYEEAEEANDLSQQVANLAISPTTPGPTWPGDALRLLLPGWCHLTVEDGPREILIKEGAPSLLCKYFLQQWELTSPGHDTSVLPDSVEIGLQTCCHIFLNLVVTAPGLIKRDACFTSLMNTLMTSLPALVQQQGRLLLAANVATLGLLMARLLSTSPALQGTPASRGFFAAAILFLSQSHVARATPGSDQAVLALSPEYEGIWADLQELWFLGMQAFTGCVPLLPWLAPAALRSRWPQELLQLLGSVSPNSVKPEMVAAYQGVLVELARANRLCREAMRLQAGEETASHYRMAALEQCLSEP

SEQ ID NO: 127 - DNA, 3378 bp, Homo sapiens
agccaggagtgggcaacgcggcgtgagcagcggcccgaggctcccggagcatcgcgctgggagaagacttcgccgctcggggccgcagcctgttgggcaaggcgagcatcatggcctcggattgcgagccagctctgaaccaggcagagggccgaaaccccaccctggagcgctacctgggagccctccgtgaggccaagaatgacagcgagcagtttgcagccctgctgctagtgaccaaggcagtcaaagcaggtgacatagatgccaaaactcggcggcggatcttcgatgctgtcggcttcaccttccccaatcgtctcctgaccaccaaggaggcgccggatggctgccctgaccatgttctgcgggctttgggtgtggccctgctggcctgcttctgcagtgaccctgaactggccgcccatccccaagtcctgaacaagattcccattcttagcaccttcctcacagcccggggggacccggacgatgctgcccgccgctccatgattgatgacacctaccagtgcctgacggctgtagcaggcacacccagagggcctcggcacctcattgctggtggcaccgtgtctgccctatgccaggcatacctggggcacggctatggctttgaccaggccctggcactcctggtggggctgctggctgctgccgagacacagtgctggaaggaggcggagcccgacctgctggccgtgttgcggggcctcagtgaggatttccagaaagctgaggatgccagcaagtttgagctctgccagctgctgcccctctttttgcccccgacaaccgtgccccctgaatgctaccgggatctgcaggccgggctggcacgcatcctgggaagcaagctgagctcctggcagcgcaaccctgcactgaagctggcagcccgcctggcacacgcctgcggctccgactggatcccggcgggcagctccgggagcaagttcctggccctgctggtgaatctggcgtgcgtggaagtgcggctggcactggaggagacgggcacggaggtgaaagaggatgtggtgaccgcctgctatgccctcatggagttggggatccaggaatgcactcgctgtgagcagtcactgcttaaggagccacagaaggtgcagctcgtgagcgtcatgaaggaggccataggggctgttatccactacctgctgcaggtggggtcagagaagcagaaggagccctttgtgtttgcctcggtgcggatcctgggtgcctggctggccgaggagacctcatccttgcgtaaggaggtgtgccagctgctgcccttcctcgtccgctatgccaagaccctctacgaggaggccgaggaggccaatgacctttcccagcaggtggccaacctggccatctcccccaccaccccagggcccacctggccaggagacgctctccggctcctcctgcctggctggtgccacctgaccgttgaagatgggccccgggagatcctgatcaaggaaggggccccctcgcttctgtgcaagtatttcctgcagcagtgggaactcacatcccctggccacgacacctcggtgctgcctgacagcgtggagattggcctgcagacctgctgccacatcttcctcaacctcgtggtcaccgcaccggggctgatcaagcgtgacgcctgcttcacatctctaatgaacaccctcatgacgtcgctaccagcactagtgcagcaacagggaaggctgcttctggctgctaatgtggccaccctggggctcctcatggcccggctccttagcacctctccagctcttcagggaacaccagcatcccgagggttcttcgcagctgccatcctcttcctatcacagtcccacgtggcgcgggccaccccgggctcagaccaggcagtgctagccctgtcccctgagtatgagggcatctgggccgacctgcaggagctctggttcctgggcatgcaggccttcaccggctgtgtgcctctgctgccctggctggcccccgctgccctgcgctcccgctggccgcaggagctgctccagctgctaggcagtgtcagccccaactctgtcaagcccgagatggtggccgcctatcagggtgtcctggtggagctggcgcgggccaaccggctgtgccgggaggccatgaggctgcaggcgggcgaggagacggccagccactaccgcatggctgccttggagcagtgcctgtcagagccctgaggggtgtccaccggggacagacccaggggcgggcagagagggaaggagggaggaggcatcttccctgaagcccccaatctggcccccccctccccagacttcctccccaaaacaccccagctttctggcttttctgagggcaagggcatggtgcccacccctcaagtgtaaggaactgcgttccgcccctcaggcccccatgggggcagggatcggcttggaaatcaacgtggttgtccccgccaggccggggaaggttggagcagcccccagggaggggggcactaggtgtcattgtgcccgatgtctggctcccctgcaggagggaggctccagggtaagacagggctggcaggagcagactgcctcagcccatgtgccctgccggccagggcgtgggctcccctcggctgtggtgcctcctctggccccccaggtccacgtcctttaaattggccctttggctcttgcccttggctcccttgggcagacagcaggcttaggccattgatatcgcagttcttcctatcagcttcagtgacccagggtctgaactgcctccatcctagggcaacctggggcagacaggcctggtggggggtggggaaacctccttccacctgagcttgcttgaagggacccagagtctttgggcccagatctttaaacctttgtgtcgtgttgcagcagagtgacgatgggggttggggggttatttattttgcctgtccttatccctgcttggacacctgagcatctgattcctgtccccctggtgccatctggcctggctggagccaggaacaggagggacacttccccagaatccgcatgtttccccagtgattacactccactgccaccgtggtgcctggctttaactcccacccctgctatgactcctctctgcagagacgcgactggcggctccagcagggactacctttcttataaacccagggggaccacacacacacacacacacacacacacacacacacacacacacacacacactcttgatcccttgcttccctcccccagtgcgttctgtgatcgccaagttcaaagctgtgcacatgtggacactcaataaatgttcattggtgacgagaaaaaaaaaaaaaaa

SEQ ID NO: 128 - protein, 712 aa, Homo sapiens
MASDCEPALNQAEGRNPTLERYLGALREAKNDSEQFAALLLVTKAVKAGDIDAKTRRRIFDAVGFTFPNRLLTTKEAPDGCPDHVLRALGVALLACFCSDPELAAHPQVLNKIPILSTFLTARGDPDDAARRSMIDDTYQCLTAVAGTPRGPRHLIAGGTVSALCQAYLGHGYGFDQALALLVGLLAAAETQCWKEAEPDLLAVLRGLSEDFQKAEDASKFELCQLLPLFLPPTTVPPECYRDLQAGLARILGSKLSSWQRNPALKLAARLAHACGSDWIPAGSSGSKFLALLVNLACVEVRLALEETGTEVKEDVVTACYALMELGIQECTRCEQSLLKEPQKVQLVSVMKEAIGAVIHYLLQVGSEKQKEPFVFASVRILGAWLAEETSSLRKEVCQLLPFLVRYAKTLYEEAEEANDLSQQVANLAISPTTPGPTWPGDALRLLLPGWCHLTVEDGPREILIKEGAPSLLCKYFLQQWELTSPGHDTSVLPDSVEIGLQTCCHIFLNLVVTAPGLIKRDACFTSLMNTLMTSLPALVQQQGRLLLAANVATLGLLMARLLSTSPALQGTPASRGFFAAAILFLSQSHVARATPGSDQAVLALSPEYEGIWADLQELWFLGMQAFTGCVPLLPWLAPAALRSRWPQELLQLLGSVSPNSVKPEMVAAYQGVLVELARANRLCREAMRLQAGEETASHYRMAALEQCLSEP

SEQ ID NO: 129 - DNA, 3718 bp, Homo sapiens
agccaggagtgggcaacgcggcgtgagcagcggcccgaggctcccggagcatcgcgctgggagaagacttcgccgctcggggccgcagcctggtgagctcagcccccttcgggccctcccctgcatcccagccggggcctctccgagccggcgctgatcgatgccgacacaccccggggaccctatcgcgactccatcgcgccatatcgcgacaccatcgtgccctgtcgagactccattttgtcacagcccttttcaatatatatcttttttttttttaatttgccctgtcatctttgggggctgtctcccatgtcgtgattttgacgtgatctctccgtgacatcaccgcgccatcgtgaagtgtgatctcatcgccgccctgtcgtgacttcatcaatgtcgtgttgtgacctggctgcggcgggacagttgggcaaggcgagcatcatggcctcggattgcgagccagctctgaaccaggcagagggccgaaaccccaccctggagcgctacctgggagccctccgtgaggccaagaatgacagcgagcagtttgcagccctgctgctagtgaccaaggcagtcaaagcaggtgacatagatgccaaaactcggcggcggatcttcgatgctgtcggcttcaccttccccaatcgtctcctgaccaccaaggaggcgccggatggctgccctgaccatgttctgcgggctttgggtgtggccctgctggcctgcttctgcagtgaccctgaactggccgcccatccccaagtcctgaacaagattcccattcttagcaccttcctcacagcccggggggacccggacgatgctgcccgccgctccatgattgatgacacctaccagtgcctgacggctgtagcaggcacacccagagggcctcggcacctcattgctggtggcaccgtgtctgccctatgccaggcatacctggggcacggctatggctttgaccaggccctggcactcctggtggggctgctggctgctgccgagacacagtgctggaaggaggcggagcccgacctgctggccgtgttgcggggcctcagtgaggatttccagaaagctgaggatgccagcaagtttgagctctgccagctgctgcccctctttttgcccccgacaaccgtgccccctgaatgctaccgggatctgcaggccgggctggcacgcatcctgggaagcaagctgagctcctggcagcgcaaccctgcactgaagctggcagcccgcctggcacacgcctgcggctccgactggatcccggcgggcagctccgggagcaagttcctggccctgctggtgaatctggcgtgcgtggaagtgcggctggcactggaggagacgggcacggaggtgaaagaggatgtggtgaccgcctgctatgccctcatggagttggggatccaggaatgcactcgctgtgagcagtcactgcttaaggagccacagaaggtgcagctcgtgagcgtcatgaaggaggccataggggctgttatccactacctgctgcaggtggggtcagagaagcagaaggagccctttgtgtttgcctcggtgcggatcctgggtgcctggctggccgaggagacctcatccttgcgtaaggaggtgtgccagctgctgcccttcctcgtccgctatgccaagaccctctacgaggaggccgaggaggccaatgacctttcccagcaggtggccaacctggccatctcccccaccaccccagggcccacctggccaggagacgctctccggctcctcctgcctggctggtgccacctgaccgttgaagatgggccccgggagatcctgatcaaggaaggggccccctcgcttctgtgcaagtatttcctgcagcagtgggaactcacatcccctggccacgacacctcggtgctgcctgacagcgtggagattggcctgcagacctgctgccacatcttcctcaacctcgtggtcaccgcaccggggctgatcaagcgtgacgcctgcttcacatctctaatgaacaccctcatgacgtcgctaccagcactagtgcagcaacagggaaggctgcttctggctgctaatgtggccaccctggggctcctcatggcccggctccttagcacctctccagctcttcagggaacaccagcatcccgagggttcttcgcagctgccatcctcttcctatcacagtcccacgtggcgcgggccaccccgggctcagaccaggcagtgctagccctgtcccctgagtatgagggcatctgggccgacctgcaggagctctggttcctgggcatgcaggccttcaccggctgtgtgcctctgctgccctggctggcccccgctgccctgcgctcccgctggccgcaggagctgctccagctgctaggcagtgtcagccccaactctgtcaagcccgagatggtggccgcctatcagggtgtcctggtggagctggcgcgggccaaccggctgtgccgggaggccatgaggctgcaggcgggcgaggagacggccagccactaccgcatggctgccttggagcagtgcctgtcagagccctgaggggtgtccaccggggacagacccaggggcgggcagagagggaaggagggaggaggcatcttccctgaagcccccaatctggcccccccctccccagacttcctccccaaaacaccccagctttctggcttttctgagggcaagggcatggtgcccacccctcaagtgtaaggaactgcgttccgcccctcaggcccccatgggggcagggatcggcttggaaatcaacgtggttgtccccgccaggccggggaaggttggagcagcccccagggaggggggcactaggtgtcattgtgcccgatgtctggctcccctgcaggagggaggctccagggtaagacagggctggcaggagcagactgcctcagcccatgtgccctgccggccagggcgtgggctcccctcggctgtggtgcctcctctggccccccaggtccacgtcctttaaattggccctttggctcttgcccttggctcccttgggcagacagcaggcttaggccattgatatcgcagttcttcctatcagcttcagtgacccagggtctgaactgcctccatcctagggcaacctggggcagacaggcctggtggggggtggggaaacctccttccacctgagcttgcttgaagggacccagagtctttgggcccagatctttaaacctttgtgtcgtgttgcagcagagtgacgatgggggttggggggttatttattttgcctgtccttatccctgcttggacacctgagcatctgattcctgtccccctggtgccatctggcctggctggagccaggaacaggagggacacttccccagaatccgcatgtttccccagtgattacactccactgccaccgtggtgcctggctttaactcccacccctgctatgactcctctctgcagagacgcgactggcggctccagcagggactacctttcttataaacccagggggaccacacacacacacacacacacacacacacacacacacacacacacacacactcttgatcccttgcttccctcccccagtgcgttctgtgatcgccaagttcaaagctgtgcacatgtggacactcaataaatgttcattggtgacgagaaaaaaaaaaaaaaa

SEQ ID NO: 130 - protein, 729 aa, Homo sapiens; identical to SEQ ID NO: 126

SEQ ID NO: 131 - DNA, 2201 bp, Homo sapiens
gtgcccgtccgtcctgcctccatggacccgcccgggaacggccaccgctgaggaccccacgcccactaggatcccggctgggtcgcacccagctaccgcaccgtgacctccgcgggctgtgccggctcccggcgcctctgcccgcagcgctcgccgtcgggctagggctccgccgccgccacgcctcgcgcccggcactcaccgccccatgctggtgcacacctactccgccatggagcgccccgacgggctgggagcagctgccggcggggcccgcctgtcgtctctgccccaggcggcctacgggccggcgcccccgctctgccacacgccggccgccacagctgccgccgaattccagccgccctacttcccgccgccctacccgcagccaccgctgccctacggtcaggcgcccgacgccgccgcagcctttccccacctggcaggggacccatatggcggcctggcgcccctggcgcagccgcagcctcctcaggccgcctgggccgcgccccgcgcagccgcccgcgcccacgaggagcctcccggcctgctggcaccgcccgcccgcgccctgggccttgacccgcgccgtgactatgccactgccgtgccccggctcctgcacggcctggccgacggcgcgcacggcctggcagacgcacctctcggccttccggggctggcggcggcccccggtctggaggacctgcaggcaatggacgagccgggaatgagcctcctagaccagtccgtgatcaagaaagtgcccatcccctccaaagccagcagcctctcagccctctccttggccaaagacagcctggtgggcggcatcacaaatcctggtgaggtcttctgctccgtgcccggccggctttcactgctcagctcaacgtccaagtacaaggtgacggtgggggaggtgcagcggcgactctcgcctcccgagtgcctcaacgcctccctcctggggggtgtcctccgcagggccaagtccaaaaatgggggccggtgtttgcgggaacggttagagaagattgggctcaacctgccagctggccgtcgcaaggccgccaatgtgacgctgctgacttcgctagtggaaggagaggccgtgcacctggcccgagacttcggttacgtctgtgagacggagttcccagccaaggcagctgccgagtacctgtgccgacagcacgctgacccgggggagctgcacagccgcaagagcatgctgctggctgccaagcagatctgcaaggagtttgcagacttgatggctcaggaccgctcaccgctgggcaacagccgcccagcactcatcctggagcccggagtacagagctgcttgacacactttagcctcatcacccatggcttcggtgggcctgccatctgtgctgccctcactgccttccagaactatttgctggagtcactcaaggggctggacaagatgtttctaagcagtgtgggcagtgggcatggtgaaaccaaggcttcggagaaggatgccaagcatcggaaataactgcttctcccaccccatccctaaggggctcccaggccctgaaatagggacttagctcttgggggtgggcctggaaggactgaaaggtgggattagagtcaggccagaaagagaacattcatccagagatcccagagttggggatctggcttggagtaagggagggtggcctctctgtggtggtgtgttggtaagttaagggcccaggtatttgtctcatgtgtgcaattttctgacctttgatggttgagaagggtttggacagaaaattgacatgaaaagatctggctcatggggcagagccctttccattagcgtggctgggtggccgtgggtgcttctagaggccaaagcctttgtgtttttcactggtggcaggaggaaaattgataaatcagaggtgctactgaggagttggtgcccctcattccagaatctcctacccccagaaaaggggtgctggaaggaggccccagtggactctttgtacccttcctactctcagagagaagtgggcaggaggggtcctcaaggaacaaagaagataaagcacaaatcgcagaacttgaatccaggctgctgctcatcatagtcctgttgctgtctgtcctatttatttatgtatgttgtaattaaatttgaaattttaaaaaaaaaaaaaaaa

SEQ ID NO: 132 - protein, 434 aa, Homo sapiens
MERPDGLGAAAGGARLSSLPQAAYGPAPPLCHTPAATAAAEFQPPYFPPPYPQPPLPYGQAPDAAAAFPHLAGDPYGGLAPLAQPQPPQAAWAAPRAAARAHEEPPGLLAPPARALGLDPRRDYATAVPRLLHGLADGAHGLADAPLGLPGLAAAPGLEDLQAMDEPGMSLLDQSVIKKVPIPSKASSLSALSLAKDSLVGGITNPGEVFCSVPGRLSLLSSTSKYKVTVGEVQRRLSPPECLNASLLGGVLRRAKSKNGGRCLRERLEKIGLNLPAGRRKAANVTLLTSLVEGEAVHLARDFGYVCETEFPAKAAAEYLCRQHADPGELHSRKSMLLAAKQICKEFADLMAQDRSPLGNSRPALILEPGVQSCLTHFSLITHGFGGPAICAALTAFQNYLLESLKGLDKMFLSSVGSGHGETKASEKDAKHRK

SEQ ID NO: 133 - DNA, 850 bp, Homo sapiens
ctgcaggcgtcgcgccaatcttcgctctgaggtgctgtctcaccggtgagacctggaagcgggcgagtctcgtgctgtgtcggacctgcagcccctggccttccgccaccatggagtacctcatcggtatccaaggccccgactatgttcttgtcgcctccgaccgggtggccgccagcaatattgtccagatgaaggacgatcatgacaagatgtttaagatgagtgaaaagatattactcctgtgtgttggagaggctggagacactgtacagtttgcagaatatattcagaaaaacgtgcaactttataagatgcgaaatggatatgaattgtctcccacggcagcagctaacttcacacgccgaaacctggctgactgtcttcggagtcggaccccatatcatgtgaacctcctcctggctggctatgatgagcatgaagggccagcgctgtattacatggactacctggcagccttggccaaggccccttttgcagcccacggctatggtgccttcctgactctcagtatcctcgaccgatactacacaccgactatctcacgtgagagggcagtggaactccttaggaaatgtctggaggagctccagaaacgcttcatcctgaatctgccaaccttcagtgttcgaatcattgacaaaaatggcatccatgacctggataacatttccttccccaaacagggctcctaacatcatgtcctccctcccacttgccagggaacttttttttgatgggctcctttatttttttctactcttttcaggcgcactcttgataaatggttaattcagaataaaggtgactatggatataattgaaaaaa

SEQ ID NO: 134 - protein, 201 aa, Homo sapiens
MEYLIGIQGPDYVLVASDRVAASNIVQMKDDHDKMFKMSEKILLLCVGEAGDTVQFAEYIQKNVQLYKMRNGYELSPTAAANFTRRNLADCLRSRTPYHVNLLLAGYDEHEGPALYYMDYLAALAKAPFAAHGYGAFLTLSILDRYYTPTISRERAVELLRKCLEELQKRFILNLPTFSVRIIDKNGIHDLDNISFPKQGS

SEQ ID NO: 135 - DNA, 2934 bp, Homo sapiens
aggacgcacagagccccgcggctaccgccttaggggttgtcccggcggtggggaagccattgaggagtttaacgccggaaggtggtgactaatcagatttcacttgaaaatggcacggtgtctgcagcgaggctaactgatgggaagggcccagcgaatgccaataggagagagcaccggacctggaaggcctgggtcaacgcggccccgcgcgggggcgaagcggttccggcgcaggggcctggcgcggggctccgcggaaaaccgaaccggcccacgtgggaccggtcgctccgccctgctgcgcagacgccgcctgactccgcagtccgggactggggctgggcgcgctgcccgggagccccgcacccacgcctggaccgcggagacgcccaggccgaggaacccccagcccagggactagacaccaccagggccgggcggagccagagccagacgcgccggagcgggcgcctctacgccgctagatgttcgccatccagccagggctagctgaggggggccaattcctgggggacccacctcctggattatgtcagcccgagctccaaccagacagcaactccaacttcatggcaagtgccaaggatgctaacgagaattggcatgggatgccaggcagagtggaacctatcctgaggaggagctcctctgagtcaccctctgacaaccaagccttccaggcccctggatcccctgaggaaggggtgcgcagccccccagagggggcagagattcccggggctgagcctgagaagatgggtggtgctggcacagtctgctcccctctggaggacaacggctatgccagcagttccctgagcattgacagccgtagcagcagtcctgagcctgcctgtgggaccccgcgaggccctggccctcccgatccccttctgccctcagtggcccaggctgtgcagcacttacaagtccaggagcgctacaaagagcaggagaaggaaaagcaccacgtgcacttggtgatgtaccgtcgcctggcactgctccagtggatccggggcctgcagcatcagttgattgaccagcaggcccgactgcaggagagcttcgacaccatcctagacaaccggaaggagcttattcgctgtctccagcagagggcagcaccatccaggccccaggaccaggcctaagggtgtgcctccacaagtgtgcaagggtatatgtatatatttgcaggcatgtgtgaggcgcactagtaagtacataatttgctggcatgattgcaggtaggcatgagtgtgtatgtgctaacatgtaggctggtgtgtgtaggcatgtgtgaataagcatgtataaatgagcttaagtgtgctgtgtgcacatgtgtacacacagctaatttatctgcagacctatatgtgagcatgtaagagtgaacatatgtgtgtgtgtgtagtatgtaagaatgaggaactcggtatgtgcatgtgtagacaggtacccagcagtgtgtgtatatgcgcatgagtgaggatgtataggcagaagatgtgtgtgtctatgagtgagtttgagtgtgcaggcttgtattaggtgtatgtgaggaagcccttgtgtgtgcaggggtgcacatgtttggccacaggcatgggaggtgtatgttaggagcatgtgtgtttgtaggcagactcatgagcaggtgtgtgcaaatacatatccagctgcactgtgggtgtccacccacaccttgtgttcctcatggcctaccccagcctttcttctccactgggtcccactgttccctggagacagagggctagcatgctgtcatttatctgaaggttgtggctgacccattctcctgggatttcccaggccacctctcctttccctttccctcacttaacccagacttgctcagctgaggctattgtccctgatgttggctttacttgtaggaggtttagtggctgctctggcctgccatggaattttggctgcaattttggcagtgtgtggagaactggtatcaggaaagggaaccaggagtagtgatgaagatgatggtggggatggggacagaggacataggggactgtccctcttgaactctgcctttgggcacatgggagatggggacaggaaagatgataacagtggaaccctgtgaagaataggagaatgggaattctaaaataccagttcccaaacaaaccatctctccattggaaaaggagctgttgcaaaccgtgttcatttaagcttctgatgaaaagcaatgtatgtttataagcttgcaagtaacagacaagatgttccaaggccgatgaggaaaatatcgcttccctgtctctgcctctaccttgctgtgcctctctggctttagcagcattggatgttgaattggtttggttcatttctctgaagtcggactgtcaggaggagccagaggttggctttctgggatgtgaaggggacagtgtcagcctaagcctctggagatgcttaggatgctgaattttaaccccttctttcactgcatggcccttcaaacagggattggcaggctccgcgagttacagagtgggtgagtcttggagagaaccaacgactaaggtagcttagctctctgctttgttcttgggagccaagagaatgcaagatcctggtgggtgagcagtggtatgaagaggggacactggtgggtgaacagtggcatggaagtcactgatgcagcctctggccctcagtctccctatcggcaaagtggggggctcttcctatctctaaagagtttcatccctgacaggtggatgggtgaaagatccagagagtgggggtgaggggtgggccctgaagactttttgtctgtagctcttgcatattgagtgtataaacccggcttctggaccaacccaagatgaataaactggggcagaaaattac

SEQ ID NO: 136 - protein, 229 aa, Homo sapiens
MFAIQPGLAEGGQFLGDPPPGLCQPELQPDSNSNFMASAKDANENWHGMPGRVEPILRRSSSESPSDNQAFQAPGSPEEGVRSPPEGAEIPGAEPEKMGGAGTVCSPLEDNGYASSSLSIDSRSSSPEPACGTPRGPGPPDPLLPSVAQAVQHLQVQERYKEQEKEKHHVHLVMYRRLALLQWIRGLQHQLIDQQARLQESFDTILDNRKELIRCLQQRAAPSRPQDQA

SEQ ID NO: 137 - DNA, 4379 bp, Homo sapiens
gacggcgggagccgctgctctccggctgagggaatcagagacagctccgtccctagtggagcgcaggggaggcagaagtcatgacaggcgaggtgggttctgaggttcacctagaaatcaatgacccaaacgtcatttcacaagaggaagcagatagtccttcagatagtggacagggcagctatgaaacaattggacccttgagtgaaggagattcagatgaagagatatttgtaagtaagaagttgaaaaacaggaaggttctacaagacagtgattccgaaacagaggacacaaatgcctctccagagaaaactacctatgacagtgccgaggaggaaaataaagagaatttatatgctgggaaaaatacaaaaatcaaaaggatttacaaaactgtggcagacagtgatgaaagttacatggaaaagtctttgtatcaggaaaatcttgaagcgcaagtgaaaccttgcttagagctgagtcttcagtctggaaactctacagactttaccactgacagaaagagttccaaaaagcacatacatgataaagaaggaactgcaggaaaagcaaaagtaaaatcaaaaagaagacttgagaaagaggagagaaaaatggaaaaaattagacagctaaaaaagaaggaaacaaaaaaccaggaagatgatgtagaacagccatttaatgacagtggctgtcttcttgtggataaagacctttttgaaactgggttggaggatgaaaataactctccattggaagatgaagagtcattagaatcaataagagcagctgtaaaaaacaaagtaaaaaagcacaagaaaaaagaaccatctttggagagtggggtccattcatttgaggaaggaagtgagttatcaaaaggaaccacgaggaaggaaagaaaggcagccagattaagtaaagaagcattaaaacaactgcatagtgagactcagcgccttattcgagagtctgcactgaaccttccatatcatatgcctgagaataaaaccattcatgatttcttcaaacgtaaaccccggcccacttgccacggaaatgccatggcactattgaagtcatctaaatatcagtcaagccatcacaaagaaatcatagacactgcaaatactactgaaatgaacagtgatcaccatagtaaaggttctgagcagacaacaggtgcagaaaatgaagtggaaactaatgcactccctgtagtttcaaaggaaacccagatcattactggatcagatgagtcttgcaggaaggatttggtaaaaaatgaagagctagaaattcaggagaaacagaagcagagtgacattagaccttcacctggggacagctcagtgttgcaacaggaatccaacttcctcgggaacaatcacagtgaggaatgtcaggttggagggcttgtagcatttgaacctcatgccctggagggtgaaggcccccaaaatccagaagaaacagatgagaaagtggaagagcctgagcagcaaaataaatcatcagcagttgggccacctgaaaaagtgagacggtttactctggatagacttaagcaactgggagtagatgtttccattaaaccacggctaggtgctgatgaagattcctttgtgatacttgaacctgaaaccaacagagaactggaagccttgaagcagcgtttctggaagcatgctaatccagcagccaaacccagggctggtcagacagtgaatgtgaacgtcatagtgaaagacatgggcactgatggaaaggaagagctaaaagcagatgtggtacctgtgactttagcacctaagaagttggatggagcaagccacacaaaaccaggtgaaaagcttcaggtgttaaaagctaaactgcaagaagcaatgaaactccgaaggtttgaggagcgccagaagcgccaagcactgtttaaattagataatgaagatgggtttgaggaagaggaggaggaagaggaagaaatgacagatgagtctgaggaagatggagaagagaaggtagagaaagaagagaaagaggaagaactagaggaagaggaggagaaagaagaggaggaggaagaagaaggaaatcaggagactgcagaattccttcttagtagtgaagaaatagaaacaaaagatgaaaaagaaatggataaagaaaataatgatggcagtagtgaaattggcaaggcagttggcttcctctctgttcccaagtctctctcatcagattctactttacttctgtttaaggacagctcttccaagatgggttactttcctactgaagaaaaatcagaaacagatgaaaactcaggcaagcagcctagcaaactggatgaggatgattcatgttcattgctaacaaaggagagcagccacaatagcagctttgagctgattggctccacgattccatcctatcagccttgcaacagacaaacaggccgtgggaccagttttttccctacagcaggaggattcagatctccttcccctgggctatttcgagccagtttggtcagctcagcttctaagagttcagggaaactgtctgagccttcacttcccatagaggattcccaggatctgtataacgcctccccagagcctaagacacttttcctaggagcaggagacttccagttctgtttagaagatgacactcagagccaactgttggatgcagatgggttcttaaatgttagaaaccacaggaatcagtaccaagctttgaagcctcgattgccattggccagtatggatgagaatgccatggatgccaacatggatgagctgttggatttgtgtactggaaagttcacatctcaggctgaaaaacatctacccaggaagagtgacaagaaagagaacatggaggaacttctgaacctttgttcaggaaaattcacttctcaggatgcctccactccagcctcatcagagttaaataaacaggagaaggagagcagcatgggtgatccaatggaagaagcacttgctctttgctcaggctcttttcccacagacaaggaagaggaagacgaggaggaggaatttggagactttcggcttgtttcaaatgataatgagtttgatagtgatgaggatgaacacagtgactctggtaatgatctggcactggaagaccatgaagatgatgatgaagaagaactcctgaagcgatctgagaagttgaaaaggcaaatgaggttgaggaaatacctggaggatgaggcagaggtgtcaggaagtgatgtgggaagcgaagatgagtatgatggggaagaaattgatgaatatgaagaggacgtaattgatgaagtacttccttctgatgaggaactgcagagtcaaatcaagaaaatacacatgaaaactatgttggatgatgataagcgacagctacgtttataccaagagaggtaccttgctgatggggatctgcacagcgatggtcctgggcgaatgaggaagtttcgatggaaaaacatagatgatgcttcccagatggacttgttccacagagactctgatgatgatcagactgaagaacagcttgatgagtcagaagccaggtggaggaaggagcgaattgaacgagagcagtggcttcgggacatggcacagcaggggaaaattacagctgaagaagaagaagaaattggggaggacagtcagtttatgatactggccaagaaagttacagccaaagcactgcagaagaatgccagtcgccctatggttattcaggaatcaaagtctttgctcagaaatccttttgaagccatcagaccaggaagtgctcaacaggtgaagacaggctcactgctaaaccagcccaaagctgtgcttcagaaactggctgctctctctgaccataaccccagtgctcctcgaaattcaagaaactttgtctttcatacactttctcctgtcaaggctgaggcggcaaaggaatcgtctaagtctcaggtaaagaaaaggggtccatctttcatgacttctccttcacctaagcacctcaaaacagatgatagcacttcaggattgacgcgaagcatcttcaaatatttggagagctaacaccatcaaaggtgccaaaatctacattgagactgctttgagaagtttctagcactgaaagttggaattgacactccagccaatgatccttccttctttcataatcaatgcaataagattgcagacagaaattccagtgatttctactgcacagctctggacatctcttttcctagtattattccctgaattggccactgatttcaattctgcagtatttacaacatcaacaactcatggaatacttgggtgaggtttcctttttttttttttttttaa

SEQ ID NO: 138 - protein, 1339 aa, Homo sapiens
MTGEVGSEVHLEINDPNVISQEEADSPSDSGQGSYETIGPLSEGDSDEEIFVSKKLKNRKVLQDSDSETEDTNASPEKTTYDSAEEENKENLYAGKNTKIKRIYKTVADSDESYMEKSLYQENLEAQVKPCLELSLQSGNSTDFTTDRKSSKKHIHDKEGTAGKAKVKSKRRLEKEERKMEKIRQLKKKETKNQEDDVEQPFNDSGCLLVDKDLFETGLEDENNSPLEDEESLESIRAAVKNKVKKHKKKEPSLESGVHSFEEGSELSKGTTRKERKAARLSKEALKQLHSETQRLIRESALNLPYHMPENKTIHDFFKRKPRPTCHGNAMALLKSSKYQSSHHKEIIDTANTTEMNSDHHSKGSEQTTGAENEVETNALPVVSKETQIITGSDESCRKDLVKNEELEIQEKQKQSDIRPSPGDSSVLQQESNFLGNNHSEECQVGGLVAFEPHALEGEGPQNPEETDEKVEEPEQQNKSSAVGPPEKVRRFTLDRLKQLGVDVSIKPRLGADEDSFVILEPETNRELEALKQRFWKHANPAAKPRAGQTVNVNVIVKDMGTDGKEELKADVVPVTLAPKKLDGASHTKPGEKLQVLKAKLQEAMKLRRFEERQKRQALFKLDNEDGFEEEEEEEEEMTDESEEDGEEKVEKEEKEEELEEEEEKEEEEEEEGNQETAEFLLSSEEIETKDEKEMDKENNDGSSEIGKAVGFLSVPKSLSSDSTLLLFKDSSSKMGYFPTEEKSETDENSGKQPSKLDEDDSCSLLTKESSHNSSFELIGSTIPSYQPCNRQTGRGTSFFPTAGGFRSPSPGLFRASLVSSASKSSGKLSEPSLPIEDSQDLYNASPEPKTLFLGAGDFQFCLEDDTQSQLLDADGFLNVRNHRNQYQALKPRLPLASMDENAMDANMDELLDLCTGKFTSQAEKHLPRKSDKKENMEELLNLCSGKFTSQDASTPASSELNKQEKESSMGDPMEEALALCSGSFPTDKEEEDEEEEFGDFRLVSNDNEFDSDEDEHSDSGNDLALEDHEDDDEEELLKRSEKLKRQMRLRKYLEDEAEVSGSDVGSEDEYDGEEIDEYEEDVIDEVLPSDEELQSQIKKIHMKTMLDDDKRQLRLYQERYLADGDLHSDGPGRMRKFRWKNIDDASQMDLFHRDSDDDQTEEQLDESEARWRKERIEREQWLRDMAQQGKITAEEEEEIGEDSQFMILAKKVTAKALQKNASRPMVIQESKSLLRNPFEAIRPGSAQQVKTGSLLNQPKAVLQKLAALSDHNPSAPRNSRNFVFHTLSPVKAEAAKESSKSQVKKRGPSFMTSPSPKHLKTDDSTSGLTRSIFKYLES

SEQ ID NO: 139 - DNA, 4758 bp, Homo sapiens
gagccggagccgggtccctgtccccgggccgggcgccgccgccgccccctgcccagcgcccgcgtctccgcggcgccaccccagcgccaatattccggagatcaagcgttacgcggcggcggcggcggcggcggcggggcccggagcgggaggcgccggggaccggggcgaggcggcccccgccgccgccatggaggcgctgggacccggacctccggctagcctgtttcagccacctcgtcgtcctggccttggaactgttggaaaaccaattcgactgttagccaatcattttcaggttcagattcctaaaatagatgtgtatcactatgatgtggatattaagcctgaaaaacggcctcgtagagtcaacagggaggtagtagatacaatggtgcggcacttcaagatgcaaatatttggtgatcggcagcctgggtatgatggcaaaagaaacatgtacacagcacatccactaccaattggacgggatagggttgatatggaggtgactcttccaggcgagggtaaagaccaaacatttaaagtgtctgttcagtgggtgtcagttgtgagccttcagttgcttttagaagctttggctgggcacttgaatgaagtcccagatgactcagtacaagcacttgatgttatcacaagacaccttccctccatgaggtacaccccagtgggccgttcctttttctcacccccggaaggttactaccaccctctgggagggggcagggaggtctggtttggttttcatcagtctgtgagacctgccatgtggaatatgatgctcaacattgatgtatctgcaactgctttctaccgggctcagcctatcattgagttcatgtgtgaggttttagacattcagaacatcaatgaacagaccaaacctctaacagactcccagcgtgtcaaatttaccaaagaaatcagaggtctcaaagttgaggtgacccactgtggacagatgaaacgaaaataccgagtttgtaatgtgactagacggccagccagtcatcaaacttttcctttgcagctagaaaacggtcaagctatggaatgtacagtagctcaatattttaagcaaaagtatagtctgcaactgaaatacccccatcttccctgtctccaagtgggacaagaacaaaagcatacatacttgccactcgaggtctgtaatatagtggcaggacagcgatgtatcaagaagctcacagacaatcagacttccacaatgatcaaagctacagcaagatctgctcctgacagacaggaagagatcagtagactggtgaagagcaacagtatggtgggtggacctgatccataccttaaagaatttggtattgttgtccacaatgaaatgacagagctcacaggcagggtacttccagcaccaatgctgcaatatggaggccggaataaaacagtagccacacccaaccagggtgtctgggacatgcgaggaaagcagttttatgctggcattgaaattaaagtttgggcagttgcttgttttgcacctcagaaacaatgtagggaagatttactaaagagtttcactgaccagctgcgtaaaatctctaaggatgcaggaatgcccatccagggtcagccatgtttctgcaagtatgcacaaggtgcagacagtgtggagcctatgtttaaacatctgaaaatgacttatgtgggcctacagctaatagtggttatcctgcctggaaagacaccagtatatgcggaggtgaaacgtgttggagatacccttctaggtatggccacacagtgtgtccaggtaaaaaatgtagtgaagacctcacctcaaaccctttccaatctttgcctgaagataaatgcaaaacttggaggaattaacaatgtgcttgtgcctcatcaaaggccctcggtgttccagcagcctgtcatcttcctgggagcggatgtcacacaccccccagcaggggatgggaagaaaccttccattgctgctgtggttggcagtatggatggccaccccagccggtactgtgccaccgttcgggtgcagacttcccggcaggagatctcccaagagctcctctacagtcaagaggtcatccaggacctgactaacatggttcgagagctgctgattcagttctacaaatccacacgcttcaaacccactcggatcatctattaccgtggaggggtatctgagggacaaatgaaacaggtagcttggccagaactaatagcaattcgaaaggcatgtattagcttggaagaagattaccggccaggaataacttatattgtggtgcaaaaaagacatcacacacgactcttctgtgcagataaaacagaaagggtagggaaaagtggcaatgtaccagcaggcactacagtggatagtaccatcacacatccatctgagtttgacttttacctctgtagtcatgcaggaattcagggaaccagccgtccctcacattaccaggtcttgtgggatgacaactgcttcactgcagatgaactccagctactgacttaccagctgtgtcacacctatgtgaggtgcactcgctcagtctctattccagcccctgcatattatgcccggcttgtagcatttagggcaaggtatcatctggtggataaagatcatgacagtgcggaaggcagtcatgtgtcaggacagagcaacggccgggatcctcaggccttggctaaggctgtgcaaatccaccatgatacccagcacacgatgtattttgcctgagagtctcagaaaaagaactcaaccaatttggcaccccatgcagcctcaaaatgtttcaaatgcctaccgcctctagatcgagccacgttgacttcaggtggtcttctaccagcagctcggaatagttgcactgaatctatactttgcagcactgtctgatgcgtcaacaaaattgagccatttttttaaagtaatagatactaatagattatcttttctgatgcactggactgaatttttacctcaatgtgcaaaggctgatcagcctgaactttctaaaggactttacaagaagggtttctatggaatattttgctagctgtggtgttcaccgcatccctctagtcttagaagagaagattattccttttttctgtagtcattgagtggggtatatgcataagtgggagagaaaaaccaaacaatctacttcagttcagtgtaactatttaattgtgtgggtccatagactttttaatgaagatttctgactttgccactgtaaatgcctttaatgagcattaatttttgaaagttttacagagttttattagttttactactttatcttattgatctctgcagacttgtgctggtgcaagtacatgctgacaggcaatttgcactatatttggctgcagattcaaataggcagttctcttatttggtcgacttttgtgaatgtgtgacataaacagatgtaatgcatgtcacagtgacggagataacactgccatgataaaagtactcatgtttcccctatttggaaaaaaaaattgcttttagtatttttccaagttttcaaaagtgcccattttatgctgctgtgtggtttgttaaatctaaatgatttttaaacttttctcatagaaacttaactttggcaataaacattttttaaggtctctcctcttccttccccaacaatgtagttttctagatgagatttcagtatgattttatcagctatttcttatatatcataatctggcaatttctgaaaccagtcagaaaagacatatatttccatgcctttttaaagaattatttttacctgttttatattcacagttggtgtcctgtcactttgttttaaaataagctagaaccaggatgcttccttattggaaaggctttgccagtccttaaggtacaatgagtgatgctgcaacttgcaaatgtaccagcatttaaaatttcttttcctgggaatcaaggtaactcacacgactacttgcagtacaaattttttgcttctctttcgacatgaaatgtacttggtgggttttccttccttttattaaactaaaactgtgtggaaaaggttgatttttcttaatagattctggattccactcacagggagatgggattcctttcttgtccaaacaaagggagttgctctaaagcgagcatcagttaaaatgtaggggaaaatgtattctgtatgtagtgtagataatactttgtgaatggacaacagttacatagtgtcttggtagcaccagccagtgtttcccagcccagagtttactgacttgtaattctctatccaggacatcaggagtgagggatggaaaaggggataaaaggcctggagccacactctatatggctgaggaaggagctagggaaagagatagacacaatggggtgaaaacaattttgccgcccctgcctggaaactgctggtggggaaatgatggtgaagggtgtttgcttgaactcatgagacggtccaaatctcataaactagccttctcaaaatcccagcaatataaagcactgtttttcttcagtcgtttaaataaacttgtaaatacattgaagtttacatttccatgtgctgttgatcaacggcgccacctgtgtttgctgagactggtctctgagagagttttatgtcgatcgaggcctgttgctcattaagctgagtgcagacgtccttaatccctgcagatagtgggatgaaagcaagttct

SEQ ID NO: 140 - protein, 861 aa, Homo sapiens
MEALGPGPPASLFQPPRRPGLGTVGKPIRLLANHFQVQIPKIDVYHYDVDIKPEKRPRRVNREVVDTMVRHFKMQIFGDRQPGYDGKRNMYTAHPLPIGRDRVDMEVTLPGEGKDQTFKVSVQWVSVVSLQLLLEALAGHLNEVPDDSVQALDVITRHLPSMRYTPVGRSFFSPPEGYYHPLGGGREVWFGFHQSVRPAMWNMMLNIDVSATAFYRAQPIIEFMCEVLDIQNINEQTKPLTDSQRVKFTKEIRGLKVEVTHCGQMKRKYRVCNVTRRPASHQTFPLQLENGQAMECTVAQYFKQKYSLQLKYPHLPCLQVGQEQKHTYLPLEVCNIVAGQRCIKKLTDNQTSTMIKATARSAPDRQEEISRLVKSNSMVGGPDPYLKEFGIVVHNEMTELTGRVLPAPMLQYGGRNKTVATPNQGVWDMRGKQFYAGIEIKVWAVACFAPQKQCREDLLKSFTDQLRKISKDAGMPIQGQPCFCKYAQGADSVEPMFKHLKMTYVGLQLIVVILPGKTPVYAEVKRVGDTLLGMATQCVQVKNVVKTSPQTLSNLCLKINAKLGGINNVLVPHQRPSVFQQPVIFLGADVTHPPAGDGKKPSIAAVVGSMDGHPSRYCATVRVQTSRQEISQELLYSQEVIQDLTNMVRELLIQFYKSTRFKPTRIIYYRGGVSEGQMKQVAWPELIAIRKACISLEEDYRPGITYIVVQKRHHTRLFCADKTERVGKSGNVPAGTTVDSTITHPSEFDFYLCSHAGIQGTSRPSHYQVLWDDNCFTADELQLLTYQLCHTYVRCTRSVSIPAPAYYARLVAFRARYHLVDKDHDSAEGSHVSGQSNGRDPQALAKAVQIHHDTQHTMYFA

SEQ ID NO: 141 - DNA, 7478 bp, Homo sapiens
actggcagctggccgggcgctcgcagtgggagctgctgcaggctccgcggcggcggcaacggaggctgcgggggcggcggcgcgagcggccgggcttggtaggggagccgagcccggcccgggatcccgagcagcgagagtgtggggtacctaggcccctcacgctggacttcacagtctccgggccgcctgacctccgcacgggtatatgggatggaagcgggaccctcgggagcagctgcgggcgcttacctgccccccctgcagcaggtgttccaggcacctcgccggcctggcattggcactgtggggaaaccaatcaagctcctggccaattactttgaggtggacatccctaagatcgacgtgtaccactacgaggtggacatcaagccggataagtgtccccgtagagtcaaccgggaagtggtggaatacatggtccagcatttcaagcctcagatctttggtgatcgcaagcctgtgtatgatggaaagaagaacatttacactgtcacagcactgcccattggcaacgaacgggtcgactttgaggtgacaatccctggggaagggaaggatcgaatctttaaggtctccatcaagtggctagccattgtgagctggcgaatgctgcatgaggccctggtcagcggccagatccctgttcccttggagtctgtgcaagccctggatgtggccatgaggcacctggcatccatgaggtacacccctgtgggccgctccttcttctcaccgcctgagggctactaccacccgctggggggtgggcgcgaggtctggttcggctttcaccagtctgtgcgccctgccatgtggaagatgatgctcaacattgatgtctcagccactgccttttataaggcacagccagtgattgagttcatgtgtgaggtgctggacatcaggaacatagatgagcagcccaagcccctcacggactctcagcgcgttcgcttcaccaaggagatcaagggcctgaaggtggaagtcacccactgtggacagatgaagaggaagtaccgcgtgtgtaatgttacccgtcgccctgctagccatcagacattccccttacagctggagagtggacagactgtggagtgcacagtggcacagtatttcaagcagaaatataaccttcagctcaagtatccccatctgccctgcctacaagttggccaggaacaaaagcatacctaccttcccctagaggtctgtaacattgtggctgggcagcgctgtattaaaaagctgaccgacaaccagacctcgaccatgataaaggccacagctagatccgctccagacagacaggaggagatcagtcgcctgatgaagaatgccagctacaacttagatccctacatccaggaatttgggatcaaagtgaaggatgacatgacggaggtgacagggcgagtgctgccggcgcccatcttgcagtacggcggccggaaccgggccattgccacacccaatcagggtgtctgggacatgcgggggaaacagttctacaatgggattgagatcaaagtctgggccatcgcctgcttcgcaccccaaaaacagtgtcgagaagaggtgctcaagaacttcacagaccagctgcggaagatttccaaggatgcggggatgcctatccagggtcaaccttgtttctgcaaatatgcacagggggcagacagcgtggagcctatgttccggcatctcaagaacacctactcagggctgcagctcattattgtcatcctgccagggaagacgccggtgtatgctgaggtgaaacgtgtcggagatacactcttgggaatggctacgcagtgtgtgcaggtgaagaacgtggtcaagacctcacctcagactctgtccaacctctgcctcaagatcaatgtcaaacttggtggcattaacaacatcctagtcccacaccagcgctctgccgtttttcaacagccagtgatattcctgggagcagatgttacacaccccccagcaggggatgggaaaaaaccttctatcacagcagtggtaggcagtatggatgcccaccccagccgatactgtgctactgtgcgggtacagcgaccacggcaagagatcattgaagacttgtcctacatggtgcgtgagctcctcatccaattctacaagtccacccgtttcaagcctacccgcatcatcttctaccgagatggggtgcctgaaggccagctaccccagatactccactatgagctactggccattcgtgatgcctgcatcaaactggaaaaggactaccagcctgggatcacttatattgtggtgcagaaacgccatcacacccgccttttctgtgctgacaagaatgagcgaattgggaagagtggtaacatcccagctgggaccacagtggacaccaacatcacccacccatttgagtttgacttctatctgtgcagccacgcaggcatccagggcaccagccgaccatcccattactatgttctttgggatgacaaccgtttcacagcagatgagctccagatcctgacgtaccagctgtgccacacttacgtacgatgcacacgctctgtctctatcccagcacctgcctactatgcccgcctggtggctttccgggcacgataccacctggtggacaaggagcatgacagtggagaggggagccacatatcggggcagagcaatgggcgggacccccaggccctggccaaagccgtgcaggttcaccaggatactctgcgcaccatgtacttcgcttgaaggcagaacgctgttacctcactggatagaagaaagctttccaagccccaggagctgtgccacccaaatccagaggaagcaaggaggagggaggtggggtagggaggagtgtaggatgccttgtttccttctatagaggtggtgtaagagtggggaacagggccagcaagacagaccaccagccagaaatctctgatatcaacctcatgtcccccacccctcaccccatcttgtcacatctggccctgaccccactggaccaaaaggggcagcactggtgcccaccatacacacaggtgtctcatgtgactcacagtgctaaagactcatgcttgacagcttggtaaggtcaactctgtagccctgcagacaaaagctggttaggtttgggtttgatactttagatgggaaagtgaggggcttgagaaagtgggtgggaggagggaaggattttttaggagccttaatcagaaaaggactagatttgtttaagaagaaaaatgaaaccagacccagatcaatattttaggatactagatgttttaatgggttcagaatccagtttgtaggaagattttttaatggttttggttgctcctcccccagctgccaccccccaccttacccttattcctctctgtccacattttctgccccaccttacttctcctccctgacagacatccagcccctagtaatacttaaggcactatggcacttagctttgaagtgacacgaccctgtcttccttccgcccgctggtgggtaaccagtgccttccctgtaacggtaatgctgcagaactgcaaccttttgtacctttctttggggaatggggtgggggtgggagaggaggtagatggggaagaaataccccagacccaacaaacctccagccagaaagccagctattttgcatttgaaggaattgacttcctcattcattgagctttttaaaagatcacaacctcaagatggttaaaatccattgacatttgcactttcaaacatgacaagtctcggagctgctgagatgacaggcccctggcctttccacttatgcctccttttctccttattcctcctacctcccgccccgcccaggtctggagttactttcatagcatttttcactcttggcttcttttctcccttgatggtcaagtctcttatgtttcaatatttcttaactggggtgtcttataacaaaaaactcttaggtctaaaatgagaaaaaagagagaaaacaaaatgttatttttataccataacttgagtgtattgccaaaatttggaaatccttcccatgcctgatgagtttatatcccagaaacattgagccatcagaatgaactgtgtacctgatttgttctctgacctggctaggtagggagggggtggttatcgccccaagatggggtccaggctccatccttcctctgtgcagataatacctttttcttgctatagcctccctcctctgcactgtcctgcactctttcttgcaagtgcatctttttccttcccctggactgtcctctgaccctttggctcatcctagattgcagtgtgtcctgtggacaggctggggaattttgctgctccctattgcttctgtttacaaaaatgaatttttcctggtttcccactagggcatgtgggtgggtggcatggacttttttttttttttttttttgtcttgagacatggggtttggctgtcttgcaggactggagaaggtggtggttctagcttggtctctgttggccttgaagcaagcatcccccctgccctttttccttgactgttcatttttttcctgccccactgcttgggatggggagttgcaacttcagtgtggaatttcctctttgaggagcctgggcttggatctatcctgatctggtgatgaagccatgattactttagacctagcccaggcttggaggccagctggaggaagaagggtctaaatcctggcctgtagagttagaactaccatttcctccccttagctgcccttgtatgacccggatttgctatgcaaaacaatctatcccaggttctgttctggttggctacattgttcagcaactcacaaaacgtagcacaaacattcattatggagaaagcatcaggactgttgagtaactcctcctttacttttttcctgctggctacagcatggggtgccctataggcacaagcccagctgaagaacagaatggagggctctgggaggaggcagctcactggagagcctacattccttacacaagtgcctaaagagagtgatgctaacactccatctgccctgtccattgccttcatatacagtctacttcgtgttctgtcaccctttggggaggggagttctcctgggacagtgggctctgcatgttctccacttggatacattttggggctaggatcagggcactattcctggagggtccagtcattcaccagcatttgcaaatgtccatagggagcaggtggcagcctctactcccagcaacaagtttgtgttctctccttttctctctttgcctcactctctccagttggttttcagctggggcttgaaatgcatttttagccctttgacgtggcttatgccattcaagaaataaaaagcaagagaatcagctttgggcaatgacaagaaatgagttcttactctgatttttttgtaaaaagataatttttgagacttgaaaaataccccgaccttgagattattcctgtttgaaaggtggtgcatgcagatggagaagtggtgttggcagcaagctttggctcatgtggatttggtttaagtggtgcttcttacccaagcttcaaggaagtgcttgggggacccccagcctcatcctcttagttgggtctcttgttccctttgtaccactgttttgccttccttttcctcttctctctttgcctggcttcctttcccttttcttctattcactctgcttgcttgctggccggcctgcctgcctgcctgcctgcctgcctgcctgtctgcctatgtgatgatgaaatctctgcatggctgcaatgatcccactgttagctggcagggtcaggcttagctccttgactgcagaagaccaagaacctgttccccaagcccagagatgtccacctgggctggactgccctcaagcttatactagagaagagcaactgacctgcccaacttgtgtgaagtcaggagggtttctggcattttccacacctgtccactccttggagctggtttctctcattgctttttctaaatctggttctttttctctttacctggggcctggcttttctgagattgtcttagggttgagctatttgggtatcctgggtttgagtgttaggggatggacataaaggaaaaagagtgatgagaagagaatggagagaatttgaataaaaggtgggaaaggagagcactgttctttgattgtttatccagtccaacctgatccattagggatcgaggtgctacactggcctccagggataagcctggggctactgttgctgggaacttaggcttaacataaagccgaagaaggtacctagaaatttgaaacttccctaaaaagctcctaatgcccacctgctagatagcttctctgtggcctcctatttagctaagcagcagtgtttttggatactttttttttctgtttgtgaataaggccagcactcaagatgggcagccaagggtgcactgactattagctggcccataggatatctgtaaggctggtgggacagttttggacctggaatcatgtgtaactaacaaggttggacgtttcttccccatcagggtagaaaaatcatctcaaactagccaaaaggcagttttggaaactacattgggggacgttatttttatttatatatggggcctaggccaatccaggatggtagctggaataccttccttcttaaaatctgatcatggcagggatatgcagggcactttttactatttggccttctaagcagattgggaaggaggtattttctggttttcgctttcctccgacttaataggacttgccttctccctgggcagggagagaggctgggttggtgctctcccttactctactcatactgacttagagcctctggctgctgtttgggcatccaagaaagggaggggaaggaatgagctaaaaacaaaacagaatgaggtgggaaagggagattttcttctttacagaggaaaataggaaaccctccaagaattgtgcaagtaaagacatttgttgaatgcactgagtcccttggtgtagtagcaataaggaaaaatgaaattactttcctgtgcacacagtccagcctaattggtatgtgatgttgcacttagcagccatgtggtgggcatgtgtgactactctggttttcactttagtttctaaactttttatccctctcaagtccagcatggatggggaaatgtctctggatccccacagctgtgtacttgtttgcatttgtttccctttgagatttgtgtttgtgtcctgctttgagctgtaccttgtccagtccattgtgaaattatcccagcagctgtaatgtacagttccttctgaagcaagcaacatcagcagcagcagcagcagcagcacaattctgtgttttataaagacaacagtggcttctatttctaa

SEQ ID NO: 142 - protein, 857 aa, Homo sapiens
MEAGPSGAAAGAYLPPLQQVFQAPRRPGIGTVGKPIKLLANYFEVDIPKIDVYHYEVDIKPDKCPRRVNREVVEYMVQHFKPQIFGDRKPVYDGKKNIYTVTALPIGNERVDFEVTIPGEGKDRIFKVSIKWLAIVSWRMLHEALVSGQIPVPLESVQALDVAMRHLASMRYTPVGRSFFSPPEGYYHPLGGGREVWFGFHQSVRPAMWKMMLNIDVSATAFYKAQPVIEFMCEVLDIRNIDEQPKPLTDSQRVRFTKEIKGLKVEVTHCGQMKRKYRVCNVTRRPASHQTFPLQLESGQTVECTVAQYFKQKYNLQLKYPHLPCLQVGQEQKHTYLPLEVCNIVAGQRCIKKLTDNQTSTMIKATARSAPDRQEEISRLMKNASYNLDPYIQEFGIKVKDDMTEVTGRVLPAPILQYGGRNRAIATPNQGVWDMRGKQFYNGIEIKVWAIACFAPQKQCREEVLKNFTDQLRKISKDAGMPIQGQPCFCKYAQGADSVEPMFRHLKNTYSGLQLIIVILPGKTPVYAEVKRVGDTLLGMATQCVQVKNVVKTSPQTLSNLCLKINVKLGGINNILVPHQRSAVFQQPVIFLGADVTHPPAGDGKKPSITAVVGSMDAHPSRYCATVRVQRPRQEIIEDLSYMVRELLIQFYKSTRFKPTRIIFYRDGVPEGQLPQILHYELLAIRDACIKLEKDYQPGITYIVVQKRHHTRLFCADKNERIGKSGNIPAGTTVDTNITHPFEFDFYLCSHAGIQGTSRPSHYYVLWDDNRFTADELQILTYQLCHTYVRCTRSVSIPAPAYYARLVAFRARYHLVDKEHDSGEGSHISGQSNGRDPQALAKAVQVHQDTLRTMYFA

SEQ ID NO: 143 - DNA, 3578 bp, Homo sapiens
acttccggacgggactcccctctgtccgcgcctcacatctccccttcctctcgcctagtcctgtgccgttttccgtccgcgactcttccggcccagagctttcggagtgcggttgctcaggggaagccgtcgccgcccccgcctcggggccgagtgagagtgcccgtcgcgtcgcgccgcgtcgccccccgggccgcctccttgccgccagtggcgggctccgttctccctcgaagcactccccccagctccatgaatggaaatcggctccgcaggacccgctggggcccagcccctactcatggtgcccagaagacctggctatggcaccatgggcaaacccattaaactgctggctaactgttttcaagttgaaatcccaaagattgatgtctacctctatgaggtagatattaaaccagacaagtgtcctaggagagtgaacagggaggtggttgactcaatggttcagcattttaaagtaactatatttggagaccgtagaccagtttatgatggaaaaagaagtctttacaccgccaatccacttcctgtggcaactacaggggtagatttagacgttactttacctggggaaggtggaaaagatcgacctttcaaggtgtcaatcaaatttgtctctcgggtgagttggcacctactgcatgaagtactgacaggacggaccttgcctgagccactggaattagacaagccaatcagcactaaccctgtccatgccgttgatgtggtgctacgacatctgccctccatgaaatacacacctgtggggcgttcatttttctccgctccagaaggatatgaccaccctctgggagggggcagggaagtgtggtttggattccatcagtctgttcggcctgccatgtggaaaatgatgcttaatatcgatgtttctgccactgccttctacaaagcacaacctgtaattcagttcatgtgtgaagttcttgatattcataatattgatgagcaaccaagacctctgactgattctcatcgggtaaaattcaccaaagagataaaaggtttgaaggttgaagtgactcattgtggaacaatgagacggaaataccgtgtttgtaatgtaacaaggaggcctgccagtcatcaaacctttcctttacagttagaaaacggccaaactgtggagagaacagtagcgcagtatttcagagaaaagtatactcttcagctgaagtacccgcaccttccctgtctgcaagtcgggcaggaacagaaacacacctacctgccactagaagtctgtaatattgtggcagggcaacgatgtatcaagaagctaacagacaatcagacttccactatgatcaaggcaacagcaagatctgcaccagatagacaagaggaaattagcagattggtaagaagtgcaaattatgaaacagatccatttgttcaggagtttcaatttaaagttcgggatgaaatggctcatgtaactggacgcgtacttccagcacctatgctccagtatggaggacggaatcggacagtagcaacaccgagccatggagtatgggacatgcgagggaaacaattccacacaggagttgaaatcaaaatgtgggctatcgcttgttttgccacacagaggcagtgcagagaagaaatattgaagggtttcacagaccagctgcgtaagatttctaaggatgcagggatgcccatccagggccagccatgcttctgcaaatatgcacagggggcagacagcgtagagcccatgttccggcatctcaagaacacatattctggcctacagcttattatcgtcatcctgccggggaagacaccagtgtatgcggaagtgaaacgtgtaggagacacacttttgggtatggctacacaatgtgttcaagtcaagaatgtaataaaaacatctcctcaaactctgtcaaacttgtgcctaaagataaatgttaaactcggagggatcaataatattcttgtacctcatcaaagaccttctgtgttccagcaaccagtgatctttttgggagccgatgtcactcatccacctgctggtgatggaaagaagccttctattgctgctgttgtaggtagtatggatgcacacccaagcagatactgtgccacagtaagagttcagagaccccgacaggagatcatccaggacttggcctccatggtccgggaacttcttattcaattttataagtcaactcggttcaagcctactcgtatcatcttttatcgggatggtgtttcagaggggcagtttaggcaggtattatattatgaactactagcaattcgagaagcctgcatcagtttggagaaagactatcaacctggaataacctacattgtagttcagaagagacatcacactcgattattttgtgctgataggacagaaagggttggaagaagtggcaatatcccagctggaacaacagttgatacagacattacacacccatatgagttcgatttttacctctgtagccatgctggaatacagggtaccagtcgtccttcacactatcatgttttatgggatgataactgctttactgcagatgaacttcagctgctaacttaccagctctgccacacttacgtacgctgtacacgatctgtttctatacctgcaccagcgtattatgctcacctggtagcatttagagccagatatcatcttgtggacaaagaacatgacagtgctgaaggaagtcacgtttcaggacaaagcaatgggcgagatccacaagctcttgccaaggctgtacagattcaccaagataccttacgcacaatgtacttcgcttaaatagtccaagtatattctctgagaggaagtactgaaagatgaattgacatacaacgtatgtttccagtgaagtcaattgagtaaggacacctccagccatacagaaaccaacactgtgtgggggccaaggtctgatccttatgttaatacaaggaagattgtttacttcatcaaggaacacagcatcattatgcaatatgaaaccagccaactgctttttgtgcggtctcctataggaagtatcgcaattgttttgttttcatttcttgtagtctaacccttttaatgcctttacctcaagttgcttggcagcacaactatctttgcaaaaaaaagtaaagaaaaagtaaatgatggtttaaaaaatacacaccttcatgaataatcaaagtgatttttcagaattatgtgtgcaaaaaattaatgtgcattcatatattcttgtaaaaggtgtctgtgtatttttaaaatatatacatccatacttcatatgcatatatatctagatctggattgataatagatatatatgtgtctgttatatattttagagttcattccattggggaattttctttcccttttattctacccccactaccgcctttatttctctatttcccttgccttcatcacctacatttttttcccagtcctaccagtgacattcaaatgttgatgtatctggttcgtttgaatataaaatatggcaaactaaaaaaaaaaaaaaaaaaaaaaa

SEQ ID NO: 144 - protein, 860 aa, Homo sapiens
MEIGSAGPAGAQPLLMVPRRPGYGTMGKPIKLLANCFQVEIPKIDVYLYEVDIKPDKCPRRVNREVVDSMVQHFKVTIFGDRRPVYDGKRSLYTANPLPVATTGVDLDVTLPGEGGKDRPFKVSIKFVSRVSWHLLHEVLTGRTLPEPLELDKPISTNPVHAVDVVLRHLPSMKYTPVGRSFFSAPEGYDHPLGGGREVWFGFHQSVRPAMWKMMLNIDVSATAFYKAQPVIQFMCEVLDIHNIDEQPRPLTDSHRVKFTKEIKGLKVEVTHCGTMRRKYRVCNVTRRPASHQTFPLQLENGQTVERTVAQYFREKYTLQLKYPHLPCLQVGQEQKHTYLPLEVCNIVAGQRCIKKLTDNQTSTMIKATARSAPDRQEEISRLVRSANYETDPFVQEFQFKVRDEMAHVTGRVLPAPMLQYGGRNRTVATPSHGVWDMRGKQFHTGVEIKMWAIACFATQRQCREEILKGFTDQLRKISKDAGMPIQGQPCFCKYAQGADSVEPMFRHLKNTYSGLQLIIVILPGKTPVYAEVKRVGDTLLGMATQCVQVKNVIKTSPQTLSNLCLKINVKLGGINNILVPHQRPSVFQQPVIFLGADVTHPPAGDGKKPSIAAVVGSMDAHPSRYCATVRVQRPRQEIIQDLASMVRELLIQFYKSTRFKPTRIIFYRDGVSEGQFRQVLYYELLAIREACISLEKDYQPGITYIVVQKRHHTRLFCADRTERVGRSGNIPAGTTVDTDITHPYEFDFYLCSHAGIQGTSRPSHYHVLWDDNCFTADELQLLTYQLCHTYVRCTRSVSIPAPAYYAHLVAFRARYHLVDKEHDSAEGSHVSGQSNGRDPQALAKAVQIHQDTLRTMYFA

SEQ ID NO: 145 - DNA, 3320 bp, Homo sapiens
acttccggacgggactcccctctgtccgcgcctcacatctccccttcctctcgcctagtcctgtgccgttttccgtccgcgactcttccggcccagagctttcggagtgcggttgctcaggggaagccgtcgccgcccccgcctcggggccgagtgagagtgcccgtcgcgtcgcgccgcgtcgccccccgggccgcctccttgccgccagtggcgggctccgttctccctcgaagcactccccccagctccatgaatggaaatcggctccgcaggacccgctggggcccagcccctactcatggtgcccagaagacctggctatggcaccatgggcaaacccattaaactgctggctaactgttttcaagttgaaatcccaaagattgatgtctacctctatgaggtagatattaaaccagacaagtgtcctaggagagtgaacaggtagatttagacgttactttacctggggaaggtggaaaagatcgacctttcaaggtgtcaatcaaatttgtctctcgggtgagttggcacctactgcatgaagtactgacaggacggaccttgcctgagccactggaattagacaagccaatcagcactaaccctgtccatgccgttgatgtggtgctacgacatctgccctccatgaatttctgccactgccttctacaaagcacaacctgtaattcagttcatgtgtgaagttcttgatattcataatattgatgagcaaccaagacctctgactgattctcatcgggtaaaattcaccaaagagataaaaggtttgaaggttgaagtgactcattgtggaacaatgagacggaaataccgtgtttgtaatgtaacaaggaggcctgccagtcatcaaacctttcctttacagttagaaaacggccaaactgtggagagaacagtagcgcagtatttcagagaaaagtatactcttcagctgaagtacccgcaccttccctgtctgcaagtcgggcaggaacagaaacacacctacctgccactagaagtctgtaatattgtggcagggcaacgatgtatcaagaagctaacagacaatcagacttccactatgatcaaggcaacagcaagatctgcaccagatagacaagaggaaattagcagattggtaagaagtgcaaattatgaaacagatccatttgttcaggagtttcaatttaaagttcgggatgaaatggctcatgtaactggacgcgtacttccagcacctatgctccagtatggaggacggaatcggacagtagcaacaccgagccatggagtatgggacatgcgagggaaacaattccacacaggagttgaaatcaaaatgtgggctatcgcttgttttgccacacagaggcagtgcagagaagaaatattgaagggtttcacagaccagctgcgtaagatttctaaggatgcagggatgcccatccagggccagccatgcttctgcaaatatgcacagggggcagacagcgtagagcccatgttccggcatctcaagaacacatattctggcctacagcttattatcgtcatcctgccggggaagacaccagtgtatgcggaagtgaaacgtgtaggagacacacttttgggtatggctacacaatgtgttcaagtcaagaatgtaataaaaacatctcctcaaactctgtcaaacttgtgcctaaagataaatgttaaactcggagggatcaataatattcttgtacctcatcaaagaccttctgtgttccagcaaccagtgatctttttgggagccgatgtcactcatccacctgctggtgatggaaagaagccttctattgctgctgttgtaggtagtatggatgcacacccaagcagatactgtgccacagtaagagttcagagaccccgacaggagatcatccaggacttggcctccatggtccgggaacttcttattcaattttataagtcaactcggttcaagcctactcgtatcatcttttatcgggatggtgtttcagaggggcagtttaggcaggtattatattatgaactactagcaattcgagaagcctgcatcagtttggagaaagactatcaacctggaataacctacattgtagttcagaagagacatcacactcgattattttgtgctgataggacagaaagggttggaagaagtggcaatatcccagctggaacaacagttgatacagacattacacacccatatgagttcgatttttacctctgtagccatgctggaatacagggtaccagtcgtccttcacactatcatgttttatgggatgataactgctttactgcagatgaacttcagctgctaacttaccagctctgccacacttacgtacgctgtacacgatctgtttctatacctgcaccagcgtattatgctcacctggtagcatttagagccagatatcatcttgtggacaaagaacatgacagtgctgaaggaagtcacgtttcaggacaaagcaatgggcgagatccacaagctcttgccaaggctgtacagattcaccaagataccttacgcacaatgtacttcgcttaaatagtccaagtatattctctgagaggaagtactgaaagatgaattgacatacaacgtatgtttccagtgaagtcaattgagtaaggacacctccagccatacagaaaccaacactgtgtgggggccaaggtctgatccttatgttaatacaaggaagattgtttacttcatcaaggaacacagcatcattatgcaatatgaaaccagccaactgctttttgtgcggtctcctataggaagtatcgcaattgttttgttttcatttcttgtagtctaacccttttaatgcctttacctcaagttgcttggcagcacaactatctttgcaaaaaaaagtaaagaaaaagtaaatgatggtttaaaaaatacacaccttcatgaataatcaaagtgatttttcagaattatgtgtgcaaaaaattaatgtgcattcatatattcttgtaaaaggtgtctgtgtatttttaaaatatatacatccatacttcatatgcatatatatctagatctggattgataatagatatatatgtgtctgttatatattttagagttcattccattggggaattttctttcccttttattctacccccactaccgcctttatttctctatttcccttgccttcatcacctacatttttttcccagtcctaccagtgacattcaaatgttgatgtatctggttcgtttgaatataaaatatggcaaactaaaaaaaaaaaaaaaaaaaaaaa

SEQ ID NO: 146 - protein, 626 aa, Homo sapiens
MCEVLDIHNIDEQPRPLTDSHRVKFTKEIKGLKVEVTHCGTMRRKYRVCNVTRRPASHQTFPLQLENGQTVERTVAQYFREKYTLQLKYPHLPCLQVGQEQKHTYLPLEVCNIVAGQRCIKKLTDNQTSTMIKATARSAPDRQEEISRLVRSANYETDPFVQEFQFKVRDEMAHVTGRVLPAPMLQYGGRNRTVATPSHGVWDMRGKQFHTGVEIKMWAIACFATQRQCREEILKGFTDQLRKISKDAGMPIQGQPCFCKYAQGADSVEPMFRHLKNTYSGLQLIIVILPGKTPVYAEVKRVGDTLLGMATQCVQVKNVIKTSPQTLSNLCLKINVKLGGINNILVPHQRPSVFQQPVIFLGADVTHPPAGDGKKPSIAAVVGSMDAHPSRYCATVRVQRPRQEIIQDLASMVRELLIQFYKSTRFKPTRIIFYRDGVSEGQFRQVLYYELLAIREACISLEKDYQPGITYIVVQKRHHTRLFCADRTERVGRSGNIPAGTTVDTDITHPYEFDFYLCSHAGIQGTSRPSHYHVLWDDNCFTADELQLLTYQLCHTYVRCTRSVSIPAPAYYAHLVAFRARYHLVDKEHDSAEGSHVSGQSNGRDPQALAKAVQIHQDTLRTMYFA

SEQ ID NO: 147 - DNA, 1536 bp, Homo sapiens
tggttgcctagcaaccggtggtgccaaacactggagctcagagcggggggcgcggagagcgaagcgggaaaggaggtggtgtctgtgaacaggcctaggggtttctgacccttctggtttctgtgccatggccacgctgagcgtcaagccaagtcggcgcttccagctgcccgactggcacactaacagctacctgctatccaccaatgcccagctgcagcgagatgcttcccatcagatccgccaggaggcccgggtgctccgcaacgagaccaacaaccagaccatttgggatgaacatgacaacaggactcgactggtggagaggattgatactgtcaaccggtggaaggagatgctggacaagtgtctgacagatttagatgccgagatcgatgccctgacacagatgaaggagtcagcagagcaaaacctgcaggccaagaacctgcctctggatgtggccattgagtgcctgaccctgcgggaaagccggcgagacattgatgtggtgaaggaccctgtggaggatgagctgcataaagaggtggaggtcatcgaggccaccaagaaggccttgcaacagaaggtcagccaggccttcgagcagctctgcctcttgcaggaagtccaacagcagctcaactccgaccatcggggcaaaatggagacactagagatcgacagaggctgtctctctctcaacctcagatccccaaacatctcgctgaaggttgaccccacacgtgtacctgatggctccaccacactccagcagtgggatgacttcagtcggttcaacaaggaccgagcggaggctgagatgaaggcagccacagagctgagggaggccactgctctaactattgctgagaccaacaacgagcttgaagcccagagagttgcaacggaatttgccttcaggaagcggctgcgggagatggagaaagtgtacagtgagctcaagtggcaagagaagaataccttggaggagatcgctgagctgcaggaggacatccggcacctggaggaggatctgcgcacaaagctcctgagcctgaagctgtcccatacccggctagaggccagaacctaccggcccaacgtggaactctgccgggaccaggcacagtacggcctcaccgacgaggttcaccagctagaggcaaccatcgctgccctgaagcagaagctggcgcaagcacaggacgcactggacgccctgtgcaagcacctggcccggctgcaggctgacattgcctgcaaggccaactccatgctgctggacaccaagtgcatggacacacggcgcaagctgaccgtgcctgctgagaggttcgtgcctgaggtggacaccttcacacgtaccacaaatagcaccctgagtccactcaaaagctgccagctggagctggcctagccttggaggactgcaggaggagggcagggttgggtgggcaatggaaggagggaggagagaaatgaatggaataaatgcagaggatctcaaaaaaaaaaaaaaaaaaaaaaaaaaaa

SEQ ID NO: 148 - protein, 430 aa, Homo sapiens
MATLSVKPSRRFQLPDWHTNSYLLSTNAQLQRDASHQIRQEARVLRNETNNQTIWDEHDNRTRLVERIDTVNRWKEMLDKCLTDLDAEIDALTQMKESAEQNLQAKNLPLDVAIECLTLRESRRDIDVVKDPVEDELHKEVEVIEATKKALQQKVSQAFEQLCLLQEVQQQLNSDHRGKMETLEIDRGCLSLNLRSPNISLKVDPTRVPDGSTTLQQWDDFSRFNKDRAEAEMKAATELREATALTIAETNNELEAQRVATEFAFRKRLREMEKVYSELKWQEKNTLEEIAELQEDIRHLEEDLRTKLLSLKLSHTRLEARTYRPNVELCRDQAQYGLTDEVHQLEATIAALKQKLAQAQDALDALCKHLARLQADIACKANSMLLDTKCMDTRRKLTVPAERFVPEVDTFTRTTNSTLSPLKSCQLELA

SEQ ID NO: 149 - DNA, 1691 bp, Homo sapiens
ggcgagcagtctgcgcgcggatggccgcagcggcgatggcggcagcggcaggtggaggggctggcgcggcccgctccctctcgcgcttccgaggctgcctggctggtgcgctgctcggggactgcgtgggctccttctacgaggcccacgacaccgtcgacctgacgtcagtcctgcgtcatgtccagagtctggagccggaccccggcacgcccgggagtgagcggacagaagccttgtactacacagatgacacagccatggccagggccctggtgcagtccctgctagccaaggaggcctttgacgaggtggacatggctcacagatttgctcaggagtacaagaaagaccctgacaggggctatggtgctggagtagtcactgtcttcaagaagctcctgaaccccaaatgtcgcgatgtctttgagcctgcccgggcccagtttaacgggaaaggctcctatggcaatggaggtgccatgcgggtggctggcatctccctggcctatagcagtgtccaggatgtgcagaagtttgcccggctctcggcccagctgacacacgcctcctccctgggttacaatggcgccatcctgcaggccctggctgtgcacctggccttgcagggcgagtcttccagcgagcactttctcaagcaactcctgggccacatggaggatctggagggtgatgcccagtccgtcttggatgccagggagttgggcatggaggagcgtccatactccagccgcctgaagaagattggagagcttctagaccaggcatcggtgaccagggaggaagtggtgtctgagctagggaatggcattgctgcctttgagtcggtacccaccgccatctactgcttcctacgctgcatggagccagaccctgagatcccttctgccttcaatagcctccaaaggactctcatttattccatctcacttggtggggacacagacaccattgccaccatggctggggccattgctggtgcctactatgggatggatcaggtgccagagagctggcagcaaagctgtgaaggctacgaggagacagacatcctggcccaaagcctgcaccgtgtcttccagaagagttgatgagggctacagctgttggggctctgccaggtcccctgggaccaactacagctccaatcagaaaccctgcgcttccttgagtgtggcttcccacttttcctgcattgtggagctgactgagtacaccggtgaggctggggtctctgcaggggaggtcactggaacagcgagcaagggactggtgcctcgctggtgctgggtctctggtttgctgcagagccgtaggacactcctggctcctcagtaggacagacagacgcaggcgggtttattttggaggggtacttgtggcattttcctgtattgtcttggacatgggatgtggggaggtggaaatgatgagcagtagcatcatttctccctgttgggttttagccagtttgccagcaagcgcatcctagcagggtccccgagcagcaggttgtgtggatgaagggacaggcacttgcatccagctgatctaggtcacacctggctcttggctgccatgtggcttattaacagcttccagtggaagtcgcaataaacagtttttggtaaatctcaaaaaaaaaaaaaaaaaaaaaaaaaaaaaaaaaa

SEQ ID NO: 150 - protein, 363 aa, Homo sapiens
MAAAAMAAAAGGGAGAARSLSRFRGCLAGALLGDCVGSFYEAHDTVDLTSVLRHVQSLEPDPGTPGSERTEALYYTDDTAMARALVQSLLAKEAFDEVDMAHRFAQEYKKDPDRGYGAGVVTVFKKLLNPKCRDVFEPARAQFNGKGSYGNGGAMRVAGISLAYSSVQDVQKFARLSAQLTHASSLGYNGAILQALAVHLALQGESSSEHFLKQLLGHMEDLEGDAQSVLDARELGMEERPYSSRLKKIGELLDQASVTREEVVSELGNGIAAFESVPTAIYCFLRCMEPDPEIPSAFNSLQRTLIYSISLGGDTDTIATMAGAIAGAYYGMDQVPESWQQSCEGYEETDILAQSLHRVFQKS

SEQ ID NO: 151 - DNA, 4443 bp, Homo sapiens
ggacgccatgctggggactctgacacccctgtcttcgctgctgctgctgctactggtgctggtgctggggtgtgggccgcgggcgtcctctggtggcggggccggtggggcggcgggctatgccccagtgaagtacatccagcccatgcagaaaggacctgtgggaccgcccttccgtgagggcaaaggccagtacctggaaatgcctctaccgctgctgccgatggacctgaagggagagcccggcccccctgggaagcccgggcctcggggtccccctggcccccctggcttcccaggaaaaccaggcatgggaaagccaggactccatgggcagcctggccctgctgggccccctggcttctcccggatgggcaaggctggtcccccagggctccctggcaaggtcgggccaccagggcagccggggcttcggggggagccaggaatacgaggggaccagggcctccggggacccccaggaccccctggcctcccgggcccctcaggcattactatccctggaaaaccaggtgcccaaggggtgccagggcccccaggattccagggggaaccagggccccagggggagcctgggcccccaggtgatcgaggcctcaagggggataatggagtgggccagcccgggctgcctggggccccagggcaggggggtgcccccggcccccccggcctccctggtccagctggcttaggcaaacctggtttggatgggcttcctggggccccaggagacaagggtgagtctgggcctcctggagttccaggccccaggggggagccaggagctgtgggcccaaaaggacctcctggagtagacggtgtgggagtcccaggggcagcagggttgccaggaccacagggcccatcaggggccaaaggggagccagggacccggggcccccctgggctgataggccccactggctatgggatgccaggactgccaggccccaagggggacaggggcccagctggggtcccaggactcttgggggacaggggtgagccaggggaggatggggagccaggggagcagggcccacagggtcttgggggtccccctggacttcctgggtctgcagggcttcctggcagacgtgggccccctgggcctaagggtgaggcagggcctggaggacccccaggagtgcctggcattcgaggtgaccaggggcctagtggcctggctgggaaaccaggggtcccaggtgagaggggacttcctggggcccatggaccccctggaccaactgggcccaagggtgagccgggtttcacgggtcgccctggaggaccaggggtggcaggagccctggggcagaaaggtgacttggggctccctgggcagcctggcctgaggggtccctcaggaatcccaggactccagggtccagctggccctattgggccccaaggcctgccgggcctgaagggggaaccaggcctgccagggccccctggagaggggagagcaggggaacctggcacggctgggcccacggggcccccaggggtccctggctcccctggaatcacgggccctccggggcctcccgggcccccgggaccccctggtgcccctggggccttcgatgagactggcatcgcaggcttgcacctgcccaacggcggtgtggagggtgccgtgctgggcaaggggggcaagccacagtttgggctgggcgagctgtctgcccatgccacaccggccttcactgcggtgctcacctcgcccttccccgcctcgggcatgcccgtgaaatttgaccggactctctacaatggccacagcggctacaacccagccactggcatcttcacctgccctgtgggcggcgtctactactttgcttaccatgtgcacgtcaagggcaccaacgtgtgggtggccctgtacaagaacaacgtgccggccacctatacctacgatgagtacaagaagggctacctggaccaggcatctggtggggccgtgctccagctgcggcccaacgaccaggtctgggtgcagatgccgtcggaccaggccaacggcctctactccacggagtacatccactcctccttttcaggattcttgctctgccccacataacccgcggggggtgtcctgctgccctggcctcctcccctttagtggtagagcgaccttttcaattacaaagaacctcctggaaaaaaaaacaaaagctgaacagaggcggccgtggccttggcccgaggagactaacttgctttctccctgcatgcaggctgagattgtttctggaaggggctggcctgagtttctttcccccaaatgtctgtgcagtgtcagggctgcaccccataggccctgaggcacacagcccagccccttgtgagtcctggcctctgctgggccctgaaggagctgagagggagctcaactccccaccccgccacgtggggagacagcccttcccactggctccctgatggcacctgctggaggaaaggggcacggcctccctcacagcccttggctggggctcctccagctccccctgggacctccagcatatgacagtggactaaggactgtggggttttcctccaaggggaagggagaagaggggaccatcgaggtggcgagtgtggacaccctgccaggactgcagcccccatggtgatgctgtggcatcagacatgtccgtggtgggcacagtgcctgttgccctgggaaagggcaacctccctttcactgctccagtggcagccatggggaaggcagtttgtgagggcttggggcacagacctggggcaggaggcagctcttcacgttcatccctgtctctcccgggctgcccccgccagctctggctgtttagcttgagggcagcacagaggcccctgggacacctacaggccagaaagatcaacctctgtgaagtgtctagaagtatctagtgcagatggtggcggaggcagaatcgaccatcagcaaacatgagcactcttccctttctccccttccacctgctgcgggctgggctggttttctcaatacaaaattgtaagaggatccttgtcaccccagccaggtatccccaaggcagagcacctctcgtttggccctctgaacaaggtgcacgcgagctgggggatgaagacggctcccacttccttttccttaataagaaccatatggtgggtgtatgtgtgtacaagaggggttcatctgtgggggcttcctctccttccaccctctggttccaatttcctgttctaagcaggactagggcccaggaggctaaggctgggagagaaagggtgccaacaggtcccttgggaatgagttggctctggacgtttctgccctgttccccgatcagagctcctctgcaggaaacaggcaggatgcccctcccaacccctcagtccctacgtcaagcggagtggataaggctgagatgagtgctgggagtggtggacattcctgctcgtgcaaagatggccactttccccgcagctgcagggcctcgcgctcggccctcgccaggccagccccactccttgtaccaagtgtgaactggggtcattcggtctgtgatctcgttgcactgctccaagtctggctgtgtccaggcggtccatgttgaaaatggaggatggctgctgacttctgactggctgagcagtgggttccttcaggttccttgccaaccctcctcccctgcccacaacttctccaaacaaagcaggctgtttgctcacttcttcaaaaggaggaatgataacccaaatctgcccaagtgacacttgagaaggttttggctggggttcctggtggatttcttactacctaacgcccaagaaaaccaactaaggactctcaaaccatacctggtgggggttcttcgctcaacctcttcttccctaggtcaaagccactatcatctgatgtgttagggatgggttctgattggcagaaattaatcagctcccaatgggagcccacggaactaagtagggtcccaagaaaaaaaacgggagctatttcacagagctgagcttctgccaaatttcattcctcaaacctttcaggaggggtggttggcgtttctaaaatgtttatgggatttgagttgcaggtgtccacttaactgactagctttgataaacaatgtcagattttaactatgaaaacgacattaccttgtgcatttttatattgattcctattttttttttaagattaaagtttaaatgttttccactagtcatttcacttctaacttggtataggaagcttagctctctacatacctatcatgtgccctgtatcacagaagattcaggaaaaatgcacttgggaatcaaagaaaatggaacttctttttgaaaagacaagcaaccatgttaactgtattgacacatcctcaataaaacctgttgtat

SEQ ID NO: 152 - protein, 703 aa, Homo sapiens
MLGTLTPLSSLLLLLLVLVLGCGPRASSGGGAGGAAGYAPVKYIQPMQKGPVGPPFREGKGQYLEMPLPLLPMDLKGEPGPPGKPGPRGPPGPPGFPGKPGMGKPGLHGQPGPAGPPGFSRMGKAGPPGLPGKVGPPGQPGLRGEPGIRGDQGLRGPPGPPGLPGPSGITIPGKPGAQGVPGPPGFQGEPGPQGEPGPPGDRGLKGDNGVGQPGLPGAPGQGGAPGPPGLPGPAGLGKPGLDGLPGAPGDKGESGPPGVPGPRGEPGAVGPKGPPGVDGVGVPGAAGLPGPQGPSGAKGEPGTRGPPGLIGPTGYGMPGLPGPKGDRGPAGVPGLLGDRGEPGEDGEPGEQGPQGLGGPPGLPGSAGLPGRRGPPGPKGEAGPGGPPGVPGIRGDQGPSGLAGKPGVPGERGLPGAHGPPGPTGPKGEPGFTGRPGGPGVAGALGQKGDLGLPGQPGLRGPSGIPGLQGPAGPIGPQGLPGLKGEPGLPGPPGEGRAGEPGTAGPTGPPGVPGSPGITGPPGPPGPPGPPGAPGAFDETGIAGLHLPNGGVEGAVLGKGGKPQFGLGELSAHATPAFTAVLTSPFPASGMPVKFDRTLYNGHSGYNPATGIFTCPVGGVYYFAYHVHVKGTNVWVALYKNNVPATYTYDEYKKGYLDQASGGAVLQLRPNDQVWVQMPSDQANGLYSTEYIHSSFSGFLLCPT

SEQ ID NO: 153 - DNA, 1278 bp, Homo sapiens
gctgaggggcagcggcttaggctccggcgtctgcaggggtcgccgagctaacccgtggctaggcgagtggggcggggcggccggcaccatgtcgaggcaggcgaaccgtggcaccgagagcaagaaaatgagctctgagctcttcaccctgacctatggtgccctggtcacccagctatgtaaggactatgaaaatgatgaagatgtgaataaacagctggacaaaatgggctttaacattggagtccggctgattgaagatttcttggctcggtcaaatgttgggaggtgccatgactttcgggaaactgcggatgtcattgccaaggtggcgttcaagatgtacttgggcatcactccaagcattactaattggagcccagctggtgatgaattctccctcattttggaaaataaccccttggtggactttgtggaacttcctgataaccactcatcccttatttattccaatctcttgtgtggggtgttgcggggagctttggagatggtccagatggctgtggaggccaagtttgtccaggacaccctgaaaggagacggtgtgacagaaatccggatgagattcatcaggcggattgaggacaatcttccagctggagaggaataaccatccctacaactcgaggatagccatcaggagcactgttggaatcagcaggcctctgtgctccctctgccctccagaactcagtgactcttgaacatggatgttatatattcttataacctgtttccattctccattcaaataaagagcagactgcgatatagtccatttaccccatgtgtgcacattcaggagcgacagtctctgcccccattcccttgagaggggctggatgtaatcacctttggttggactagaaagagctcaaaccattttacattcctgtttgaatttttccaaagcaaaactcactttgaccccattaagaggcaagcctggcacatctatccctgggcctttagaaagccatttgcctcaaatggctatagggttgtggggtggagggaggaagggctgggagggagtggggaggaattgctagctgtagtgtgacacattgtagtgtttgccaggaaaggagccagtcatgccggaaacactgacttctgggaagccacccaggtctcattcctccctgctgttggaggcaacatctcctctttttacagagggtacatccttttttcttacaaattcttcaataaagacacattcttgagtgaaatcccaaaaaaaaaaaaaaaaaa

SEQ ID NO: 154 - protein, 180 aa, Homo sapiens
MSRQANRGTESKKMSSELFTLTYGALVTQLCKDYENDEDVNKQLDKMGFNIGVRLIEDFLARSNVGRCHDFRETADVIAKVAFKMYLGITPSITNWSPAGDEFSLILENNPLVDFVELPDNHSSLIYSNLLCGVLRGALEMVQMAVEAKFVQDTLKGDGVTEIRMRFIRRIEDNLPAGEE

SEQ ID NO: 155 - DNA, 3357 bp, Homo sapiens
gggttcgcgaccgcagccgagagaccccgggcgaccggcacctccgagactcgcgggccacctgcctcgaccttccccggagcgcccccgcctccgagtcgctacttgccgggccgggccgggccgggcgtgatgcgccgcgggacccctgtcctggccactggccgccgccgccgccgccgctgagaccccgagacccccagtgacgccgcagccatggagagcggcccgcgtgcggagctgggggcgggcgcacccccagctgtggtcgccaggacccccccagagccaagaccttctccagaaggtgacccttcccccccaccaccaccaatgtcagccctggtccccgacactcccccggacacccctcctgccatgaagaatgccactagctctaagcagctcccactggaaccagagagcccctcagggcaggtcgggcctaggccagcccccccgcaggaagagtccccttcctctgaagcaaagagcagaggacccaccccaccagccatgggcccacgggatgccagacctcctcgaaggagcagccagccatctccaacagcagtgccagcctccgacagccctcccaccaagcaagaggtgaagaaggcaggagagagacacaagctggcaaaggagcggcgagaagagcgggccaagtacctggcggccaagaaggcagtgtggctggagaaggaggagaaggccaaggcgctgcgggagaagcagctccaggagcgccggcgccggctggaggagcaacgtcttaaagccgagcaacgccgtgcagccctggaggaacggcagcggcagaagctcgagaaaaacaaggagcgctatgaagcagccatccaacggtcagtgaagaagacgtgggccgaaatccggcagcagcgctggtcctgggcaggggccctgcaccacagctctccaggacataagaccagtgggagcaggtgctccgtgtcggcagttaacctgcccaaacacgtggactctataatcaacaagcggctctcaaagtcctctgccacgctctggaactcccccagtagaaatcgcagcctgcagctgagcgcatgggagagcagcatcgtggatcgtctgatgacgcccactctctccttccttgctcggagtcgcagcgcggtcacactgccccgcaacggccgggaccagggtaggggctgcgaccctgggagaggccccacgtggggccgggcaggggccagcctggcgcgcgggccgcaacccgaccgcactcatccctctgcagccgtgccggtgtgcccgcgctcggcctccgccagccccctgacgccgtgcagcgtcacccgaagcgtgcaccgctgcgcccccgccggtgagcgcggggagcgccgcaagcccaacgccgggggcagccccgctccggtgcgccgccggccggaggcctcgccggtgcagaaaaaggagaagaaggacaaggagcgggaaaacgagaaggagaagagtgccctagcccgggagcgcagcctcaagaagcgccagtcgctgcccgcctccccacgtgcccgcctctccgccagcaccgcctctgagctcagccccaaatccaaggccaggccatcctctccctccacatcctggcacaggcctgcctccccctgccccagcccagggccaggccacactctgcctccaaagccaccgtccccccgaggcaccactgcatcccccaaggggcgggttcggaggaaggaggaggcaaaggagagccccagcgccgcagggcccgaggacaagagccagagcaagcgcagggccagtaacgagaaggagtcagcagccccagcctcaccggcaccttcgccggcgccctcgcccaccccagccccgccccagaaggagcagccccccgcggagacccctacagacgctgctgtcttgacctcacccccagcccctgctcccccggtgacccctagcaaaccaatggccggcaccacagaccgagaagaagccactcggctcttggctgagaagcggcgccaggcccgggagcagcgggagcgcgaggagcaggagcggaggctgcaggcagaaagggacaagcgaatgcgagaggagcagctggcacgggaggccgaggcccgggcggagcgggaggcggaggcccggaggcgggaggagcaggaggcacgagagaaggcgcaggccgagcaggaggagcaggagcggctgcagaagcagaaagaggaggccgaagctcggtcgcgggaagaggcggagcggcagcgtctggagcgggaaaagcacttccagcagcaggagcaagagcggcaagagcgcagaaagcgtctggaggagatcatgaagaggactcggaagtcagaagtttctgaaaccaagcagaagcaggacagcaaggaggccaacgccaacggttccagcccagagcctgtgaaagctgtggaggctcggtccccagggctgcagaaggaggctgtgcagaaagaggagcccatcccacaggagcctcagtggagtctcccaagcaaggagttgccagcgtccctggtgaatggcctgcagcctctcccagcacaccaggagaatggcttctccaccaacggaccctctggggacaagagtctgagccgaacaccagagacactcctgccctttgcagaggcagaagccttcctcaagaaagctgtggtgcagtccccgcaggtcacagaagtcctttaagagggtttgccttggatccgggcacagttgtgagggctcctctgcatcacctaccaggatgtctggaggagaaaaagacagaacaaagatggaagtggcctgggcccctgggggtgggtcctctctgttgtttttaatctgcaccttatagactgatgtctctttggccggagccagatctgcccctcagtgcattcgtgtgctcgcacgcgcagacatcccttctcccccatacacacatatacactcacagcctctctggcctcttcccttggggaggggccacctgtagtatttgccttgatttggtggggtacagtggatgtgaatactgtaaatagcttgtgctcagactcctctgcgtggagagggtgggtgcaggaggcagaccctccccccaaagccccctggggagatcttcctctctctatttaactgtaactgagggggatcccaggtctggggatgggggacaccttgggccacaggatactggttgcttcaggggtacccatgccccctgccctcgcctggaatcagtgttactgcatctgattaaatgtctccagaaataaagaataaaaaaaaaaaaaaaaaaaaaaaaaaaaaaaaaaa

SEQ ID NO: 156 - protein, 841 aa, Homo sapiens
MESGPRAELGAGAPPAVVARTPPEPRPSPEGDPSPPPPPMSALVPDTPPDTPPAMKNATSSKQLPLEPESPSGQVGPRPAPPQEESPSSEAKSRGPTPPAMGPRDARPPRRSSQPSPTAVPASDSPPTKQEVKKAGERHKLAKERREERAKYLAAKKAVWLEKEEKAKALREKQLQERRRRLEEQRLKAEQRRAALEERQRQKLEKNKERYEAAIQRSVKKTWAEIRQQRWSWAGALHHSSPGHKTSGSRCSVSAVNLPKHVDSIINKRLSKSSATLWNSPSRNRSLQLSAWESSIVDRLMTPTLSFLARSRSAVTLPRNGRDQGRGCDPGRGPTWGRAGASLARGPQPDRTHPSAAVPVCPRSASASPLTPCSVTRSVHRCAPAGERGERRKPNAGGSPAPVRRRPEASPVQKKEKKDKERENEKEKSALARERSLKKRQSLPASPRARLSASTASELSPKSKARPSSPSTSWHRPASPCPSPGPGHTLPPKPPSPRGTTASPKGRVRRKEEAKESPSAAGPEDKSQSKRRASNEKESAAPASPAPSPAPSPTPAPPQKEQPPAETPTDAAVLTSPPAPAPPVTPSKPMAGTTDREEATRLLAEKRRQAREQREREEQERRLQAERDKRMREEQLAREAEARAEREAEARRREEQEAREKAQAEQEEQERLQKQKEEAEARSREEAERQRLEREKHFQQQEQERQERRKRLEEIMKRTRKSEVSETKQKQDSKEANANGSSPEPVKAVEARSPGLQKEAVQKEEPIPQEPQWSLPSKELPASLVNGLQPLPAHQENGFSTNGPSGDKSLSRTPETLLPFAEAEAFLKKAVVQSPQVTEVL

SEQ ID NO: 157 - DNA, 3610 bp, Homo sapiens
cgaggttcgggctggttgttccgttgcgagctgcagctgcgatctctgtggtaggcccagaagtgtatgctgacttgtaaagtgaagaagccagtggtgctgcgggtgttcttttggggtagtgtctgggatccagtacgagttgaatcattgttcaaataaggtgtaattgaaaagtgatcctctcttcagagatgtcaaaaacaaacaaatccaagtctggatctcgctcttctcgctcaagatctgcatcaagatctcgttctcgttcattttcgaagtctcggtcccgaagccgatctctctctcgttcaaggaagcgcaggctgagttctaggtctcgttccagatcatattctccagctcataacagagaaagaaaccacccaagagtatatcagaatcgggatttccgaggtcacaacagaggctatagaaggccctattatttccgtgggcgtaacagaggcttttatccatggggccaatataaccgaggaggctatggaaactaccgctcaaattggcagaattaccggcaagcatacagtcctcgtcgaggccgttcaagatcccggtccccaaagagaaggtccccttcaccaaggtccaggagccattctagaaactctgataagtcgtcttctgaccggtcaaggcgctcctcatcctcccgttcttcctccaaccatagccgagttgaatcttctaagcgcaagtctgcaaaggagaaaaagtcctcttctaaggatagccggccatctcaggctgccggggataaccagggagatgaggtcaaggagcagacattctctggaggcacctctcaagatacaaaagcatctgagagctcgaagccatggccagatgccacctacggcactggttctgcatcacgggcctcagcagtttctgagctgagtcctcgggagcgaagcccagctctcaaaagccccctccagtctgtggtggtgaggcggcggtcaccccgtcctagccccgtgccaaaacctagtcctccactttccagcacatcccagatgggctcaactctgccgagtggtgccgggtatcagtctgggacacaccaaggtcagttcgaccatggttctgggtccctgagtccatccaaaaagagccctgtgggtaagagtccaccatccactggctccacatatggctcatctcagaaggaggagagtgctgcttcaggaggagcagcctatacaaagaggtatctagaagagcagaagacagagaatggaaaagataaggaacagaaacaaacaaataccgataaagaaaaaataaaagagaaagggagcttctctgacacaggcttgggtgatggaaaaatgaaatctgattcttttgctcccaaaactgattctgagaagccttttcggggcagtcagtctcccaaaaggtataagctccgagatgactttgagaagaagatggctgacttccacaaggaggagatggatgatcaagataaggacaaagctaagggaagaaaggaatctgagtttgatgatgaacccaaatttatgtctaaagtcataggtgcaaacaaaaaccaggaggaggagaagtcaggcaaatgggagggcctggtatatgcacctccagggaaggaaaagcagagaaaaacagaggagctggaggaggagtctttcccagagagatccaaaaaggaagatcggggcaagagaagcgaaggtgggcacaggggctttgtgcctgagaagaatttccgagtgactgcttataaagcagtccaggagaaaagctcatcacctcccccaagaaagacctctgagagccgagacaagctgggagcgaaaggagattttcccacaggaaagtcttccttttccattactcgagaggcacaggtcaatgtccggatggactcttttgatgaggacctcgcacgacccagtggcttattggctcaggaacgcaagctttgccgagatctagtccatagcaacaaaaaggaacaggagtttcgttccattttccagcacatacaatcagctcagtctcagcgtagcccctcagaactgtttgcccaacatatagtgaccattgttcaccatgttaaagagcatcactttgggtcctcaggaatgacattacatgaacgctttactaaatacctaaagagaggaactgagcaggaggcagccaaaaacaagaaaagcccagagatacacaggagaatagacatttcccccagtacattcagaaaacatggtttggctcatgatgaaatgaaaagtccccgggaacctggctacaaggctgagggaaaatacaaagatgatcctgttgatctccgccttgatattgaacgtcgtaaaaaacataaggagagagatcttaaacgaggtaaatcgagagaatcagtggattcccgagactccagtcactcaagggaaaggtcagctgaaaaaacagagaaaactcataaaggatcaaagaaacagaagaagcatcggagagcaagagacaggtccagatcctcctcctcttcctcccagtcatctcactcctacaaagcagaagagtacactgaagagacagaggaaagagaggagagcaccacgggctttgacaaatcaagactggggaccaaagactttgtgggtccaagtgaaagaggaggtggcagagctcgaggaacctttcagtttcgagccagaggaagaggctggggcagaggcaactactctgggaacaataacaacaacagcaacaacgattttcaaaaaagaaaccgggaagaggagtgggacccagagtacacacccaaaagcaagaagtattacttgcatgatgaccgtgaaggcgaaggcagtgacaagtgggtgagccggggccggggccgaggagcctttcctcggggtcggggccggttcatgttccggaaatcaagtaccagccccaagtgggcccatgacaagttcagtggggaggaaggggagattgaagacgacgagagtgggacagagaaccgagaagagaaggacaatatacagcccacaaccgagtaggggccacccttgacgggattcctgcccaggggagagaggcgctgggaagatggctggtgaggagcttaacagaggaacctcaagaagattctgaaaatcctacccccaccccccaccagccgcacagattgtactaccgcgagaggcatccctggcgctgtctcccactggacagaggaggctggccatggggcccaggggtcaggcccagcttttgagcagaatacaacgcattgggctttagctgtttttctcatttgttggtgtgtggggtgggggcaggggtagggcgggagagcgatgcttggatttttgtttcctattagaaaccaacagttttgttctaatttcatttcatttggagctaagatgactaatttgatgattttcgatctcttttcccctgtcctgattttaaaagccccctccttttttttttttttttttctttttttaggcatatgtagtaatattagaaacatttaatttgggaaactttgattcttgaaagagaaaacaaaagcatgtgaataaactttgctcgtgcc

SEQ ID NO: 158 - protein, 955 aa, Homo sapiens
MSKTNKSKSGSRSSRSRSASRSRSRSFSKSRSRSRSLSRSRKRRLSSRSRSRSYSPAHNRERNHPRVYQNRDFRGHNRGYRRPYYFRGRNRGFYPWGQYNRGGYGNYRSNWQNYRQAYSPRRGRSRSRSPKRRSPSPRSRSHSRNSDKSSSDRSRRSSSSRSSSNHSRVESSKRKSAKEKKSSSKDSRPSQAAGDNQGDEVKEQTFSGGTSQDTKASESSKPWPDATYGTGSASRASAVSELSPRERSPALKSPLQSVVVRRRSPRPSPVPKPSPPLSSTSQMGSTLPSGAGYQSGTHQGQFDHGSGSLSPSKKSPVGKSPPSTGSTYGSSQKEESAASGGAAYTKRYLEEQKTENGKDKEQKQTNTDKEKIKEKGSFSDTGLGDGKMKSDSFAPKTDSEKPFRGSQSPKRYKLRDDFEKKMADFHKEEMDDQDKDKAKGRKESEFDDEPKFMSKVIGANKNQEEEKSGKWEGLVYAPPGKEKQRKTEELEEESFPERSKKEDRGKRSEGGHRGFVPEKNFRVTAYKAVQEKSSSPPPRKTSESRDKLGAKGDFPTGKSSFSITREAQVNVRMDSFDEDLARPSGLLAQERKLCRDLVHSNKKEQEFRSIFQHIQSAQSQRSPSELFAQHIVTIVHHVKEHHFGSSGMTLHERFTKYLKRGTEQEAAKNKKSPEIHRRIDISPSTFRKHGLAHDEMKSPREPGYKAEGKYKDDPVDLRLDIERRKKHKERDLKRGKSRESVDSRDSSHSRERSAEKTEKTHKGSKKQKKHRRARDRSRSSSSSSQSSHSYKAEEYTEETEEREESTTGFDKSRLGTKDFVGPSERGGGRARGTFQFRARGRGWGRGNYSGNNNNNSNNDFQKRNREEEWDPEYTPKSKKYYLHDDREGEGSDKWVSRGRGRGAFPRGRGRFMFRKSSTSPKWAHDKFSGEEGEIEDDESGTENREEKDNIQPTTE

SEQ ID NO: 159 - DNA, 2120 bp, Homo sapiens
gggaagcgcgcggccgggcgggcggccatggcgcggcacgctgggaggtagcgcggcggctgcaggagcgcacagtcggccatggcccggcggcggcgccgcgcctgcatcgctctgttcctggtgctgctcttcgccttcggcaccctcatgggtctgcgcacgctcaaggctccggacggactcccggcgctgggcccgggcctggagctggcgccctttgagcgacgcccagagggggcccccgcgcccgctgccagggccccggcagcccctgccgcgccgcccccgccgccgccgccgccccgcaccgcggaccctggcggctcccctgggccggcacccgcggaggccgagcccgcccccgtgcagagcctgcgcgtctactcggacctgcacgccttctactactcgtggtacgggagcccgcggcgcgagggccactacattcactgggaccacgtcatggtgccgcactgggaccccaagatctcggccagctacccccgcggccgccacagccccccagacgacttgggctccagcttctacccggagctggggccctacagctcccgggaccccgaagtgctgcgggagcatatgacccagctcaaggaagccgccatcggcgtcctggtcctgtcctggtacccacctggcatggctgatgataacggggagccctcagatgacctggtgcccgccattctggacaccgcccatcagtacagcatccaggtggccttccacatccaaccctacaagggccgggatgacatcactgtacatgacaacatcaagtacatcattgacacaactggaaagctgtgaagaacttttgtgatgccaacaacctcatgttcatccccagtgtggggcctggctacatagacaccagcattcggccctggaacaaccacaatacgcgcaacagggtcaatggcaagtactatgagacggccctgcaggcggccctgacagtgaggcccgagatcgtttccattacctccttcaatgagtggcacgagggcacccagattgagaaggccattcccaagaagacacccacccgcctgtatttggactacctgcctcaccagcccagcctgtacctggagctgacacgccgctgggcggagcacttcatcaaagagaaggagcagtggctcatgtgaggggcctgtaaatgggcgtgaggtgctgatgtccttgccttgctggaagatgtcaccatgtggggttcagctgaggttgtagccactcactcgttcccaggtcagaggtcagcagatgggtgtttctgggtgggccgtcaggcatgggcctgtgcaacacagagcccgttcctcaggcgagtggtgctgaggtgctctgtggtgatgggaacggcagaggctggcaggtgactgaacttagcccagggcagctccacatcctgggaacactttcatgtaaccccttctagttttgaactctgcagcaggctggtgctgtgtagtggccacccagtcaccacccttggaagggtgtcagggtctgggctcgcatgcaccctgctcccttctgccagcctgcatcctctcctcaggcctccttcccacatcatctgtcttctctaagttagggaaccatatttgagactttcaaaaagggaacttctaggtttaagctcctcccagtagattcctgaacccaattatcaggaaatcatcctgagcactcacaggttcatttaacactcactcatcaagcaccttcctatgtgctaggtgctggggaaaacttgaccaaggaagagttcctgtcctgaagcttccaggacccagctttccttttctggtgtggccttgtagctagtgcctgggcacaggtgtttttctttttgcagttttacctagtgctgggagttcagttctttttcctctagaaaaatacctctgtgctccagagcctaatttttcccagatgcatatttagctctagggagaggactaggaggaaatccccctccctttagctgcctgaactgaggcccactcactagagccatgttcagtgctactgtgattagtagtaattaaatatgaactggtattctcaaaaaaaaaaaaaaaaaa

SEQ ID NO: 160 - protein, 250 aa, Homo sapiens
MARRRRRACIALFLVLLFAFGTLMGLRTLKAPDGLPALGPGLELAPFERRPEGAPAPAARAPAAPAAPPPPPPPPRTADPGGSPGPAPAEAEPAPVQSLRVYSDLHAFYYSWYGSPRREGHYIHWDHVMVPHWDPKISASYPRGRHSPPDDLGSSFYPELGPYSSRDPEVLREHMTQLKEAAIGVLVLSWYPPGMADDNGEPSDDLVPAILDTAHQYSIQVAFHIQPYKGRDDITVHDNIKYIIDTTGKL

SEQ ID NO: 161 - DNA, 2341 bp, Homo sapiens
agtctaaagcctggctcccttccggcctggcgcgctacggttcccgcaggcgctccgcttcagcaccgcgggcgtggacagctccggggcgcgaggctctgggactcatctgcaggaagtgaacctggcaggaggcttgcttcaggtttttaggaaccatttttgcaattggagatgtttgtgaggaaaaaaatctctgttgaggggggtactgtgtgtctctgaagtggcctctgtgttgcgtctcaggcgtcctggtcctgtcctggtacccacctggcatggctgatgataacggggagccctcagatgacctggtgcccgccattctggacaccgcccatcagtacagcatccaggtatggctcccatggtgcattttaccgctataagaacagcatgggcaagagcctcccactcttttatatctacgactcatacctgacgtcccctgaggcctgggcccacctcctgacaccaaacgggccccattcgatccgcaacacgccctacgatggggtcttcatagcgctgctggtggaggagggccacacccacgatatcctggccgccggatttgacggcatgtacacctactttgcctccaatggtttctcctttggttcttcccatcagaactggaaagctgtgaagaacttttgtgatgccaacaacctcatgttcatccccagtgtggggcctggctacatagacaccagcattcggccctggaacaaccacaatacgcgcaacagggtcaatggcaagtactatgagacggccctgcaggcggccctgacagtgaggcccgagatcgtttccattacctccttcaatgagtggcacgagggcacccagattgagaaggccattcccaagaagacacccacccgcctgtatttggactacctgcctcaccagcccagcctgtacctggagctgacacgccgctgggcggagcacttcatcaaagagaaggagcagtggctcatgtgaggggcctgtaaatgggcgtgaggtgctgatgtccttgccttgctggaagatgtcaccatgtggggttcagctgaggttgtagccactcactcgttcccaggtcagaggtcagcagatgggtgtttctgggtgggccgtcaggcatgggcctgtgcaacacagagcccgttcctcaggcgagtggtgctgaggtgctctgtggtgatgggaacggcagaggctggcaggtgactgaacttagcccagggcagctccacatcctgggaacactttcatgtaaccccttctagttttgaactctgcagcaggctggtgctgtgtagtggccacccagtcaccacccttggaagggtgtcagggtctgggctcgcatgcaccctgctcccttctgccagcctgcatcctctcctcaggcctccttcccacatcatctgtcttctctaagttagggaaccatatttgagactttcaaaaagggaacttctaggtttaagctcctcccagtagattcctgaacccaattatcaggaaatcatcctgagcactcacaggttcatttaacactcactcatcaagcaccttcctatgtgctaggtgctggggaaaacttgaccaaggaagagttcctgtcctgaagcttccaggacccagctttccttttctggtgtggccttgtagctagtgcctgggcacaggtgtttttctttttgcagttttacctagtgctgggagttcagttctttttcctctagaaaaatacctctgtgctccagagcctaatttttcccagatgcatatttagctctagggagaggactaggaggaaatccccctccctttagctgcctgaactgactgaggcccactcactagagccatgttcagtgctactgtgattagtagtaattaaatatgaactggtattctcaagtaagcattccttttgctctctttaagacctcacagattctgaccttagattctgtgacaaactgatacaggagctgggctggctatggctttaccacaacaagtaggtttgcttaagaaattactaaacaatggctgggcgtggtggctcactcctgtaatcccagcactttgggaggccgagatgggcggatcacgaggtcaggagatcgagaccatcctggctaacagggtgaaaccacgtctctactaaaaatacaaaaaaattagccaggcgtagtggtgggcgcctgtagtcccagctacttgggaggctgaggcaggagaatggcgtgaacccgggaggcggagcttgcagtgagccgagatcacgccactgcactccagcctgggcgacagagcgagactccgtctc

SEQ ID NO: 162 - protein, 235 aa, Homo sapiens
MITGSPQMTWCPPFWTPPISTASRYGSHGAFYRYKNSMGKSLPLFYIYDSYLTSPEAWAHLLTPNGPHSIRNTPYDGVFIALLVEEGHTHDILAAGFDGMYTYFASNGFSFGSSHQNWKAVKNFCDANNLMFIPSVGPGYIDTSIRPWNNHNTRNRVNGKYYETALQAALTVRPEIVSITSFNEWHEGTQIEKAIPKKTPTRLYLDYLPHQPSLYLELTRRWAEHFIKEKEQWLM

SEQ ID NO: 163 - DNA, 1871 bp, Homo sapiens
cgggcctgggcggatgtctccggcgcgtcggtgcagggggatgagggccgcggtggctgccagcgtggggttgagcgaggggcctgctggctcccggagcggtcgcctcttccgcccgccgagtcccgctccggcggcccccggcgcccggctgttgcggctcccggggagcggggccgtgcaggccgcgagcccggagcgcgccggctggaccgaggcgctgcgggccgccgtggccgagctgcgcgccggcgccgtggtggccgtccccaccgatacgctgtacggcctggcctgcgcggcgagctgctcggcggctctgcgcgctgtgtaccgcctcaagggtcgcagcgaggccaagcctctggccgtatgcctcggccgcgtggccgacgtctacagatactgccgtgtgagagtacctgaggggctcctgaaagacctactgccaggaccagtgaccctggtgatggaacgctcggaggagctcaacaaggacctaaacccttttacgcctcttgtaggcattcggattcctgatcatgcttttatgcaagacttggctcagatgtttgagggtccgcttgctctcactagtgccaacctcagctcccaggccagttctctgaatgtcgaggagttccaggatctctggcctcagttgtccttggttattgatgggggacaaattggggatggccagagccccgagtgtcgccttggctcaactgtggttgatttgtctgtgcccggaaagtttggcatcattcgtccaggctgtgccctggaaagtactacagccatcctccaacagaagtacggactgctcccctcacatgcgtcctacctgtgaaactctgggaagcaggaaggcccaagacctggtgctggatactatgtgtctgtccactgacgactgtcaaggcctcatttgcagaggccaccggagctagggcactagcctgacttttaaggcagtgtgtctttctgagcactgtagaccaagcccttggagctgctggtttagccttgcacctggggaaaggatgtatttatttgtattttcatatatcagccaaaagctgaatggaaaagttaagaacattcctaggtggccttattctaataagtttcttctgtctgttttgtttttcaattgaaaagtaattaaataacagatttagaatctagtgagagcctcctctctggtgggtggtggcatttaaggttcaaaccagccagaagtgctggtgctgtttaaaaagtctcaggtggctgcgtgtggtggctcatgcctgtaatcccaacattctgggaggcccaggcgggagaactgcttgagcccaggagttcagaatcagcctgggcaacatagcaatactccgtctcataaaaattaataaataaaaagtctcaggtgaccaaaggctcctgaagctagaaccaggtttggataaagattgaagagccacaggccactcttccctctgagccattgggcctagtggtgtcatgtattgtaattgctcgcagggagagcagtctttttggtgtaatagtgggatgtctgcttagttggcaggggttcagtccaaatggaagaatattgggaaataaacctccactatcctttatagccagggacttttttcttatttattcataaaataaattatagttaattatacccataacacctttatttaaatccagtgttctccgcagccttttgtctatttatatgtgtaccaagtgttaaacataattattattgggcatttgaactttgtttttctttaaagaaatgctgctattaaacatatttgtaaatggtttaaaaaaaaaaaaaaaaaaaaaaaaaaaaaaaaaaa

SEQ ID NO: 164 - protein, 279 aa, Homo sapiens
MSPARRCRGMRAAVAASVGLSEGPAGSRSGRLFRPPSPAPAAPGARLLRLPGSGAVQAASPERAGWTEALRAAVAELRAGAVVAVPTDTLYGLACAASCSAALRAVYRLKGRSEAKPLAVCLGRVADVYRYCRVRVPEGLLKDLLPGPVTLVMERSEELNKDLNPFTPLVGIRIPDHAFMQDLAQMFEGPLALTSANLSSQASSLNVEEFQDLWPQLSLVIDGGQIGDGQSPECRLGSTVVDLSVPGKFGIIRPGCALESTTAILQQKYGLLPSHASYL

SEQ ID NO: 165 - DNA, 822 bp, Homo sapiens
aaggagaccggtggggacggggcggggcgcagccttgcgaagccctaacgcagcgctggggaggggggcggccgaaaggggggcggtggtcgggccgcgcaagcggagatggaatggggcccgggctcagactggtcacggggggaggctgccggcgtggaccgcgggaaggcggggctggggctcggcgggaggccacccccacagccgccccgggaggagcgcgcccagcagctgctggacgcggtggagcagcggcagcggcagctcctggacaccatcgcagcctgcgaggagatgttacggcagctgggccgccggcgcccggagccggctggtggcgggaacgtctcagccaaacctggagcgcccccccagccggctgtctccgccagaggcggctttccaaaggatgctggcgatggagctgcggagccctgaccatccccgagcagaataccctgacttctctccctccccagggccggtggctggactctgaacaactcccttcagtaaaggggccagtcttcactggcagtggctggtacttggctctcagcctggagtggcagctctgctagcagctgggttcactcccacttcatcctggctgaaagcagtgctgtgctttgaaatgcagccaatgaatacccagtctgattacccagatttgggcagaccagcagtgctcgccagagtggtctggcctgctatgggggatccaggtggtgttacatgtccatttcatgttttgggggcttttagccccacaaaacaccttcagtagagccttgattaaaaggaaacctgcagactctc

SEQ ID NO: 166 - protein, 156 aa, Homo sapiens
MGPGLRLVTGGGCRRGPREGGAGARREATPTAAPGGARPAAAGRGGAAAAAAPGHHRSLRGDVTAAGPPAPGAGWWRERLSQTWSAPPAGCLRQRRLSKGCWRWSCGALTIPEQNTLTSLPPQGRWLDSEQLPSVKGPVFTGSGWYLALSLEWQLC

SEQ ID NO: 167 - DNA, 3302 bp, Homo sapiens
cggtgctgccgccgttgccgggagccgcggagacaagtcattacgttttcatttctcacaactgggctgagcacaactgaaccatgggggaacacagtccagacaacaacatcatctactttgaggcagaggaagatgagctgacccccgatgataaaatgctcaggtttgtggataaaaacggactggtgccttcctcatctggaactgtttatgataggaccactgttcttattgagcaggaccctggcactttggaggatgaagatgacgacggacagtgcggagaacacttgccttttctagtagggggtgaagagggctttcacctgatagatcatgaagcaatgtcccagggttatgtgcagcacattatctcaccagatcagattcatttgacaataaaccctggttccacacccatgccaagaaatattgaaggtgcaaccctcactctgcagtcggaatgtccggaaacaaaacgtaaagaagtaaagcggtaccaatgtacctttgagggctgtccccgcacctacagcacagcaggcaacctgcgaacccaccagaagactcaccgaggagagtacacctttgtctgtaatcaggagggctgtggcaaagccttccttacctctcacagcctcaggatccacgtgcgagtgcacacgaaggagaagccatttgagtgtgacgtgcagggctgtgagaaggcattcaacacactgtacaggctgaaagcacatcagaggcttcacacagggaaaacgtttaactgtgaatctgaaggctgcagcaaatacttcaccacactcagtgatctgaggaagcacattcgaactcatacaggggaaaagccatttcggtgcgatcacgatggctgtggaaaagcatttgcagcaagccaccaccttaaaactcacgttcgtacacatactggtgaaagacccttcttctgccccagtaatggctgtgagaaaacattcagcactcaatacagtctcaaaagtcacatgaaaggtcatgataacaaaggacactcatacaatgcacttccacaacacaatggatcagaggatacaaatcactcactttgtctaagtgacttgagccttctgtccacagattctgaattgcgagaaaattccagtacgacccagggccaggacctcagcacaatttcaccagcaatcatctttgaatcaatgttccagaattcagatgatacggcaattcaggaagatcctcaacagacagcttccttgactgaaagttttaatggtgatgcagagtcagtcagtgatgttccgccatccacaggaaattcagcatctttatctcttccacttgtactgcaacctggcctctccgagccaccccagcctctactacctgcctcagctccgtctgctcctccgcctgctccctccctaggacctggctcccagcaagctgcatttggcaacccccctgctctcttacaacctccagaagtgcctgttccccacagcacacagtttgctgctaatcatcaagagtttcttccgcacccccaggcaccgcagcccattgtaccaggactttctgttgttgctggggcttctgcatcagcagcggcagtggcatcagctgtggcagcaccagccccaccacaaagtactactgagcccctgccagccatggtccagactctgcccctgggtgccaactctgtcctaactaataatcccacaataaccatcaccccaactcccaacacagctatcctgcagtccagcctagtcatgggagaacagaacttacaatggatattaaatggtgccaccagttctccacaaaaccaagaacaaattcagcaagcatctaaagttgagaaggtgttttttaccactgcagtaccagtagccagtagcccagggagctctgtccagcagattggcctcagtgttcctgtgatcatcatcaaacaagaagaggcatgtcagtgtcagtgtgcatgccgggactctgcaaaggagcgggcatccagcaggagaaagggctgctcctccccaccccctccagagccgagcccccaggctcctgatgggcccagcctgcagctcccagcgcagactttctcttcagcccctgttcccgggtcatcatcctctaccttgccctcctcctgtgagcaaagccgacaagcagagactccttcagaccctcagacagaaacattaagtgccatggatgtgtcagagtttctatccctccagagcctggacaccccgtccaatctgattcccattgaagcactactgcagggggaggaggagatgggcctcaccagcagcttctccaagtgaagggcccatgtgtgctcacctctgggaaaagcgggtgagcaggaggcatgaggtacaatgcctgccatcatgggtcagaaatttgaaggatgaagaaatctactgtttgaaatcctcacctttcagacgtattttctttattcacatcccaggagcatccattttaaggaactattctttggaaaaaaacaaaaaacaaaaaaaacaacaaaaaaagctaagttataagtgaactgtttggctgcactgtatgtcacttttgcttgttgtcatgtgaacttggaaactaaggttactcgtgtgcataaaaattctaaatgaaagggtgtggtttccatcaatctgatgctgcccatcgcttgcactggggtctttgtggatcgggcaggagttttcagtgtgttgggtgttgctccttcctatgtgtcttttgaatctgaggctgacatttgcttggaaggccagacccttgctccatcagagagggcagtggcaaaggccagtgaggcagctgtgagttggacagggttcaggtgagatggtgttgtcatttgtgcttagtgttggtggtgctcagggtggataacacgggtcgttctgcagcccgcttcagcacaaataggcagcttaaggcctggctcacaggctgtggggttgatctggctctgcagaggccctaggcagcttgttgactgctgtctgttgatgacgtgtgtgcaaagcaggctctagcaacatgatcactgtccttgccttcctggttctttctctcggttggttgccagggcttgcagatcgcagtgaattttccttggggaacatcgctgttttgtcctagagtgaacttgtggcttatggccagtgctgtttggtggtctgccttctttttaatggtattttcttcctcagagcagaagggctgcattttgcttatcagaagaaggtgcagatttaagg

SEQ ID NO: 168 - protein, 753 aa, Homo sapiens
MGEHSPDNNIIYFEAEEDELTPDDKMLRFVDKNGLVPSSSGTVYDRTTVLIEQDPGTLEDEDDDGQCGEHLPFLVGGEEGFHLIDHEAMSQGYVQHIISPDQIHLTINPGSTPMPRNIEGATLTLQSECPETKRKEVKRYQCTFEGCPRTYSTAGNLRTHQKTHRGEYTFVCNQEGCGKAFLTSHSLRIHVRVHTKEKPFECDVQGCEKAFNTLYRLKAHQRLHTGKTFNCESEGCSKYFTTLSDLRKHIRTHTGEKPFRCDHDGCGKAFAASHHLKTHVRTHTGERPFFCPSNGCEKTFSTQYSLKSHMKGHDNKGHSYNALPQHNGSEDTNHSLCLSDLSLLSTDSELRENSSTTQGQDLSTISPAIIFESMFQNSDDTAIQEDPQQTASLTESFNGDAESVSDVPPSTGNSASLSLPLVLQPGLSEPPQPLLPASAPSAPPPAPSLGPGSQQAAFGNPPALLQPPEVPVPHSTQFAANHQEFLPHPQAPQPIVPGLSVVAGASASAAAVASAVAAPAPPQSTTEPLPAMVQTLPLGANSVLTNNPTITITPTPNTAILQSSLVMGEQNLQWILNGATSSPQNQEQIQQASKVEKVFFTTAVPVASSPGSSVQQIGLSVPVIIIKQEEACQCQCACRDSAKERASSRRKGCSSPPPPEPSPQAPDGPSLQLPAQTFSSAPVPGSSSSTLPSSCEQSRQAETPSDPQTETLSAMDVSEFLSLQSLDTPSNLIPIEALLQGEEEMGLTSSFSK

SEQ ID NO: 169 - DNA, 3995 bp, Homo sapiens
gtcccgtgcgccctgtggtgacagctcaggagggtgtgtgcgctcagcaggggccagcatggaccagtctgtggcaatccaggagacgctggctgagggggaatactgcgtcatcgcggtgcaaggtgtgctgtgtgagggggacagccggcagagccgcctcctgggactcgtgcgctaccgcctggagcatggcggccaggaacacgctctcttcctctatacgcaccggaggatggccattaccggggacgatgtctctctggaccagatagtgccagtctcgcgggattttacgctggaagaagtgtccccagatggtgaactctacatccttggctcagatgtgaccgtccagctggacacagcagagcttagcctcgtattccaactgccctttggttcacaaaccaggatgttcctccacgaagttgccagggcctgtccaggcttcgattctgcgacccgggatcctgaattcctgtggctgtctcggtataggtgcgcagagctggagctggagatgccaacgccgcgcggttgtaactcggccctagttacctggccagggtacgcgacaattggcggaggtggttctaactttgatggtttgagaccaaatgggaagggagtgcctatggaccaaagctccaggggtcaagataaaccagaaagcttgcaaccaagacagaataaatccaagtccgaaattactgacatggttcgctcctccactatcacagtgtcggacaaggctcatattttatccatgcagaagtttggactgcgagatacaattgtgaaatcacatctactacagaaagaagaggattacacctatatccagaacttcaggttttttgcgggaacatacaatgtaaatgggcagtcccccaaagaatgcctccggctgtggctgagcaatggtatccaggccccagatgtctattgtgtagggttccaggagcttgatctgagtaaggaagcttttttctttcacgataccccaaaggaggaagagtggttcaaagctgtgtcagagggtcttcatccagatgccaaatatgcaaaggtgaagcttatccgactggttgggattatgctgctgttatatgtcaaacaggagcatgcagcttatatctcagaagtggaagccgagactgtggggacaggaatcatggggaggatgggcaacaagggaggcgtggcgatcaggttccagttccacaacaccagcatctgcgttgtgaattctcacttggcagcccacattgaagagtatgagaggaggaaccaggactataaggacatttgttctcgaatgcagttttgtcagcctgacccaagccttccccctctcaccatcagcaaccatgatgtgatcttgtggctgggggacctcaactacaggatagaagagctggatgtggaaaaagtgaaaaagctcatcgaagagaaggactttcaaatgctgtatgcatatgatcagctgaaaattcaggtggccgcaaagactgtctttgaaggcttcacagagggtgagctcacattccagcctacttacaagtatgatacgggctctgacgactgggataccagtgagaagtgccgtgctcctgcctggtgtgatcggattctctggaaagggaagaacatcactcagctgagttaccagagccacatggccctgaagaccagtgaccacaagcctgtcagctcagtgtttgacatcggggtgagggtcgtaaatgacgagctttaccggaagacactggaggaaattgttcgctccctggataagatggaaaatgccaacattccttctgtgtccctgtccaagcgagagttctgttttcagaatgtgaagtacatgcaattgaaagtagaatcctttacaattcataatggacaagtaccctgtcattttgaattcatcaacaagcctgatgaagagtcttactgtaagcagtggctgaatgccaaccccagcagaggcttcctcctgccagattctgatgttgagattgacttggagctcttcgtaaataagacgacagctacaaagctcaactcgggtgaagacaaaattgaggacattctggttctgcacttggacaggggaaaggattactttttgtctgtgtctgggaactacctgcccagctgttttgggtctcccattcatacactgtgttacatgagagagccaatcttggacctaccacttgaaaccattagtgagctgctagcatatttggcagcttattgcttcgaaacccagctggtcaccaaaagcttgatatgacagagaagaagaaggctcaagaatttattcaccagttcctctgcaacccactctgagcctatctctcctcctattttacttgaggctgccaattaccagccccacctgtttcagctcaagagatgccttaagataattatgtgaggccacttggtagcaagaatggcagctatttcctgagcctagtaccccaattaagcccaccattggttagcacactcagcgctgtgagtcgtgaagacacgggagaaaatccaccataataaaactgacattcaattttcaactttagttatttaacacagatttttttattttttatttttttttattttgagacggagttttgctctgtcgcgcagggtggagtgcggtggcacgatctcggctcactgcaacctctgcctcctgggtgcaagcaattatcctgcctcagcctcccgagtagctgggactacaggcacacactgccacgcccagctaattttttgcattttagtagagacggggtttcaccgtgttgcccaggctgttctaaaactcctgaactcaggtaatctgcctgcctcggcctccccaagtgctgggattacaggtgtgagccaccacgcccggcctttttttttttttttttcttttttgagatggagtttcactctcgttgcccaggctggagtgcgttggcgtggtcttggctcactgcaacctctgcctccttggttcaagcgattctcctgcctcagcctctcgagtagctgggattataggcgtccgccaccatgcctggctaatttttttgtgtgtttttagtatagacacggtttcaccatgttggccaggctggtctcgaatgcctggcctcaggtgatccacctgccttggcctcccaaagtgctgggattacaggcatgaaccaccacgcctggcctaaaatgtttttaaataactgtacttgtactcactcaccctacctccagggcatagtcagtctgggctgagatccccatgatcagatatttgatggaaagtcctgaaaggccaatgagttggatggcaagaatgcaggcagaagctgctggataaaataggctacagccacctcagatgctttcagtgctctgtctgaggatgtgtatatgcatatgcaaactcgacccccgttcctgcccagataatggctcaataactctgaggctggttgctcagcctctgagggcaatacaggcatttaaaaaattaaaatgaccaggcacagtggctcacgcctgtaatctcggcactttgggagactgaggtgggagcatcgcttgagaccaggagtttgggaccaggctgggcaacacagggagaccccctctctacaaaaacatttttaaaaaattagctgggcgtggtgatgcatgcctgtggtcccagttacttgggaggctgacgtgggtggctcacttgagcacaggagtttgaggctgcagtgacctatgaccacatcactgtacgccagcccgggtgagagagggagaccccgtctctaaaaataaaatgtaaaatcactgaaaaaatgagtgttcggtgaaacaagtgggattttctgggccagcaagtcttccaaactgtatatgatgcatcctgtctccatgtgtaatatattttaatgataaatgtatttttaacagtgaaaaaaaaaaaaaaa

SEQ ID NO: 170 - protein, 748 aa, Homo sapiens
MDQSVAIQETLAEGEYCVIAVQGVLCEGDSRQSRLLGLVRYRLEHGGQEHALFLYTHRRMAITGDDVSLDQIVPVSRDFTLEEVSPDGELYILGSDVTVQLDTAELSLVFQLPFGSQTRMFLHEVARACPGFDSATRDPEFLWLSRYRCAELELEMPTPRGCNSALVTWPGYATIGGGGSNFDGLRPNGKGVPMDQSSRGQDKPESLQPRQNKSKSEITDMVRSSTITVSDKAHILSMQKFGLRDTIVKSHLLQKEEDYTYIQNFRFFAGTYNVNGQSPKECLRLWLSNGIQAPDVYCVGFQELDLSKEAFFFHDTPKEEEWFKAVSEGLHPDAKYAKVKLIRLVGIMLLLYVKQEHAAYISEVEAETVGTGIMGRMGNKGGVAIRFQFHNTSICVVNSHLAAHIEEYERRNQDYKDICSRMQFCQPDPSLPPLTISNHDVILWLGDLNYRIEELDVEKVKKLIEEKDFQMLYAYDQLKIQVAAKTVFEGFTEGELTFQPTYKYDTGSDDWDTSEKCRAPAWCDRILWKGKNITQLSYQSHMALKTSDHKPVSSVFDIGVRVVNDELYRKTLEEIVRSLDKMENANIPSVSLSKREFCFQNVKYMQLKVESFTIHNGQVPCHFEFINKPDEESYCKQWLNANPSRGFLLPDSDVEIDLELFVNKTTATKLNSGEDKIEDILVLHLDRGKDYFLSVSGNYLPSCFGSPIHTLCYMREPILDLPLETISELLAYLAAYCFETQLVTKSLI

SEQ ID NO: 171 - DNA, 2855 bp, Homo sapiens
ttccggcactcgcggaactttggtgcagcctgatgcgcaacgtggggactcaggcgcgctgggcggcaggagttgcttccggccgtgttggtggtctgaattgagaagccgcgactaagggaagatggagacaatactggagcagcagcggcgctatcatgaggagaaggaacggctcatggacgtcatggctaaagagatgctcaccaagaagtccacgctccgggaccagatcaattctgatcaccgcactcgggccatgcaagataggtatatggaggtcagtgggaacctgagggatttgtatgatgataaggatggattacgaaaggaggagctcaatgccatttcaggacccaatgagtttgctgaattctataatagactcaagcaaataaaggaattccaccggaagcacccaaatgagatctgtgtgccaatgtcagtggaatttgaggaactcctgaaggctcgagagaatccaagtgaagaggcacaaaacttggtggagttcacagatgaagagggatatggtcgttatctcgatctccatgactgttacctcaagtacattaacctgaaggcatctgagaagctggattatatcacatacctgtccatctttgaccaattatttgacattcctaaagaaaggaagaatgcagagtataagagatacctagagatgctgcttgagtaccttcaggattacacagatagagtgaagcctctccaagatcagaatgaactttttgggaagattcaggctgagtttgagaagaaatgggagaatgggacctttcctggatggccgaaagagacaagcagtgccctgacccatgctggagcccatcttgacctctctgcattctcctcctgggaggagttggcttctctgggtttggacagattgaaatctgctctcttagctttaggcttgaaatgtggcgggaccctagaagagcgagcccagagactattcagtaccaaaggaaagtccctggagtcacttgatacctctttgtttgccaaaaatcccaagtcaaagggcaccaagcgagacactgaaaggaacaaagacattgcttttctagaagcccagatctatgaatatgtagagattctcggggaacagcgacatctcactcatgaaaatgtacagcgcaagcaagccaggacaggagaagagcgagaagaagaggaagaagagcagatcagtgagagtgagagtgaagatgaagagaacgagatcatttacaaccccaaaaacctgccacttggctgggatggcaaacctattccctactggctgtataagcttcatggcctaaatatcaactacaactgtgagatttgtggaaactacacctaccgagggcccaaagccttccagcgacactttgctgaatggcgtcatgctcatggcatgaggtgtttgggcatcccaaacactgctcactttgctaatgtgacacagattgaagatgctgtctccttgtgggccaaactgaaattgcagaaggcttcagaacgatggcagcctgacactgaggaagaatatgaagactcaagtgggaatgttgtgaataagaagacatacgaggatctgaaaagacaaggactgctctagtgttcagggatgtagctcagcttttgggctagcccaggcttccctaagatctgctttttctatttctcccaaccaaatcctcttaaagaccctttgctatgtagtctcatggtctagcatgcatcttgtagaaacaaggcatgctggcagattgcagggttgagatgtgttttatctgttttatattttaaaagattctgccagaaaataaaaccagaccttgttctaaagcccagggttatggaccaactcagtgcttcaggtcttaacgcctccatacctcttcctcaccaactttactagtagctgagatttaatgggcacctattatgctacatatcatgttaggtaaatctgacctgacctctttccccaccctcctttgttgctgcttccctgaatgagtattaccccaggatgaggtctgccatcagcttagttagccattgatgcaaatactagggaaagactaggaggatgagccagggttgctactaaggactaagtgtcgcaccaaggtttgccttttgtatttgcataaagaaaggagttggagctgggtgcagtggcttgtgcctgtagtcccagctacttgggaggctgaggcaggagggttgcttgagactagcctaggtaacatagtgagaccctgtctcattaaaaaaaaaaaaaaggcatggtggcacgcactgtagtcccagctactcaggagactgaggctagaagatcctttgaacctaggagtttgagaccagcctgggcgatatagtgaggccccatctcaaaaaaaaaaaaaggggggggggggggagttgggctgtgttggaatgggcctgcagcccaacaaacaagggaactaggaccgacagtgacttcaccagcttgctaggtcagaatgagagactggtgggtctgtctacctgtttcttctacaagatccctatttgactgtaaaagtagctaatactcacatgttctccaatcccaggtagccatggtagagttgggtagagttgagcagctgccccaggatccaaatgtggtgtctgaaatggaaagaactaaggcaaccaggaaggcactgatctgccttataagcacagtcatctgaaagtcaggcctgctgcaggacaggatcccccagagaccccatttgcctctcaacactcagaccttcaactgttttttaataaatctactttttaaaaaaaaaaaaaaaaaaaaa

SEQ ID NO: 172 - protein, 501 aa, Homo sapiens
METILEQQRRYHEEKERLMDVMAKEMLTKKSTLRDQINSDHRTRAMQDRYMEVSGNLRDLYDDKDGLRKEELNAISGPNEFAEFYNRLKQIKEFHRKHPNEICVPMSVEFEELLKARENPSEEAQNLVEFTDEEGYGRYLDLHDCYLKYINLKASEKLDYITYLSIFDQLFDIPKERKNAEYKRYLEMLLEYLQDYTDRVKPLQDQNELFGKIQAEFEKKWENGTFPGWPKETSSALTHAGAHLDLSAFSSWEELASLGLDRLKSALLALGLKCGGTLEERAQRLFSTKGKSLESLDTSLFAKNPKSKGTKRDTERNKDIAFLEAQIYEYVEILGEQRHLTHENVQRKQARTGEEREEEEEEQISESESEDEENEIIYNPKNLPLGWDGKPIPYWLYKLHGLNINYNCEICGNYTYRGPKAFQRHFAEWRHAHGMRCLGIPNTAHFANVTQIEDAVSLWAKLKLQKASERWQPDTEEEYEDSSGNVVNKKTYEDLKRQGLL

SEQ ID NO: 173 - DNA, 1738 bp, Homo sapiens
ggcgggcccgcgctcacttcctcggggaggggttggggccgcgctcccactcgcccacacggtccgtctgcagtcggcagcctcgccggcagctcgctcggcccccgcttggcccggcccgcaggtaggagccgccgagggacgcggcgcccggttcccggccccgcctgcgccgcgcgctccccgctcccgccgcccgcttcgagggttctctccccttgccaccatgagcgagtcatttgactgtgcaaaatgcaacgagtccctgtatggacgcaagtacatccagacagacagcggcccctactgtgtgccctgctatgacaatacctttgccaacacctgtgctgagtgccagcagcttatcgggcatgactcgagggagctgttctatgaagaccgccatttccacgagggctgcttccgctgctgccgctgccagcgctcactagccgatgaacccttcacctgccaggacagtgagctgctctgcaatgactgctactgcagtgcgttttcctcgcagtgctccgcttgtggggagactgtcatgcctgggtcccggaagctggaatatggaggccagacatggcatgagcactgcttcctgtgcagtggctgtgaacagccactgggctcccgttcttttgtgcccgacaagggtgctcactactgcgtgccctgctatgagaacaagtttgctcctcgctgcgcccgctgcagcaagacgctgacacagggtggagtgacataccgtgatcagccgtggcatcgagaatgtctggtctgtaccggatgccagacgcccctggcagggcagcagttcacctcccgggatgaagatccctactgtgtggcctgttttggagaactctttgcacctaagtgcagcagctgcaagcgccccatcgtaggactcggtggaggcaagtatgtgtcctttgaagaccgacactggcaccacaactgcttctcctgcgcccgctgctctacctccctggtgggccagggcttcgtaccggatggagaccaagtgctctgccagggctgtagccaggcagggccctaagccagggctcctggacccaggctttcccataccacgggcccaggactgtggctccttttctaaaccacctctgggactcagctccccccgccaaaaaaaatgggtctccttctgggctccaggattgtctccccactccagcatccccaaactggtactccctgacccaggcccccaatcctgggctcttacagagcctccatgagtcaagccccctccccacacctggactccagaattcaccctctcccctgcagtctgggttcccagactgagtcctctccccaaatcagggctctagacccgagccctccaaacctggactctgggacttaggcccccttaaatctagacttctctttataggtttcaggtctcctatgggtgcctgggaagtccttgaaagtggactgttctcaggcttgacctgccccaccccatccccgcggttgaggctgtgggggcagcagatcaggagcccactgataaggggccctagggtacagggtgctgcccagcaggtcgccaccgagtgtcttctcattttatttcagctccattttgcccatagatgggcagaggggtgagattggctcatcccccttccagattctgcaataaagcggtgtgaggaaaaaaaaaaaaaaaaaaaaaaaaaaaaaaaaaaaa

SEQ ID NO: 174 - protein, 280 aa, Homo sapiens
MSESFDCAKCNESLYGRKYIQTDSGPYCVPCYDNTFANTCAECQQLIGHDSRELFYEDRHFHEGCFRCCRCQRSLADEPFTCQDSELLCNDCYCSAFSSQCSACGETVMPGSRKLEYGGQTWHEHCFLCSGCEQPLGSRSFVPDKGAHYCVPCYENKFAPRCARCSKTLTQGGVTYRDQPWHRECLVCTGCQTPLAGQQFTSRDEDPYCVACFGELFAPKCSSCKRPIVGLGGGKYVSFEDRHWHHNCFSCARCSTSLVGQGFVPDGDQVLCQGCSQAGP

SEQ ID NO: 175 - DNA, 1017 bp, Homo sapiens
tggcggcagaggcagtgcggatccggcgttctccactgatcttttccaaggctgtacagacatggcggcggcttttcggaaggcggctaagtcccggcagcgggaacacagagagcgaagcgagcctggctttcgaaaacatctgggcctgctggagaaaaagaaagattacaaacttcgtgcagatgactaccgtaaaaaacaagaatacctcaaagctcttcggaagaaggctcttgaaaaaaatccagatgaattctactacaaaatgactcgggttaaactccaggatggagtacatattattaaggagactaaggaagaagtaaccccagaacaactaaagctgatgagaactcaggacgtcaaatatatagaaatgaagagggttgcagaagctaagaaaatcgaaagactaaaatcagagctccatctgctggatttccaggggaagcaacagaacaagcatgtgttcttttttgacaccaaaaaggaagttgaacagtttgatgtcgcaactcacctgcaaacagccccggagctagtcgacagagtctttaataggcccaggatagagaccttgcagaaagaaaaagtgaaaggagttaccaatcagactggacttaagcgaatagctaaagaaaggcaaaagcagtataactgcctgacacagcggattgaacgagagaagaaattgttcgttattgctcagaaaattcaaacacgcaaagatcttatggataaaactcagaaagtgaaggtgaagaaagaaacggtgaactccccagctatttataaatttcagagtcgtcgaaaacgttgacgtgttatagataagccttgtcattctgtatcaaaaatctgttgtcgttttctagtaacttcaaattccattactccaaatggcatggttttccggtttgtaaccataactaaattgtcagtctgacatttaatgtctttctatggacaacattaaatctccctcccttctgtaattgtttttggattgtgaaa

SEQ ID NO: 176 - protein, 253 aa, Homo sapiens
MAAAFRKAAKSRQREHRERSEPGFRKHLGLLEKKKDYKLRADDYRKKQEYLKALRKKALEKNPDEFYYKMTRVKLQDGVHIIKETKEEVTPEQLKLMRTQDVKYIEMKRVAEAKKIERLKSELHLLDFQGKQQNKHVFFFDTKKEVEQFDVATHLQTAPELVDRVFNRPRIETLQKEKVKGVTNQTGLKRIAKERQKQYNCLTQRIEREKKLFVIAQKIQTRKDLMDKTQKVKVKKETVNSPAIYKFQSRRKR

SEQ ID NO: 177 - DNA, 1442 bp, Homo sapiens
gggcggcggcggctccagcaccatgtccctgcagtacggggcggaggagacgcccctcgccggcagttacggcgcggccgattcgtttccaaaggacttcggctacggcgtggaggaggaggaagaggaggcggcggcggcgggcggaggggttggggcaggggcaggcggtggctgtggtccggggggcgctgacagctccaagccgaggattctgctcatgggactccggcgcagcggcaagtcctccatccagaaggtggtgtttcataagatgtcacccaacgagaccctctttttggaaagtaccaacaagatttataaggatgacatttccaatagctcctttgtgaatttccagatatgggattttcctgggcaaatggacttttttgacccaacctttgactatgagatgatcttcaggggaacaggagcattgatatacgtcattgacgcacaggatgactacatggaggctttaacaagacttcacattactgtttctaaagcctacaaagttaacccagacatgaattttgaggtttttattcacaaagttgatggtctgtctgatgatcacaaaatagaaacacagagggacattcatcaaagggccaatgatgaccttgcagatgctgggctagaaaaactccatcttagcttttatctgactagtatctatgaccattcaatatttgaagcctttagtaaggtggtgcagaaactcattccacaactgccgaccttggaaaacctattaaatatctttatatcaaattcaggtattgaaaaagcttttctctttgatgttgtcagcaaaatctacattgcaacagacagttcccctgtggatatgcaatcttatgaactttgctgtgacatgatcgatgttgtaattgatgtgtcttgtatatatgggttaaaggaagatggaagtggaagtgcttatgacaaagaatctatggcaattatcaagctgaataatacaactgtcctttatttaaaggaggtgactaaatttttggcactggtctgcattctaagggaagaaagctttgaaagaaaaggtttaatagactacaacttccactgtttccgaaaagctattcatgaggtttttgaggtgggtgtgacttctcacaggagctgtggtcaccagactagtgcctccagtctgaaagcgctgacacacaatggcacgccacgaaacgccatctagtctgaatcccagcgtcggggctctgtgccagcttactcttcactccagggtcggatgccacgtgctacaggacatgggagctgctgcttgtgggaatctggtgcctgttccactagagacaaggggtagagtttctcatttggatgaaaaccccttcaactggtggtgtacaactgaagctactatatcttttttgaaaatggcaaaaaaaaaaaaaaaa

SEQ ID NO: 178 - protein, 399 aa, Homo sapiens
MSLQYGAEETPLAGSYGAADSFPKDFGYGVEEEEEEAAAAGGGVGAGAGGGCGPGGADSSKPRILLMGLRRSGKSSIQKVVFHKMSPNETLFLESTNKIYKDDISNSSFVNFQIWDFPGQMDFFDPTFDYEMIFRGTGALIYVIDAQDDYMEALTRLHITVSKAYKVNPDMNFEVFIHKVDGLSDDHKIETQRDIHQRANDDLADAGLEKLHLSFYLTSIYDHSIFEAFSKVVQKLIPQLPTLENLLNIFISNSGIEKAFLFDVVSKIYIATDSSPVDMQSYELCCDMIDVVIDVSCIYGLKEDGSGSAYDKESMAIIKLNNTTVLYLKEVTKFLALVCILREESFERKGLIDYNFHCFRKAIHEVFEVGVTSHRSCGHQTSASSLKALTHNGTPRNAI

SEQ ID NO: 179 - DNA, 2093 bp, Homo sapiens
gcgcatgagcagtgctgctcccaacccgccagtcgcggtctccggcgccagctacgccgctgccgctgtcactatggcccattacaaagccgccgactcgaagcgtgagcagttccggaggtacttggagaagtcgggggtgctggacacgctgaccaaggtgttggtagccttatatgaagaaccagagaaacctaacagtgctttggattttttaaagcatcacttaggagctgctactccagaaaatccagaaatagagctgcttcgcctagaactggccgaaatgaaagagaagtatgaagctattgtagaagaaaataaaaaactgaaagcaaagcttgctcagtatgaaccacctcaggaggagaagcgtgctgaataggattcttctcagtttgaaagacaatgaaaaatggttttgtatgacttgaatagtttgtatagtatataatcttttctgaacagatgctatagaactcttttaatatgtttaattcacctatcacactctgttaaaaacacatagaatcatcaataaaaactcaatataactttctttgggtcttaaagcaggagaatccaaagtaaatcctgaacaaaacctaaacacagccatctaactcattaccttaaaagacattctgtttattagtctgattaggaatgatggcactggttgtattttagccaagacagtttagcatggagctattccttggtgcagttcaggatatgaacacaggtacagtcattctttgaaggtgacactgttctgtatattccctataggcagctggagagatctgtgtgacacaagatgcttttgtacgggttcccatgaatcttctgctcttgtttgtgtgacatggaacaaataacttctttgccaccactttgccttagataactgtgtgtgtgtgtgccagtttgaactctgacaccacattttccttctatgcaatcatgcctgtctgataatcttgcattgctttcctctgagctttagtgggtcctagttgcacactggcctttctgtgctgtttttcaatttgcctaataatagcagttaccctgattgtaatttatgtaactttaaacaggatcacactgtaccccctgcctgccttatttgcttactgagcacaggacagaggcaatatacaactctgggttcacacacaagctgagatgagaagaggaatgagccatatattggggaaaatcatagtttgtaggtataattatatagtgcttttctccctcaaagtatttttctagccttgaattcattttatcttcattatccctgtgaagtaggtgggacaagtataaggggaagaggggtgctgaatttttaggccaaagactgatattaatacaaatcactcactaactgtagagccttgggcattatcagtgaactactctgagatttactgtcttcatctgtttaatgagtagaatgtccgtgatgcctacctcacagggttgttgtgagggtcaaatgagaatgtatgtgaaagatttgtaaatggtaaagcactatattcttgtttgttagtcctttttcctttctttgggtagacctacagtcagatgttttgttttatggatcacttattttccttactggtagactgtcgttttatagacatattcctatttcatatattctctccctgttgttagagaacctatctttgtttttggtcaaaacacacatagaaaacaaaatgatccaatgaaaactggtttaactagcaaaagccttggcacctgttggagactatgaccaagccaataaaaagggcatttaaatcagccctgttagtaggaatgtggctatggctggtgcctcttctagtcacaagtttgtttttggagggggtccagaagatcattcccttgcatagatttctcttttaccaatttgagtgcctcctacatgggcagcagtggactaagtgctgggtgtgataaagaggaatgacttaattatgagactgtatataatcaaatacagtgtgggttaggacctgtggcagaccattataataaagcatggccccgtgagggttttgaaagagaaa

SEQ ID NO: 180 - protein, 103 aa, Homo sapiens
MAHYKAADSKREQFRRYLEKSGVLDTLTKVLVALYEEPEKPNSALDFLKHHLGAATPENPEIELLRLELAEMKEKYEAIVEENKKLKAKLAQYEPPQEEKRAE

SEQ ID NO: 181 - DNA, 2331 bp, Homo sapiens
ttttaaaagcaaggataagcagaaagggacatggattttagttgatggatgactcactcactacattcaactgaactgaatctgctctataccagcaaagggacaaattcagaaaataaattgaagatggccatgctgtaacttctaaacatggtttgcttctcagatttacctaaactaagaaaggtttgctttaagaaatagtgctcccttcagaatggaagaatttatctgcctcttatttgatgtggatcagagctaagatggctgactaaataaacatgggggactggaatctccttggagatactctggaggaagttcacatccactccaccatgattggaaagatctggctcaccatcctgttcatatttcgaatgcttgttctgggtgtagcagctgaagatgtctggaatgatgagcagtctggcttcatctgcaatacagaacaaccaggctgcagaaatgtatgctacgaccaggcctttcctatctccctcattagatactgggttctgcaggtgatatttgtgtcttcaccatccctggtctacatgggccatgcattgtaccgactgagagttcttgaggaagagaggcaaaggatgaaagctcagttaagagtagaactggaggaggtagagtttgaaatgcctagggatcggaggagattggagcaagagctttgtcagctggagaaaaggaaactaaataaagctccactcagaggaaccttgctttgcacttatgtgatacacattttcactcgctctgtggttgaagttggattcatgattggacagtaccttttatatggatttcacttagagccgctatttaagtgccatggccacccgtgtccaaatataatcgactgttttgtctcaagaccaacagaaaagacaatattcctattatttatgcaatctatagccactatttcacttttcttaaacattcttgaaattttccacctaggttttaaaaagattaaaagagggctttggggaaaatacaagttgaagaaggaacataatgaattccatgcaaacaaggcaaaacaaaatgtagccaaataccagagcacatctgcaaattcactgaagcgactcccttctgcccctgattataatctgttagtggaaaagcaaacacacactgcagtgtaccctagtttaaattcatcttctgtattccagccaaatcctgacaatcatagtgtaaatgatgagaaatgcattttggatgaacaggaaactgtactttctaatgagatttccacacttagtactagttgtagtcattttcaacacatcagttcaaacaataacaaagacactcataaaatatttggaaaagaacttaatggtaaccagttaatggaaaaaagagaaactgaaggcaaagacagcaaaaggaactactactctagaggtcaccgttctattccaggtgttgctatagatggagagaacaacatgaggcagtcaccccaaacagttttctccttgccagctaactgcgattggaaaccgcggtggcttagagctacatggggttcctctacagaacatgaaaaccgggggtcacctcctaaaggtaacctcaagggccagttcagaaagggcacagtcagaacccttcctccttcacaaggagattctcaatcacttgacattccaaacactgctgattctttgggagggctgtcctttgagccagggttggtcagaacctgtaataatcctgtttgtcctccaaatcacgtagtgtccctaacgaacaatctcattggtaggcgggttcccacagatcttcagatctaaacagcggttggcttttagacattatatatattatcagagaagtagcctagtggtcgtggggcacagaaaaaatagataggggcagctctaaagaccagctgttaagacagacaactgcaaactcatttaagcaagagaaaaacagctctaattcgagattgtgaagcaacacttctaaattcaaagacatagagttgtcaaatcaggattttttttttttaaaatgatatcctttcgaatgtaactgattttgggaaaatcacatgttcagaattgaggctaaatggtttgatcaggttttctctttgaagagaccacagccttaggaaatggttcttgatctatacaattccaccttggacactgggttaattctgtttgcccctggaacacaatcacgtaagtttccttctagactggcatcctgatgtgtcttgagtataatcacatgttgctacctagtaaataaaatcttaagaagatcaaaaaaaaaaaaaaaaaa

SEQ ID NO: 182 - protein, 515 aa, Homo sapiens
MGDWNLLGDTLEEVHIHSTMIGKIWLTILFIFRMLVLGVAAEDVWNDEQSGFICNTEQPGCRNVCYDQAFPISLIRYWVLQVIFVSSPSLVYMGHALYRLRVLEEERQRMKAQLRVELEEVEFEMPRDRRRLEQELCQLEKRKLNKAPLRGTLLCTYVIHIFTRSVVEVGFMIGQYLLYGFHLEPLFKCHGHPCPNIIDCFVSRPTEKTIFLLFMQSIATISLFLNILEIFHLGFKKIKRGLWGKYKLKKEHNEFHANKAKQNVAKYQSTSANSLKRLPSAPDYNLLVEKQTHTAVYPSLNSSSVFQPNPDNHSVNDEKCILDEQETVLSNEISTLSTSCSHFQHISSNNNKDTHKIFGKELNGNQLMEKRETEGKDSKRNYYSRGHRSIPGVAIDGENNMRQSPQTVFSLPANCDWKPRWLRATWGSSTEHENRGSPPKGNLKGQFRKGTVRTLPPSQGDSQSLDIPNTADSLGGLSFEPGLVRTCNNPVCPPNHVVSLTNNLIGRRVPTDLQI

SEQ ID NO: 183 - DNA, 1838 bp, Homo sapiens
agagcgggatcttcagggcagcgggcaaccccttggcccaggaagcctggaacgcaaggaccggagggcgtgggctgggacgcccctaccttggtctttcagggaaaggccttggaaagcagtcgttgcgccagacagcccagggaagagcggcagcctgaggacctagggccacctgctgttccctgggattcatgtccttctggggaggagggaggacccaggacaatggctgctgttcatgatctggagatggagagcatgaatctgaatatggggagagagatgaaagaagagctggaggaagaggagaaaatgagagaggatgggggaggtaaagatcgggccaagagtaaaaaggtccacaggattgtctcaaaatggatgctgcccgaaaagtcccgaggaacatacttggagagagctaactgcttcccgcctcccgtgttcatcatctccatcagcctggccgagctggcagtgtttatttactatgctgtgtggaagcctcagaaacagtggatcacgttggacacaggcatcttggagagtccctttatctacagtcctgagaagagggaggaagcctggaggtttatctcatacatgctggtacatgctggagttcagcacatcttggggaatctttgtatgcagcttgttttgggtattcccttggaaatggtccacaaaggcctccgtgtggggctggtgtacctggcaggagtgattgcagggtcccttgccagctccatctttgacccactcagatatcttgtgggagcttcaggaggagtctatgctctgatgggaggctattttatgaatgttctggtgaattttcaagaaatgattcctgcctttggaattttcagactgctgatcatcatcctgataattgtgttggacatgggatttgctctctatagaaggttctttgttcctgaagatgggtctccggtgtcttttgcagctcacattgcaggtggatttgctggaatgtccattggctacacggtgtttagctgctttgataaagcactgctgaaagatccaaggttttggatagcaattgctgcatatttagcttgtgtcttatttgctgtgtttttcaacattttcctatctccagcaaactgacctgcccctattgtaagtcaattaataaaaagagccatctggaggaaataaaaaaaaaaggaagactctatgaagaaacagagaagtctcagaaaaggctaacaattttatatagaggacaaaacagcattaaactcatcagttgcaaagattgcctataaaaggaccttaggatttaaggaaggggcttcttaatgtagaaagggaagaagaagagagaaaagaagggtagtaaaaactagagattggggccaggcgcagtggctcacgcctgtaatcccagcactttgggaggctgaggcgggtgaaatcacctgaggtcatgagttcaagaccagcctgaccaatatggtgaaaccctgtctctactaaagaaaatacaaaaattagccgggcgtggtggcgtgtgcctgtagtcccagctacttgcgaggctgaggcaggagaattgcttgaacctgggaggcgaaggttgcagtgagccgagattgcgccactgcactccagcctgggtgatagagcgacactcggtctcaaaaaacaaaacaaaacaaaacaaaattagagattgggtctttcccaggcatatggtattctataaaacagacttactctccttggaggatatattttggagaatgcttcataaaatctatgaatactgtacaatgctgataataaaaactttttatacctga

SEQ ID NO: 184 - protein, 303 aa, Homo sapiens
MAAVHDLEMESMNLNMGREMKEELEEEEKMREDGGGKDRAKSKKVHRIVSKWMLPEKSRGTYLERANCFPPPVFIISISLAELAVFIYYAVWKPQKQWITLDTGILESPFIYSPEKREEAWRFISYMLVHAGVQHILGNLCMQLVLGIPLEMVHKGLRVGLVYLAGVIAGSLASSIFDPLRYLVGASGGVYALMGGYFMNVLVNFQEMIPAFGIFRLLIIILIIVLDMGFALYRRFFVPEDGSPVSFAAHIAGGFAGMSIGYTVFSCFDKALLKDPRFWIAIAAYLACVLFAVFFNIFLSPAN

SEQ ID NO: 185 - DNA, 1739 bp, Homo sapiens
gcttctccggcggaacccaggctggaccgcgggccccggcctgggggccactgctgccaccgccgccgccacctcgtctcctccccgtccccgcccagccccaggtctccccgcctcactcgggcccgtggccggggtcactccccgccgcccctccccgcacggatgccgaaggtgaaggcgctgcagtgcgccctggcgctggagatcagctcagtaacttgcccaggagtcgtgcttaaagacaaagaggacatctatcttagcatctgtgtgtttggccaatacaaaaagacacaatgtgtcccagccacttttcccctggtcttcaatgccagaatggtgtttgaaaaggtgttcccggacgcagtagatcctggagatgtggttacacagcttgaatatgatacagcagtgttcgagttgatacagctagttccaccagtgggtgaaacactgtctacgtatgacgaaaatacacgagatttcatgtttccgggtccaaaccaaatgtctggacaccatgattcaaaccgccaggttaccatgaggaggatttctggccttcgaggaaatgctccaaggctggaattttctacgacttcagtgattactgaatgtctgataagttcaaggaaatgccacactcaggataaatttatttaccatttggctccagttgaaaaatcacatggcagactgcaaaacagaacatcaagatcacaaaagaaaaaatccaagtcacctgagagaagtaaatactgtataaatgcaaaaaactacgaacagcctacaatttcttcaaaatcacactctccatctccctacacaaaaagacgcatgtgtgagctatctgaagacaccaggcggcggctggcccatttaaatctgggaccctatgagttcaaaaaagaaacagataaacctccatttgtgattagacatgttgatcccccaagtcccagggctgatactttattgggatcttctggaagagactgtgaaagagatggatggtcaagggtgcacaatgatcattctcatcttggctgctgccgacccaaggattataaggttatcaggacaccccatgggagagacttcgatgactctttagaaaaatgtgaagagtatttgagcccaaggtcgtgtagtaagccccggcattcagcgaggaccttgctagtccattcagcaccctcaacaatgccaaagcattctccaagccctgtgttaaatagagcttctctcagggaaagatttcattctgattggtgttcaccttcaaactgcgatgagatccatgaccgggtaaaaaatgtcttgaaatcacatcaggctcatcaaagacatttatatgatgagagagacctagagaaagatgatgaactggaactgaaaagaagtcttttatgtagagactctgcctatgacagtgaccccgagtatagctcatgtcagcagccacgtggcactttccatttggatgacggtgaatactggtccaacagggcagcctcttataagggaaaatcccaccgacccatctttgagaacagcatggacaagatgtacaggaacttatacaaaaaggcctgtagttctgcttcacatacacaggaaagcttctgagaccatccatgataaacctcattagtgtccgtgtcaatttctcaatgaaaatgtttgatgtgatcaatatctgtattcctttttttaaaaaaaatgggattataact

SEQ ID NO: 186 - protein, 488 aa, Homo sapiens
MPKVKALQCALALEISSVTCPGVVLKDKEDIYLSICVFGQYKKTQCVPATFPLVFNARMVFEKVFPDAVDPGDVVTQLEYDTAVFELIQLVPPVGETLSTYDENTRDFMFPGPNQMSGHHDSNRQVTMRRISGLRGNAPRLEFSTTSVITECLISSRKCHTQDKFIYHLAPVEKSHGRLQNRTSRSQKKKSKSPERSKYCINAKNYEQPTISSKSHSPSPYTKRRMCELSEDTRRRLAHLNLGPYEFKKETDKPPFVIRHVDPPSPRADTLLGSSGRDCERDGWSRVHNDHSHLGCCRPKDYKVIRTPHGRDFDDSLEKCEEYLSPRSCSKPRHSARTLLVHSAPSTMPKHSPSPVLNRASLRERFHSDWCSPSNCDEIHDRVKNVLKSHQAHQRHLYDERDLEKDDELELKRSLLCRDSAYDSDPEYSSCQQPRGTFHLDDGEYWSNRAASYKGKSHRPIFENSMDKMYRNLYKKACSSASHTQESF

SEQ ID NO: 187 - DNA, 3938 bp, Homo sapiens
accgagaagaagatatttaccagtttgcttactgctacccatatacatacactcgcttccaacattaccttgacagcctgcaaaagagaaacatggattacttctttcgggagcagctgggccagagtgtgcaacaacgaaagcttgacctcctgacgataaccagccctgacaatctccgggaaggggcagagcagaaggtggtattcatcacaggacgagtccacccaggggaaacaccctcatcatttgtgtgccaagggatcattgacttccttgtaagccagcaccctattgcctgtgtcctccgggaatacctggtcttcaagatcgcaccaatgctcaatcctgatggagtctacctgggcaattacaggtgttctctgatgggatttgatctgaatcgtcactggctggatccctctccatgggtccatcctaccctgcatggagtgaaacaactcatcgtccagatgtacaacgacccaaaaacaagcctggagttttatattgacatccatgcccactccaccatgatgaatggcttcatgtatggcaacatctttgaggatgaggaacggttccagaggcaggccatttttcccaagctcctctgccagaatgctgaggacttctcctattccagcacaccctttaaccgggacgctgtgaaagcaggaactggccgtcgcttcctcggtggactcctggaccacacttcctattgctacaccctagaggtctccttctacagctacatcatcagtggcaccacggctgctgtgccctacactgaagaagcctgtatccttagtccccacccagccttgggccagccctcatccagccgagagtatccaagtctgacaggtcaggaattaggcccccagctcaggtaagggctgagactctcaggtgaggatggaggtgcttcttcttctggtggcgtctttggattgtccagtttgcctcagcccttagtatgatactcctaccccaattgccatgctccaaatctttcccaggccagccggacccatggcctgcccatatcttactctgcttccatctctctcccctctcttctctcatgatgcagtgagtctcctgccatctaagctatgcaagtccacaggctggatgaccatccccagggttgctgaggaagagcttgatgatcttgactccttctaaccctgaacatacaaaaacatatgttctcttttcatcttttgtctaacctatcctctcccactttctcttccctctactcactatttccccttctacttacttttctcacccttgttccctctccttctatgccctcctcctccctcctcacctgtcctgtgcttctctttccttacttctttttccccctcctcccctcctttctgtcctctctctcatcccatcctccttttctttctctcctctttgcctgtcttctgtcttccttgtctttcccctctcatcctctgtgcatctttctctctgcctttgcatttcctttgacaaattccttttcctcttagtttcttcataaaatttctctgaaaactccaaagccttccatgatgaaattagaagttattttctagtttgcctaattttttaaggattaggtagtaactctagtttcccgagtgttgattttaatatcaaggtcactgcatcagagctgtaacagatcgtggcagattctgctttccttgatcctttgttttcgggttgatctatgtctcctttcctaacacttagttttctcagagaagtggagggaggaggaaggaactttagatgaaatgaactctgtatttctgcaaattccccctccctggaggtagaagtgctcttttagcattttttcaacccttggtgagtgtttatggaattcctctgtgcagggaaacatcttttctgaacgtggcatgacttagggctagtcccaccagccaactgcaacttagtggctctgtttgtatgtgtgtttgggagggttgggggtatggtgtccaggtaccttgccaggaacatcggaagtagggcaatggccctagaaggaggggctgtcagggggtaggccaggtgttagagcaatgttccacatcctgttggacacagagatattatgattggaactgagagttccctatgtacagtcatcaagactgagggtcatcttgcagtctgctttaatacccacctgactcagcaaggccaagggagtaggctctgctctgaggaagagggtctgtgggttccaaagtcctggccacctgttatgtgccacattgcccctcttcatgccccatacacaccttagatgatgcatatggcctatgccttctccagaatctgctaactcctataacacatgcatatgcttcattccacattgtacttgctttgctctcccataatattatggcaaagggacagagagctgcctggaataagagtttgagcttgtgcactaaaggggattctgcaacccttattcatagtgagatgagggtccctccagaggaggcctgcccttagtttgttgttttttgctgtccaatctgacaggctctcctaccttttcttagcacttctgacatgcttctgtcttagaagaaaatgtgtttcttagtagaaagcccacccttggttcaggcccaaggtttccacccctcaacagccaacactcatttatcaaaagtaaacacagcattagtacataccaggaatcataaaaggcacctagggtaaaatactgaataaaaaggcatgattcctgactcacagaactttcagtctacttggggagacagaaaagggaagagataattacaatgtatgtgataaattctggtggaggaattccagaaggctctgggacattttcatttgacaagtatatattgagtgcctgtcataggtcaggtaaagttctaggcacagggaatgtaacagagaacatactaaagacaagaatgtctttacatgggggaaagagggaactcacacgcagtcctaggagtcagggaagatttcccaggaaaagagacatctaaactgagattttttgtttgtttgtttttgagatggagtctcactctgttacccaggctagagtgtagtggcatgatctcagctcactgcaacttctgcctcctgggttcaagcgattcccctgcctcagcctcctgagtagctgggattacaggtgtgcgccaccatgtccggctaatttttgtatttttagcagagatggggttttaccatgttggtcaggctggtctcaaacttctgacctcgtgatccacctgcttcggcctcccaaagtgctgagattacaggtgtaagccactgagcccggcctaaactgagtttttaatatgaactagtcaaactgggtgagggtgttgttgaagggaggatgtggtagacagaggggggagtacagaaggtatgggcagaagctgtaagtggtcccttagggctgaaggacttcagactcaatgataagtctgaagtggaaagatgtaagaagtttgatcttgaatgtagacaatggaaggacagattcgagggggccagtattgtagacagggacatgcattaggaggctgttataaaaatccaggtgagaaataatccaggccaagaccagagtggtggctgtagaatacttagaatgtggaactgagaagacttggtaattgactatttgggagtggcgacagggaatgggagctcgtgattggaaggggttaaggtgagtagagaggctatgcacaagctgagcaggtcgtgatactgatggacctaccctgccttgttctgtcctctagaggatgagaagaggaaacaaactgcaccagggaagctcaggccgattcaatgcatgcaagggtgatttaacctgggttctgtttgaaatactt

SEQ ID NO: 188 - protein, 268 aa, Homo sapiens
MDYFFREQLGQSVQQRKLDLLTITSPDNLREGAEQKVVFITGRVHPGETPSSFVCQGIIDFLVSQHPIACVLREYLVFKIAPMLNPDGVYLGNYRCSLMGFDLNRHWLDPSPWVHPTLHGVKQLIVQMYNDPKTSLEFYIDIHAHSTMMNGFMYGNIFEDEERFQRQAIFPKLLCQNAEDFSYSSTPFNRDAVKAGTGRRFLGGLLDHTSYCYTLEVSFYSYIISGTTAAVPYTEEACILSPHPALGQPSSSREYPSLTGQELGPQLR

SEQ ID NO: 189 - DNA, 2610 bp, Homo sapiens
caggggcggaggcggcggccagggaggaagcggaggaggcggaggcggccgcggcgttcgcccgcccgctcgctcgctcggtttccccgcccccgccgggcttaacgccgctgaaggtatccgggtgcgcgctgtcgcaacctgccctcatcctggcccgcgactgtaagaccggacccacatccagaccaatcttcctgtccgggctgctgcgacgcgggctccgcaggttgcaggcgggcggccggggcgcctgaaggttaccgagtgcatgagcgcctagcgcttcccgcgctgccccgcccgctggcccgccgacccgcccgccggctcgcccgccagcccctcggcgcccggcggcggcggcggcggtggcggcgacggtcgcaggaggtgccgtctgcctcccaggtgcgcgcttcgctcccggagccgcggaactcggcggccgccatggcgtccaacatggaccgggagatgatcctggcggattttcaggcatgtactggcattgaaaacattgacgaagctattacattgcttgaacaaaataattgggacttagtggcagctatcaatggtgtaataccacaggaaaatggcattctacaaagtgaatatggaggtgagaccataccaggacctgcatttaatccagcaagtcatccagcttcagctcctacttcctcttcttcttcagcgtttcgacctgtaatgccatccaggcagattgtagaaaggcaacctcggatgctggacttcagggttgaatacagagacagaaatgttgatgtggtacttgaagacacctgtactgttggagagattaaacagattctagaaaatgaacttcagatacctgtgtccaaaatgctgttaaaaggctggaagacgggagatgtggaagacagtacggtcctaaaatctctacacttgccaaaaaacaacagtctttatgtccttacaccagatttgccaccaccttcatcatctagtcatgctggtgccctgcaggagtcattaaatcaaaacttcatgctgatcatcacccaccgagaagtccagcgggagtacaacctgaacttctcaggaagcagtactattcaagaggtaaagagaaatgtgtatgaccttacaagtatccccgttcgccaccaattatgggagggctggccaacttctgctacagacgactcaatgtgtcttgctgaatcagggctctcttatccctgccatcgacttacagtgggaagaagatcttcacctgcacagacccgggaacagtcggaagaacaaatcaccgatgttcatatggttagtgatagcgatggagatgactttgaagatgctacagaatttggggtggatgatggagaagtatttggcatggcgtcatctgccttgagaaaatctccaatgatgccagaaaacgcagaaaatgaaggagatgccttattacaatttacagcagagttttcttcaagatatggtgattgccatcctgtattttttattggctcattagaagctgcttttcaagaggccttctatgtgaaagcccgagatagaaagcttcttgctatctacctccaccatgatgaaagtgtgttaaccaacgtgttctgctcacaaatgctttgtgctgaatccattgtttcttatctgagtcaaaattttataacctgggcttgggatctgacaaaggactccaacagagcaagatttctcactatgtgcaatagacactttggcagtgttgtggcacaaaccattcggactcaaaaaacggatcagtttccgcttttcctgattattatgggaaagcgatcatctaatgaagtgttgaatgtgatacaagggaacacaacagtagatgagttaatgatgagactcatggctgcaatggagatcttcacagcccaacaacaggaagatataaaggacgaggatgaacgtgaagccagagaaaatgtgaagagagagcaagatgaggcctatcgcctttcacttgaggctgacagagcaaagagggaagctcacgagagagagatggcagaacagtttcgtttggagcagattcgcaaagaacaagaagaggaacgtgaggccatccggctgtccttagagcaagccctgcctcctgagccaaaggaagaaaatgctgagcctgtgagcaaactgcggatccggacccccagtggcgagttcttggagcggcgtttcctggccagcaacaagctccagattgtctttgattttgtagcttccaaaggatttccatgggatgagtacaagttactgagcacctttcctaggagagacgtaactcaactggacccaaataaatcattattggaggtaaagttgttccctcaagaaacccttttccttgaagcaaaagagtaaacacggcccagcggtggaaccagccattccttgacaagccagcagcctgcgtcaggagaagggctcctcgccaacccacccacacgctcgtctcactcaattcaatgtcacacttctgcctcttgcaaaattgctggaaaaagtaataataaatatagctacttaagatttcccatcaaaaaaaaaaaaaaaaaaaaaaaaaaa

SEQ ID NO: 190 - protein, 650 aa, Homo sapiens
MASNMDREMILADFQACTGIENIDEAITLLEQNNWDLVAAINGVIPQENGILQSEYGGETIPGPAFNPASHPASAPTSSSSSAFRPVMPSRQIVERQPRMLDFRVEYRDRNVDVVLEDTCTVGEIKQILENELQIPVSKMLLKGWKTGDVEDSTVLKSLHLPKNNSLYVLTPDLPPPSSSSHAGALQESLNQNFMLIITHREVQREYNLNFSGSSTIQEVKRNVYDLTSIPVRHQLWEGWPTSATDDSMCLAESGLSYPCHRLTVGRRSSPAQTREQSEEQITDVHMVSDSDGDDFEDATEFGVDDGEVFGMASSALRKSPMMPENAENEGDALLQFTAEFSSRYGDCHPVFFIGSLEAAFQEAFYVKARDRKLLAIYLHHDESVLTNVFCSQMLCAESIVSYLSQNFITWAWDLTKDSNRARFLTMCNRHFGSVVAQTIRTQKTDQFPLFLIIMGKRSSNEVLNVIQGNTTVDELMMRLMAAMEIFTAQQQEDIKDEDEREARENVKREQDEAYRLSLEADRAKREAHEREMAEQFRLEQIRKEQEEEREAIRLSLEQALPPEPKEENAEPVSKLRIRTPSGEFLERRFLASNKLQIVFDFVASKGFPWDEYKLLSTFPRRDVTQLDPNKSLLEVKLFPQETLFLEAKE

SEQ ID NO: 191 - DNA, 2154 bp, Homo sapiens
caggggcggaggcggcggccagggaggaagcggaggaggcggaggcggccgcggcgttcgcccgcccgctcgctcgctcggtttccccgcccccgccgggcttaacgccgctgaaggtatccgggtgcgcgctgtcgcaacctgccctcatcctggcccgcgactgtaagaccggacccacatccagaccaatcttcctgtccgggctgctgcgacgcgggctccgcaggttgcaggcgggcggccggggcgcctgaaggttaccgagtgcatgagcgcctagcgcttcccgcgctgccccgcccgctggcccgccgacccgcccgccggctcgcccgccagcccctcggcgcccggcggcggcggcggcggtggcggcgacggtcgcaggaggtgccgtctgcctcccaggtgcgcgcttcgctcccggagccgcggaactcggcggccgccatggcgtccaacatggaccgggagatgatcctggcggattttcaggcatgtactggcattgaaaacattgacgaagctattacattgcttgaacaaaataattgggacttagtggcagctatcaatggtgtaataccacaggaaaatggcattctacaaagtgaatatggaggtgagaccataccaggacctgcatttaatccagcaagtcatccagcttcagctcctacttcctcttcttcttcagcgtttcgacctgtaatgccatccaggcagattgtagaaaggcaacctcggatgctggacttcagggttgaatacagagacagaaatgttgatgtggtacttgaagacacctgtactgttggagagattaaacagattctagaaaatgaacttcagatacctgtgtccaaaatgctgttaaaaggctggaagacgggagatgtggaagacagtacggtcctaaaatctctacacttgccaaaaaacaacagtctttatgtccttacaccagatttgccaccaccttcatcatctagtcatgctggtgccctgcaggagttttcttcaagatatggtgattgccatcctgtattttttattggctcattagaagctgcttttcaagaggccttctatgtgaaagcccgagatagaaagcttcttgctatctacctccaccatgatgaaagtgtgttaaccaacgtgttctgctcacaaatgctttgtgctgaatccattgtttcttatctgagtcaaaattttataacctgggcttgggatctgacaaaggactccaacagagcaagatttctcactatgtgcaatagacactttggcagtgttgtggcacaaaccattcggactcaaaaaacggatcagtttccgcttttcctgattattatgggaaagcgatcatctaatgaagtgttgaatgtgatacaagggaacacaacagtagatgagttaatgatgagactcatggctgcaatggagatcttcacagcccaacaacaggaagatataaaggacgaggatgaacgtgaagccagagaaaatgtgaagagagagcaagatgaggcctatcgcctttcacttgaggctgacagagcaaagagggaagctcacgagagagagatggcagaacagtttcgtttggagcagattcgcaaagaacaagaagaggaacgtgaggccatccggctgtccttagagcaagccctgcctcctgagccaaaggaagaaaatgctgagcctgtgagcaaactgcggatccggacccccagtggcgagttcttggagcggcgtttcctggccagcaacaagctccagattgtctttgattttgtagcttccaaaggatttccatgggatgagtacaagttactgagcacctttcctaggagagacgtaactcaactggacccaaataaatcattattggaggtaaagttgttccctcaagaaacccttttccttgaagcaaaagagtaaacacggcccagcggtggaaccagccattccttgacaagccagcagcctgcgtcaggagaagggctcctcgccaacccacccacacgctcgtctcactcaattcaatgtcacacttctgcctcttgcaaaattgctggaaaaagtaataataaatatagctacttaagatttcccatcaaaaaaaaaaaaaaaaaaaaaaaaaaa

SEQ ID NO: 192 - protein, 498 aa, Homo sapiens
MASNMDREMILADFQACTGIENIDEAITLLEQNNWDLVAAINGVIPQENGILQSEYGGETIPGPAFNPASHPASAPTSSSSSAFRPVMPSRQIVERQPRMLDFRVEYRDRNVDVVLEDTCTVGEIKQILENELQIPVSKMLLKGWKTGDVEDSTVLKSLHLPKNNSLYVLTPDLPPPSSSSHAGALQEFSSRYGDCHPVFFIGSLEAAFQEAFYVKARDRKLLAIYLHHDESVLTNVFCSQMLCAESIVSYLSQNFITWAWDLTKDSNRARFLTMCNRHFGSVVAQTIRTQKTDQFPLFLIIMGKRSSNEVLNVIQGNTTVDELMMRLMAAMEIFTAQQQEDIKDEDEREARENVKREQDEAYRLSLEADRAKREAHEREMAEQFRLEQIRKEQEEEREAIRLSLEQALPPEPKEENAEPVSKLRIRTPSGEFLERRFLASNKLQIVFDFVASKGFPWDEYKLLSTFPRRDVTQLDPNKSLLEVKLFPQETLFLEAKE

SEQ ID NO: 193 - DNA, 2104 bp, Homo sapiens
ctctgccgagcctccttaaaactctgccgttaaaatgggggcgggtttttcaactcaaaaagcgctcaatttttttcttttcaaaaaaagctgatgaggtcggaaaaaagggagaagaaaccggcaccctctctgagaggcaacagaagcagcaattgtttcagcgaaaaaagcagcaagggagggagtgaaggaaaaaagcaaaaaagggggcgacacgcaagtgcctgtaggggtgaaaggagcagggaccggcgatctagggggggatcagctacaaaagaaactgtcactgggagcggtgcggccaaggaggaagcagtgctgccaggctctgctccagggcacagctggctggcggctgccctgtccgcagcaaaggggcacaggccggggaccgcgagaggtggcaaagtggcaccgggcgccgaggctgctgagcgctcgccgagacggcgaccggactggctgccccggaactgcggcgactctccctactcagaacttggcctacgtttcccaggactctccccatctccagaggcccccacaaaaccgggaaaggaaggaaaggacagcggcggcagcagctcaatgagtgcctacagcagaaagcctgaacgagctcggtcgtaggcgggaagttcccgggggggctgcccagtgcagccgcaatgctgccgcgagctgccccagcagtccgggctccgtagacgctttccgcatcactctccttcctcgggctgccgggagtcccgggacctggcggggccggcatgacgggcttctcgggggcccgccgcacgcccggcagcctccggagacgcgcgccgagcccggctcccacggcctctgaggctcggcggggctgcggctgcctggcgggcgggctccggagctttcctgagcggcattagcccacggcttggcccggacgcgaccaaaggctcttctggagaagcccagagcactgggcaatcgttacgacctgtaacttgagggccaccgaactgctactcccgttcgcctttggcgatcatcttttaaccctccggagcacgtcagcatccagccaccgcggcgctctcccagcagcggaggacccaggactatcccttcggcgagacggatggaaaccgagccccctggaggacctgcccctgcagttctgcctcacacggctcaagtcaccaccgtgaacaagggaccctaaagaatggccgagccttgggggaacgagttggcgtccgcagctgccaggggggacctagagcaacttactagtttgttgcaaaataatgtaaacgtcaatgcacaaaatggatttggaaggactgcgctgcaggttatgaaacttggaaatcccgagattgccaggagactgctacttagaggtgctaatcccgatttgaaagaccgaactggtttcgctgtcattcatgatgcggccagagcaggtttcctggacactttacagactttgctggagtttcaagctgatgttaacatcgaggataatgaagggaacctgcccttgcacttggctgccaaagaaggccacctccgggtggtggagttcctggtgaagcacacggccagcaatgtggggcatcggaaccataagggggacaccgcctgtgatttggccaggctctatgggaggaatgaggttgttagcctgatgcaggcaaacggggctgggggagccacaaatcttcaataaacgtggggagggctcccccacgttgcctctactttatcaattaactgagtagctctcctgacttttaatgtcatttgttaaaatacagttctgtcatatgttaagcagctaaattttctgaaactgcataagtgaaaatcttacaacaggcttatgaatatatttaagcaacatctttttaacctgcaaaatctgttctaacatgtaattgcagataactttgactttcttctgaatattttatctttccttggcttttcccttgcttccccttttgccaatctcaacacccaagttgaagactttgtttttaaaatggtttgtcctgatgcttttgtctaattaaaacactttcaaaacaggaaaaaaaaaaaaaaaaaa

SEQ ID NO: 194 - protein, 168 aa, Homo sapiens
MAEPWGNELASAAARGDLEQLTSLLQNNVNVNAQNGFGRTALQVMKLGNPEIARRLLLRGANPDLKDRTGFAVIHDAARAGFLDTLQTLLEFQADVNIEDNEGNLPLHLAAKEGHLRVVEFLVKHTASNVGHRNHKGDTACDLARLYGRNEVVSLMQANGAGGATNLQ

SEQ ID NO: 195 - DNA, 1273 bp, Homo sapiens
ccttgagtctccacacacactcctcacagagatctgtagcgtaggtacgtgacagctctgcctacatctgacgtccggagtcattaaccaggaatgtatgtgtgtctgtgtgtctctctgtggagtcgtcagaattcttcataggggttaagctaaaaaagcgaggcgaggagcccctctccaatggctcagttttgctgaataatcacgtgtgaatcgaggggcgggcttttggcaggcagatcttactagtatttactaccaagctctactccagattaaccatcccagtccttctgtcagtctccgatgccatcatgcagcctggttaggagcaaaggaaaggggaaaaagaaaaacgactaattcatcttttcctgatcgtcaggaccctaaagaatggccgagccttgggggaacgagttggcgtccgcagctgccaggggggacctagagcaacttactagtttgttgcaaaataatgtaaacgtcaatgcacaaaatggatttggaaggactgcgctgcaggttatgaaacttggaaatcccgagattgccaggagactgctacttagaggtgctaatcccgatttgaaagaccgaactggtttcgctgtcattcatgatgcggccagagcaggtttcctggacactttacagactttgctggagtttcaagctgatgttaacatcgaggataatgaagggaacctgcccttgcacttggctgccaaagaaggccacctccgggtggtggagttcctggtgaagcacacggccagcaatgtggggcatcggaaccataagggggacaccgcctgtgatttggccaggctctatgggaggaatgaggttgttagcctgatgcaggcaaacggggctgggggagccacaaatcttcaataaacgtggggagggctcccccacgttgcctctactttatcaattaactgagtagctctcctgacttttaatgtcatttgttaaaatacagttctgtcatatgttaagcagctaaattttctgaaactgcataagtgaaaatcttacaacaggcttatgaatatatttaagcaacatctttttaacctgcaaaatctgttctaacatgtaattgcagataactttgactttcttctgaatattttatctttccttggcttttcccttgcttccccttttgccaatctcaacacccaagttgaagactttgtttttaaaatggtttgtcctgatgcttttgtctaattaaaacactttcaaaacaggacaa

SEQ ID NO: 196 - protein, 168 aa, Homo sapiens; identical to SEQ ID NO: 194

SEQ ID NO: 197 - DNA, 905 bp, Homo sapiens
atggcttcacctaaaggtttttttaattacttgacctattttcttgctgctggtgctgtcactttgggaattggtttctttgctttggcatcagctttgtggttcctgatttgcaaacgaagagaaatatttcaaaattccaaatttaaagcaattgatgagagatgcaggcaaagaccatcaatggcgaagattaaatctcattctcagtgtgtttttatttctcgaaattttcatactgggagattccaattacaggaggagcaaagaaaaaaggaagcagcacatataaaagcaattaaagatcattctaaagatgaaccccaacttgcaacaaaaaatatcatttgtgatccctcagagaccagctccacaacaaatcgcagcagtgttacattaagcttatcaacattaccatctgattcttattacagccaaagtatagaagcagctgatgactggttttctgatgattctctagtgaaaaggaactctccaatgccttctctcggggaacctctaatggaaaaagtattttcatacctgtcaaccatttcattagaagagggtactgaaagtgtactgaatgacactttatgaccatcaaaaagatgactacattaagggaaaatgttcatgaagaaacacagaggttgaaatataaaaccttcaacataatactgaatgacttttttcttttgaaaccttgtatacaatcagcttctgagtctcttaacatgtccatgctaatattgctttttttgttctttaccatagagcggctctacttcccttgctggttcttatttctagaaacaaaattaggaagaactagagtgatgtcatgaacattaagcttaacttattgtatctcatccaaagacatattaaataaaatgagtgta

SEQ ID NO: 198 - protein, 199 aa, Homo sapiens
MASPKGFFNYLTYFLAAGAVTLGIGFFALASALWFLICKRREIFQNSKFKAIDERCRQRPSMAKIKSHSQCVFISRNFHTGRFQLQEEQRKKEAAHIKAIKDHSKDEPQLATKNIICDPSETSSTTNRSSVTLSLSTLPSDSYYSQSIEAADDWFSDDSLVKRNSPMPSLGEPLMEKVFSYLSTISLEEGTESVLNDTL

SEQ ID NO: 199 - DNA, 497 bp, Homo sapiens
agaagaggaaaatatatttagacgaacaaccagaaatctatttctattctctggaagagcttgtataagataagaaatacttgaatcatgggtttttttaattacttgacctattttcttgctgctggtgctgtcactttgggaattggtttctttgctttggcatcagctttgtggttcctgatttgcaaacgaagagaaatatttcaaaattccaaatttaaagcaattgatgagagatgcaggcaaagaccatcaatggcgaagattaaatctcattctcagtgtgtttttatttctcgaaattttcatactgggagattccaattacagttttgaaggctgagaagtccaagatcaagatgctgaaagatccggttctggtgaaggccctcttcctgatttggagatggcctttttcttgctgtgttttcagatggcagggagcagagagagcaagagcgcactttcacatctcttcttataaaggcactaat

SEQ ID NO: 200 - protein, 83 aa, Homo sapiens
MGFFNYLTYFLAAGAVTLGIGFFALASALWFLICKRREIFQNSKFKAIDERCRQRPSMAKIKSHSQCVFISRNFHTGRFQLQF

SEQ ID NO: 201 - DNA, 3139 bp, Homo sapiens
tgccgccgtctcgctgaggcggagtaggatgaggcccgcggccgtggctccggcgtcggcgggggcagcagcagctgaggcagcagctgaggcagccgcgacggccgcgcccccccccgctgacctggattaggcccagcagctccgtggccgccgccgccccgcgggggggcggggtggggaagtgcttcgtctccccgcccccccccccccatcgctgcctcgcaggaggcgaacgccgcgaccccagcggagcccgcggcccagccttgatcccccaaccccgggggctggcatgagcggcccctcggcggcaccgtggggcggtggagtcgcctccgcctgatccccggcctgtcgcccgaccccacctcgccaaccgaggcggaccgcggagtgtgcgaacgaccccaccgctgctttctcctcccccagatcacgcaccccagctccggaagatggggaactgcctcaaatcccccacctcggatgacatctccctgcttcacgagtctcagtccgaccgggctagctttggcgaggggacggagccggatcaggagccgccgccgccatatcaggaacaagttccagttccagtctaccacccaacacctagccagactcggctagcaactcagctgactgaagaggaacaaattaggatagctcaaagaataggtcttatacaacatctgcctaaaggagtttatgaccctggaagagatggatcagaaaaaaagatccgggagtgtgtgatctgtatgatggactttgtttatggggacccaattcgatttctgccgtgcatgcacatctatcacctggactgtatagatgactggttgatgagatccttcacgtgcccctcctgcatggagccagttgatgcagcactgctttcatcctatgagactaattgagccagggtctcttatctgacttcaagtgaaccaccattttggtggttttgatcttttgtcactgagcccaaagagccagggattaggaattaagatcgtgcacaaaagtttccttaaaattcctggatggctgcagatgttgggggaaaaagtacgtgatattttagaaacttagtgggaaaagtaggatggtatttttatgtaaagccttgacccaatgtttaaaaatataattgtatttagatcttgttattgctccagtacataggaattgtgtaaagtgttaacagcagctgtatttgtttaaattgtgtgtattgaagattaggaaaaagatagtagttatttttcctaaatgaaataactttcttctcttccccttccccacccgaattcttttctgaagttgctggcatttgggtcaaggttttattaaaagctacattttataacactggcacacacaaaaaagtagttttaagcttgtttgcacagttctttttttccattggaaatggaattcattgccttaggtctttttaaatagtgtattattatcgttggggctggctctatgcttgaaaaccagtttatttataacctgttataagtgctatattctgtttgcagttaggaaatgcagaattcaaagtgatctcctagcttgtaagcaaactgagatgcactatcccttttctataaaaaataagttaatgtgtcaagaaaccaactctattaaggtggggtttaatattaccctttcctatgtgttttatctaattattttggttgttaatatggtgataatggaaagtcaagttaaattttaaatattaagaattctgatttattgagattgaattatgccaccacgtttatgtaaaaatgaaggtggcaccgtggtgagacctaatgagaaatagttactcagttgtaaaaattttgatttattctctttcttctgacctccttgcctcttgtcttgaaccatagcaaaaggatactgcatctctcattactgtagtgctgaggttattgaagttatacaaaacacatctcagtctctgtttcttggaaaggtatctattacatcctgctagctgactgacaaaactaagcagggagaataaagataattgtattttatgttttgcacacaaacgcagaatttgtataaccatatgacttcatagttgtgatctcaaaaaagaaggaatttctcctttgtttcttgcagttaatgtaagaatactttaaatctctaagcttctgaagtgttagaggtagagatggtctagtaaagatgtagtagtaatgttttatccatttagcatgtgtttattttttcatatgtactcaaaggtgacttattggttcacctcagtgatattacagctaaaaaaatcattcattagcaaaaggaaaagtggtctcaacctaacatcagaagtgtttcttattattattttatattgagttgaatattgaactctaacagttttctacatacaaaacacagtgtcatgaaggttattcataattgcattatagaggaatgtagtatgtcataagtactttgtaaagatttgacattcaactgtagtatccatatgttgcttaaatttccttatgagccccatgatggaaagacttaaagatgaatttgagaaaaattgaaagaaattagattatcaggttctgttaaattgttacatgtatcttgcttaaatttctgtttattaatttatatccacccaagtacataaagcaaatttggaggaaacaactgaagttgtgcaatattttctgataattgctttttttattcttgtgttttctacttaaacataatgtctgtgtcatcaagtattatagtcagacttttctttttttctagattgttaaaattggcaaatgaacttttttaaaaatcatcttccatgttgcagttagtctttcttttcattacaagtctttcacagaagtttggtggtaatattgaaagaactagcattgggcagaatgtgtcttttttaggcactttatattctcaacatacaatgttaagaaccatcaattttgacttttactaagttgttaaataaagttataatacagctgtgaagggctaaagttagagttgattacataagtaagtattccccatataatcttttaaaaagttgtgtatgattattttaaaatctctctctcta

SEQ ID NO: 202 - protein, 154 aa, Homo sapiens
MGNCLKSPTSDDISLLHESQSDRASFGEGTEPDQEPPPPYQEQVPVPVYHPTPSQTRLATQLTEEEQIRIAQRIGLIQHLPKGVYDPGRDGSEKKIRECVICMMDFVYGDPIRFLPCMHIYHLDCIDDWLMRSFTCPSCMEPVDAALLSSYETN

SEQ ID NO: 203 - DNA, 935 bp, Homo sapiens
tccgagaaaacaccaaatggtggatgacaccagtgcagcgggggggggcccggaggccctgggatggggaactgcggtggcttccgcggaggtttcggcagtggcatccggggccggggtcgcagccgtagacggggccggggccgaggccgcggagctcgcggaggcaaggccgaggataaggagtggatgcccgtcaccaagctgggctgcttggtgaaggacatgaagatcaagtccctggaggagatctatctcttctccctgcccattaaggaatcagagatcattgactttttcctgggggcctctctcaaggatgaggttttgaagattatgccagtgcagacgcagacccgtgctggccagcgcaccaggttcaaggcgtttgttgctatcggggactacaatggccacgtcggtctgggtgttaagtgctccaaggaggtggccaccgccatccatggggccatcatcctggccaagctctccattgtccccgtgcgcagaggctactgggggaacaagattggcaagccccacaccgtcccttgcaaggtgacaggccgctgcggctctgcactggtgcacctcatccctgtacccaggggcactggcattgtctccgcacctgtgcccaagaagctgctcatgatggctggtatcgatgactgctgcacctcagcctggggctgcactgccaccctgggcaacttcgccaaggccacctttgatgccatttctaagacctacagctacctgacccccgacctctggaaggagactgtatttaccaagtctcccgatcaggaattcactgaccacctcatcaaggcccacgccagagtctccgtgcagcggacccaggctccagctgtggctacaacatagggtttttagacaaggaaaataaagcgaattaagcgtaaaaaaaa

SEQ ID NO: 204 - protein, 275 aa, Homo sapiens
MGNCGGFRGGFGSGIRGRGRSRRRGRGRGRGARGGKAEDKEWMPVTKLGCLVKDMKIKSLEEIYLFSLPIKESEIIDFFLGASLKDEVLKIMPVQTQTRAGQRTRFKAFVAIGDYNGHVGLGVKCSKEVATAIHGAIILAKLSIVPVRRGYWGNKIGKPHTVPCKVTGRCGSALVHLIPVPRGTGIVSAPVPKKLLMMAGIDDCCTSAWGCTATLGNFAKATFDAISKTYSYLTPDLWKETVFTKSPDQEFTDHLIKAHARVSVQRTQAPAVATT

SEQ ID NO: 205 - DNA, 883 bp, Homo sapiens
tccgagaaaacaccaaatggtggatgacaccagtgcagcgggggggggcccggaggccctgggatggggaactgcggtggcttccgcggaggtttcggcagtggcatccggggccggggtcgcagccgtagacggggccggggccgaggccgcggagctcgcggaggcaaggccgaggataaggagtggatgcccgtcaccaagctgggctgcttggtgaaggacatgaagatcaagtccctggaggagatctatctcttctccctgcccattaaggaatcagagatcattgactttttcctgggggcctctctcaaggatgaggttttgaagattatgccagtgcagacgcagacccgtgctggccagcgcaccaggttcaaggcgtttgttgctatcggggactacaatggccacgtcggtctgggtgttaagtgctccaaggaggtggccaccgccatccatggggccatcatcctggccaagctctccattgtccccgtgcgcagaggctactgggggaacaagattggcaagccccacaccgtcccttgcaaggggcactggcattgtctccgcacctgtgcccaagaagctgctcatgatggctggtatcgatgactgctgcacctcagcctggggctgcactgccaccctgggcaacttcgccaaggccacctttgatgccatttctaagacctacagctacctgacccccgacctctggaaggagactgtatttaccaagtctcccgatcaggaattcactgaccacctcatcaaggcccacgccagagtctccgtgcagcggacccaggctccagctgtggctacaacatagggtttttagacaaggaaaataaagcgaattaagcgtaaaaaa

SEQ ID NO: 206 - protein, 185 aa, Homo sapiens
MGNCGGFRGGFGSGIRGRGRSRRRGRGRGRGARGGKAEDKEWMPVTKLGCLVKDMKIKSLEEIYLFSLPIKESEIIDFFLGASLKDEVLKIMPVQTQTRAGQRTRFKAFVAIGDYNGHVGLGVKCSKEVATAIHGAIILAKLSIVPVRRGYWGNKIGKPHTVPCKGHWHCLRTCAQEAAHDGWYR

SEQ ID NO: 207 - DNA, 2872 bp, Homo sapiens
gggggagggaggaggccttggagaaggaggagggaaaaaggggctgtgggatttagtggctgggctgcaccccctgggggggcagcagagcccaatgggccagaagggccacaaagactccctttacccttgtggagggactcctgagagcagcctccatgaggccctggaccagtgcatgaccgccctggacctcttcctcaccaaccagttctcagaagcactcagctacctcaagcccagaaccaaggaaagcatgtaccactcactgacatatgccaccatcctggagatgcaggccatgatgacctttgaccctcaggacatcctgcttgccggcaacatgatgaaggaggcacagatgctgtgtcagaggcaccggaggaagtcttctgtaacagattccttcagcagcctggtgaaccgccccacgctgggccaattcactgaagaggaaatccacgctgaggtctgctatgcagagtgcctgctgcagcgagcagccctgaccttcctgcaggacgagaacatggtgagcttcatcaaaggcggcatcaaagttcgaaacagctaccagacctacaaggagctggacagccttgttcagtcctcacaatactgcaagggtgagaaccacccgcactttgaaggaggagtgaagcttggtgtaggggccttcaacctgacactgtccatgcttcctactaggatcctgaggctgttggagtttgtggggttttcaggaaacaaggactatgggctgctgcagctggaggagggagcgtcagggcacagcttccgctctgtgctctgtgtcatgctcctgctgtgctaccacaccttcctcaccttcgtgctcggtactgggaacgtcaacatcgaggaggccgagaagctcttgaagccctacctgaaccggtaccctaagggtgccatcttcctgttctttgcagggaggattgaagtcattaaaggcaacattgatgcagccatccggcgtttcgaggagtgctgtgaggcccagcagcactggaagcagttccaccacatgtgctactgggagctgatgtggtgcttcacctacaagggccagtggaagatgtcctacttctacgccgacctgctcagcaaggagaactgctggtccaaggccacctacatttacatgaaggccgcctacctcagcatgtttgggaaggaggaccacaagccgttcggggacgacgaagtggaattatttcgagctgtgccaggcctgaagctcaagattgctgggaaatctctacccacagagaagtttgccatccggaagtcccggcgctacttctcctccaaccctatctcgctgccagtgcctgctctggaaatgatgtacatctggaacggctacgccgtgattgggaagcagccgaaactcacggatgggatacttgagattatcactaaggctgaagagatgctggagaaaggcccagagaacgagtactcagtggatgacgagtgcttggtgaaattgttgaaaggcctgtgtctgaaatacctgggccgtgtccaggaggccgaggagaattttaggagcatctctgccaatgaaaagaagattaaatatgaccactacttgatcccaaacgccctgctggagctggccctgctgcttatggagcaagacagaaacgaagaggccatcaaacttttggaatctgccaagcaaaactacaagaattactccatggagtcaaggacacactttcgaatccaggcagccacactccaagccaagtcttccctagagaacagcagcagatccatggtctcatcagtgtccttgtagctttgtgcagcagttccgggctggaagacagagacagctggacagagctcctgaaaacatttcaaaataccccctccccctgccctgccctgcctttggggtccaccggcactccagttggatggcacaacatagtgtatccgtgcagaagccgagctggcattttcaccagtgtagccaagggcctttgccaagggcagagcaggtggagccctctgcctgccctatcacacatacgggtacttgcttttcactgtgatgtttaagagaatgtatgaacagtttacattttccttagaaatacattgatgggatcacagttggctttaaaaaccaacaacaatcaaccacctgtaagtctttgtcttcacctattatcatctggaggtaaatctctttatatgatgatgccaaagggcaaattgcttttcaaattcagcaagttctcagcttgtgtgacggaaggtccttcagaggacctgaggaatgcctgggagaggctaagcctcaggcttcaatgcttctggggttgggcatgaggatgtacacagacacccactaccttactactcacacttcatttcactccttttgtaaatttccaatttaaaaatcaagcacgtctttttagtgagataaaatctgagctcttctgtagaaaaatcaatctctaccagtagaaaatgccagggcttgatggaagagctgtgtagccctttctatgccaaagccaggaaatttggggggcaggaggaggttctcagaatccagtctgtatctttgctgtatgccaaactgaaaccactgggaataatttatgaaacataaaaatcttctgtacttcactccaaggtacatttgcttactgacagcatttttgttaaaactgttattcttgacctgttgtgtatgcgttagattcttcagttaagagaaaagagatatttaagtgataaaatttatgcccttaagggatcgtgcatcatgtatttcaataaaatatgtgttgcatgaatccttaggccaggcagaaagtcttga

SEQ ID NO: 208 - protein, 578 aa, Homo sapiens
MGQKGHKDSLYPCGGTPESSLHEALDQCMTALDLFLTNQFSEALSYLKPRTKESMYHSLTYATILEMQAMMTFDPQDILLAGNMMKEAQMLCQRHRRKSSVTDSFSSLVNRPTLGQFTEEEIHAEVCYAECLLQRAALTFLQDENMVSFIKGGIKVRNSYQTYKELDSLVQSSQYCKGENHPHFEGGVKLGVGAFNLTLSMLPTRILRLLEFVGFSGNKDYGLLQLEEGASGHSFRSVLCVMLLLCYHTFLTFVLGTGNVNIEEAEKLLKPYLNRYPKGAIFLFFAGRIEVIKGNIDAAIRRFEECCEAQQHWKQFHHMCYWELMWCFTYKGQWKMSYFYADLLSKENCWSKATYIYMKAAYLSMFGKEDHKPFGDDEVELFRAVPGLKLKIAGKSLPTEKFAIRKSRRYFSSNPISLPVPALEMMYIWNGYAVIGKQPKLTDGILEIITKAEEMLEKGPENEYSVDDECLVKLLKGLCLKYLGRVQEAEENFRSISANEKKIKYDHYLIPNALLELALLLMEQDRNEEAIKLLESAKQNYKNYSMESRTHFRIQAATLQAKSSLENSSRSMVSSVSL

SEQ ID NO: 209 - DNA, 2789 bp, Homo sapiens
ccatggcctttctgaccacctggaaggaggcggcctccgggaaaagcgaccgcaggactcctgagagcagcctccatgaggccctggaccagtgcatgaccgccctggacctcttcctcaccaaccagttctcagaagcactcagctacctcaagcccagaaccaaggaaagcatgtaccactcactgacatatgccaccatcctggagatgcaggccatgatgacctttgaccctcaggacatcctgcttgccggcaacatgatgaaggaggcacagatgctgtgtcagaggcaccggaggaagtcttctgtaacagattccttcagcagcctggtgaaccgccccacgctgggccaattcactgaagaggaaatccacgctgaggtctgctatgcagagtgcctgctgcagcgagcagccctgaccttcctgcaggacgagaacatggtgagcttcatcaaaggcggcatcaaagttcgaaacagctaccagacctacaaggagctggacagccttgttcagtcctcacaatactgcaagggtgagaaccacccgcactttgaaggaggagtgaagcttggtgtaggggccttcaacctgacactgtccatgcttcctactaggatcctgaggctgttggagtttgtggggttttcaggaaacaaggactatgggctgctgcagctggaggagggagcgtcagggcacagcttccgctctgtgctctgtgtcatgctcctgctgtgctaccacaccttcctcaccttcgtgctcggtactgggaacgtcaacatcgaggaggccgagaagctcttgaagccctacctgaaccggtaccctaagggtgccatcttcctgttctttgcagggaggattgaagtcattaaaggcaacattgatgcagccatccggcgtttcgaggagtgctgtgaggcccagcagcactggaagcagttccaccacatgtgctactgggagctgatgtggtgcttcacctacaagggccagtggaagatgtcctacttctacgccgacctgctcagcaaggagaactgctggtccaaggccacctacatttacatgaaggccgcctacctcagcatgtttgggaaggaggaccacaagccgttcggggacgacgaagtggaattatttcgagctgtgccaggcctgaagctcaagattgctgggaaatctctacccacagagaagtttgccatccggaagtcccggcgctacttctcctccaaccctatctcgctgccagtgcctgctctggaaatgatgtacatctggaacggctacgccgtgattgggaagcagccgaaactcacggatgggatacttgagattatcactaaggctgaagagatgctggagaaaggcccagagaacgagtactcagtggatgacgagtgcttggtgaaattgttgaaaggcctgtgtctgaaatacctgggccgtgtccaggaggccgaggagaattttaggagcatctctgccaatgaaaagaagattaaatatgaccactacttgatcccaaacgccctgctggagctggccctgctgcttatggagcaagacagaaacgaagaggccatcaaacttttggaatctgccaagcaaaactacaagaattactccatggagtcaaggacacactttcgaatccaggcagccacactccaagccaagtcttccctagagaacagcagcagatccatggtctcatcagtgtccttgtagctttgtgcagcagttccgggctggaagacagagacagctggacagagctcctgaaaacatttcaaaataccccctccccctgccctgccctgcctttggggtccaccggcactccagttggatggcacaacatagtgtatccgtgcagaagccgagctggcattttcaccagtgtagccaagggcctttgccaagggcagagcaggtggagccctctgcctgccctatcacacatacgggtacttgcttttcactgtgatgtttaagagaatgtatgaacagtttacattttccttagaaatacattgatgggatcacagttggctttaaaaaccaacaacaatcaaccacctgtaagtctttgtcttcacctattatcatctggaggtaaatctctttatatgatgatgccaaagggcaaattgcttttcaaattcagcaagttctcagcttgtgtgacggaaggtccttcagaggacctgaggaatgcctgggagaggctaagcctcaggcttcaatgcttctggggttgggcatgaggatgtacacagacacccactaccttactactcacacttcatttcactccttttgtaaatttccaatttaaaaatcaagcacgtctttttagtgagataaaatctgagctcttctgtagaaaaatcaatctctaccagtagaaaatgccagggcttgatggaagagctgtgtagccctttctatgccaaagccaggaaatttggggggcaggaggaggttctcagaatccagtctgtatctttgctgtatgccaaactgaaaccactgggaataatttatgaaacataaaaatcttctgtacttcactccaaggtacatttgcttactgacagcatttttgttaaaactgttattcttgacctgttgtgtatgcgttagattcttcagttaagagaaaagagatatttaagtgataaaatttatgcccttaagggatcgtgcatcatgtatttcaataaaatatgtgttgcatgaatccttaggccaggcagaaagtcttga

SEQ ID NO: 210 - protein, 581 aa, Homo sapiens
MAFLTTWKEAASGKSDRRTPESSLHEALDQCMTALDLFLTNQFSEALSYLKPRTKESMYHSLTYATILEMQAMMTFDPQDILLAGNMMKEAQMLCQRHRRKSSVTDSFSSLVNRPTLGQFTEEEIHAEVCYAECLLQRAALTFLQDENMVSFIKGGIKVRNSYQTYKELDSLVQSSQYCKGENHPHFEGGVKLGVGAFNLTLSMLPTRILRLLEFVGFSGNKDYGLLQLEEGASGHSFRSVLCVMLLLCYHTFLTFVLGTGNVNIEEAEKLLKPYLNRYPKGAIFLFFAGRIEVIKGNIDAAIRRFEECCEAQQHWKQFHHMCYWELMWCFTYKGQWKMSYFYADLLSKENCWSKATYIYMKAAYLSMFGKEDHKPFGDDEVELFRAVPGLKLKIAGKSLPTEKFAIRKSRRYFSSNPISLPVPALEMMYIWNGYAVIGKQPKLTDGILEIITKAEEMLEKGPENEYSVDDECLVKLLKGLCLKYLGRVQEAEENFRSISANEKKIKYDHYLIPNALLELALLLMEQDRNEEAIKLLESAKQNYKNYSMESRTHFRIQAATLQAKSSLENSSRSMVSSVSL

SEQ ID NO: 211 - DNA, 1864 bp, Homo sapiens
cccggctcggggttgcggcggcagcacctgggccgcgattggcgtccggctggggcagcgccgcccgcgcccctcggcgatgacctcggctggcggcgccccaggagccctgcccgcggggactcctgagagcagcctccatgaggccctggaccagtgcatgaccgccctggacctcttcctcaccaaccagttctcagaagcactcagctacctcaagcccagaaccaaggaaagcatgtaccactcactgacatatgccaccatcctggagatgcaggccatgatgacctttgaccctcaggacatcctgcttgccggcaacatgatgaaggaggcacagatgctgtgtcagaggcaccggaggaagtcttctgtaacagattccttcagcagcctggtgaaccgccccacgctgggccaattcactgaagaggaaatccacgctgaggtctgctatgcagagtgcctgctgcagcgagcagccctgaccttcctgcagggttcctcacacggaggggcagtcaggcccagagccttgcatgatccctctcacgcctgcagctgcccacctgggccaggccgtcagcatcttttcctcctgcaggacgagaacatggtgagcttcatcaaaggcggcatcaaagttcgaaacagctaccagacctacaaggagctggacagccttgttcagtcctcacaatactgcaagggtgagaaccacccgcactttgaaggaggagtgaagcttggtgtaggggccttcaacctgacactgtccatgcttcctactaggatcctgaggctgttggagtttgtggggttttcaggaaacaaggactatgggctgctgcagctggaggagggagcgtcagggcacagcttccgctctgtgctctgtgtcatgctcctgctgtgctaccacaccttcctcaccttcgtgctcggtactgggaacgtcaacatcgaggaggccgagaagctcttgaagccctacctgaaccggtaccctaagggtgccatcttcctgttctttgcagggaggattgaagtcattaaaggcaacattgatgcagccatccggcgtttcgaggagtgctgtgaggcccagcagcactggaagcagttccaccacatgtgctactgggagctgatgtggtgcttcacctacaagggccagtggaagatgtcctacttctacgccgacctgctcagcaaggagaactgctggtccaaggccacctacatttacatgaaggccgcctacctcagcatgtttgggaaggaggaccacaagccgttcggggacgacgaagtggaattatttcggtgggtcccacatcgtgctcccactgtgtaggccactcccaccgtgtaggccgctatggacagaccagccaggccaccctgagctgtgggcactggggagggaggagtagggtggctccctgcccccacccgcggactgccccccctgcgtgtcctcccctcccatcaccaccccatgctgctgctgctggtggttggagccctttgactttcttcagaggctttctttcacagaaatggttttgctaatatcgtcttcctccgagtctctttcatgtggacagtaggacagatgtggctccaaggtccagggagggaaggtctttcactctgctgagttaacctgagacactcagagaagcacagtagagagctgacagtcggaatcgaacaaacaagagtaaacccagcctctgcttgttcttagctgtgtcaccttggacaacttcagcatctgtaaaatgggaacaacaacctccacctcgcagcactgttttgcaaatcaactagataataaatgttaagagcctggcgc

SEQ ID NO: 212 - protein, 426 aa, Homo sapiens
MTSAGGAPGALPAGTPESSLHEALDQCMTALDLFLTNQFSEALSYLKPRTKESMYHSLTYATILEMQAMMTFDPQDILLAGNMMKEAQMLCQRHRRKSSVTDSFSSLVNRPTLGQFTEEEIHAEVCYAECLLQRAALTFLQGSSHGGAVRPRALHDPSHACSCPPGPGRQHLFLLQDENMVSFIKGGIKVRNSYQTYKELDSLVQSSQYCKGENHPHFEGGVKLGVGAFNLTLSMLPTRILRLLEFVGFSGNKDYGLLQLEEGASGHSFRSVLCVMLLLCYHTFLTFVLGTGNVNIEEAEKLLKPYLNRYPKGAIFLFFAGRIEVIKGNIDAAIRRFEECCEAQQHWKQFHHMCYWELMWCFTYKGQWKMSYFYADLLSKENCWSKATYIYMKAAYLSMFGKEDHKPFGDDEVELFRWVPHRAPTV

SEQ ID NO: 213 - DNA, 1800 bp, Homo sapiens
ggcagggcacagcagggcaggagtgtgtttgatgtgtcctgggaaccgccctgaggccgtcgtgtggctggagtgctgcaggtgtcaaggaaattgtaggagatgtctcctgagtgtgatggaatataaccagatttccagaaggaactgacatgatctgacttaaaaagagctgtgccaggcctgaagctcaagattgctgggaaatctctacccacagagaagtttgccatccggaagtcccggcgctacttctcctccaaccctatctcgctgccagtgcctgctctggaaatgatgtacatctggaacggctacgccgtgattgggaagcagccgaaactcacggatgggatacttgagattatcactaaggctgaagagatgctggagaaaggcccagagaacgagtactcagtggatgacgagtgcttggtgaaattgttgaaaggcctgtgtctgaaatacctgggccgtgtccaggaggccgaggagaattttaggagcatctctgccaatgaaaagaagattaaatatgaccactacttgatcccaaacgccctgctggagctggccctgctgcttatggagcaagacagaaacgaagaggccatcaaacttttggaatctgccaagcaaaactacaagaattactccatggagtcaaggacacactttcgaatccaggcagccacactccaagccaagtcttccctagagaacagcagcagatccatggtctcatcagtgtccttgtagctttgtgcagcagttccgggctggaagacagagacagctggacagagctcctgaaaacatttcaaaataccccctccccctgccctgccctgcctttggggtccaccggcactccagttggatggcacaacatagtgtatccgtgcagaagccgagctggcattttcaccagtgtagccaagggcctttgccaagggcagagcaggtggagccctctgcctgccctatcacacatacgggtacttgcttttcactgtgatgtttaagagaatgtatgaacagtttacattttccttagaaatacattgatgggatcacagttggctttaaaaaccaacaacaatcaaccacctgtaagtctttgtcttcacctattatcatctggaggtaaatctctttatatgatgatgccaaagggcaaattgcttttcaaattcagcaagttctcagcttgtgtgacggaaggtccttcagaggacctgaggaatgcctgggagaggctaagcctcaggcttcaatgcttctggggttgggcatgaggatgtacacagacacccactaccttactactcacacttcatttcactccttttgtaaatttccaatttaaaaatcaagcacgtctttttagtgagataaaatctgagctcttctgtagaaaaatcaatctctaccagtagaaaatgccagggcttgatggaagagctgtgtagccctttctatgccaaagccaggaaatttggggggcaggaggaggttctcagaatccagtctgtatctttgctgtatgccaaactgaaaccactgggaataatttatgaaacataaaaatcttctgtacttcactccaaggtacatttgcttactgacagcatttttgttaaaactgttattcttgacctgttgtgtatgcgttagattcttcagttaagagaaaagagatatttaagtgataaaatttatgcccttaagggatcgtgcatcatgtatttcaataaaatatgtgttgcatgaatccttaggccaggcagaaagtcttga

SEQ ID NO: 214 - protein, 153 aa, Homo sapiens
MYIWNGYAVIGKQPKLTDGILEIITKAEEMLEKGPENEYSVDDECLVKLLKGLCLKYLGRVQEAEENFRSISANEKKIKYDHYLIPNALLELALLLMEQDRNEEAIKLLESAKQNYKNYSMESRTHFRIQAATLQAKSSLENSSRSMVSSVSL

SEQ ID NO: 215 - DNA, 1929 bp, Homo sapiens
gcagtcacatggcaggccgttagggcagagggagctgggcagggcacagcagggcaggagtgtgtttgatgtgtcctgggaaccgccctgaggccgtcgtgtggctggagtgctgcaggtgtcaaggaaattgtaggagatgtctcctgagtgtgatggaatataaccagatttccagaaggaactgacatgatctgacttaaaaaggccacctacatttacatgaaggccgcctacctcagcatgtttgggaaggaggaccacaagccgttcggggacgacgaagtggaattatttcgagctgtgccaggcctgaagctcaagattgctgggaaatctctacccacagagaagtttgccatccggaagtcccggcgctacttctcctccaaccctatctcgctgccagtgcctgctctggaaatgatgtacatctggaacggctacgccgtgattgggaagcagccgaaactcacggatgggatacttgagattatcactaaggctgaagagatgctggagaaaggcccagagaacgagtactcagtggatgacgagtgcttggtgaaattgttgaaaggcctgtgtctgaaatacctgggccgtgtccaggaggccgaggagaattttaggagcatctctgccaatgaaaagaagattaaatatgaccactacttgatcccaaacgccctgctggagctggccctgctgcttatggagcaagacagaaacgaagaggccatcaaacttttggaatctgccaagcaaaactacaagaattactccatggagtcaaggacacactttcgaatccaggcagccacactccaagccaagtcttccctagagaacagcagcagatccatggtctcatcagtgtccttgtagctttgtgcagcagttccgggctggaagacagagacagctggacagagctcctgaaaacatttcaaaataccccctccccctgccctgccctgcctttggggtccaccggcactccagttggatggcacaacatagtgtatccgtgcagaagccgagctggcattttcaccagtgtagccaagggcctttgccaagggcagagcaggtggagccctctgcctgccctatcacacatacgggtacttgcttttcactgtgatgtttaagagaatgtatgaacagtttacattttccttagaaatacattgatgggatcacagttggctttaaaaaccaacaacaatcaaccacctgtaagtctttgtcttcacctattatcatctggaggtaaatctctttatatgatgatgccaaagggcaaattgcttttcaaattcagcaagttctcagcttgtgtgacggaaggtccttcagaggacctgaggaatgcctgggagaggctaagcctcaggcttcaatgcttctggggttgggcatgaggatgtacacagacacccactaccttactactcacacttcatttcactccttttgtaaatttccaatttaaaaatcaagcacgtctttttagtgagataaaatctgagctcttctgtagaaaaatcaatctctaccagtagaaaatgccagggcttgatggaagagctgtgtagccctttctatgccaaagccaggaaatttggggggcaggaggaggttctcagaatccagtctgtatctttgctgtatgccaaactgaaaccactgggaataatttatgaaacataaaaatcttctgtacttcactccaaggtacatttgcttactgacagcatttttgttaaaactgttattcttgacctgttgtgtatgcgttagattcttcagttaagagaaaagagatatttaagtgataaaatttatgcccttaagggatcgtgcatcatgtatttcaataaaatatgtgttgcatgaatccttaggccaggcagaaagtcttga

SEQ ID NO: 216 - protein, 221 aa, Homo sapiens
MKAAYLSMFGKEDHKPFGDDEVELFRAVPGLKLKIAGKSLPTEKFAIRKSRRYFSSNPISLPVPALEMMYIWNGYAVIGKQPKLTDGILEIITKAEEMLEKGPENEYSVDDECLVKLLKGLCLKYLGRVQEAEENFRSISANEKKIKYDHYLIPNALLELALLLMEQDRNEEAIKLLESAKQNYKNYSMESRTHFRIQAATLQAKSSLENSSRSMVSSVSL

SEQ ID NO: 217 - DNA, 2248 bp, Homo sapiens
ggggacagagaactaagtcttgttcctgcatggagtgggggaaggtttcctacgggaggggacactgtccatgcttcctactaggatcctgaggctgttggagtttgtggggttttcaggaaacaaggactatgggctgctgcagctggaggagggagcgtcagggcacagcttccgctctgtgctctgtgtcatgctcctgctgtgctaccacaccttcctcaccttcgtgctcggtactgggaacgtcaacatcgaggaggccgagaagctcttgaagccctacctgaaccggtaccctaagggtgccatcttcctgttctttgcagggaggattgaagtcattaaaggcaacattgatgcagccatccggcgtttcgaggagtgctgtgaggcccagcagcactggaagcagttccaccacatgtgctactgggagctgatgtggtgcttcacctacaagggccagtggaagatgtcctacttctacgccgacctgctcagcaaggagaactgctggtccaaggccacctacatttacatgaaggccgcctacctcagcatgtttgggaaggaggaccacaagccgttcggggacgacgaagtggaattatttcgagctgtgccaggcctgaagctcaagattgctgggaaatctctacccacagagaagtttgccatccggaagtcccggcgctacttctcctccaaccctatctcgctgccagtgcctgctctggaaatgatgtacatctggaacggctacgccgtgattgggaagcagccgaaactcacggatgggatacttgagattatcactaaggctgaagagatgctggagaaaggcccagagaacgagtactcagtggatgacgagtgcttggtgaaattgttgaaaggcctgtgtctgaaatacctgggccgtgtccaggaggccgaggagaattttaggagcatctctgccaatgaaaagaagattaaatatgaccactacttgatcccaaacgccctgctggagctggccctgctgcttatggagcaagacagaaacgaagaggccatcaaacttttggaatctgccaagcaaaactacaagaattactccatggagtcaaggacacactttcgaatccaggcagccacactccaagccaagtcttccctagagaacagcagcagatccatggtctcatcagtgtccttgtagctttgtgcagcagttccgggctggaagacagagacagctggacagagctcctgaaaacatttcaaaataccccctccccctgccctgccctgcctttggggtccaccggcactccagttggatggcacaacatagtgtatccgtgcagaagccgagctggcattttcaccagtgtagccaagggcctttgccaagggcagagcaggtggagccctctgcctgccctatcacacatacgggtacttgcttttcactgtgatgtttaagagaatgtatgaacagtttacattttccttagaaatacattgatgggatcacagttggctttaaaaaccaacaacaatcaaccacctgtaagtctttgtcttcacctattatcatctggaggtaaatctctttatatgatgatgccaaagggcaaattgcttttcaaattcagcaagttctcagcttgtgtgacggaaggtccttcagaggacctgaggaatgcctgggagaggctaagcctcaggcttcaatgcttctggggttgggcatgaggatgtacacagacacccactaccttactactcacacttcatttcactccttttgtaaatttccaatttaaaaatcaagcacgtctttttagtgagataaaatctgagctcttctgtagaaaaatcaatctctaccagtagaaaatgccagggcttgatggaagagctgtgtagccctttctatgccaaagccaggaaatttggggggcaggaggaggttctcagaatccagtctgtatctttgctgtatgccaaactgaaaccactgggaataatttatgaaacataaaaatcttctgtacttcactccaaggtacatttgcttactgacagcatttttgttaaaactgttattcttgacctgttgtgtatgcgttagattcttcagttaagagaaaagagatatttaagtgataaaatttatgcccttaagggatcgtgcatcatgtatttcaataaaatatgtgttgcatgaatccttaggccaggcagaaagtcttga

SEQ ID NO: 218 - protein, 378 aa, Homo sapiens
MLPTRILRLLEFVGFSGNKDYGLLQLEEGASGHSFRSVLCVMLLLCYHTFLTFVLGTGNVNIEEAEKLLKPYLNRYPKGAIFLFFAGRIEVIKGNIDAAIRRFEECCEAQQHWKQFHHMCYWELMWCFTYKGQWKMSYFYADLLSKENCWSKATYIYMKAAYLSMFGKEDHKPFGDDEVELFRAVPGLKLKIAGKSLPTEKFAIRKSRRYFSSNPISLPVPALEMMYIWNGYAVIGKQPKLTDGILEIITKAEEMLEKGPENEYSVDDECLVKLLKGLCLKYLGRVQEAEENFRSISANEKKIKYDHYLIPNALLELALLLMEQDRNEEAIKLLESAKQNYKNYSMESRTHFRIQAATLQAKSSLENSSRSMVSSVSL

SEQ ID NO: 219 - DNA, 2856 bp, Homo sapiens
cgcccggctcggggttgcggcggcagcacctgggccgcgattggcgtccggctggggcagcgccgcccgcgcccctcggcgatgacctcggctggcggcgccccaggagccctgcccgcggggactcctgagagcagcctccatgaggccctggaccagtgcatgaccgccctggacctcttcctcaccaaccagttctcagaagcactcagctacctcaagcccagaaccaaggaaagcatgtaccactcactgacatatgccaccatcctggagatgcaggccatgatgacctttgaccctcaggacatcctgcttgccggcaacatgatgaaggaggcacagatgctgtgtcagaggcaccggaggaagtcttctgtaacagattccttcagcagcctggtgaaccgccccacgctgggccaattcactgaagaggaaatccacgctgaggtctgctatgcagagtgcctgctgcagcgagcagccctgaccttcctgcaggacgagaacatggtgagcttcatcaaaggcggcatcaaagttcgaaacagctaccagacctacaaggagctggacagccttgttcagtcctcacaatactgcaagggtgagaaccacccgcactttgaaggaggagtgaagcttggtgtaggggccttcaacctgacactgtccatgcttcctactaggatcctgaggctgttggagtttgtggggttttcaggaaacaaggactatgggctgctgcagctggaggagggagcgtcagggcacagcttccgctctgtgctctgtgtcatgctcctgctgtgctaccacaccttcctcaccttcgtgctcggtactgggaacgtcaacatcgaggaggccgagaagctcttgaagccctacctgaaccggtaccctaagggtgccatcttcctgttctttgcagggaggattgaagtcattaaaggcaacattgatgcagccatccggcgtttcgaggagtgctgtgaggcccagcagcactggaagcagttccaccacatgtgctactgggagctgatgtggtgcttcacctacaagggccagtggaagatgtcctacttctacgccgacctgctcagcaaggagaactgctggtccaaggccacctacatttacatgaaggccgcctacctcagcatgtttgggaaggaggaccacaagccgttcggggacgacgaagtggaattatttcgagctgtgccaggcctgaagctcaagattgctgggaaatctctacccacagagaagtttgccatccggaagtcccggcgctacttctcctccaaccctatctcgctgccagtgcctgctctggaaatgatgtacatctggaacggctacgccgtgattgggaagcagccgaaactcacggatgggatacttgagattatcactaaggctgaagagatgctggagaaaggcccagagaacgagtactcagtggatgacgagtgcttggtgaaattgttgaaaggcctgtgtctgaaatacctgggccgtgtccaggaggccgaggagaattttaggagcatctctgccaatgaaaagaagattaaatatgaccactacttgatcccaaacgccctgctggagctggccctgctgcttatggagcaagacagaaacgaagaggccatcaaacttttggaatctgccaagcaaaactacaagaattactccatggagtcaaggacacactttcgaatccaggcagccacactccaagccaagtcttccctagagaacagcagcagatccatggtctcatcagtgtccttgtagctttgtgcagcagttccgggctggaagacagagacagctggacagagctcctgaaaacatttcaaaataccccctccccctgccctgccctgcctttggggtccaccggcactccagttggatggcacaacatagtgtatccgtgcagaagccgagctggcattttcaccagtgtagccaagggcctttgccaagggcagagcaggtggagccctctgcctgccctatcacacatacgggtacttgcttttcactgtgatgtttaagagaatgtatgaacagtttacattttccttagaaatacattgatgggatcacagttggctttaaaaaccaacaacaatcaaccacctgtaagtctttgtcttcacctattatcatctggaggtaaatctctttatatgatgatgccaaagggcaaattgcttttcaaattcagcaagttctcagcttgtgtgacggaaggtccttcagaggacctgaggaatgcctgggagaggctaagcctcaggcttcaatgcttctggggttgggcatgaggatgtacacagacacccactaccttactactcacacttcatttcactccttttgtaaatttccaatttaaaaatcaagcacgtctttttagtgagataaaatctgagctcttctgtagaaaaatcaatctctaccagtagaaaatgccagggcttgatggaagagctgtgtagccctttctatgccaaagccaggaaatttggggggcaggaggaggttctcagaatccagtctgtatctttgctgtatgccaaactgaaaccactgggaataatttatgaaacataaaaatcttctgtacttcactccaaggtacatttgcttactgacagcatttttgttaaaactgttattcttgacctgttgtgtatgcgttagattcttcagttaagagaaaagagatatttaagtgataaaatttatgcccttaagggatcgtgcatcatgtatttcaataaaatatgtgttgcatgaatccttaggccaggcagaaagtcttga

SEQ ID NO: 220 - protein, 577 aa, Homo sapiens
MTSAGGAPGALPAGTPESSLHEALDQCMTALDLFLTNQFSEALSYLKPRTKESMYHSLTYATILEMQAMMTFDPQDILLAGNMMKEAQMLCQRHRRKSSVTDSFSSLVNRPTLGQFTEEEIHAEVCYAECLLQRAALTFLQDENMVSFIKGGIKVRNSYQTYKELDSLVQSSQYCKGENHPHFEGGVKLGVGAFNLTLSMLPTRILRLLEFVGFSGNKDYGLLQLEEGASGHSFRSVLCVMLLLCYHTFLTFVLGTGNVNIEEAEKLLKPYLNRYPKGAIFLFFAGRIEVIKGNIDAAIRRFEECCEAQQHWKQFHHMCYWELMWCFTYKGQWKMSYFYADLLSKENCWSKATYIYMKAAYLSMFGKEDHKPFGDDEVELFRAVPGLKLKIAGKSLPTEKFAIRKSRRYFSSNPISLPVPALEMMYIWNGYAVIGKQPKLTDGILEIITKAEEMLEKGPENEYSVDDECLVKLLKGLCLKYLGRVQEAEENFRSISANEKKIKYDHYLIPNALLELALLLMEQDRNEEAIKLLESAKQNYKNYSMESRTHFRIQAATLQAKSSLENSSRSMVSSVSL

SEQ ID NO: 221 - DNA, 5220 bp, Homo sapiens
ggcctcgcctgcggccgctccctccgcctcctccccgccccgagccccagtcagcccgtcttccttcccctcccttgcatgatggaaacaccatggctgcggcggcccagctctctctgacacagttatcaagtgggaatcctgtatatgaaaaatactatagacaggttgatacaggcaatactggaagggtgttggcttctgatgctgctgctttcctgaaaaaatcagggcttccagacttgatacttggaaagatttgggatttagccgacacagatggcaaaggtatcctgaacaaacaagaattctttgttgctttgcgtcttgtggcatgtgcccagaatggattggaagtttcactaagtagtttgaacctggctgttcctccaccaagatttcatgataccagtagtcctttgctaatcagtggaacctctgcagctgagctcccatgggctgtaaaacctgaagataaggccaaatatgatgcaatatttgatagtttaagcccagtgaatggatttctgtctggtgataaagtgaaaccagtgttgctcaactctaagttacctgtggatatccttggaagagtttgggagttgagtgatattgaccatgatggaatgcttgacagagatgagtttgcagttgccatgtttttggtatactgtgcactggagaaagaacctgtgccaatgtccttgcctccagccttggtgccaccatctaagagaaaaacgtgggttgtatcccctgcagaaaaagctaaatatgatgaaatcttcctgaaaactgataaagatatggacggatttgtgtctggattggaggtccgtgaaatattcttgaaaacaggtttaccttctaccttactagcccatatatggtcattatgcgacacaaaggactgtgggaagctttcaaaggatcagtttgccttggcttttcacttaatcagtcagaagttaatcaagggcattgatcctcctcacgttcttactcctgaaatgattccaccatcagacagggccagtttacaaaagaacatcataggatcaagtcctgttgcagatttctctgctattaaggaactagatactcttaacaatgaaatagttgacctacagagggaaaagaataatgtggaacaggaccttaaggagaaggaagatactattaaacagaggacaagtgaggttcaggatcttcaagatgaagttcaaagggagaatactaatctgcaaaaactacaggcccagaaacagcaggtacaggaactccttgatgaactggatgagcagaaagcccagctggaggagcaactcaaggaagtcagaaagaaatgtgctgaggaggcccaactgatctcttctctgaaagctgaattaactagtcaggaatcgcagatctccacttacgaagaagaattggcaaaagctagagaagagctgagccgtctacagcaagaaacagcagaattggaggagagtgtagagtcagggaaggctcagttggaacctcttcagcagcacctacaagattcacaacaggaaattagttcaatgcaaatgaaactgatggaaatgaaagatttggaaaatcataatagtcagttaaattggtgcagtagcccacacagcattcttgtaaacggagctacagattattgcagcctcagcaccagcagcagtgaaacagccaaccttaatgaacatgttgaaggccagagcaacctagagtctgagcccatacaccaggaatctccagcaagaagtagtcctgaactactgccttctggtgtgactgatgaaaatgaggtgactacagctgttactgaaaaagtttgttctgaactcgacaataatagacattcaaaagaggaagatccatttaatgtagactcaagttcgctgacaggtccagttgcagatacaaacttggattttttccagtctgatccttttgttggcagtgatcctttcaaggatgatccttttggaaaaatcgatccatttggtggtgatcctttcaaaggttcagatccatttgcatcagactgtttcttcaggcaatctactgatccttttgccacttcaagcactgaccctttcagtgcagccaacaatagcagtattacatcggtagaaacgttgaagcacaatgatccttttgctcctggtggaacagttgttgcagcaagcgattcagccacagacccctttgcttctgtttttgggaatgaatcatttggaggtggatttgctgacttcagcacattgtcaaaggtcaacaatgaagatccttttcgttcagccacatcgagctctgtcagcaacgtagtgattacaaaaaatgtatttgaggaaacatcggtcaaaagtgaagatgaacccccagcactgccaccaaagatcggaactccaacaagaccctgccctctaccacctgggaaaagatccatcaacaaattggattctcctgatccctttaaactgaatgatccatttcagcctttcccaggcaacgatagccccaaagaaaaagatcctgaaatattttgtgatccattcacttctgctactaccactaccaataaagaggctgatccaagcaattttgccaacttcagtgcttatccctctgaagaagatatgatcgaatgggccaagagggaaagtgagagagaggaagagcagaggcttgcccgactaaatcagcaggaacaagaagacttagaactggctattgcactcagcaaatctgagatatcagaagcatgaagaattctcttgttctttggcaacaatatagtattcttcttcctgaatactgaaactatttacaatgtgtatcaaaactacctgtgagcatgggaatacaaaaggtttgagattcctgtaaatgtgacaaaattttaggattttttttttttcttcattacagattcgtctttttttttttttcttataaaagccgtaacccagtcagacaaattcaccttcacttaggcccctgttctggtatacatttactgtgagcttttgcctgcctgtgctattttacttgtaaagctagagcacccaagcttctgccttctggaatatagagaaatagtttcaccctgcactaccctgttctgtagttattctgatgatagccagtgaggttcttaaagtttgcagtattctcccctgattggaatggttgagtgagggtaagggaaagaatatcttatttcttttatgattggtgcaaattggctaaagtgcatttttaaatttcctctacttaatttgtttttcagagataaggaaaaatattttgcacagatttactccactatggaaaagggatgctgtaggttgaaccattatagcctcagattcgatcttttcctaactaaaaatattaaagcctcatgtgtgaaataaatttttaaaaagatttatctggatttagagaattttagatcaacagatacctctcagtgtgtttgctaattaataaaaatcagtttcttacaaataaagtttgtaagaaaatgttcattttaagtgatagatagtggagaaaatttatcacctaaaatatacccatcagtataaggcaagcaaaagtcttaacatggcagccattctgcctttgccgtggccctgtcctgtttagttcttagtgggttaatttttgtacttttgcagaagaaacttcagcaagctagaactggaaggtactttaatttttcatatatatttgtttttttttttttaatgaaggctcatttacttgaaatgtaaaaactttcactgaatacaaatagaaaaagtgatgtgttttatatcatattgctttttgtccatctttgtggtttagtttatttactcacttcatgtttttcacctataaaattgtcaagctagcaaaaaaactcttgtttttttaattgggagagaagagacctgccagattatcagacctcttcatgttaaaagaccatctcctgtaaaactgacctagtggacaagctgaatttgaaatagactgtgaagtaagctgtaacttgtcattttaattttgtttaacacggttactgacttagatgatgtattaaataccaagataaagaaaaatgcacctaaaatctaattagaattctctgggtcaacaagtcaaggtggtattgatctgtgttaatctgagtaacttattgcctagcctataaataaattccaaaatatccaattcatttcttcttgaaatggtgcttgttttgttttctttccattacacaattagactcctacagtttaaaacaaactttaaaccactatcttgcactgctaacttttttctacctttgtaaatagaaacatttctgcataaaagtcatacatatgaagcaagggctgaatcataatcacaaggcttaattttgataaacgaatccagtgacctaaggattttctgcaaaatttgactgggagttgtgataggtggtatttttgtttattttcttcctcttactccttaggataaaggtaagttgacttgaacaactttcttttgcactgggaaaataagcaaatgtttaaatgcttcaaaaaaattttcaattaaactcaaatattaaatatctataacttataaacaccaactttcaatgtaataaatgtatcctaatcttatgtatgtttaactggattacatagatttttatcttttgttaaaatgtgtataccccgtggaccaacataatattaaagtatgtatatattatataaatatatatgtatatgtgctcgcttgtgtaggatgaatgtcttagagtcgtttgtggtattttatgttgttgactctggctccagggcctgtgcttgaaaaggacagataagtattgcccagagctaagtggcactacttacaaagttttaaatgtcttctacatactgattcatgtttatttgagctctctttatagaattttctcttaaagtttcaaacctctaagttgtagcctgtaattatgagaacagtaaactttaagtaataataaagaatcccatccatatatccaatttgcaattgagttttgcatggttctctgattatgtccatgctgtgtccaaggaggagtaggtacatacaatcagcacagattaatatatgtaaagggtttgggacagcacctggtatagaataaataataaatgtaaactatta

SEQ ID NO: 222 - protein, 896 aa, Homo sapiens
MAAAAQLSLTQLSSGNPVYEKYYRQVDTGNTGRVLASDAAAFLKKSGLPDLILGKIWDLADTDGKGILNKQEFFVALRLVACAQNGLEVSLSSLNLAVPPPRFHDTSSPLLISGTSAAELPWAVKPEDKAKYDAIFDSLSPVNGFLSGDKVKPVLLNSKLPVDILGRVWELSDIDHDGMLDRDEFAVAMFLVYCALEKEPVPMSLPPALVPPSKRKTWVVSPAEKAKYDEIFLKTDKDMDGFVSGLEVREIFLKTGLPSTLLAHIWSLCDTKDCGKLSKDQFALAFHLISQKLIKGIDPPHVLTPEMIPPSDRASLQKNIIGSSPVADFSAIKELDTLNNEIVDLQREKNNVEQDLKEKEDTIKQRTSEVQDLQDEVQRENTNLQKLQAQKQQVQELLDELDEQKAQLEEQLKEVRKKCAEEAQLISSLKAELTSQESQISTYEEELAKAREELSRLQQETAELEESVESGKAQLEPLQQHLQDSQQEISSMQMKLMEMKDLENHNSQLNWCSSPHSILVNGATDYCSLSTSSSETANLNEHVEGQSNLESEPIHQESPARSSPELLPSGVTDENEVTTAVTEKVCSELDNNRHSKEEDPFNVDSSSLTGPVADTNLDFFQSDPFVGSDPFKDDPFGKIDPFGGDPFKGSDPFASDCFFRQSTDPFATSSTDPFSAANNSSITSVETLKHNDPFAPGGTVVAASDSATDPFASVFGNESFGGGFADFSTLSKVNNEDPFRSATSSSVSNVVITKNVFEETSVKSEDEPPALPPKIGTPTRPCPLPPGKRSINKLDSPDPFKLNDPFQPFPGNDSPKEKDPEIFCDPFTSATTTTNKEADPSNFANFSAYPSEEDMIEWAKRESEREEEQRLARLNQQEQEDLELAIALSKSEISEA

SEQ ID NO: 223 - DNA, 2919 bp, Homo sapiens
gtcattggcggctcccaagatggcgtccatcatggaagggccgctgagcaaatggactaacgtgatgaagggctggcagtaccgttggttcgtgctggactacaatgcaggactgctctcctactacacgtccaaggacaaaatgatgagaggctctcgcagaggatgtgttagactcagaggagctgtgattggtatagacgatgaggacgacagcaccttcacaataactgttgatcagaaaaccttccatttccaggcccgtgatgctgatgagcgagagaagtggatccatgccttagaagaaacaattcttcgacatactctccagcttcaaggtttggattcaggatttgttcctagtgtccaagattttgataagaaacttacagaagctgatgcttacctacaaatcttgattgaacaattaaagctttttgatgacaagcttcaaaactgcaaagaagatgaacagagaaagaaaattgaaactctcaaagagacaacaaatagcatggtagaatcaattaaacactgcattgtgttgctgcagattgccaaagaccagagtaatgcggagaagcacgcagatggaatgataagtactattaatcccgtagatgcaatatatcaacctagtcctttggaacctgtgatcagcacaatgccttcccagactgtgttacctccagaacctgttcagttgtgtaagtcagagcagcgtccatcttccctaccagttggacctgtgttggctaccttgggacatcatcagactcctacaccaaatagtacaggcagtggccattcaccaccgagtagcagtctcacttctccaagccacgtgaacttgtctccaaatacagtcccagagttctcttactccagcagtgaagatgaattttatgatgctgatgaattccatcaaagtggctcatccccaaagcgcttaatagattcttctggatctgcctcagtcctgacacacagcagctcgggaaatagtctaaaacgcccagataccacagaatcacttaattcttccttgtccaatggaacaagtgatgctgacctgtttgattcacatgatgacagagatgatgatgcggaggcagggtctgtggaggagcacaagagcgttatcatgcatctcttgtcgcaggttagacttggaatggatcttactaaggtagttcttccaacgtttattcttgaaagaagatctcttttagaaatgtatgcagacttttttgcacatccggacctgtttgtgagcattagtgaccagaaggatcccaaggatcgaatggttcaggttgtgaaatggtacctctcagcctttcatgcgggaaggaaaggatcagttgccaaaaagccatacaatcccattttgggcgagatttttcagtgtcattggacattaccaaatgatactgaagagaacacagaactagtttcagaaggaccagttccctgggtttccaaaaacagtgtaacatttgtggctgagcaggtttcccatcatccacccatttcagccttttatgctgagtgttttaacaagaagatacaattcaatgctcatatctggaccaaatcaaaattccttgggatgtcaattggggtgcacaacatagggcagggctgtgtctcatgtctagactatgatgaacattacattctcacattccccaatggctatggaaggtctatcctcacagtgccctgggtggaattaggaggagaatgcaatattaattgttccaaaacaggctatagtgcaaatatcatcttccacactaaacccttctatgggggcaagaagcacagaattactgccgagattttttctccaaatgacaagaagtctttttgctcaattgaaggggaatggaatggtgtgatgtatgcaaaatatgcaacaggggaaaatacagtctttgtagataccaagaagttgcctataatcaagaagaaagtgaggaagttggaagatcagaacgagtatgaatcccgcagcctttggaaggatgtcactttcaacttaaaaatcagagacattgatgcagcaactgaagcaaagcacaggcttgaagaaagacaaagagcagaagcccgagaaaggaaggagaaggaaattcagtgggagacaaggttatttcatgaagatggagaatgctgggtttatgatgaaccattactgaaacgtcttggtgctgccaagcattaggttggaagatgcaaagtttatacctgatgatcagggcagtaggcataattcagcaacaaacaatcttcctttgggagaaacctgttcattccaatcttctaattacagtggttcctatctcagggatactggactttctgacgcagatgaacaattaaggggaaaagcttcccttttccctctgtggcagttacgattttgacttcagtcctgagaaaaacttcaggttttgaaaatcagatgatgtcttctccttttccaaacaccacacgttgaaagcatttataaatccaagtctgaaactctgcgctctagtactgctgttaagatacacaacttgtttcttagttcatataatctcgggatacacacacacacacacatatatatacacacacatacgtatacacacacatacatatatataaatatacctgatgccagatttttttcataaatattctgcctactgtaaatatgggttcctctgagttgttttagaaaattagcgcaatgtattaaaatcaagtgttaggaaatttcatggtcttacctacaataacttttattttggaattgaactattattaaattgtatctaatcctggattacagtttaattaattattcttagtgcttaaggcttcataaagtaatttttccaaccttttttttaaaaaaaaaaaaaa

SEQ ID NO: 224 - protein, 736 aa, Homo sapiens
MASIMEGPLSKWTNVMKGWQYRWFVLDYNAGLLSYYTSKDKMMRGSRRGCVRLRGAVIGIDDEDDSTFTITVDQKTFHFQARDADEREKWIHALEETILRHTLQLQGLDSGFVPSVQDFDKKLTEADAYLQILIEQLKLFDDKLQNCKEDEQRKKIETLKETTNSMVESIKHCIVLLQIAKDQSNAEKHADGMISTINPVDAIYQPSPLEPVISTMPSQTVLPPEPVQLCKSEQRPSSLPVGPVLATLGHHQTPTPNSTGSGHSPPSSSLTSPSHVNLSPNTVPEFSYSSSEDEFYDADEFHQSGSSPKRLIDSSGSASVLTHSSSGNSLKRPDTTESLNSSLSNGTSDADLFDSHDDRDDDAEAGSVEEHKSVIMHLLSQVRLGMDLTKVVLPTFILERRSLLEMYADFFAHPDLFVSISDQKDPKDRMVQVVKWYLSAFHAGRKGSVAKKPYNPILGEIFQCHWTLPNDTEENTELVSEGPVPWVSKNSVTFVAEQVSHHPPISAFYAECFNKKIQFNAHIWTKSKFLGMSIGVHNIGQGCVSCLDYDEHYILTFPNGYGRSILTVPWVELGGECNINCSKTGYSANIIFHTKPFYGGKKHRITAEIFSPNDKKSFCSIEGEWNGVMYAKYATGENTVFVDTKKLPIIKKKVRKLEDQNEYESRSLWKDVTFNLKIRDIDAATEAKHRLEERQRAEARERKEKEIQWETRLFHEDGECWVYDEPLLKRLGAAKH

SEQ ID NO: 225 - DNA, 2847 bp, Homo sapiens
ggtgaagggggtgtcccgggggacgggctgaacctcagtcaggaccgcctgcaccgcagtccggggatcgggtcgaggggagaagaaaaaggggtgctcgggagcagcccccggctacctcccctggaggcacagagggcgggggccttggcgaatggctttcttgctggccacttgcggagtgagtagaccccgagggtctgggagaggggccggcccctacccctgagtccccggggtcccggccgccaggccggagcgcgaatgtcgtgctcaccctgcctccttcccgccgccccctgggggtttggattcaggatttgttcctagtgtccaagattttgataagaaacttacagaagctgatgcttacctacaaatcttgattgaacaattaaagctttttgatgacaagcttcaaaactgcaaagaagatgaacagagaaagaaaattgaaactctcaaagagacaacaaatagcatggtagaatcaattaaacactgcattgtgttgctgcagattgccaaaagtactattaatcccgtagatgcaatatatcaacctagtcctttggaacctgtgatcagcacaatgccttcccagactgtgttacctccagaacctgttcagttgtgtaagtcagagcagcgtccatcttccctaccagttggacctgtgttggctaccttgggacatcatcagactcctacaccaaatagtacaggcagtggccattcaccaccgagtagcagtctcacttctccaagccacgtgaacttgtctccaaatacagtcccagagttctcttactccagcagtgaagatgaattttatgatgctgatgaattccatcaaagtggctcatccccaaagcgcttaatagattcttctggatctgcctcagtcctgacacacagcagctcgggaaatagtctaaaacgcccagataccacagaatcacttaattcttccttgtccaatggaacaagtgatgctgacctgtttgattcacatgatgacagagatgatgatgcggaggcagggtctgtggaggagcacaagagcgttatcatgcatctcttgtcgcaggttagacttggaatggatcttactaaggtagttcttccaacgtttattcttgaaagaagatctcttttagaaatgtatgcagacttttttgcacatccggacctgtttgtgagcattagtgaccagaaggatcccaaggatcgaatggttcaggttgtgaaatggtacctctcagcctttcatgcgggaaggaaaggatcagttgccaaaaagccatacaatcccattttgggcgagatttttcagtgtcattggacattaccaaatgatactgaagagaacacagaactagtttcagaaggaccagttccctgggtttccaaaaacagtgtaacatttgtggctgagcaggtttcccatcatccacccatttcagccttttatgctgagtgttttaacaagaagatacaattcaatgctcatatctggaccaaatcaaaattccttgggatgtcaattggggtgcacaacatagggcagggctgtgtctcatgtctagactatgatgaacattacattctcacattccccaatggctatggaaggtctatcctcacagtgccctgggtggaattaggaggagaatgcaatattaattgttccaaaacaggctatagtgcaaatatcatcttccacactaaacccttctatgggggcaagaagcacagaattactgccgagattttttctccaaatgacaagaagtctttttgctcaattgaaggggaatggaatggtgtgatgtatgcaaaatatgcaacaggggaaaatacagtctttgtagataccaagaagttgcctataatcaagaagaaagtgaggaagttggaagatcagaacgagtatgaatcccgcagcctttggaaggatgtcactttcaacttaaaaatcagagacattgatgcagcaactgaagcaaagcacaggcttgaagaaagacaaagagcagaagcccgagaaaggaaggagaaggaaattcagtgggagacaaggttatttcatgaagatggagaatgctgggtttatgatgaaccattactgaaacgtcttggtgctgccaagcattaggttggaagatgcaaagtttatacctgatgatcagggcagtaggcataattcagcaacaaacaatcttcctttgggagaaacctgttcattccaatcttctaattacagtggttcctatctcagggatactggactttctgacgcagatgaacaattaaggggaaaagcttcccttttccctctgtggcagttacgattttgacttcagtcctgagaaaaacttcaggttttgaaaatcagatgatgtcttctccttttccaaacaccacacgttgaaagcatttataaatccaagtctgaaactctgcgctctagtactgctgttaagatacacaacttgtttcttagttcatataatctcgggatacacacacacacacacatatatatacacacacatacgtatacacacacatacatatatataaatatacctgatgccagatttttttcataaatattctgcctactgtaaatatgggttcctctgagttgttttagaaaattagcgcaatgtattaaaatcaagtgttaggaaatttcatggtcttacctacaataacttttattttggaattgaactattattaaattgtatctaatcctggattacagtttaattaattattcttagtgcttaaggcttcataaagtaatttttccaaccttttttttaaaaaaaaaaaaaa

SEQ ID NO: 226 - protein, 558 aa, Homo sapiens
MVESIKHCIVLLQIAKSTINPVDAIYQPSPLEPVISTMPSQTVLPPEPVQLCKSEQRPSSLPVGPVLATLGHHQTPTPNSTGSGHSPPSSSLTSPSHVNLSPNTVPEFSYSSSEDEFYDADEFHQSGSSPKRLIDSSGSASVLTHSSSGNSLKRPDTTESLNSSLSNGTSDADLFDSHDDRDDDAEAGSVEEHKSVIMHLLSQVRLGMDLTKVVLPTFILERRSLLEMYADFFAHPDLFVSISDQKDPKDRMVQVVKWYLSAFHAGRKGSVAKKPYNPILGEIFQCHWTLPNDTEENTELVSEGPVPWVSKNSVTFVAEQVSHHPPISAFYAECFNKKIQFNAHIWTKSKFLGMSIGVHNIGQGCVSCLDYDEHYILTFPNGYGRSILTVPWVELGGECNINCSKTGYSANIIFHTKPFYGGKKHRITAEIFSPNDKKSFCSIEGEWNGVMYAKYATGENTVFVDTKKLPIIKKKVRKLEDQNEYESRSLWKDVTFNLKIRDIDAATEAKHRLEERQRAEARERKEKEIQWETRLFHEDGECWVYDEPLLKRLGAAKH

SEQ ID NO: 227 - DNA, 2751 bp, Homo sapiens
ggtgaagggggtgtcccgggggacgggctgaacctcagtcaggaccgcctgcaccgcagtccggggatcgggtcgaggggagaagaaaaaggggtgctcgggagcagcccccggctacctcccctggaggcacagagggcgggggccttggcgaatggctttcttgctggccacttgcggagtgagtagaccccgagggtctgggagaggggccggcccctacccctgagtccccggggtcccggccgccaggccggagcgcgaatgtcgtgctcaccctgcctccttcccgccgccccctgggctttttgatgacaagcttcaaaactgcaaagaagatgaacagagaaagaaaattgaaactctcaaagagacaacaaatagcatggtagaatcaattaaacactgcattgtgttgctgcagattgccaaaagtactattaatcccgtagatgcaatatatcaacctagtcctttggaacctgtgatcagcacaatgccttcccagactgtgttacctccagaacctgttcagttgtgtaagtcagagcagcgtccatcttccctaccagttggacctgtgttggctaccttgggacatcatcagactcctacaccaaatagtacaggcagtggccattcaccaccgagtagcagtctcacttctccaagccacgtgaacttgtctccaaatacagtcccagagttctcttactccagcagtgaagatgaattttatgatgctgatgaattccatcaaagtggctcatccccaaagcgcttaatagattcttctggatctgcctcagtcctgacacacagcagctcgggaaatagtctaaaacgcccagataccacagaatcacttaattcttccttgtccaatggaacaagtgatgctgacctgtttgattcacatgatgacagagatgatgatgcggaggcagggtctgtggaggagcacaagagcgttatcatgcatctcttgtcgcaggttagacttggaatggatcttactaaggtagttcttccaacgtttattcttgaaagaagatctcttttagaaatgtatgcagacttttttgcacatccggacctgtttgtgagcattagtgaccagaaggatcccaaggatcgaatggttcaggttgtgaaatggtacctctcagcctttcatgcgggaaggaaaggatcagttgccaaaaagccatacaatcccattttgggcgagatttttcagtgtcattggacattaccaaatgatactgaagagaacacagaactagtttcagaaggaccagttccctgggtttccaaaaacagtgtaacatttgtggctgagcaggtttcccatcatccacccatttcagccttttatgctgagtgttttaacaagaagatacaattcaatgctcatatctggaccaaatcaaaattccttgggatgtcaattggggtgcacaacatagggcagggctgtgtctcatgtctagactatgatgaacattacattctcacattccccaatggctatggaaggtctatcctcacagtgccctgggtggaattaggaggagaatgcaatattaattgttccaaaacaggctatagtgcaaatatcatcttccacactaaacccttctatgggggcaagaagcacagaattactgccgagattttttctccaaatgacaagaagtctttttgctcaattgaaggggaatggaatggtgtgatgtatgcaaaatatgcaacaggggaaaatacagtctttgtagataccaagaagttgcctataatcaagaagaaagtgaggaagttggaagatcagaacgagtatgaatcccgcagcctttggaaggatgtcactttcaacttaaaaatcagagacattgatgcagcaactgaagcaaagcacaggcttgaagaaagacaaagagcagaagcccgagaaaggaaggagaaggaaattcagtgggagacaaggttatttcatgaagatggagaatgctgggtttatgatgaaccattactgaaacgtcttggtgctgccaagcattaggttggaagatgcaaagtttatacctgatgatcagggcagtaggcataattcagcaacaaacaatcttcctttgggagaaacctgttcattccaatcttctaattacagtggttcctatctcagggatactggactttctgacgcagatgaacaattaaggggaaaagcttcccttttccctctgtggcagttacgattttgacttcagtcctgagaaaaacttcaggttttgaaaatcagatgatgtcttctccttttccaaacaccacacgttgaaagcatttataaatccaagtctgaaactctgcgctctagtactgctgttaagatacacaacttgtttcttagttcatataatctcgggatacacacacacacacacatatatatacacacacatacgtatacacacacatacatatatataaatatacctgatgccagatttttttcataaatattctgcctactgtaaatatgggttcctctgagttgttttagaaaattagcgcaatgtattaaaatcaagtgttaggaaatttcatggtcttacctacaataacttttattttggaattgaactattattaaattgtatctaatcctggattacagtttaattaattattcttagtgcttaaggcttcataaagtaatttttccaaccttttttttaaaaaaaaaaaaaa

SEQ ID NO: 228 - protein, 558 aa, Homo sapiens; identical to SEQ ID NO: 226

SEQ ID NO: 229 - DNA, 2840 bp, Homo sapiens
gtcattggcggctcccaagatggcgtccatcatggaagggccgctgagcaaatggactaacgtgatgaagggctggcagtaccgttggttcgtgctggactacaatgcaggactgctctcctactacacgtccaaggacaaaatgatgagaggctctcgcagaggatgtgttagactcagacccgtgatgctgatgagcgagagaagtggatccatgccttagaagaaacaattcttcgacatactctccagcttcaaggtttggattcaggatttgttcctagtgtccaagattttgataagaaacttacagaagctgatgcttacctacaaatcttgattgaacaattaaagctttttgatgacaagcttcaaaactgcaaagaagatgaacagagaaagaaaattgaaactctcaaagagacaacaaatagcatggtagaatcaattaaacactgcattgtgttgctgcagattgccaaagaccagagtaatgcggagaagcacgcagatggaatgataagtactattaatcccgtagatgcaatatatcaacctagtcctttggaacctgtgatcagcacaatgccttcccagactgtgttacctccagaacctgttcagttgtgtaagtcagagcagcgtccatcttccctaccagttggacctgtgttggctaccttgggacatcatcagactcctacaccaaatagtacaggcagtggccattcaccaccgagtagcagtctcacttctccaagccacgtgaacttgtctccaaatacagtcccagagttctcttactccagcagtgaagatgaattttatgatgctgatgaattccatcaaagtggctcatccccaaagcgcttaatagattcttctggatctgcctcagtcctgacacacagcagctcgggaaatagtctaaaacgcccagataccacagaatcacttaattcttccttgtccaatggaacaagtgatgctgacctgtttgattcacatgatgacagagatgatgatgcggaggcagggtctgtggaggagcacaagagcgttatcatgcatctcttgtcgcaggttagacttggaatggatcttactaaggtagttcttccaacgtttattcttgaaagaagatctcttttagaaatgtatgcagacttttttgcacatccggacctgtttgtgagcattagtgaccagaaggatcccaaggatcgaatggttcaggttgtgaaatggtacctctcagcctttcatgcgggaaggaaaggatcagttgccaaaaagccatacaatcccattttgggcgagatttttcagtgtcattggacattaccaaatgatactgaagagaacacagaactagtttcagaaggaccagttccctgggtttccaaaaacagtgtaacatttgtggctgagcaggtttcccatcatccacccatttcagccttttatgctgagtgttttaacaagaagatacaattcaatgctcatatctggaccaaatcaaaattccttgggatgtcaattggggtgcacaacatagggcagggctgtgtctcatgtctagactatgatgaacattacattctcacattccccaatggctatggaaggtctatcctcacagtgccctgggtggaattaggaggagaatgcaatattaattgttccaaaacaggctatagtgcaaatatcatcttccacactaaacccttctatgggggcaagaagcacagaattactgccgagattttttctccaaatgacaagaagtctttttgctcaattgaaggggaatggaatggtgtgatgtatgcaaaatatgcaacaggggaaaatacagtctttgtagataccaagaagttgcctataatcaagaagaaagtgaggaagttggaagatcagaacgagtatgaatcccgcagcctttggaaggatgtcactttcaacttaaaaatcagagacattgatgcagcaactgaagcaaagcacaggcttgaagaaagacaaagagcagaagcccgagaaaggaaggagaaggaaattcagtgggagacaaggttatttcatgaagatggagaatgctgggtttatgatgaaccattactgaaacgtcttggtgctgccaagcattaggttggaagatgcaaagtttatacctgatgatcagggcagtaggcataattcagcaacaaacaatcttcctttgggagaaacctgttcattccaatcttctaattacagtggttcctatctcagggatactggactttctgacgcagatgaacaattaaggggaaaagcttcccttttccctctgtggcagttacgattttgacttcagtcctgagaaaaacttcaggttttgaaaatcagatgatgtcttctccttttccaaacaccacacgttgaaagcatttataaatccaagtctgaaactctgcgctctagtactgctgttaagatacacaacttgtttcttagttcatataatctcgggatacacacacacacacacatatatatacacacacatacgtatacacacacatacatatatataaatatacctgatgccagatttttttcataaatattctgcctactgtaaatatgggttcctctgagttgttttagaaaattagcgcaatgtattaaaatcaagtgttaggaaatttcatggtcttacctacaataacttttattttggaattgaactattattaaattgtatctaatcctggattacagtttaattaattattcttagtgcttaaggcttcataaagtaatttttccaaccttttttttaaaaaaaaaaaaaa

SEQ ID NO: 230 - protein, 571 aa, Homo sapiens
MVESIKHCIVLLQIAKDQSNAEKHADGMISTINPVDAIYQPSPLEPVISTMPSQTVLPPEPVQLCKSEQRPSSLPVGPVLATLGHHQTPTPNSTGSGHSPPSSSLTSPSHVNLSPNTVPEFSYSSSEDEFYDADEFHQSGSSPKRLIDSSGSASVLTHSSSGNSLKRPDTTESLNSSLSNGTSDADLFDSHDDRDDDAEAGSVEEHKSVIMHLLSQVRLGMDLTKVVLPTFILERRSLLEMYADFFAHPDLFVSISDQKDPKDRMVQVVKWYLSAFHAGRKGSVAKKPYNPILGEIFQCHWTLPNDTEENTELVSEGPVPWVSKNSVTFVAEQVSHHPPISAFYAECFNKKIQFNAHIWTKSKFLGMSIGVHNIGQGCVSCLDYDEHYILTFPNGYGRSILTVPWVELGGECNINCSKTGYSANIIFHTKPFYGGKKHRITAEIFSPNDKKSFCSIEGEWNGVMYAKYATGENTVFVDTKKLPIIKKKVRKLEDQNEYESRSLWKDVTFNLKIRDIDAATEAKHRLEERQRAEARERKEKEIQWETRLFHEDGECWVYDEPLLKRLGAAKH

SEQ ID NO: 231 - DNA, 2694 bp, Homo sapiens
aacctcagtcaggaccgcctgcaccgcagtccggggatcgggtcgaggggagaagaaaaaggggtgctcgggagcagcccccggctacctcccctggaggcacagagggcgggggccttggcgaatggctttcttgctggccacttgcggaggtttggattcaggatttgttcctagtgtccaagattttgataagaaacttacagaagctgatgcttacctacaaatcttgattgaacaattaaagctttttgatgacaagcttcaaaactgcaaagaagatgaacagagaaagaaaattgaaactctcaaagagacaacaaatagcatggtagaatcaattaaacactgcattgtgttgctgcagattgccaaaagtactattaatcccgtagatgcaatatatcaacctagtcctttggaacctgtgatcagcacaatgccttcccagactgtgttacctccagaacctgttcagttgtgtaagtcagagcagcgtccatcttccctaccagttggacctgtgttggctaccttgggacatcatcagactcctacaccaaatagtacaggcagtggccattcaccaccgagtagcagtctcacttctccaagccacgtgaacttgtctccaaatacagtcccagagttctcttactccagcagtgaagatgaattttatgatgctgatgaattccatcaaagtggctcatccccaaagcgcttaatagattcttctggatctgcctcagtcctgacacacagcagctcgggaaatagtctaaaacgcccagataccacagaatcacttaattcttccttgtccaatggaacaagtgatgctgacctgtttgattcacatgatgacagagatgatgatgcggaggcagggtctgtggaggagcacaagagcgttatcatgcatctcttgtcgcaggttagacttggaatggatcttactaaggtagttcttccaacgtttattcttgaaagaagatctcttttagaaatgtatgcagacttttttgcacatccggacctgtttgtgagcattagtgaccagaaggatcccaaggatcgaatggttcaggttgtgaaatggtacctctcagcctttcatgcgggaaggaaaggatcagttgccaaaaagccatacaatcccattttgggcgagatttttcagtgtcattggacattaccaaatgatactgaagagaacacagaactagtttcagaaggaccagttccctgggtttccaaaaacagtgtaacatttgtggctgagcaggtttcccatcatccacccatttcagccttttatgctgagtgttttaacaagaagatacaattcaatgctcatatctggaccaaatcaaaattccttgggatgtcaattggggtgcacaacatagggcagggctgtgtctcatgtctagactatgatgaacattacattctcacattccccaatggctatggaaggtctatcctcacagtgccctgggtggaattaggaggagaatgcaatattaattgttccaaaacaggctatagtgcaaatatcatcttccacactaaacccttctatgggggcaagaagcacagaattactgccgagattttttctccaaatgacaagaagtctttttgctcaattgaaggggaatggaatggtgtgatgtatgcaaaatatgcaacaggggaaaatacagtctttgtagataccaagaagttgcctataatcaagaagaaagtgaggaagttggaagatcagaacgagtatgaatcccgcagcctttggaaggatgtcactttcaacttaaaaatcagagacattgatgcagcaactgaagcaaagcacaggcttgaagaaagacaaagagcagaagcccgagaaaggaaggagaaggaaattcagtgggagacaaggttatttcatgaagatggagaatgctgggtttatgatgaaccattactgaaacgtcttggtgctgccaagcattaggttggaagatgcaaagtttatacctgatgatcagggcagtaggcataattcagcaacaaacaatcttcctttgggagaaacctgttcattccaatcttctaattacagtggttcctatctcagggatactggactttctgacgcagatgaacaattaaggggaaaagcttcccttttccctctgtggcagttacgattttgacttcagtcctgagaaaaacttcaggttttgaaaatcagatgatgtcttctccttttccaaacaccacacgttgaaagcatttataaatccaagtctgaaactctgcgctctagtactgctgttaagatacacaacttgtttcttagttcatataatctcgggatacacacacacacacacatatatatacacacacatacgtatacacacacatacatatatataaatatacctgatgccagatttttttcataaatattctgcctactgtaaatatgggttcctctgagttgttttagaaaattagcgcaatgtattaaaatcaagtgttaggaaatttcatggtcttacctacaataacttttattttggaattgaactattattaaattgtatctaatcctggattacagtttaattaattattcttagtgcttaaggcttcataaagtaatttttccaaccttttttttaaaaaaaaaaaaaa

SEQ ID NO: 232 - protein, 626 aa, Homo sapiens
MAFLLATCGGLDSGFVPSVQDFDKKLTEADAYLQILIEQLKLFDDKLQNCKEDEQRKKIETLKETTNSMVESIKHCIVLLQIAKSTINPVDAIYQPSPLEPVISTMPSQTVLPPEPVQLCKSEQRPSSLPVGPVLATLGHHQTPTPNSTGSGHSPPSSSLTSPSHVNLSPNTVPEFSYSSSEDEFYDADEFHQSGSSPKRLIDSSGSASVLTHSSSGNSLKRPDTTESLNSSLSNGTSDADLFDSHDDRDDDAEAGSVEEHKSVIMHLLSQVRLGMDLTKVVLPTFILERRSLLEMYADFFAHPDLFVSISDQKDPKDRMVQVVKWYLSAFHAGRKGSVAKKPYNPILGEIFQCHWTLPNDTEENTELVSEGPVPWVSKNSVTFVAEQVSHHPPISAFYAECFNKKIQFNAHIWTKSKFLGMSIGVHNIGQGCVSCLDYDEHYILTFPNGYGRSILTVPWVELGGECNINCSKTGYSANIIFHTKPFYGGKKHRITAEIFSPNDKKSFCSIEGEWNGVMYAKYATGENTVFVDTKKLPIIKKKVRKLEDQNEYESRSLWKDVTFNLKIRDIDAATEAKHRLEERQRAEARERKEKEIQWETRLFHEDGECWVYDEPLLKRLGAAKH

SEQ ID NO: 233 - DNA, 2880 bp, Homo sapiens
gtcattggcggctcccaagatggcgtccatcatggaagggccgctgagcaaatggactaacgtgatgaagggctggcagtaccgttggttcgtgctggactacaatgcaggactgctctcctactacacgtccaaggacaaaatgatgagaggctctcgcagaggatgtgttagactcagaggagctgtgattggtatagacgatgaggacgacagcaccttcacaataactgttgatcagaaaaccttccatttccaggcccgtgatgctgatgagcgagagaagtggatccatgccttagaagaaacaattcttcgacatactctccagcttcaaggtttggattcaggatttgttcctagtgtccaagattttgataagaaacttacagaagctgatgcttacctacaaatcttgattgaacaattaaagctttttgatgacaagcttcaaaactgcaaagaagatgaacagagaaagaaaattgaaactctcaaagagacaacaaatagcatggtagaatcaattaaacactgcattgtgttgctgcagattgccaaaagtactattaatcccgtagatgcaatatatcaacctagtcctttggaacctgtgatcagcacaatgccttcccagactgtgttacctccagaacctgttcagttgtgtaagtcagagcagcgtccatcttccctaccagttggacctgtgttggctaccttgggacatcatcagactcctacaccaaatagtacaggcagtggccattcaccaccgagtagcagtctcacttctccaagccacgtgaacttgtctccaaatacagtcccagagttctcttactccagcagtgaagatgaattttatgatgctgatgaattccatcaaagtggctcatccccaaagcgcttaatagattcttctggatctgcctcagtcctgacacacagcagctcgggaaatagtctaaaacgcccagataccacagaatcacttaattcttccttgtccaatggaacaagtgatgctgacctgtttgattcacatgatgacagagatgatgatgcggaggcagggtctgtggaggagcacaagagcgttatcatgcatctcttgtcgcaggttagacttggaatggatcttactaaggtagttcttccaacgtttattcttgaaagaagatctcttttagaaatgtatgcagacttttttgcacatccggacctgtttgtgagcattagtgaccagaaggatcccaaggatcgaatggttcaggttgtgaaatggtacctctcagcctttcatgcgggaaggaaaggatcagttgccaaaaagccatacaatcccattttgggcgagatttttcagtgtcattggacattaccaaatgatactgaagagaacacagaactagtttcagaaggaccagttccctgggtttccaaaaacagtgtaacatttgtggctgagcaggtttcccatcatccacccatttcagccttttatgctgagtgttttaacaagaagatacaattcaatgctcatatctggaccaaatcaaaattccttgggatgtcaattggggtgcacaacatagggcagggctgtgtctcatgtctagactatgatgaacattacattctcacattccccaatggctatggaaggtctatcctcacagtgccctgggtggaattaggaggagaatgcaatattaattgttccaaaacaggctatagtgcaaatatcatcttccacactaaacccttctatgggggcaagaagcacagaattactgccgagattttttctccaaatgacaagaagtctttttgctcaattgaaggggaatggaatggtgtgatgtatgcaaaatatgcaacaggggaaaatacagtctttgtagataccaagaagttgcctataatcaagaagaaagtgaggaagttggaagatcagaacgagtatgaatcccgcagcctttggaaggatgtcactttcaacttaaaaatcagagacattgatgcagcaactgaagcaaagcacaggcttgaagaaagacaaagagcagaagcccgagaaaggaaggagaaggaaattcagtgggagacaaggttatttcatgaagatggagaatgctgggtttatgatgaaccattactgaaacgtcttggtgctgccaagcattaggttggaagatgcaaagtttatacctgatgatcagggcagtaggcataattcagcaacaaacaatcttcctttgggagaaacctgttcattccaatcttctaattacagtggttcctatctcagggatactggactttctgacgcagatgaacaattaaggggaaaagcttcccttttccctctgtggcagttacgattttgacttcagtcctgagaaaaacttcaggttttgaaaatcagatgatgtcttctccttttccaaacaccacacgttgaaagcatttataaatccaagtctgaaactctgcgctctagtactgctgttaagatacacaacttgtttcttagttcatataatctcgggatacacacacacacacacatatatatacacacacatacgtatacacacacatacatatatataaatatacctgatgccagatttttttcataaatattctgcctactgtaaatatgggttcctctgagttgttttagaaaattagcgcaatgtattaaaatcaagtgttaggaaatttcatggtcttacctacaataacttttattttggaattgaactattattaaattgtatctaatcctggattacagtttaattaattattcttagtgcttaaggcttcataaagtaatttttccaaccttttttttaaaaaaaaaaaaaa

SEQ ID NO: 234 - protein, 723 aa, Homo sapiens
MASIMEGPLSKWTNVMKGWQYRWFVLDYNAGLLSYYTSKDKMMRGSRRGCVRLRGAVIGIDDEDDSTFTITVDQKTFHFQARDADEREKWIHALEETILRHTLQLQGLDSGFVPSVQDFDKKLTEADAYLQILIEQLKLFDDKLQNCKEDEQRKKIETLKETTNSMVESIKHCIVLLQIAKSTINPVDAIYQPSPLEPVISTMPSQTVLPPEPVQLCKSEQRPSSLPVGPVLATLGHHQTPTPNSTGSGHSPPSSSLTSPSHVNLSPNTVPEFSYSSSEDEFYDADEFHQSGSSPKRLIDSSGSASVLTHSSSGNSLKRPDTTESLNSSLSNGTSDADLFDSHDDRDDDAEAGSVEEHKSVIMHLLSQVRLGMDLTKVVLPTFILERRSLLEMYADFFAHPDLFVSISDQKDPKDRMVQVVKWYLSAFHAGRKGSVAKKPYNPILGEIFQCHWTLPNDTEENTELVSEGPVPWVSKNSVTFVAEQVSHHPPISAFYAECFNKKIQFNAHIWTKSKFLGMSIGVHNIGQGCVSCLDYDEHYILTFPNGYGRSILTVPWVELGGECNINCSKTGYSANIIFHTKPFYGGKKHRITAEIFSPNDKKSFCSIEGEWNGVMYAKYATGENTVFVDTKKLPIIKKKVRKLEDQNEYESRSLWKDVTFNLKIRDIDAATEAKHRLEERQRAEARERKEKEIQWETRLFHEDGECWVYDEPLLKRLGAAKH

SEQ ID NO: 235 - DNA, 2949 bp, Homo sapiens
gtcattggcggctcccaagatggcgtccatcatggaagggccgctgagcaaatggactaacgtgatgaagggctggcagtaccgttggttcgtgctggactacaatgcaggactgctctcctactacacgtccaaggacaaaatgatgagaggctctcgcagaggatgtgttagactcagaggagctgtgattggtatagacgatgaggacgacagcaccttcacaataactgttgatcagaaaaccttccatttccaggcccgtgatgctgatgagcgagagaagtggatccatgccttagaagaaacaattcttcgacatactctccagcttcaaatcagtaccacacttgcttttttccagtcttctggtatctctccagttcttgaattttcaaaaataattggtttggattcaggatttgttcctagtgtccaagattttgataagaaacttacagaagctgatgcttacctacaaatcttgattgaacaattaaagctttttgatgacaagcttcaaaactgcaaagaagatgaacagagaaagaaaattgaaactctcaaagagacaacaaatagcatggtagaatcaattaaacactgcattgtgttgctgcagattgccaaaagtactattaatcccgtagatgcaatatatcaacctagtcctttggaacctgtgatcagcacaatgccttcccagactgtgttacctccagaacctgttcagttgtgtaagtcagagcagcgtccatcttccctaccagttggacctgtgttggctaccttgggacatcatcagactcctacaccaaatagtacaggcagtggccattcaccaccgagtagcagtctcacttctccaagccacgtgaacttgtctccaaatacagtcccagagttctcttactccagcagtgaagatgaattttatgatgctgatgaattccatcaaagtggctcatccccaaagcgcttaatagattcttctggatctgcctcagtcctgacacacagcagctcgggaaatagtctaaaacgcccagataccacagaatcacttaattcttccttgtccaatggaacaagtgatgctgacctgtttgattcacatgatgacagagatgatgatgcggaggcagggtctgtggaggagcacaagagcgttatcatgcatctcttgtcgcaggttagacttggaatggatcttactaaggtagttcttccaacgtttattcttgaaagaagatctcttttagaaatgtatgcagacttttttgcacatccggacctgtttgtgagcattagtgaccagaaggatcccaaggatcgaatggttcaggttgtgaaatggtacctctcagcctttcatgcgggaaggaaaggatcagttgccaaaaagccatacaatcccattttgggcgagatttttcagtgtcattggacattaccaaatgatactgaagagaacacagaactagtttcagaaggaccagttccctgggtttccaaaaacagtgtaacatttgtggctgagcaggtttcccatcatccacccatttcagccttttatgctgagtgttttaacaagaagatacaattcaatgctcatatctggaccaaatcaaaattccttgggatgtcaattggggtgcacaacatagggcagggctgtgtctcatgtctagactatgatgaacattacattctcacattccccaatggctatggaaggtctatcctcacagtgccctgggtggaattaggaggagaatgcaatattaattgttccaaaacaggctatagtgcaaatatcatcttccacactaaacccttctatgggggcaagaagcacagaattactgccgagattttttctccaaatgacaagaagtctttttgctcaattgaaggggaatggaatggtgtgatgtatgcaaaatatgcaacaggggaaaatacagtctttgtagataccaagaagttgcctataatcaagaagaaagtgaggaagttggaagatcagaacgagtatgaatcccgcagcctttggaaggatgtcactttcaacttaaaaatcagagacattgatgcagcaactgaagcaaagcacaggcttgaagaaagacaaagagcagaagcccgagaaaggaaggagaaggaaattcagtgggagacaaggttatttcatgaagatggagaatgctgggtttatgatgaaccattactgaaacgtcttggtgctgccaagcattaggttggaagatgcaaagtttatacctgatgatcagggcagtaggcataattcagcaacaaacaatcttcctttgggagaaacctgttcattccaatcttctaattacagtggttcctatctcagggatactggactttctgacgcagatgaacaattaaggggaaaagcttcccttttccctctgtggcagttacgattttgacttcagtcctgagaaaaacttcaggttttgaaaatcagatgatgtcttctccttttccaaacaccacacgttgaaagcatttataaatccaagtctgaaactctgcgctctagtactgctgttaagatacacaacttgtttcttagttcatataatctcgggatacacacacacacacacatatatatacacacacatacgtatacacacacatacatatatataaatatacctgatgccagatttttttcataaatattctgcctactgtaaatatgggttcctctgagttgttttagaaaattagcgcaatgtattaaaatcaagtgttaggaaatttcatggtcttacctacaataacttttattttggaattgaactattattaaattgtatctaatcctggattacagtttaattaattattcttagtgcttaaggcttcataaagtaatttttccaaccttttttttaaaaaaaaaaaaaa

SEQ ID NO: 236 - protein, 746 aa, Homo sapiens
MASIMEGPLSKWTNVMKGWQYRWFVLDYNAGLLSYYTSKDKMMRGSRRGCVRLRGAVIGIDDEDDSTFTITVDQKTFHFQARDADEREKWIHALEETILRHTLQLQISTTLAFFQSSGISPVLEFSKIIGLDSGFVPSVQDFDKKLTEADAYLQILIEQLKLFDDKLQNCKEDEQRKKIETLKETTNSMVESIKHCIVLLQIAKSTINPVDAIYQPSPLEPVISTMPSQTVLPPEPVQLCKSEQRPSSLPVGPVLATLGHHQTPTPNSTGSGHSPPSSSLTSPSHVNLSPNTVPEFSYSSSEDEFYDADEFHQSGSSPKRLIDSSGSASVLTHSSSGNSLKRPDTTESLNSSLSNGTSDADLFDSHDDRDDDAEAGSVEEHKSVIMHLLSQVRLGMDLTKVVLPTFILERRSLLEMYADFFAHPDLFVSISDQKDPKDRMVQVVKWYLSAFHAGRKGSVAKKPYNPILGEIFQCHWTLPNDTEENTELVSEGPVPWVSKNSVTFVAEQVSHHPPISAFYAECFNKKIQFNAHIWTKSKFLGMSIGVHNIGQGCVSCLDYDEHYILTFPNGYGRSILTVPWVELGGECNINCSKTGYSANIIFHTKPFYGGKKHRITAEIFSPNDKKSFCSIEGEWNGVMYAKYATGENTVFVDTKKLPIIKKKVRKLEDQNEYESRSLWKDVTFNLKIRDIDAATEAKHRLEERQRAEARERKEKEIQWETRLFHEDGECWVYDEPLLKRLGAAKH

SEQ ID NO: 237 - DNA, 3851 bp, Homo sapiens
agactggggtgggggaggggttcaggcctgttccccgcggctgcggcagcaccagggccggccgccaccgcctctagaacgcggaggaggtgggtcctgggaagcgggatgtccatcgctccagcttggtggtgaatgctgaggagagtcactgttgctgcagtctgtgccacccggaggaagttgtgtgaggccgggcgggacgtcgcggcgctctggggaatcgaaacgcggggtcggtgcgaagactctgctgctgccagaccctttcctattctggccatgcctggaaggaacaaggcgaagtctacctgcagctgccctgacctgcagcccaatggacaggatctgggcgagaacagccgggttgcccgtctaggagcggatgaatctgaggaagagggacggagggggtctctcagtaatgctggggaccctgagatcgtcaagtctcccagcgaccccaagcaataccgatacatcaaattacagaatggcctacaggcacttctgatttcagacctaagtaatatggaaggtaaaacaggaaatacaacagatgatgaagaagaagaggaggtggaggaagaagaagaagatgatgatgaagattctggagctgaaatagaagatgacgatgaagagggttttgatgatgaagatgagtttgatgatgaacatgatgatgatcttgatactgaggataatgaattggaagaattagaagagagagcagaagctagaaaaaaaactactgaaaaacagcaattgcagagcctgtttttgctgtggtcaaagctgactgatagactgtggtttaagtcaacttattcaaaaatgtcttcaaccctgctggtcgagacaagaaatctttatggggtagttggagctgaaagcaggtctgcacctgttcagcatttggcaggatggcaagcggaggagcagcagggtgaaactgacacagttctgtctgcagcggctctttgtgttggagttgggagtttcgctgatccagatgacctgccggggctggcacactttttggagcacatggtattcatgggtagtttgaaatatccagatgagaatggatttgatgccttcctgaagaagcatgggggtagtgataatgcctcaactgattgtgaacgcactgtctttcagtttgatgtccagaggaagtacttcaaggaagctcttgatagatgggcgcagttcttcatccacccactaatgatcagagatgcaattgaccgtgaagttgaagctgttgatagtgaatatcaacttgcaaggccttctgatgcaaacagaaaggaaatgttgtttggaagccttgctagacctggccatcctatgggaaaatttttttggggaaatgctgagacgctcaagcatgagccaagaaagaataatattgatacacatgctagattgagagaattctggatgcgttactactcttctcattacatgactttagtggttcaatccaaagaaacactggatactttggaaaagtgggtgactgaaatcttctctcagataccaaacaatgggttacccagaccaaactttggccatttaacggatccatttgacacaccagcatttaacaaactttatagagttgttccaatcagaaaaattcatgctctgaccatcacatgggcacttcctcctcaacagcaacattacagggtgaagccacttcattatatatcctggctggttggacatgaaggcaaaggcagcattctttctttccttaggaaaaaatgctgggctcttgcactgtttggtggaaatggtgagacaggatttgagcaaaattctacttattcagtgttcagcatttctattacattgactgatgagggttatgaacatttttatgaggttgcttacactgtctttctgtatttaaaaatgctgcagaagctaggcccagaaaaaagaatttttgaagagattcggaaaattgaggataatgaatttcattaccaagaacagacagatccagttgagtatgtggaaaacatgtgtgagaacatgcagctgtacccattgcaggacattctcactggagatcagcttctttttgaatacaagccagaagtcattggtgaagccttgaatcagctagttcctcaaaaagcaaatcttgttttactgtctggtgctaatgagggaaaatgtgacctcaaggagaaatggtttggaactcaatatagtatagaagatattgaaaactcttgggctgaactgtggaatagtaatttcgaattaaatccagatcttcatcttccagctgaaaacaagtacatagccacggactttacgttgaaggctttcgattgcccggaaacagaatacccagttaaaattgtgaatactccacaaggttgcctgtggtataagaaagacaacaaattcaaaatccccaaagcatatatacgtttccatctaatttcaccgttgatacagaaatctgcagcaaatgtggtcctctttgatatctttgtcaatatccttacgcataaccttgcggaaccagcttatgaagcagatgtggcacagctggagtataaactggcagctggagaacatggtttaattattcgagtgaaaggatttaaccacaaactacctctactgtttcagctcattattgactacttagctgagttcaattccacaccagctgtctttacaatgataactgagcagttgaagaagacctactttaacatcctcatcaagcctgagactttggccaaagatgtacggcttttaatcttggaatatgcccgttggtctatgattgacaagtaccaggctttgatggacggcctttcccttgagtctctgctgagcttcgtcaaagaattcaaatcccagctctttgtggagggcctggtacaagggaatgtcacaagcacagaatctatggatttcctgaaatatgttgttgacaaactaaacttcaagcctctggagcaggagatgcctgtgcagttccaggtggtagagctgcccagtggccaccatctatgcaaagtgaaagctctgaacaagggtgatgccaactctgaagtcactgtgtactaccagtcaggtaccaggagtctaagagaatatacgcttatggagctgcttgtgatgcacatggaagaaccttgttttgacttccttcgaaccaagcagacccttgggtaccatgtctaccctacctgtaggaacacatccgggattctaggattttctgtcactgtggggactcaggcaaccaaatacaattctgaagttgttgataagaagatagaagagtttctttctagctttgaggagaagattgagaacctcactgaagaggcattcaacacccaggtcacagctctcatcaagctgaaggagtgtgaggatacccaccttggggaggaggtggataggaactggaatgaagtggttacacagcagtacctctttgaccgccttgcccacgagattgaagcactgaagtcattctcaaaatcagacctggtcaactggttcaaggctcatagagggccaggaagtaaaatgctcagcgttcatgttgttgggtatgggaagtatgaactggaagaggatggatccccttctagtgaggattcaaattcttcttgtgaagtgatgcagctgacctacctgccaacctctcctctgctggcagattgtatcatccccattactgatatcagggctttcacaacaacactcaaccttctcccctaccataaaatagtcaaataaataaactgcagtcacgttggcctgaaaaaaaaaaaaaaaaaaaaaaaaaaaaaaaa

SEQ ID NO: 238 - protein, 1219 aa, Homo sapiens
MLRRVTVAAVCATRRKLCEAGRDVAALWGIETRGRCEDSAAARPFPILAMPGRNKAKSTCSCPDLQPNGQDLGENSRVARLGADESEEEGRRGSLSNAGDPEIVKSPSDPKQYRYIKLQNGLQALLISDLSNMEGKTGNTTDDEEEEEVEEEEEDDDEDSGAEIEDDDEEGFDDEDEFDDEHDDDLDTEDNELEELEERAEARKKTTEKQQLQSLFLLWSKLTDRLWFKSTYSKMSSTLLVETRNLYGVVGAESRSAPVQHLAGWQAEEQQGETDTVLSAAALCVGVGSFADPDDLPGLAHFLEHMVFMGSLKYPDENGFDAFLKKHGGSDNASTDCERTVFQFDVQRKYFKEALDRWAQFFIHPLMIRDAIDREVEAVDSEYQLARPSDANRKEMLFGSLARPGHPMGKFFWGNAETLKHEPRKNNIDTHARLREFWMRYYSSHYMTLVVQSKETLDTLEKWVTEIFSQIPNNGLPRPNFGHLTDPFDTPAFNKLYRVVPIRKIHALTITWALPPQQQHYRVKPLHYISWLVGHEGKGSILSFLRKKCWALALFGGNGETGFEQNSTYSVFSISITLTDEGYEHFYEVAYTVFLYLKMLQKLGPEKRIFEEIRKIEDNEFHYQEQTDPVEYVENMCENMQLYPLQDILTGDQLLFEYKPEVIGEALNQLVPQKANLVLLSGANEGKCDLKEKWFGTQYSIEDIENSWAELWNSNFELNPDLHLPAENKYIATDFTLKAFDCPETEYPVKIVNTPQGCLWYKKDNKFKIPKAYIRFHLISPLIQKSAANVVLFDIFVNILTHNLAEPAYEADVAQLEYKLAAGEHGLIIRVKGFNHKLPLLFQLIIDYLAEFNSTPAVFTMITEQLKKTYFNILIKPETLAKDVRLLILEYARWSMIDKYQALMDGLSLESLLSFVKEFKSQLFVEGLVQGNVTSTESMDFLKYVVDKLNFKPLEQEMPVQFQVVELPSGHHLCKVKALNKGDANSEVTVYYQSGTRSLREYTLMELLVMHMEEPCFDFLRTKQTLGYHVYPTCRNTSGILGFSVTVGTQATKYNSEVVDKKIEEFLSSFEEKIENLTEEAFNTQVTALIKLKECEDTHLGEEVDRNWNEVVTQQYLFDRLAHEIEALKSFSKSDLVNWFKAHRGPGSKMLSVHVVGYGKYELEEDGSPSSEDSNSSCEVMQLTYLPTSPLLADCIIPITDIRAFTTTLNLLPYHKIVK

SEQ ID NO: 239 - DNA, 1565 bp, Homo sapiens
cctgaccggaccagaccatcccgcagcgccccgccccggccccctccgcgccctcccgacgccaggtcctgccgtcccgccgaccgtccgggagcgaacccgtcgtcccgcactcggagtccgcgatggcttcagtgacagatggtaaaactggagtcaaagatgcctctgaccagaattttgactacatgtttaaactgcttatcattggcaacagcagtgttggcaagacctccttcctcttccgctatgctgatgacacgttcaccccagccttcgttagcaccgtgggcatcgacttcaaggtgaagacagtctaccgtcacgagaagcgggtgaaactgcagatctgggacacagctgggcaggagcggtaccggaccatcacaacagcctattaccgtggggccatgggcttcattctgatgtatgacatcaccaatgaagagtccttcaatgctgtccaagactgggctactcagatcaagacctactcctgggacaatgcacaagttattctggtggggaacaagtgtgacatggaggaagagagggttgttcccactgagaagggccagctccttgcagagcagcttgggtttgatttctttgaagccagtgcaaaggagaacatcagtgtaaggcaggcctttgagcgcctggtggatgccatttgtgacaagatgtctgattcgctggacacagacccgtcgatgctgggctcctccaagaacacgcgtctctcggacaccccaccgctgctgcagcagaactgctcatgctaggcaaggcccaccttcctgacctcccctcattgtggccccacacccagtctgcttctccctgttacacactgtccgctctcagcccactctccctgttacacactgcccacactcagagcaagatgagttgctgctattctttgcctgcccctggggttctctgcagatggtcccagtaatagatactcagcactagactaacataacaggtcactacacgggtgcagaatcactttacaaaagaagactctgttttacgaaggggattcactacagggacttagagaacagtctcttttctgcctttaaaatgagagttcctccatttaccaaaatttgacacgcacacattcttcaggggcatgccaattgcgtaaagtgaggctcgcctgcatagctaatcctgttaaagacaacttctcaaagcacaacgtgcttgtttcctatcgggctccctgcggggctttctctcactacaagtcaagcttgggctctcaaagccctgcgcctgttaccacggatgcccacagggcctgggcagttgctgtggcgacaggaagagctaatcttcagagagctcagactctctaatgatgctgaaggagcaaaggctgagtcagaaacacacttaagagaaaaggattggccgggcgcggtggctcacgcctgtaatcccagcactttgggaggccgaggcgggtggatcatgaggtcaggagatcgagaccatcctggctaacaaggtgaaaccccgtctctactaaaaaaaaaaaaaaaaaa

SEQ ID NO: 240 - protein, 219 aa, Homo sapiens
MASVTDGKTGVKDASDQNFDYMFKLLIIGNSSVGKTSFLFRYADDTFTPAFVSTVGIDFKVKTVYRHEKRVKLQIWDTAGQERYRTITTAYYRGAMGFILMYDITNEESFNAVQDWATQIKTYSWDNAQVILVGNKCDMEEERVVPTEKGQLLAEQLGFDFFEASAKENISVRQAFERLVDAICDKMSDSLDTDPSMLGSSKNTRLSDTPPLLQQNCSC

SEQ ID NO: 241 - DNA, 1616 bp, Homo sapiens
cgggacctggacacccagaatccacgaaaagcaactcgcgctcgagaacagctctcgtacccttctacgtgatctgcacctttaagctcactccatcccaaaccggaccccggaggcaccacccacatccgtctaacatcacttccttcagagtttgaaaaaaaaaaatctgggaagtagaggtgttgtgctgagcggcgctcggcgaactgtgtggaccgtctgctgggactccggccctgcgtccgctcagccccgtggccccgcgcacctactgccatggagacgcggcctcgtctcggggccacctgtttgctgggcttcagtttcctgctcctcgtcatctcttctgatggacataatgggcttggaaagggttttggagatcatattcattggaggacactggaagatgggaagaaagaagcagctgccagtggactgcccctgatggtgattattcataaatcctggtgtggagcttgcaaagctctaaagcccaaatttgcagaatctacggaaatttcagaactctcccataattttgttatggtaaatcttgaggatgaagaggaacccaaagatgaagatttcagccctgacgggggttatattccacgaatcctttttctggatcccagtggcaaggtgcatcctgaaatcatcaatgagaatggaaaccccagctacaagtatttttatgtcagtgccgagcaagttgttcaggggatgaaggaagctcaggaaaggctgacgggtgatgccttcagaaagaaacatcttgaagatgaattgtaacatgaatgtgccccttctttcatcagagttagtgttctggaaggaaagcagcagggaagggaatattgaggaatcatctagaacaattaagccgaccaggaaacctcattcctacctacactggaaggagcgctctcactgtggaagagttctgctaacagaagctggtctgcatgtttgtggatccagcggagagtggcagactttcttctccttttccctctcacctaaatgtcaacttgtcattgaatgtaaagaatgaaaccttctgacacaaaacttgagccacttggatgtttactcctcgcacttaagtatttgagtcttttcccatttcctcccactttactcaccttagtggtgaaaggagactagtagcatcttttctacaacgttaaaattgcagaagtagcttatcattaaaaaacaacaacaacaacaataacaataaatcctaagtgtaaatcagttattctaccccctaccaaggatatcagcctgttttttcccttttttctcctgggaataattgtgggcttcttcccaaatttctacagcctctttcctcttctcatgcttgagcttccctgtttgcacgcatgcgtgtgcaggactggctgtgtgcttggactcggctccaggtggaagcatgctttcccttgttactgttggagaaactcaaaccttcaagccctaggtgtagccattttgtcaagtcatcaactgtatttttgtactggcattaacaaaaaaagagataaaatattgtaccattaaactttaataaaactttaaaaggaaaaaaaaaaaaaaaaaaa

SEQ ID NO: 242 - protein, 172 aa, Homo sapiens
METRPRLGATCLLGFSFLLLVISSDGHNGLGKGFGDHIHWRTLEDGKKEAAASGLPLMVIIHKSWCGACKALKPKFAESTEISELSHNFVMVNLEDEEEPKDEDFSPDGGYIPRILFLDPSGKVHPEIINENGNPSYKYFYVSAEQVVQGMKEAQERLTGDAFRKKHLEDEL

SEQ ID NO: 243 - DNA, 1712 bp, Homo sapiens
ttggcgcagcgcggttgccaatggtcgctccctgagaggatgccgctcgtggtgttttgcgggctgccgtacagcggcaagagccggcgtgctgaagagttgcgcgtggcgctggctgccgagggccgcgcggtgtacgtggtggacgacgcagctgtcctgggcgcagaggacccagcggtgtacggcgattctgcccgtgagaaggcattgcgtggagctctgcgagcctccgtggaacggcgcctgagtcgccacgacgtggtcatcctggactcgcttaactacatcaaaggtttccgttacgagctctactgcctggcacgggcggcgcgcaccccgctctgcctggtctactgcgtacggcccggcggcccgatcgcgggacctcaggtggcgggcgcgaacgagaaccctggccggaacgtcagtgtgagttggcggccacgcgctgaggaggacgggagagcccaggcggcgggcagcagcgtcctcagggaactgcatactgcggactctgtagtaaatggaagtgcccaggccgacgtacccaaggaactggagcgagaagaatccggggctgcggagtctccagctcttgtgactccggattcagagaaatctgcaaagcatgggtccggtgccttttactctcccgaactcctggaggccctaacgctgcgctttgaggctcccgattctcggaatcgctgggaccggcctttattcactttggtgggcctagaggagccgttgcccctggcggggatccgctctgccctgtttgagaaccgggccccaccaccccatcagtctacgcagtcccagcccctcgcctccggcagctttctgcaccagttggaccaggtcacgagtcaagtactggccggattgatggaagcgcagaagagcgctgtccccggggacttgctcacgcttcctggtaccacagagcacttgcggtttacccggcccttgaccatggcagaactgagtcgccttcgtcgccagtttatttcgtacactaaaatgcatcccaacaatgagaacttgccgcaactggccaacatgtttcttcagtatttgagccagagcctgcactgaccagaggaggtaggggggaagccatggcttctgatctccactccactttatttctctgggaaaaataggctgcaggtctccagagcatatcgatgcagtactgtactagagctgttgtgactgattcactcaaactttcctgcatacccctgtgccaggccttgggtttacagcataagttcagactaaagagaatggagaactattgtggtgcaacctggcaaatccctcagaggacagagctaaggtggacagggattacctagattggatcctacttgggctatcacagagcattgaccattggcttccctcatctgaggcgtgggagagcagactggatagatgagaattgttttaaaacaattgtgaacagaaactgaagatggtacagttctacatctgcacctgcccttttttcataccacaaaagtattttttgagtactgtactgactttttgctagtttctattctgggaccgagttcacagataaatccattggtttgtatccttgagaaactttgtttttgtggaagtaagaaagttatctactagattatttcctctaataaaatcttttaaaatagtcaaaaaaaaaaaaaaaa

SEQ ID NO: 244 - protein, 354 aa, Homo sapiens
MPLVVFCGLPYSGKSRRAEELRVALAAEGRAVYVVDDAAVLGAEDPAVYGDSAREKALRGALRASVERRLSRHDVVILDSLNYIKGFRYELYCLARAARTPLCLVYCVRPGGPIAGPQVAGANENPGRNVSVSWRPRAEEDGRAQAAGSSVLRELHTADSVVNGSAQADVPKELEREESGAAESPALVTPDSEKSAKHGSGAFYSPELLEALTLRFEAPDSRNRWDRPLFTLVGLEEPLPLAGIRSALFENRAPPPHQSTQSQPLASGSFLHQLDQVTSQVLAGLMEAQKSAVPGDLLTLPGTTEHLRFTRPLTMAELSRLRRQFISYTKMHPNNENLPQLANMFLQYLSQSLH

SEQ ID NO: 245 - DNA, 1923 bp, Homo sapiens
cttcctcctcctggccgcttagtctcacacccgccgggccgttgttcccgagacgttgttgagtcccctgtgtcctcttctgggtggaggaactgcaatgtctggtggagaacagaaaccagagaggtactatgtgggtgtggacgttggaacaggcagtgtccgtgcagctctggtggaccagagtggggtcctgttggcttttgcagaccagccaattaagaattgggagccccagttcaaccaccatgagcagtcctccgaggacatctgggctgcgtgctgtgttgtcacaaagaaagttgtacaagggattgatttaaaccaaattcgaggacttgggtttgatgccacgtgttctctggttgttttggataagcagtttcacccattaccagtcaaccaggaaggggattcccatcgaaacgtcatcatgtggctggaccatcgagcagtcagtcaagttaacaggatcaatgagaccaagcacagtgtcctccagtacgtcgggggggtgatgtctgtggaaatgcaggccccgaaacttctgtggctgaaagagaacttgagagagatttgctgggataaggcgggacatttctttgatctcccggacttcttatcgtggaaggcaacaggtgtcacagcacggtctctctgctccctggtgtgtaagtggacatattcagcagagaaaggctgggacgacagtttctggaaaatgattggtttggaagactttgttgcagataattacagcaaaataggaaaccaagtgctacctcctggagcttctcttggaaatgggctcacaccagaggcagcaagagaccttggccttctccctgggattgcggtcgcagcttcactcattgatgcccatgcaggaggactaggagtgattggggcagatgtgagagggcacggcctcatctgtgaggggcagccagtgacgtcacggctggctgtcatctgtggaacgtcttcttgtcacatggggatcagcaaagacccgatttttgtaccaggcgtctgggggccttatttctcagccatggtacctgggttctggctgaatgaaggtggtcagagcgttactggaaaattgatagaccacatggtacaaggccatgctgcttttccagaactacaagtaaaggccacagccagatgccagagtatatatgcatatttgaacagtcacctggatctgattaagaaggctcagcctgtgggtttccttactgttgatttacatgtttggccagatttccatggcaaccggtctcccttagcagatctgacactaaagggcatggtcaccggattgaaactgtctcaggaccttgatgatcttgccattctctacctggccacagttcaagccattgctttggggactcgcttcattatagaagccatggaggcagcagggcactcaatcagtactcttttcctatgtggaggcctcagcaagaatcccctttttgtgcaaatgcatgcggacattactggcatgcctgtggtcctgtcgcaagaggtggagtccgttcttgtgggtgctgctgttctgggtgcctgtgcctcaggggatttcgcttctgtacaggaagcaatggcaaaaatgagcaaagttgggaaagttgtgttcccgagactacaggataaaaaatactatgataagaaataccaagtattcctgaagctggttgaacaccagaaggagtatttggcgatcatgaatgatgactgaacagggcttgcaggtgctgatgccagaagcttctgtgccattgcattaaagacttctgtcatttgatccatgttcaagacccttgaggtattgtttcatcatttctgtattgtctttcaataaagaaaacaaacatgtgcaaccaaaaaaaaaaaaaaaaaaaaaaaaaa

SEQ ID NO: 246 - protein, 439 aa, Homo sapiens
MWLDHRAVSQVNRINETKHSVLQYVGGVMSVEMQAPKLLWLKENLREICWDKAGHFFDLPDFLSWKATGVTARSLCSLVCKWTYSAEKGWDDSFWKMIGLEDFVADNYSKIGNQVLPPGASLGNGLTPEAARDLGLLPGIAVAASLIDAHAGGLGVIGADVRGHGLICEGQPVTSRLAVICGTSSCHMGISKDPIFVPGVWGPYFSAMVPGFWLNEGGQSVTGKLIDHMVQGHAAFPELQVKATARCQSIYAYLNSHLDLIKKAQPVGFLTVDLHVWPDFHGNRSPLADLTLKGMVTGLKLSQDLDDLAILYLATVQAIALGTRFIIEAMEAAGHSISTLFLCGGLSKNPLFVQMHADITGMPVVLSQEVESVLVGAAVLGACASGDFASVQEAMAKMSKVGKVVFPRLQDKKYYDKKYQVFLKLVEHQKEYLAIMNDD

SEQ ID NO: 247 - DNA, 4352 bp, Homo sapiens
cccgggcctcctcccgctttctctctccgcttcccctggagcctccgaggagtccgcagccgctgggcgcccgggaagatggcggcggcggcgggagacggcggcggcgaggggggcgcgggcctgggcagcgcggcggggctggggccggggccggggctgcgcgggcagggcccctcagccgaagcgcacgagggcgccccggacccgatgcccgccgcgctgcaccctgaggaggtcgccgcgcgactgcagcggatgcagcgggagctgagcaaccgcaggaaaatcctggtgaaaaacctgccccaggacagcaactgccaggaagttcatgatttgttaaaagactatgacttaaaatattgttatgtggacagaaataaacgaacagcttttgttaccttattgaatggggaacaagcccagaacgcaattcagatgtttcatcaatattcttttagaggaaaagacttaatagtccagcttcagccaacagatgctttgttgtgtattaccaacgtgcccatttcttttacatcagaagagtttgaagaacttgttcgtgcttatggaaatattgagagatgttttctggtctatagtgaagttactggccattccaaaggctatggatttgtggaatacatgaaaaaggactttgctgcaaaggctagactggagctattgggtagacagttgggagcatcagcactctttgcacaatggatggatgttaatctattggcttcagagctcattcattctaagtgcctttgtattgataaactccccagtgactacagggattcagaagagctgttgcaaattttttccagtgtccataaacctgtgttttgccagcttgcacaggatgaaggtagttacgttggtggctttgcagtggttgaatatagcactgcggagcaggctgaagaggtccagcaggcagcagacggtatgaccatcaagggcagcaaagtccaggtttccttctgtgctcctggagcgccagggcgaagtacattagcagcattgatagcggctcaacgtgtgatgcacagtaatcaaaagggcttacttccagagccaaatccagtacaaattatgaaaagtttaaacaaccctgccatgttgcaagttcttctacagccccagttatgtggacgagctgttaaaccagccgttcttggaacacctcacagcttgccacatctgatgaatccatccatctctcctgcatttttacatttgaataaagcacatcagaatctttctcatataccactggcacaacaacaattaatgaagtttgagaatattcatactaataataaacccggcttacttggagagcccccagctgtggtacttcagactgcactagggatagggtcagtgcttccattgaaaaaggagttgggacatcatcatggagaagcacataaaacatctagcctgattccaactcaaacaacgataacagctggaatgggcatgttaccattctttccaaatcagcacattgctggacaggctgggccagggcacagtaatactcaggagaaacagccagccacggtgggaatggcagaaggaaatttctcagggtcgcagccttatcttcagagctttccaaaccttgctgctggaagcttgctggtgggacaccataagcagcagcaaagccagccaaaaggcacagagataagttcaggggctgcctctaagaatcaaacttcactcttgggagaaccaccaaaagaaattcggctcagtaaaaatccatacttgaatttggcaagtgtgttgcccagtgtgtgcttatcatcccctgcaagtaaaaccactcttcataagactggaattgcaagcagcattctggatgcaatctctcagggaagtgaatcacaacacgcattggaaaagtgcattgcttattctccaccttttggtgattatgcacaggtgtcatctttaagaaatgaaaagcgaggctcatcatatctcatctctgccccagaaggtggttcagtggaatgtgttgaccagcattctcagggcacaggagcatattacatggaaacttacttaaaaaagaagcgagtatactgagttaagctctctcctaataaccccctaaggttctctgcagtatctctgctgttcatcgctgccttaacttcattcaaactagccatatcctttaaatacgggtttatagtttcccagaaggaactgtgttgtgcagcaggcagaaatgccaaataaaaaatagcaataagaagagacatcaattgaggacattttccactagagtcagatgcatcttaatcagtgtgctaacttacaatccattggagaaactaacaatgttccaatattccttgatttaggactgggaataattctgacaccatatataaaagaagtttgaagcaataaatgggaaacagtgttgtttcctgagccttagaagaatgagtttcttataagccaatgtgcatttcaatttactttccctagaagtaattgcatttatagatttttaggacttttcctagaactacaagggtgcaagtaccaaatgtgctgatggtaatattataaagatgctctacatgcacactcaattacgcccacaccagccatgcaaaattaaacccggtaagagagtgacagtgatgtccaaggtatccactactaccgatgctttaagatgttgtttaccatttataccttctgtgaaaaatagaaggtattttaagaaaagtaactttggtgatctaataaaagggtttggcaaactacaccctgggtccacatttggtctaccacccgcttttgtgctgcctgcaagctaagactaatgtttacatttttaaatggttggaggaaaaaagaaaacttatgacatgaaatttatatgaaattcagatttcagtgtccataaataaacttttattgggacgttgccatgctcattcatttacgtgttgtctgtggcactcttacgctacaagggcagaactgattagcttcaacagagactgtatggcctacaaagaccatatggcctaaaatttcaagtatctggccatttatatatagtttgctgatccctgatctaatagcactaattctaatagcaactattcctttcaattcacctaaagacagacctttagcctttagacagacttgtaagtggaaaggaacatgggtttctgtgctcatttcatagcgtagactagtaatgatctaatgactagaatggggcctattttgatcactaaatgccctatttccacaatatagtatagtaaagcagtcaatactgcactttctgatggagtcttaaggagtcacagtatttataaccattttgagctaataagctatacctcactctctgctttctctctctctctttttgatagtgtgttagggtgaaaaatcagttatttaacccaatttacttgtgaaagaagttttatctttatggactatgatgacttttgacatcaccatttcttgaagaccttggtattaaatgcatgagaaaccttttgccatctagaaatttctaagtttgtttatgttataagactgtaattaattgatagggaatttgggatctcaatccggggctttttgaaatcagatcattaaatatctcgtcactttggggacttgttatttttaactatgatgtggatatcctgttttaattatgaagtctagaattggtacatatgttgtatgctttgtaaagaatttcacttggtctaatttattgcatatactagcttctgttggaaaatgactgacagctagaaagtttaaggtaatttctaagtatactacctataagtaactgataagaattaggcatcattcagtgatatagcagatgactaatgggtttttcaggccctgcacttctctttcccattttcctgttgcattcagcctcttcaatgcttagtcacacctccactatagtacaaacaaacaaacaaacagaagaaaggaaagatggtgaattttgcaacagagctgcaaaaagtcagtcaaagcaggaagaggttgaaggaactaaaacaaacaaacaaaggtgtctggactacagcacagtggacatgccatccatactggcctgtgccccgttatcaatcactgggcacaacagtgaagaagtgcaaatcaagtggtgtttgtttgtttgtttgtagtaaggaccgtaacccaccccttcctccccccaaaactatactgttatttttctatgtaagcaaattgtttgaaatgctttgaaaatgaaatcttaatattaaaaggcatatgcatgt

SEQ ID NO: 248 - protein, 678 aa, Homo sapiens
MAAAAGDGGGEGGAGLGSAAGLGPGPGLRGQGPSAEAHEGAPDPMPAALHPEEVAARLQRMQRELSNRRKILVKNLPQDSNCQEVHDLLKDYDLKYCYVDRNKRTAFVTLLNGEQAQNAIQMFHQYSFRGKDLIVQLQPTDALLCITNVPISFTSEEFEELVRAYGNIERCFLVYSEVTGHSKGYGFVEYMKKDFAAKARLELLGRQLGASALFAQWMDVNLLASELIHSKCLCIDKLPSDYRDSEELLQIFSSVHKPVFCQLAQDEGSYVGGFAVVEYSTAEQAEEVQQAADGMTIKGSKVQVSFCAPGAPGRSTLAALIAAQRVMHSNQKGLLPEPNPVQIMKSLNNPAMLQVLLQPQLCGRAVKPAVLGTPHSLPHLMNPSISPAFLHLNKAHQNLSHIPLAQQQLMKFENIHTNNKPGLLGEPPAVVLQTALGIGSVLPLKKELGHHHGEAHKTSSLIPTQTTITAGMGMLPFFPNQHIAGQAGPGHSNTQEKQPATVGMAEGNFSGSQPYLQSFPNLAAGSLLVGHHKQQQSQPKGTEISSGAASKNQTSLLGEPPKEIRLSKNPYLNLASVLPSVCLSSPASKTTLHKTGIASSILDAISQGSESQHALEKCIAYSPPFGDYAQVSSLRNEKRGSSYLISAPEGGSVECVDQHSQGTGAYYMETYLKKKRVY

SEQ ID NO: 249 - DNA, 5053 bp, Homo sapiens
tgcagacagtgcgggcctgcgcccagtcccggctgtcctcgccgcgacccctcctcagccctgggcgcgcgcacgctggggccccgcggggctggccgcctagcgagcctgccggtcgaccccagccagcgcagcgacggggcgctgcctggcccaggcgcacacggaagtgcgcttctctgaagtagctttggaaagtagagaagaaaatccagtttgcttcttggagaacactggacagctgaataaatgcagtatctaaatataaaagaggactgcaatgccatggctttctgtgctaaaatgaggagctccaagaagactgaggtgaacctggaggcccctgagccaggggtggaagtgatcttctatctgtcggacagggagcccctccggctgggcagtggagagtacacagcagaggaactgtgcatcagggctgcacaggcatgccgtatctctcctctttgtcacaacctctttgccctgtatgacgagaacaccaagctctggtatgctccaaatcgcaccatcaccgttgatgacaagatgtccctccggctccactaccggatgaggttctatttcaccaattggcatggaaccaacgacaatgagcagtcagtgtggcgtcattctccaaagaagcagaaaaatggctacgagaaaaaaaagattccagatgcaacccctctccttgatgccagctcactggagtatctgtttgctcagggacagtatgatttggtgaaatgcctggctcctattcgagaccccaagaccgagcaggatggacatgatattgagaacgagtgtctagggatggctgtcctggccatctcacactatgccatgatgaagaagatgcagttgccagaactgcccaaggacatcagctacaagcgatatattccagaaacattgaataagtccatcagacagaggaaccttctcaccaggatgcggataaataatgttttcaaggatttcctaaaggaatttaacaacaagaccatttgtgacagcagcgtgtccacgcatgacctgaaggtgaaatacttggctaccttggaaactttgacaaaacattacggtgctgaaatatttgagacttccatgttactgatttcatcagaaaatgagatgaattggtttcattcgaatgacggtggaaacgttctctactacgaagtgatggtgactgggaatcttggaatccagtggaggcataaaccaaatgttgtttctgttgaaaaggaaaaaaataaactgaagcggaaaaaactggaaaataaacacaagaaggatgaggagaaaaacaagatccgggaagagtggaacaatttttcttacttccctgaaatcactcacattgtaataaaggagtctgtggtcagcattaacaagcaggacaacaagaaaatggaactgaagctctcttcccacgaggaggccttgtcctttgtgtccctggtagatggctacttccggctcacagcagatgcccatcattacctctgcaccgacgtggcccccccgttgatcgtccacaacatacagaatggctgtcatggtccaatctgtacagaatacgccatcaataaattgcggcaagaaggaagcgaggaggggatgtacgtgctgaggtggagctgcaccgactttgacaacatcctcatgaccgtcacctgctttgagaagtctgagcaggtgcagggtgcccagaagcagttcaagaactttcagatcgaggtgcagaagggccgctacagtctgcacggttcggaccgcagcttccccagcttgggagacctcatgagccacctcaagaagcagatcctgcgcacggataacatcagcttcatgctaaaacgctgctgccagcccaagccccgagaaatctccaacctgctggtggctactaagaaagcccaggagtggcagcccgtctaccccatgagccagctgagtttcgatcggatcctcaagaaggatctggtgcagggcgagcaccttgggagaggcacgagaacacacatctattctgggaccctgatggattacaaggatgacgaaggaacttctgaagagaagaagataaaagtgatcctcaaagtcttagaccccagccacagggatatttccctggccttcttcgaggcagccagcatgatgagacaggtctcccacaaacacatcgtgtacctctatggcgtctgtgtccgcgacgtggagaatatcatggtggaagagtttgtggaagggggtcctctggatctcttcatgcaccggaaaagcgatgtccttaccacaccatggaaattcaaagttgccaaacagctggccagtgccctgagctacttggaggataaagacctggtccatggaaatgtgtgtactaaaaacctcctcctggcccgtgagggcatcgacagtgagtgtggcccattcatcaagctcagtgaccccggcatccccattacggtgctgtctaggcaagaatgcattgaacgaatcccatggattgctcctgagtgtgttgaggactccaagaacctgagtgtggctgctgacaagtggagctttggaaccacgctctgggaaatctgctacaatggcgagatccccttgaaagacaagacgctgattgagaaagagagattctatgaaagccggtgcaggccagtgacaccatcatgtaaggagctggctgacctcatgacccgctgcatgaactatgaccccaatcagaggcctttcttccgagccatcatgagagacattaataagcttgaagagcagaatccagatattgtttcagaaaaaaaaccagcaactgaagtggaccccacacattttgaaaagcgcttcctaaagaggatccgtgacttgggagagggccactttgggaaggttgagctctgcaggtatgaccccgaaggggacaatacaggggagcaggtggctgttaaatctctgaagcctgagagtggaggtaaccacatagctgatctgaaaaaggaaatcgagatcttaaggaacctctatcatgagaacattgtgaagtacaaaggaatctgcacagaagacggaggaaatggtattaagctcatcatggaatttctgccttcgggaagccttaaggaatatcttccaaagaataagaacaaaataaacctcaaacagcagctaaaatatgccgttcagatttgtaaggggatggactatttgggttctcggcaatacgttcaccgggacttggcagcaagaaatgtccttgttgagagtgaacaccaagtgaaaattggagacttcggtttaaccaaagcaattgaaaccgataaggagtattacaccgtcaaggatgaccgggacagccctgtgttttggtatgctccagaatgtttaatgcaatctaaattttatattgcctctgacgtctggtcttttggagtcactctgcatgagctgctgacttactgtgattcagattctagtcccatggctttgttcctgaaaatgataggcccaacccatggccagatgacagtcacaagacttgtgaatacgttaaaagaaggaaaacgcctgccgtgcccacctaactgtccagatgaggtttatcaacttatgaggaaatgctgggaattccaaccatccaatcggacaagctttcagaaccttattgaaggatttgaagcacttttaaaataagaagcatgaataacatttaaattccacagattatcaagtccttctcctgcaacaaatgcccaagtcattttttaaaaatttctaatgaaagaagtttgtgttctgtccaaaaagtcactgaactcatacttcagtacatatacatgtataaggcacactgtagtgcttaatatgtgtaaggacttcctctttaaatttggtaccagtaacttagtgacacataatgacaaccaaaatatttgaaagcacttaagcactcctccttgtggaaagaatataccaccatttcatctggctagttcaccatcacaactgcattaccaaaaggggatttttgaaaacgaggagttgaccaaaataatatctgaagatgattgcttttccctgctgccagctgatctgaaatgttttgctggcacattaatcatagataaagaaagattgatggacttagccctcaaatttcagtatctatacagtactagaccatgcattcttaaaatattagataccaggtagtatatattgtttctgtacaaaaatgactgtattctctcaccagtaggacttaaactttgtttctccagtggcttagctcctgttcctttgggtgatcactagcacccatttttgagaaagctggttctacatggggggatagctgtggaatagataatttgctgcatgttaattctcaagaactaagcctgtgccagtgctttcctaagcagtatacctttaatcagaactcattcccagaacctggatgctattacacatgcttttaagaaacgtcaatgtatatccttttataactctaccactttggggcaagctattccagcactggttttgaatgctgtatgcaaccagtctgaataccacatacgctgcactgttcttagagggtttccatacttaccaccgatctacaagggttgatccctgtttttaccatcaatcatcaccctgtggtgcaacacttgaaagacccggctagaggcactatggacttcaggatccactagacagttttcagtttgcttggaggtagctgggtaatcaaaaatgtttagtcattgattcaatgtgaacgattacggtctttatgaccaagagtctgaaaatctttttgttatgctgtttagtattcgtttgatattgttacttttcacctgttgagcccaaattcaggattggttcagtggcagcaatgaagttgccatttaaatttgttcatagcctacatcaccaaggtctctgtgtcaaacctgtggccactctatatgcactttgtttactctttatacaaataaatatactaaagactttacatgca

SEQ ID NO: 250 - protein, 1154 aa, Homo sapiens
MQYLNIKEDCNAMAFCAKMRSSKKTEVNLEAPEPGVEVIFYLSDREPLRLGSGEYTAEELCIRAAQACRISPLCHNLFALYDENTKLWYAPNRTITVDDKMSLRLHYRMRFYFTNWHGTNDNEQSVWRHSPKKQKNGYEKKKIPDATPLLDASSLEYLFAQGQYDLVKCLAPIRDPKTEQDGHDIENECLGMAVLAISHYAMMKKMQLPELPKDISYKRYIPETLNKSIRQRNLLTRMRINNVFKDFLKEFNNKTICDSSVSTHDLKVKYLATLETLTKHYGAEIFETSMLLISSENEMNWFHSNDGGNVLYYEVMVTGNLGIQWRHKPNVVSVEKEKNKLKRKKLENKHKKDEEKNKIREEWNNFSYFPEITHIVIKESVVSINKQDNKKMELKLSSHEEALSFVSLVDGYFRLTADAHHYLCTDVAPPLIVHNIQNGCHGPICTEYAINKLRQEGSEEGMYVLRWSCTDFDNILMTVTCFEKSEQVQGAQKQFKNFQIEVQKGRYSLHGSDRSFPSLGDLMSHLKKQILRTDNISFMLKRCCQPKPREISNLLVATKKAQEWQPVYPMSQLSFDRILKKDLVQGEHLGRGTRTHIYSGTLMDYKDDEGTSEEKKIKVILKVLDPSHRDISLAFFEAASMMRQVSHKHIVYLYGVCVRDVENIMVEEFVEGGPLDLFMHRKSDVLTTPWKFKVAKQLASALSYLEDKDLVHGNVCTKNLLLAREGIDSECGPFIKLSDPGIPITVLSRQECIERIPWIAPECVEDSKNLSVAADKWSFGTTLWEICYNGEIPLKDKTLIEKERFYESRCRPVTPSCKELADLMTRCMNYDPNQRPFFRAIMRDINKLEEQNPDIVSEKKPATEVDPTHFEKRFLKRIRDLGEGHFGKVELCRYDPEGDNTGEQVAVKSLKPESGGNHIADLKKEIEILRNLYHENIVKYKGICTEDGGNGIKLIMEFLPSGSLKEYLPKNKNKINLKQQLKYAVQICKGMDYLGSRQYVHRDLAARNVLVESEHQVKIGDFGLTKAIETDKEYYTVKDDRDSPVFWYAPECLMQSKFYIASDVWSFGVTLHELLTYCDSDSSPMALFLKMIGPTHGQMTVTRLVNTLKEGKRLPCPPNCPDEVYQLMRKCWEFQPSNRTSFQNLIEGFEALLK

SEQ ID NO: 251 - DNA, 1191 bp, Homo sapiens
atggccatattctccattggttgtatgattagctccttttctgttggactgtttgtcaacagctttgacaggcgtaattcaatgcttactgtcaacctgttggctgccactggtggctgccttatgggactgtgtaaagtagctgagttggttgaaatactgatcctggcctacttggttattggcctcttctgcagactctgcacaggttttgtgcccacgtacatcggagacatctcacctattggcctgcaaggtgtctttggcactctcaaccagctgggcattgttgttggaattctggtggcccagatctttgatctggaattcatcctggggtctgaagacctatggcctgtgctattaggctttcccatctctcctgctatgctacaaagtgcagcccttcctttttgccctgaaagtcccagattcttgctcattaacagaaaagaagaggagaatgctaaggagatcctccagtggttgtggggcacccaggatgtatcccaagacatccaggagatgaaagatgagagtgcaaggatggcacaagaaaagcaagtcactgtgctggagctctttagagtatccagctaccgacagcccatcatcatttccatcatgctccagctctctcagcagctctctgtaatcaatactgtgttctattactcaacaggaatctttaagggtgcaggtgttcaagagcccatctgtgtcaccattggtgtgggtgtggttaatactatcttcactatagtttccctatttctagtggaaagggcagtaagaaggactctacatatgataggccttggagggatggctttttgttccatcctcatgtctgtttgtttgttattgaaggatgagtgtaatgggataagctttgtctgtattggggctatcttggtctttgtggtcttctttgaaattgggccagaccacattccctggtttattgtggctgaactcttcagccagggccctggcccagctgtgatggcagtggccggctgctccacctggacctccaacttcctagtcagattgcttttcccttctgctgcttactatttaggagcctacgtttttattatcttcaccgacttcctcattaccttcttgatctttaccttcttcaaagtccctgagatgtgttacaggactttcaaggatatcacatag

SEQ ID NO: 252 - protein, 396 aa, Homo sapiens
MAIFSIGCMISSFSVGLFVNSFDRRNSMLTVNLLAATGGCLMGLCKVAELVEILILAYLVIGLFCRLCTGFVPTYIGDISPIGLQGVFGTLNQLGIVVGILVAQIFDLEFILGSEDLWPVLLGFPISPAMLQSAALPFCPESPRFLLINRKEEENAKEILQWLWGTQDVSQDIQEMKDESARMAQEKQVTVLELFRVSSYRQPIIISIMLQLSQQLSVINTVFYYSTGIFKGAGVQEPICVTIGVGVVNTIFTIVSLFLVERAVRRTLHMIGLGGMAFCSILMSVCLLLKDECNGISFVCIGAILVFVVFFEIGPDHIPWFIVAELFSQGPGPAVMAVAGCSTWTSNFLVRLLFPSAAYYLGAYVFIIFTDFLITFLIFTFFKVPEMCYRTFKDIT

SEQ ID NO: 253 - DNA, 2352 bp, Homo sapiens
agccgccggggaggggacgagacgcagaccacacgttgcccacgtgcgaggaccgggcaggggctcagcccctaggccgcccggtgcgtggggcggcgggggctggctttgagtcacccccgcttgtgccagcttccccggctcggcggagactggcttggggatgcctggccgcccggcccccttctcggacgcggcgtggggagcgagctggagttaaggatgaaggggcggccggcgagtcccagtgagagcggagggtgccagaggtagggggccgagaaacaaagttcccggggcttcctccggggccgcggtcggggctgcgcgtttgaccgcccccctcctcgcgaaggcaatggcttccaaactcctgcgcgcggtcatcctcgggccgcccggctcgggcaagggcaccgtgtgccagaggatcgcccagaactttggtctccagcatctctccagcggccacttcttgcgggagaacatcaaggccagcaccgaagttggtgagatggcaaagcagtatatagagaaaagtcttttggttccagaccatgtgatcacacgcctaatgatgtccgagttggagaacaggcgtggccagcactggctccttgatggttttcctaggacattaggacaagccgaagccctggacaaaatctgtgaagtggatctagtgatcagtttgaatattccatttgaaacacttaaagatcgtctcagccgccgttggattcaccctcctagcggaagggtatataacctggacttcaatccacctcatgtacatggtattgatgacgtcactggtgaaccgttagtccagcaggaggatgataaacccgaagcagttgctgccaggctaagacagtacaaagacgtggcaaagccagtcattgaattatacaagagccgaggagtgctccaccaattttccggaacggagacgaacaaaatctggccctacgtttacacacttttctcaaacaagatcacacctattcagtccaaagaagcatattgaccctgcccaatggaagaaccaggaagatgtggtcattcattcaatagtgtgtgtagtattggtgctgtgtccaaattagaagctagctgaggtagcttgcagcatcttttctagttgaaatggtgaactgataggaaaacaaatgagtagaaagagttcatgaagaggccctcctctgcctttcaaaaggctggtcacctacacatgtttaaggtgtctctgcacatgtctcaagcccatcacaagaaagcaagtacagtgtggatttcaaatggtgtgtaacttcagctccagctggtttttgacagctgttgctgtggtaatatttttgacatgtgatggtgatagtctctggttctccccatccccacaaaggctgttgaaccacagcaccaggaagcctgagaatgaatcctgagggctctagcccaggctttgtcccaggctttctggtgtgtgccctcctggtaacagtgaaattgaagctacttactcatagtggttgtttctctggtcttgagtgactgtgtccacagttcatttttttccggtaggaataactccttttctacatccacgctccatagagtctctccttttcagacatcctgggatgaaagaatttggcttttttttttctttttttttttggacatctgttttcactcttaggcttttaaacaatagttattgcttttatccctctcagattctaataactgagagcgatggggctatattgaatctctgtatgcactgagaactgagctatgaagaggatcttattaaactgctggtctgactttatggattgacactgttcctttcttttattgtgaaaaaaaaaaaaaaccctgaaagtcttgggaaccccctaaagtcttttgggaatcctcaaaaagcatgggaagttaagtatttagctacataaatgttgtaagatcatatcttatgtatagaagtaataagaccatttggaattactggactaattgaatagttaaggtttctattcgggacaataaaatgtattttgaaagtgctgctaactattgatgctgacagtgtttcactcctatgagtgacccaaacatattataaatatgtggtaaagggaatggagcctgtggggttgagcagaatgttgtactagctgtgcctggactgagtataacagctttatgattatgagaaaacaaattctttattttttttttctgttccaaagattcatcctatggggtggccataaagtctagaattagatactaatattttgtcattcattataacatatcaataaaccatttgttaaaaaaaaa

SEQ ID NO: 254 - protein, 223 aa, Homo sapiens
MASKLLRAVILGPPGSGKGTVCQRIAQNFGLQHLSSGHFLRENIKASTEVGEMAKQYIEKSLLVPDHVITRLMMSELENRRGQHWLLDGFPRTLGQAEALDKICEVDLVISLNIPFETLKDRLSRRWIHPPSGRVYNLDFNPPHVHGIDDVTGEPLVQQEDDKPEAVAARLRQYKDVAKPVIELYKSRGVLHQFSGTETNKIWPYVYTLFSNKITPIQSKEAY

SEQ ID NO: 255 - DNA, 2199 bp, Homo sapiens
agtccgcctgctactcggtcccggcgctgggctgaggggaggggttgtcttaaaagtctctccttccccctgtaggggcggccggcgagtcccagtgagagcggagggtgccagaggtagggggccgagaaacaaagttcccggggcttcctccggggccgcggtcggggctgcgcgtttgaccgcccccctcctcgcgaaggcaatggcttccaaactcctgcgcgcggtcatcctcgggccgcccggctcgggcaagggcaccgtgtgccagaggatcgcccagaactttggtctccagcatctctccagcggccacttcttgcgggagaacatcaaggccagcaccgaagttggtgagatggcaaagcagtatatagagaaaagtcttttggttccagaccatgtgatcacacgcctaatgatgtccgagttggagaacaggcgtggccagcactggctccttgatggttttcctaggacattaggacaagccgaagccctggacaaaatctgtgaagtggatctagtgatcagtttgaatattccatttgaaacacttaaagatcgtctcagccgccgttggattcaccctcctagcggaagggtatataacctggacttcaatccacctcatgtacatggtattgatgacgtcactggtgaaccgttagtccagcaggaggatgataaacccgaagcagttgctgccaggctaagacagtacaaagacgtggcaaagccagtcattgaattatacaagagccgaggagtgctccaccaattttccggaacggagacgaacaaaatctggccctacgtttacacacttttctcaaacaagatcacacctattcagtccaaagaagcatattgaccctgcccaatggaagaaccaggaagatgtggtcattcattcaatagtgtgtgtagtattggtgctgtgtccaaattagaagctagctgaggtagcttgcagcatcttttctagttgaaatggtgaactgataggaaaacaaatgagtagaaagagttcatgaagaggccctcctctgcctttcaaaaggctggtcacctacacatgtttaaggtgtctctgcacatgtctcaagcccatcacaagaaagcaagtacagtgtggatttcaaatggtgtgtaacttcagctccagctggtttttgacagctgttgctgtggtaatatttttgacatgtgatggtgatagtctctggttctccccatccccacaaaggctgttgaaccacagcaccaggaagcctgagaatgaatcctgagggctctagcccaggctttgtcccaggctttctggtgtgtgccctcctggtaacagtgaaattgaagctacttactcatagtggttgtttctctggtcttgagtgactgtgtccacagttcatttttttccggtaggaataactccttttctacatccacgctccatagagtctctccttttcagacatcctgggatgaaagaatttggcttttttttttctttttttttttggacatctgttttcactcttaggcttttaaacaatagttattgcttttatccctctcagattctaataactgagagcgatggggctatattgaatctctgtatgcactgagaactgagctatgaagaggatcttattaaactgctggtctgactttatggattgacactgttcctttcttttattgtgaaaaaaaaaaaaaaccctgaaagtcttgggaaccccctaaagtcttttgggaatcctcaaaaagcatgggaagttaagtatttagctacataaatgttgtaagatcatatcttatgtatagaagtaataagaccatttggaattactggactaattgaatagttaaggtttctattcgggacaataaaatgtattttgaaagtgctgctaactattgatgctgacagtgtttcactcctatgagtgacccaaacatattataaatatgtggtaaagggaatggagcctgtggggttgagcagaatgttgtactagctgtgcctggactgagtataacagctttatgattatgagaaaacaaattctttattttttttttctgttccaaagattcatcctatggggtggccataaagtctagaattagatactaatattttgtcattcattataacatatcaataaaccatttgttaaaaaaaaa

SEQ ID NO: 256 - protein, 223 aa, Homo sapiens; identical to SEQ ID NO: 254

SEQ ID NO: 257 - DNA, 2241 bp, Homo sapiens
ttacgtaaggcgcgagtcccgcgcggccggccggggctccgcgactgggcgggcggaggcggcgccgccctgcaggatccgggctggaagcctctcggagtgctgcctccagccaaggggcggccggcgagtcccagtgagagcggagggtgccagaggtagggggccgagaaacaaagttcccggggcttcctccggggccgcggtcggggctgcgcgtttgaccgcccccctcctcgcgaaggcaatggcttccaaactcctgcgcgcggtcatcctcgggccgcccggctcgggcaagggcaccgtgtgccagaggatcgcccagaactttggtctccagcatctctccagcggccacttcttgcgggagaacatcaaggccagcaccgaagttggtgagatggcaaagcagtatatagagaaaagtcttttggttccagaccatgtgatcacacgcctaatgatgtccgagttggagaacaggcgtggccagcactggctccttgatggttttcctaggacattaggacaagccgaagccctggacaaaatctgtgaagtggatctagtgatcagtttgaatattccatttgaaacacttaaagatcgtctcagccgccgttggattcaccctcctagcggaagggtatataacctggacttcaatccacctcatgtacatggtattgatgacgtcactggtgaaccgttagtccagcaggaggatgataaacccgaagcagttgctgccaggctaagacagtacaaagacgtggcaaagccagtcattgaattatacaagagccgaggagtgctccaccaattttccggaacggagacgaacaaaatctggccctacgtttacacacttttctcaaacaagatcacacctattcagtccaaagaagcatattgaccctgcccaatggaagaaccaggaagatgtggtcattcattcaatagtgtgtgtagtattggtgctgtgtccaaattagaagctagctgaggtagcttgcagcatcttttctagttgaaatggtgaactgataggaaaacaaatgagtagaaagagttcatgaagaggccctcctctgcctttcaaaaggctggtcacctacacatgtttaaggtgtctctgcacatgtctcaagcccatcacaagaaagcaagtacagtgtggatttcaaatggtgtgtaacttcagctccagctggtttttgacagctgttgctgtggtaatatttttgacatgtgatggtgatagtctctggttctccccatccccacaaaggctgttgaaccacagcaccaggaagcctgagaatgaatcctgagggctctagcccaggctttgtcccaggctttctggtgtgtgccctcctggtaacagtgaaattgaagctacttactcatagtggttgtttctctggtcttgagtgactgtgtccacagttcatttttttccggtaggaataactccttttctacatccacgctccatagagtctctccttttcagacatcctgggatgaaagaatttggcttttttttttctttttttttttggacatctgttttcactcttaggcttttaaacaatagttattgcttttatccctctcagattctaataactgagagcgatggggctatattgaatctctgtatgcactgagaactgagctatgaagaggatcttattaaactgctggtctgactttatggattgacactgttcctttcttttattgtgaaaaaaaaaaaaaaccctgaaagtcttgggaaccccctaaagtcttttgggaatcctcaaaaagcatgggaagttaagtatttagctacataaatgttgtaagatcatatcttatgtatagaagtaataagaccatttggaattactggactaattgaatagttaaggtttctattcgggacaataaaatgtattttgaaagtgctgctaactattgatgctgacagtgtttcactcctatgagtgacccaaacatattataaatatgtggtaaagggaatggagcctgtggggttgagcagaatgttgtactagctgtgcctggactgagtataacagctttatgattatgagaaaacaaattctttattttttttttctgttccaaagattcatcctatggggtggccataaagtctagaattagatactaatattttgtcattcattataacatatcaataaaccatttgttaaaaaaaaa

SEQ ID NO: 258 - protein, 223 aa, Homo sapiens; identical to SEQ ID NO: 254

SEQ ID NO: 259 - DNA, 5750 bp, Homo sapiens
ataaccccgcacaccgacttgcatgcaattatcatagcccgagtgctcctccgttgagagacttcgcccccgagaccgctgactgtgaatgacaaatcaaaagtcagggttgcagaatcagccggactttcctgctcatttgcagcagagggaggaagcagagaatgaaagattctgaaaataaaggtgcctcatctccagacatggagcccagctatgggggaggtctctttgacatggtaaaaggaggtgcagggaggctctttagtaacctaaaggacaacttgaaagacaccctcaaagacacatcttctagagtgatacaatctgtgaccagctacacaaagggagatttagacttcacttatgttacctccagaattattgtgatgtcctttcctctggacaatgttgacataggattcaggaatcaggttgatgacattcgaagctttttggattccagacatcttgaccactacacagtatacaatctgtcacctaagtcttatcgaactgccaagtttcacagccgggtctcagaatgcagttggcccattaggcaggctcccagtctgcacaacctttttgctgtgtgtcggaatatgtataactggctactgcagaatcccaaaaatgtctgtgttgtccactgcttggatggacgggcggcatcatcaattctggttggtgctatgttcattttctgtaatctctactctactcctggcccagccattcgattgctatatgcaaagcgaccaggaattggactttcaccatcccataggagatacctgggctatatgtgtgacctactggcagacaagccctaccgccctcacttcaagcctctcacaattaagtcgatcactgtcagtccaataccctttttcaacaaacagaggaatggatgtcgcccttactgtgatgtactcattggagaaaccaaaatatattcgacttgcacagattttgaacgaatgaaagaatatcgtgtccaagatggaaaaatcttcattcccttgaacatcactgtgcaaggagacgtggttgtttccatgtatcacttgaggtcaaccattgggagccggctacaggctaaggtgaccaacacacagatattccagcttcagtttcacactggattcataccactggacacaacagttttaaagttcaccaagcctgagttagatgcatgtgatgtaccagaaaaatatcctcagctatttcaggtgacactggatgtagaactacagccccatgacaaagtaatagacttaactccaccatgggaacattactgcacaaaagatgtcaatcccagcatcctcttctcttctcaccaggaacatcaagatacgctggccttaggaggacaggctccaatagatatccctccagacaaccccaggcattacggacaaagtggtttctttgcctctctctgttggcaagatcagaaatcggagaagtcattctgtgaggaggaccacgctgccctagtgaatcaggaaagtgagcaatcagatgatgaacttctgacactttccagtccgcatggcaatgccaatggtgacaagcctcatggagtcaagaagcccagcaaaaagcagcaggagccagcagcccctccaccccctgaggatgtggaccttttgggcctggaagggtctgcaatgagtaacagcttctctccgccagcggctcctcccaccaattctgaactactgagtgacctgtttgggggtggaggtgcagctggtcccacccaggctggacagtcaggagtggaagatgtgtttcatcctagtggacctgcgtctacccagtcaacaccacgccgctctgccacctccacctctgcgtctccaaccctaagagtgggagaaggtgccacctttgacccatttggagcaccttctaaaccatcaggtcaggatttgctgggttcttttctgaacacatccagtgcttccagtgacccctttctccagccaacaagaagtccttcgcccacagtacatgcttctagtacgcctgctgtgaacattcagccagatgtttctggaggttgggactggcatgctaaaccaggaggctttggaatgggaagcaagtcagctgccaccagcccaaccggatcctcgcatggtactcccacccatcaaagcaaaccccagactctggatccttttgccgaccttgggacactaggtagttcttcctttgccagcaaacccaccacaccaactggattgggtggaggattcccgcctctcagctcgccacagaaggcgtctccccagcctatgggtggcgggtggcagcagggaggtgcctacaactggcagcagccacagcctaagcctcagcccagcatgccccactcctctccccagaaccgacccaactacaacgtgagcttctcagccatgcctgggggccagaacgaacgtgggaaaggatcaagtaatttggaagggaaacaaaaagcagctgattttgaagacctactctctggtcaaggtttcaatgctcacaaagacaaaaaggggcctcggacaatagctgagatgagaaaggaggaaatggccaaggaaatggatcctgagaaattaaagattctggaatggattgaaggcaaagaaagaaatatcagagcccttctttccacgatgcataccgtactatgggctggggagaccaagtggaaaccagttggcatggcagacctggtaacaccagagcaggtgaagaaggtgtacaggaaggctgtcctggtggtgcacccagataaagctactgggcaaccctatgaacaatacgcaaagatgattttcatggagctcaatgatgcctggtctgaatttgaaaaccaaggccaaaagcccttatattaatttatgagcttttccatctctgctgcagacctgtgctaatgcttagtgtgtgtcacaattctgaggttttcgcagatgaaccaaaaactccagtaacatgttttcagtactaaaccgttaagttactcatgaattaatttctcattgataaggaatgtggatgtttggtttctccaaagttcccaccataaaagatccaaagcatgagaggaacttctagtcagatgaccttgcagaaccaccgcattccaccctgccctttggggagcctactcagcattctacctggggaaatggaaaacagaggccaccacccatgaaggcataacacccatcacattgtctgagaataggattaatgagcaaaagttatgataatagagttatatgatggtttaatggtttctagatttttcttggaaagatataatttgagcagtggctttatgcagactccaagaacaaaaccaccaggtatttttttttaagtaaaaatttactaaggcctttagcataatactgtaaatgtcttttggtcaagagaactaacaaatataaaggaacttgaaatgtggggagtgataatagtccagtgattaaactacagtccagtgattaccaccaactttctgactaagctaaaaatgaatgaaaatggtggctaaagaaaatagggactctgaagatgtcgaaatctttattcctggttaggaaggtgggccgctacccttctttccctttagaaaactgtgattaattaaataaaaagtcttactactataacaactctaaacctggtttaaatgaaacatctaattttgctgtaaggcttaatgctcttcttttgtttagccaagaaaacattcttagttggaaacaggtggtaaagtagtttggcctgttcacaacttatcaggaccaatatctagtgtggactcagtgttctctaggtttgtgagcagttgtggtaagagaatggaaggcaacactgaataggagttaagggaatggcacgatcacagtgagagagctgcactcacctgcagacccagtcagatggcttgtcagtatctgctctgaggaaccaggtcccacctccccacaaggcaaatctagacccattaaattattacagtgggcttttttgttttaaaagtggttggggatccacaggaacgacattcatacagggacatttgtgaaagcaaagcaagaatgaatgctttcccgatctcagactggctggattcagatcagtgtgttggctggttctcattttaaggggtaagcagtttgctattctgtgactttagtagatctcttttgtgtgcacatatacaatgtgcattatacatatatattaaatatatccacaaagcagatgggcaaaaagattttcatgctaatcttcaaaggttcatgctcaatattgtgaaaagcttttaaaagttgttttgaaaagacaatcattttttgtttttgttttaactttcttgtggcaagctataccggaaaagcggcatgtcaaaaatactttaggttctacatagatctctttctctcttttgttttgtttgtttgtttgttaaagttcattatttattttaccttttactgacaatgtgaaactcgaagaaaatgttctctttttaaatatacagtcataaactgttcaaggtaaccataacaaactaggtgttatttattaacgtattataaaataatgtttgatccagtatgtgcttgtcttatttaaaattggaatgtgagacatgttgctgtgacctgtttttctttctcattcacatttgtagatattgtgtgaactacagtatataatgataacaattaaaaggatattctgtggatgtcacgtattttgaaatgatagaactacattagctttgtatcatgtttggataattcatcaatgttcacagtttaaaacatcattaaacattatgtaattacaatgagaaagaatcttacttaaatttggagattttcccccacatctcttttccggatacattataattctggacccctatttatctcaaaactcttaatatatgcagaccaacaggtctttgcattccttttaaataactggttgtgacaaagcttgttgttgatcagattcactgtttcatcatatttattgtaatatattttttgttttgtaaatatgttacaacaaaatgtgattggtctaaaatatttgtaatgtatattaaaaggttcaaaaatatttgtataaatctaagttatttgggtacttgtaggaatacaatgaggagcttgaatgccaccttctgacatgatttacttttaaggaaagttatgaggagagaatacaaaaagcatgcaccaaaatgtaatctgacaggatttctggatttatacgtaatcactcctgccccaacacacacacacacacacacacacacacacacacacatgcacgcacacatgattttgattatgctacatgatatatgtttcaaaaagaattagcatagaaatcctggtctcctagccaaaaaaatcaaaggattttcaaaaaaacgaatctgtatgttgaggcaaaaggattgaacctggaagtctgggactttatcatagaaacaaagtctcagatattttagttctttggaaacaaatgctgtaattcaaaagcatttgacctgtcactgtactatctacatgtggaagaatgttcaagttgaatcctaatgccgtgaatgaaacacagtctgtgtagggaatgagcaaaaaagttgaattccaattgctttttggccttttggctaaaataaatgtagcatctaattttatcagttt

SEQ ID NO: 260 - protein, 913 aa, Homo sapiens
MKDSENKGASSPDMEPSYGGGLFDMVKGGAGRLFSNLKDNLKDTLKDTSSRVIQSVTSYTKGDLDFTYVTSRIIVMSFPLDNVDIGFRNQVDDIRSFLDSRHLDHYTVYNLSPKSYRTAKFHSRVSECSWPIRQAPSLHNLFAVCRNMYNWLLQNPKNVCVVHCLDGRAASSILVGAMFIFCNLYSTPGPAIRLLYAKRPGIGLSPSHRRYLGYMCDLLADKPYRPHFKPLTIKSITVSPIPFFNKQRNGCRPYCDVLIGETKIYSTCTDFERMKEYRVQDGKIFIPLNITVQGDVVVSMYHLRSTIGSRLQAKVTNTQIFQLQFHTGFIPLDTTVLKFTKPELDACDVPEKYPQLFQVTLDVELQPHDKVIDLTPPWEHYCTKDVNPSILFSSHQEHQDTLALGGQAPIDIPPDNPRHYGQSGFFASLCWQDQKSEKSFCEEDHAALVNQESEQSDDELLTLSSPHGNANGDKPHGVKKPSKKQQEPAAPPPPEDVDLLGLEGSAMSNSFSPPAAPPTNSELLSDLFGGGGAAGPTQAGQSGVEDVFHPSGPASTQSTPRRSATSTSASPTLRVGEGATFDPFGAPSKPSGQDLLGSFLNTSSASSDPFLQPTRSPSPTVHASSTPAVNIQPDVSGGWDWHAKPGGFGMGSKSAATSPTGSSHGTPTHQSKPQTLDPFADLGTLGSSSFASKPTTPTGLGGGFPPLSSPQKASPQPMGGGWQQGGAYNWQQPQPKPQPSMPHSSPQNRPNYNVSFSAMPGGQNERGKGSSNLEGKQKAADFEDLLSGQGFNAHKDKKGPRTIAEMRKEEMAKEMDPEKLKILEWIEGKERNIRALLSTMHTVLWAGETKWKPVGMADLVTPEQVKKVYRKAVLVVHPDKATGQPYEQYAKMIFMELNDAWSEFENQGQKPLY

SEQ ID NO: 261 - DNA, 2250 bp, Homo sapiens
gagacgctgtctgcttgctgccttaagacagctagctgaattgctgattaacttttaaaatacccagcttggtttatttttcttagaatctgttgctaagactggggacgctgttttcttttacaaagggaaatctaagttaatttcaaggcattcgaaatggggaaagactattattgcattttgggaattgagaaaggagcttcagatgaagatattaaaaaggcttaccgaaaacaagccctcaaatttcatccggacaagaacaaatctcctcaggcagaggaaaaatttaaagaggtcgcagaagcttatgaagtattgagtgatcctaaaaagagagaaatatatgatcagtttggggaggaagggttgaaaggaggagcaggaggtactgatggacaaggaggtaccttccggtacacctttcatggcgatcctcatgctacatttgctgcatttttcggagggtccaacccctttgaaattttctttggaagacgaatgggtggtggtagagattctgaagaaatggaaatagatggtgatccttttagtgcctttggtttcagcatgaatggatatccaagagacaggaattctgtggggccatcccgcctcaaacaagatcctccagttattcatgaacttagagtatcacttgaagagatatatagtggttgtaccaaacggatgaagatttctcgaaaaaggctaaacgctgatggaaggagttacagatctgaggacaaaattcttaccattgagattaaaaaagggtggaaagaaggcaccaaaattacttttccaagagaaggagatgaaacaccaaatagtattccagcagacattgtttttatcattaaagacaaagatcatccaaaatttaaaagggatggatcaaatataatttatactgctaaaattagtttacgagaggcattgtgtggctgctcaattaatgtaccaacactggatggaagaaacatacctatgtcagtaaatgatattgtgaaacccggaatgaggagaagaattattggatatgggctgccatttccaaaaaatcctgaccaacgtggtgaccttctaatagaatttgaggtgtccttcccagatactatatcttcttcatccaaagaagtacttaggaaacatcttcctgcctcatagaatgaagaactttgttacacatattttgataaggcactgaaaatataaaaggactggtagtttactgatgtagatgtgaattctgtataaagatgtgtaaattcttttgagggttcattaaattgcatgaatagagacgggtcaaataaataggcaaaagggatttttacagttagagataaaagagaaaaccattcactgtattttatttcatttctcctgattcagatatttttagtaatttgcttatatgtaaaagttgtttttgtggagtcagtggatatatttctaatgaagtgctagactatccaattacttaatttcttatacctttagataatcagtatgaaaagttcccatttataatggaaatgaaaattcttaactaaactatacatgtaatatgtatttctagaagagaataaaaacccaagtcagttattagatttaaatcaccttctgaaatgctgctatagggctggtatctgtaaaagaatatcctgatgcatctgtttcaccattttgatttttaaagtatgctgtagcatttcttaataacatcgttgtgatgttcttaaggcagatctttcttcataaaaaggaaagtaatggcaatttctctcctgtggaaatcccaattgcttgaattactgatattttagaatagactttttaaaatgccatatgtaattttatgcaagttgactatatatcttgtacttaataaattataggctcattttgttctctgctagtttaaagtaattcgtttaataatagatgtgtttttagaggaaatgctgttacttggaattaattttccagttatacagtcttctataacttactaataatattctatatgtactttatgtaatttccctaaaaagaatgaactaccactacactatggtgttaaaccaaaatatagggaaaataaacactaactgctgcttatggataatgttgcaactacttgttatgcatataaatattttactttttcacatgtatagattgcatttcttaggtgttttaattttttaaatatatttatgttttaaaaaaaaaaaaaaa

SEQ ID NO: 262 - protein, 337 aa, Homo sapiens
MGKDYYCILGIEKGASDEDIKKAYRKQALKFHPDKNKSPQAEEKFKEVAEAYEVLSDPKKREIYDQFGEEGLKGGAGGTDGQGGTFRYTFHGDPHATFAAFFGGSNPFEIFFGRRMGGGRDSEEMEIDGDPFSAFGFSMNGYPRDRNSVGPSRLKQDPPVIHELRVSLEEIYSGCTKRMKISRKRLNADGRSYRSEDKILTIEIKKGWKEGTKITFPREGDETPNSIPADIVFIIKDKDHPKFKRDGSNIIYTAKISLREALCGCSINVPTLDGRNIPMSVNDIVKPGMRRRIIGYGLPFPKNPDQRGDLLIEFEVSFPDTISSSSKEVLRKHLPAS

SEQ ID NO: 263 - DNA, 2838 bp, Homo sapiens
gggtgggcgggcggctgctccggtccaggggtggaggtcggggccctgacccgacgcagccaggcggaagcgcggctgccattggaggctgcttttacctgcgcggggcccggggcgcaaagtccgaggcgccggggggaggaggcggcggacggcagcgcaggtgggcccgcgctctcggccctgcaagatgcccctgaagctgcgggggaagaagaaggccaagtccaaggagaccgccgggctggtggagggcgagccgacgggcgcgggcggcgggagcctctcagcgtcccgggctcccgcacgcaggctggtcttccacgcgcagctggcgcacggtagtgccacgggccgagtggagggcttctccagcatccaggagctctacgcccagatcgcgggcgcgtttgaaatctcgccgtcggagatcttatattgcactttaaacacacctaaaattgacatggaaagactcttaggaggacaactaggactagaagatttcatatttgcccatgtgaaaggaatcgaaaaagaagtgaatgtgtataaatctgaggattcacttggtctcaccattacagataatggtgttggctatgcttttataaagagaattaaagatggtggtgttattgactcagttaaaacaatctgtgttggggatcatattgaatccataaatggagaaaatattgttgggtggcgtcactatgatgttgctaagaagttaaaggaattaaaaaaggaggaactctttactatgaagttaatagaacctaagaaggcatttgaaatagagctgaggtcaaaggctggaaagtcatcaggagaaaaaattggttgtggaagggcaacacttcgcctgagatcaaaaggtcctgccaccgtggaagaaatgccttctgaaaccaaagcaaaggcaattgaaaagattgatgatgttcttgagttgtacatgggaattcgagatattgatttagccaccacaatgtttgaagctggaaaggacaaagtaaatccagatgaatttgctgtggcacttgacgaaactcttggagactttgcgttcccagacgaatttgtctttgatgtttggggagtcattggtgatgccaaacgaagaggattatgatgtgtacactccatctctgaagaaacaacccatcgttcttttttttctcttttttaaaaagtcctataagatctgtttttggacacctttactaactctggtttaatttcatgtgtatggaatatattctttgaaatataattttggtaattttgatttctgggcactttttaacattgctgatgtagtatgcttaagagaaatgacctaaataaggatcaattgtaatattcattcaaaaggtttttaaaagtaagttttaaggagtatttctcgacagatgattttcttctccattaatacccatgctttgtttttcacatataaatagatgatttcaatagctttgtagttttttttcaaaatcttaatgtaaactaggattggagtatgatttacctcatagtatcttcactgtgttatcctagtttgaacaggatatgttcaggaaatgaaaggtgaattatgccccttattggtctagaagcattggtttttttttgatcctctgagtaagggaaggaagattcctgtggcatgttgatttctatggccaactttctctctttgtaaaacaaagattgattgattttcttgtatgcttctttatacatgctcttaaaacttgtggttgaaatctgtgctgtgtgtgtgtgtctctgcatgtgtaaaagaagggtaaaaaagagatgggtagggtagaactacttgcatttgatttttttttcagtccttaaaacattatttctttttttcactcatagccacttttatgttaccttttataagcactccagggaagattttatatttttttgtagagtttttggaaagatatttactcaaaataactatgctttagaactttttttttttttttttttttggttaaacagcagcactttttagttccctaaactttagaagaaatgctatcagaaatagatttccttccagtggaaagaaaggaggaagggagaattgagaaaatatattagtctattattttagagttctaatacactctaaattatagagaaaattgagagtaaatgactgtcttatcactcttatttgacatttcgtaggtgtaagagaaatggaaatgaatggtttcaacaaagatcatttaatacagcagagcatggcatgaccaagcatctttgtaaagtgttagatggaaaatgctgtgtgctgccatggtaatcagaaataataacctgttagggatgtattctaggaaatcagaagtagttctcttttcttgctggattattgcttagataactcttgttttctggtaaaactttagttgtattgccatccactcctttttcaaatgagtttaatgccataaagctgatattctttgtccgattaatttgaaatctgcacagaagctgttttagtcattaatgtgtaacaaaagtagcttatagaatatggactgccttattgctgttgcttatcatttgaaaataaaatccagctcaggttgtaacttgttggtacttgtttagtgagttcgttttggaggttctgaaatacctattaattcttaatattacctctcttggaaagacacaaaaaaagagctgttatttttaggcataagatgacttaggaggcccatagaaacgttctcgtttaaacaacaacaacaaaataaatttatcagcactagaaaaaaaaaaaaaaaa

SEQ ID NO: 264 - protein, 315 aa, Homo sapiens
MPLKLRGKKKAKSKETAGLVEGEPTGAGGGSLSASRAPARRLVFHAQLAHGSATGRVEGFSSIQELYAQIAGAFEISPSEILYCTLNTPKIDMERLLGGQLGLEDFIFAHVKGIEKEVNVYKSEDSLGLTITDNGVGYAFIKRIKDGGVIDSVKTICVGDHIESINGENIVGWRHYDVAKKLKELKKEELFTMKLIEPKKAFEIELRSKAGKSSGEKIGCGRATLRLRSKGPATVEEMPSETKAKAIEKIDDVLELYMGIRDIDLATTMFEAGKDKVNPDEFAVALDETLGDFAFPDEFVFDVWGVIGDAKRRGL

SEQ ID NO: 265 - DNA, 1981 bp, Homo sapiens
gatttggtaaccacctcagagcctaccctatttattcccagcatggacctaaatccacttcagccaaaaatgaacaaagaaatgatgaagaacagagcctgtttctttctcagtggtgtactcagaaaatggatgcaagagtagaagctgatcctcgaggcttgcaaaagtggggttctttctgaaagtgaagccagcagccaagagccacccttcagaagatagaaggaagagcagctgcatgagtgatggccacagcaatgcatgggtcctgtctgtccacgtagtcctctccatctgcccgtagcttgccaggtctcctacccacactggggaaattccagctgccggccctctttgggttgcacctcccctttttgcacagggctctattgggaaagcagctgtcatgtgtctatttgaaagacaagaaaccagtctagttatagaaaagagatttagattacatcagaataacaatgcaaatcatttgtgcagttcttagtacagaaaacagatttaggaacaaaaattgggagggttaaagaaagtggttttttattctgtcatcaaaattgttttttaaaaacacatctgtagtaagataaataattgtgtgccgacttcataaacagaatgaatgactgaattcacacaatgttatttactgtttcagggcacacacacatggtttccaagtggtttcttgccactttggccttcaactggccttgctattttccattgaggggtgtctgattgtctcctccacagccctgagtctaagcaaaagcccatgggttggttgactggtgttcttgttgtccttggaagtggacagactggcagatgtggggctagtggggaagattctcgtaaacactttatttgttgtaagaactccagttggaatgtggcttccaatcatgggaggaggactgctttagaacaggaaactttctataataataccaatacaaccaaagactattattctgaacagaaaacaagaaatacagctggagctatttcctatctacctgatgaagggcactaccaggcggtcactctggctctgtccaccgatgcctgtgcccactttgtgcgacgtagcttccatggagacaagagcaatggtaatggaagaagaaagtctggatgtactcttgcagaagcagaaagcttcatggaacaatattaatcttctggtcatctctgtgctggtctagttgcccataaagttgtcagattgactttggatttaaagcctgaaaatgagtcccaaggaaatccgttgacatgaggcccaaggaagacagtttttggaaggggcaaggagggacagttctctgctccactgaagctaggtatggccatgtgacccatgttgccagtgaaacaggaggagaagggacatctgggtggaaacatttaagagtcaagtgtatttctccatactctctttctttggctttggcagtgatgaaggtcaatccaattacagttgattcttgaacaacagaggtttgaactgtgtgggtcaacctatacgtggattttcttctgcctctgccacctctgagacagcaagaccaatccttccttttcctccttctcctcagcctatacaatgtaaaaatgacaaggatgaagacctttatgatgattcacgtccacttaatgaacaacgtacctttcacttcccaccatgattctgaggcctcccgagccatgtggaactgtaagtgcaattaaacctctttttcttcccagtcttgggtatgtctttatcagcagtgtgaaaatggactaatacagtaaataggtaccagtagagtggggcattgctgaaaagatatctgaaaatgtggaagcaacttttgaactgggtaacaggcagaggttggaagagtttggagggctcagaagaagacaggaaaatgtgggaaagtttggaacttctagagatttgttgaatggc

SEQ ID NO: 266 - protein, 134 aa, Homo sapiens
MGWLTGVLVVLGSGQTGRCGASGEDSRKHFICCKNSSWNVASNHGRRTALEQETFYNNTNTTKDYYSEQKTRNTAGAISYLPDEGHYQAVTLALSTDACAHFVRRSFHGDKSNGNGRRKSGCTLAEAESFMEQY

SEQ ID NO: 267 - DNA, 1459 bp, Homo sapiens
cggcgggctggcctggcgcgctgcggcgctcgctcacccgctcccgaggaagggcagtgggccccgccgccgcctcccaatggcgaggctgcgggattgcctgccccgcctgatgctcacgctccggtccctgctcttctggtccctggtctactgctactgcgggctctgcgcctccatccacctgctcaaacttttgtggagcctcggcaaggggccggcgcagaccttccggcggcccgcccgggagcaccctcccgcgtgcctgagcgacccctccttgggcacccactgctacgtgcggatcaaggattcagggttaagatttcactatgttgctgctggagaaagaggcaaaccacttatgctgctgcttcatggatttccagaattctggtattcttggcgttaccaactgagagaatttaaaagtgaatatcgagttgtagcactggatttgagaggttatggagaaacagatgctcccattcatcgacagaattataaattggattgtctaattacagatataaaggatattttagattctttagggtatagcaaatgtgttcttattggccatgactgggggggcatgattgcttggctaattgccatctgttatcctgaaatggtgatgaagcttattgttattaacttccctcatccaaatgtatttacagaatatattttacgacaccctgctcagctgttgaaatccagttattattacttcttccaaataccatggttcccagaatttatgttctcaataaatgatttcaaggttttgaaacatctgtttaccagtcacagcactggcattggaagaaaaggatgccaattaacaacagaggatcttgaagcttatatttatgtcttttctcagcctggagcattaagtggcccaattaaccattaccgaaatatcttcagctgcctgcctctcaaacatcacatggtgaccactccaacactactactgtggggagagaatgacgcattcatggaggttgagatggctgaagtcacaaagatttttgttaaaaactatttcaggctaactattttgtcagaagccagtcattggcttcagcaagaccaacctgacatagtgaacaaattgatatggacatttctaaaagaagaaacaagaaaaaaagattgacttttctttatcttctatgaagggtctgtaatgaaatctctaaataatttttaaaaattgttcatcaacttctttatgttttattagaaaaaaactgttttaatgtgctttatcataaataaatatcctgacaaatggtattgaaaaaaatctgagatcatgtgaacatataatacaatgttgattttcttctggtgtattttgcacagacaagcatctgccttaaaatatatacacttgtacaaaaagggaaaaaaaaaaaaaaaaaaaaaaaaaaaaaaaaaaaaaaaa

SEQ ID NO: 268 - protein, 362 aa, Homo sapiens
MARLRDCLPRLMLTLRSLLFWSLVYCYCGLCASIHLLKLLWSLGKGPAQTFRRPAREHPPACLSDPSLGTHCYVRIKDSGLRFHYVAAGERGKPLMLLLHGFPEFWYSWRYQLREFKSEYRVVALDLRGYGETDAPIHRQNYKLDCLITDIKDILDSLGYSKCVLIGHDWGGMIAWLIAICYPEMVMKLIVINFPHPNVFTEYILRHPAQLLKSSYYYFFQIPWFPEFMFSINDFKVLKHLFTSHSTGIGRKGCQLTTEDLEAYIYVFSQPGALSGPINHYRNIFSCLPLKHHMVTTPTLLLWGENDAFMEVEMAEVTKIFVKNYFRLTILSEASHWLQQDQPDIVNKLIWTFLKEETRKKD

SEQ ID NO: 269 - DNA, 1438 bp, Homo sapiens
gggggcgcacgctcttcctgggtcaagagccggctcggttctgggattctgaggctccccaccgcggtccggcttctctgggagactgtctacaaaccgacgagaggcgtcaaccttttaccctagggggcggatttgggtaggagccgagcgttcggtcggaaacgcccccttcttcctcctgggcggggcaagtgaggccaagtactgggcctccagggcgtcgtacctctgtgagacatggctcgctgtggggaaggcagtgcggcccccatggtacttctggggtccgctggagtttgcagtaaggggttgcaaaggaaggggccgtgtgagcggcgccggctgaaggcgacggtgtcggagcagctcagccaggatttgctcaggcttctaagggaagaattccatacagatgttaccttctctgtgggttgtactttgttcaaagcacacaaagcagtccttttagcaagagttcctgacttctattttcatactattggacagacatcaaatagtttaacaaatcaggagcctattgctgtggagaatgttgaagctttagaatttagaacgtttttacagattatatattcatcaaacagaaacataaaaaactatgaagaggaaattcttaggaaaaagataatggagattgggatatcacaaaagcaacttgacatcagttttccaaagtgtgaaaactcatctgattgttctcttcagaagcatgaaattccagaggatatcagtgacagagatgatgatttcatttccaatgataattatgacttggagcctgcatctgaattaggagaagatttattgaagctttatgtgaaacctggttgcccagatattgatatttttgttgatggaaaacgttttaaagctcacagggccattttgagtgccagatctagttattttgctgcaatgctgagtggctgttgggctgaaagctcccaagagtacgttactcttcaaggtataagccatgtagaactgaatgttatgatgcattttatatatggaggaactctggacattccagacaaaactaatgttggtcagatactcaatatggctgatatgtatggactagaaggattaaaagaagtagcaatctatattttaagaagagattactgtaatttctttcagaagcctgttcccagaacattgacgtctatactagaatgcctgattattgctcattcagttggagtggaaagtctttttgctgactgcatgaagtggattgtaaagcattttgcaaggttttggtctgagagaagctttgcaaatatacctcctgagattcagaaaagttgtcttaatatgttgattcagtccttagtaaatataacctgaatactcttttgtgtgtttgccattaaaaagtttatgcaaaaaaaaaaaaaaaaaaaaaaaa

SEQ ID NO: 270 - protein, 378 aa, Homo sapiens
MARCGEGSAAPMVLLGSAGVCSKGLQRKGPCERRRLKATVSEQLSQDLLRLLREEFHTDVTFSVGCTLFKAHKAVLLARVPDFYFHTIGQTSNSLTNQEPIAVENVEALEFRTFLQIIYSSNRNIKNYEEEILRKKIMEIGISQKQLDISFPKCENSSDCSLQKHEIPEDISDRDDDFISNDNYDLEPASELGEDLLKLYVKPGCPDIDIFVDGKRFKAHRAILSARSSYFAAMLSGCWAESSQEYVTLQGISHVELNVMMHFIYGGTLDIPDKTNVGQILNMADMYGLEGLKEVAIYILRRDYCNFFQKPVPRTLTSILECLIIAHSVGVESLFADCMKWIVKHFARFWSERSFANIPPEIQKSCLNMLIQSLVNIT

SEQ ID NO: 271 - DNA, 4556 bp, Homo sapiens
atggcgtctcagcttcaagaaaaatgtattgcatttattgtagacaacttctccaagattattcagagtgaaaattttgctcttcttttacagtcacaagcaatgagcagcacagccgatctgttggacacaattttaaaagcaattgaagaaaatatcaccactgaaaatagctgctctcttcttatggctctggacacactgctgaactctgacagtacaaaggaaatgggttttacgtgcaagatccaggctctgcgtgataagctgtggatcttcctggttcagtctttctatgctgttcgtcacacagaaagctggaagctgatgagcacagatgatcaacagaaaatccaagcagctgcatttgacaaaggtgatgatcgaagacttggcaaaaagcctatattcagtagctcgcagcaaaggaaacaagtttctgactctggtgatataaaaatcaaatcttggaggggaaataacaagaaagagtgttggagttatctctctactaataaaaagatgaaatctgatggattaggagcatctggacattcgtcaagtaccaatagaaatagtataaataaaactctgaagcaagatgatgtaaaggaaaaagatggtacaaaaatagcatctaagattacaaaagaactaaaaactgggggaaaaaatgtttctggaaagcccaaaactgtaacaaaatccaaaacagaaaatggtgataaggcacggttggaaaacatgtcacctagacaagttgtagaaagatcagcaacagcagcagcagcagcaactggacagaagaatttactaaatggaaaaggagtgagaaatcaggaagggcaaatttcaggtgccagacccaaggtactcacaggaaacttaaatgtgcaagccaaagcaaagcctttgaagaaagctacagggaaggattcaccatgcctcagcatcgcaggaccctccagcagatccacagattcaagtatggaattctcaatttccactgaatgtctggatgaaccgaaagaaaatggatcaacagaagaagaaaagccttctggacataaactatccttttgtgattctccaggacagatgatgaaaaacagtgtagatagtgtcaaaaattccactgtagccataaaatctcgacctgtttcaagagttaccaatggaacttccaataaaaaaagtattcatgaacaagacactaatgtaaataacagtgtactaaagaaagtcagtggcaaaggatgtagtgagccagtaccacaggcaattttgaagaaaagaggaactagcaatggatgtactgcagctcagcagaggacaaagagtaccccatctaatcttactaaaactcaaggatcccaaggagagtcaccaaactcagtaaaatcttcagtctcttcaaggcagtctgatgaaaatgtggcaaagttggaccacaatacaactacagagaaacaagcacctaagagaaaaatggtcaagcaagtacacacagctttgcctaaggttaatgcaaaaatagtggcaatgcctaaaaatctaaatcagtcaaagaaaggtgaaactttgaataataaagattcaaaacagaaaatgcctcctggacaggttatatcaaaaactcagccttcctcccaaagacctttaaaacatgaaacatctactgtccaaaaaagtatgtttcatgatgtgcgtgataataacaacaaggacagtgtttctgaacagaagcctcacaaacctctcattaatcttgcatctgaaataagtgatgcagaagcactccagtcatcctgcaggcctgacccacaaaagccattaaacgatcaagaaaaagagaagttggcgttagaatgccaaaatatttcaaagctggataaatcattaaaacacgaactggaatcaaaacagatttgtttagataaaagtgaaacaaaatttcccaatcacaaagaaacagatgattgcgatgcagctaacatatgttgtcattctgttgggagtgataatgtaaattcaaaattttatagcaccacagccctaaaatacatggtttcaaatccaaatgaaaactccttgaactctaatccagtttgtgatttagactcaacaagtgcagggcaaatccatttgatatcagatagggagaaccaagtagggagaaaagatacaaacaaacaatcaagtattaaatgtgtggaagatgtttcactgtgtaatcctgaaaggacaaatggtaccttaaattctgctcaagaagacaaaaaatcgaaagttcctgtggaaggactgacaattcctagtaagttgtcagatgaatctgctatggatgaagacaaacatgctacagcagactcagatgtatcttccaagtgtttttcgggacagctatcagaaaaaaattctcctaaaaatatggaaacatcagaatctccagagagccatgaaactccagaaactccatttgtgggtcactggaatttgagtactggtgttctgcatcagcgagagagtcctgaatctgacactggcagtgctaccacctcctccgatgacataaagcccagatctgaagactatgatgctggagggtctcaggatgatgatgggtcaaatgacagaggtatctctaaatgtggcactatgctgtgccatgattttcttggaagaagtagcagtgataccagtactcctgaagaattaaaaatttatgatagtaatttaagaattgaagtaaaaatgaaaaagcaaagtaataatgatcttttccaagttaattcaacgagtgatgatgaaatccctaggaaaaggccagaaatttggtctcgatctgcaatagttcactctagggaaagagaaaatattccacgaggcagtgtccagtttgctcaggaaatagatcaggtatcttcttcagcagatgaaacagaagatgaaagatctgaagctgaaaacgttgcagaaaatttctctatatctaacccagctcctcagcagtttcagggaataattaatttagcttttgaagatgcaactgaaaatgaatgtcgtgaattttctgcaactaaaaagtttaaaaggtcagttttactttcagtcgatgaatgtgaagagctgggatcagatgaaggagaagtccatactccctttcaggcttctgtagattctttttcaccttctgatgtttttgatggcatttctcatgaacatcatggaaggacctgctattccagattctcacgagaaagtgaagataatattttagaatgtaaacaaaataaaggcaatagtgtatgtaaaaatgaaagcactgtcttggatcttagtagcattgactcttcaagaaaaaataaacagagtgtttcagccacagaaaaaaagaacacaatagacgtcctatccagtagaagcagacagcttcttcgagaagataaaaaagtaaacaatggaagcaatgtggaaaatgacattcagcaacgcagcaaattcttggatagtgatgtaaaatctcaagaaagaccatgtcacttggatcttcatcaaagagaacccaattctgacataccaaagaacagctctacaaaatctctagactcctttcggagtcaagttctgcctcaggaaggtccagtgaaagagagccattctacaactactgaaaaagctaatattgctttatctgcaggagacatagatgattgtgacacactggcacaaacccgcatgtatgaccatcggccttcaaaaaccctgtctccaatatatgagatggatgtaatagaagcatttgagcagaaagtggaatcagaaacacatgttacagatatggattttgaagatgaccaacattttgcaaaacaagattggacactactaaagcaactgctctctgaacaggattcaaacttagatgttacaaattccgttcctgaagacttaagtttagcacagtatctaatcaatcagacactacttttagcacgagatagctcaaaacctcagggtataacacatattgacactttgaacagatggagtgaactaacatctccacttgattcctcagcgagcatcaccatggctagtttttcctctgaagattgttcgcctcaaggcgagtggacaattctggaactggaaactcagcattaagtgttaacattttggaaaaatttatgccactcctttattttttgatgcctatattatatccaaatgataattgcattagccggatataaactttctttaatattgagtctttccaatttaatgaggtaaacatagtttatttattaatatatcacatatagaaaaatgtttttctaaagtttttgagcatgttttctctaattattagagaaattagaagacttataaggaaaccctagcttcagttttcctttcctagctgatgatttgttcacttaatcattattcaagaatttaaaatgtgaatgcagaagtagatcagtccctttactttttgctctgcatagggtaacatagtaatttaacaataaaaacttaccgtgcttgtg

SEQ ID NO: 272 - protein, 1388 aa, Homo sapiens
MASQLQEKCIAFIVDNFSKIIQSENFALLLQSQAMSSTADLLDTILKAIEENITTENSCSLLMALDTLLNSDSTKEMGFTCKIQALRDKLWIFLVQSFYAVRHTESWKLMSTDDQQKIQAAAFDKGDDRRLGKKPIFSSSQQRKQVSDSGDIKIKSWRGNNKKECWSYLSTNKKMKSDGLGASGHSSSTNRNSINKTLKQDDVKEKDGTKIASKITKELKTGGKNVSGKPKTVTKSKTENGDKARLENMSPRQVVERSATAAAAATGQKNLLNGKGVRNQEGQISGARPKVLTGNLNVQAKAKPLKKATGKDSPCLSIAGPSSRSTDSSMEFSISTECLDEPKENGSTEEEKPSGHKLSFCDSPGQMMKNSVDSVKNSTVAIKSRPVSRVTNGTSNKKSIHEQDTNVNNSVLKKVSGKGCSEPVPQAILKKRGTSNGCTAAQQRTKSTPSNLTKTQGSQGESPNSVKSSVSSRQSDENVAKLDHNTTTEKQAPKRKMVKQVHTALPKVNAKIVAMPKNLNQSKKGETLNNKDSKQKMPPGQVISKTQPSSQRPLKHETSTVQKSMFHDVRDNNNKDSVSEQKPHKPLINLASEISDAEALQSSCRPDPQKPLNDQEKEKLALECQNISKLDKSLKHELESKQICLDKSETKFPNHKETDDCDAANICCHSVGSDNVNSKFYSTTALKYMVSNPNENSLNSNPVCDLDSTSAGQIHLISDRENQVGRKDTNKQSSIKCVEDVSLCNPERTNGTLNSAQEDKKSKVPVEGLTIPSKLSDESAMDEDKHATADSDVSSKCFSGQLSEKNSPKNMETSESPESHETPETPFVGHWNLSTGVLHQRESPESDTGSATTSSDDIKPRSEDYDAGGSQDDDGSNDRGISKCGTMLCHDFLGRSSSDTSTPEELKIYDSNLRIEVKMKKQSNNDLFQVNSTSDDEIPRKRPEIWSRSAIVHSRERENIPRGSVQFAQEIDQVSSSADETEDERSEAENVAENFSISNPAPQQFQGIINLAFEDATENECREFSATKKFKRSVLLSVDECEELGSDEGEVHTPFQASVDSFSPSDVFDGISHEHHGRTCYSRFSRESEDNILECKQNKGNSVCKNESTVLDLSSIDSSRKNKQSVSATEKKNTIDVLSSRSRQLLREDKKVNNGSNVENDIQQRSKFLDSDVKSQERPCHLDLHQREPNSDIPKNSSTKSLDSFRSQVLPQEGPVKESHSTTTEKANIALSAGDIDDCDTLAQTRMYDHRPSKTLSPIYEMDVIEAFEQKVESETHVTDMDFEDDQHFAKQDWTLLKQLLSEQDSNLDVTNSVPEDLSLAQYLINQTLLLARDSSKPQGITHIDTLNRWSELTSPLDSSASITMASFSSEDCSPQGEWTILELETQH

SEQ ID NO: 273 - DNA, 751 bp, Homo sapiens
accctgagcggtctctgaggacctggtgagcagattgttgcaccattagaagctaggttgatccacagacagatggctgaaagtggaaaagaaaaaataaaatggacaaccaccattattattagctcatctcttaagagttatgaagttgcaactgccctagaaaatcgaagccacaaagttcgatattcagattcagtggaaaatggatcaattatattttctctttctggagttgcatttttattaatggatactaaggaatgtcttctgtcaactgaagaaatatttctagccaaaattgagaaatttattaacattcaccaaaatagttttttggttttgtctgctgccctccatgggcctgaagaatggaaactgatgttcaggattcagcagagattcctgggttgtaacttacgaatacttccagtacacaacacagtaaatgctattaatcttatgtgcactatagcaaagactacctccaaaccatacatagatagcatttgctacagaatgataacagctaaagcttacatcattgagcaaagtcctgtttggaaaacacttcagaagataaaactgaatagtgattcagttaacccaaattagagtaccaacttaatgtttttctcgaagaatgtgaaaataattagacctgttaaattataatattcaaatatctatttaaagacatttatattaatttgaaataataacatatacaattaaaagtgattttatttta

SEQ ID NO: 274 - protein, 180 aa, Homo sapiens
MAESGKEKIKWTTTIIISSSLKSYEVATALENRSHKVRYSDSVENGSIIFSLSGVAFLLMDTKECLLSTEEIFLAKIEKFINIHQNSFLVLSAALHGPEEWKLMFRIQQRFLGCNLRILPVHNTVNAINLMCTIAKTTSKPYIDSICYRMITAKAYIIEQSPVWKTLQKIKLNSDSVNPN

SEQ ID NO: 275 - DNA, 2042 bp, Homo sapiens
acgcgtagcgcggggcggggccagaagagcgggctaagacgccggaggaggtggcggcggctgggagaggcgagggttctggccgattttagcatcgaaactaggagaaataagaatggctgtagaggaacttcagtctataataaagagatgtcaaatcctagaagagcaagactttaaagaagaggattttggcctatttcagttagctgggcaaagatgcatagaagaagggcacacagaccagctattagaaattattcaaaatgaaaagaataaggtcatcatcaagaatatgggctggaatctcgttggtcctgttgttcgatgccttttgtgtaaagataaagaggatagtaaaagaaaagtttattttttgatctttgatttattggtaaagttatgcaatccaaaggaattattgttgggtttgcttgaactgattgaagagccctctggaaaacagatatcccaaagtattcttcttttgcttcagccattacaaacagtgattcagaaacttcataacaaggcatattcaattggattagcattgtctaccctttggaatcagctatctcttcttcctgttccatactcaaaagaacaaatacaaatggatgactatggcctttgtcagtgttgcaaggccttaatagagttcactaagccttttgtggaagaagtcattgataacaaagaaaactcactggaaaatgaaaagttaaaggatgaattactgaaattttgtttcaaaagcttgaaatgccctttgctgacagcacaattctttgaacagtctgaagaaggtggaaatgatcctttcaggtattttgcatcagaaataataggttttttatcagcaattggacaccctttccccaaaatgatttttaatcatggaaggaaaaagagaacttggaattaccttgaatttgaagaagaagaaaataaacagttagcagactcaatggcttctctggcatatctagtatttgtacagggcatccatattgatcagcttccaatggtcttaagcccattgtaccttttgcagtttaatatggggcacattgaagtctttttgcaaagaacagaagagtctgttatctccaaaggattggagctgctggagaatagtttattgagaatagaagacaatagtctactttaccagtacttagaaatcaagagttttcttactgtacctcagggcttagtgaaagtaatgacactttgccccattgagacactgaggaaaaagagtttagctatgcttcagctgtatattaacaagttggattcacaaggcaaatatacattatttaggtgcttattgaatacaagtaatcactcaggtgtggaggcttttattattcaaaatatcaaaaatcaaattgacatgtcattaaagagaacacgtaacaacaaatggtttacaggaccacagttgatttcccttcttgatttggtactttttctcccagagggtgcagaaacagatttactgcaaaactcagataggattatggcttcattaaatttattgaggtatttggttatcaaagataatgaaaatgacaatcaaactggattatggacagaacttggaaatattgagaataatttcttaaagccacttcatataggacttaatatgtcaaaagcacattatgaagcagaaattaaaaatagccaagaggcccagaaatctaaagatctttgttctataactgtaagtggagaagagatccctaatatgcctcctgaaatgcagcttaaggtcctgcattcagctcttttcacatttgatttgattgaaagtgttctagctcgagtggaagaactcattgaaataaaaacaaagtctacctctgaagaaaatattgggataaagtgaaagttccatttcctaaataaaaactaataaaatatagtactttccattatgattcatttaatacctttataaaaaatttttctgtaaaaatttactgcttgaaaaataaatgtagcttttctcatttatcaaaaaaaaaaaa

SEQ ID NO: 276 - protein, 594 aa, Homo sapiens
MAVEELQSIIKRCQILEEQDFKEEDFGLFQLAGQRCIEEGHTDQLLEIIQNEKNKVIIKNMGWNLVGPVVRCLLCKDKEDSKRKVYFLIFDLLVKLCNPKELLLGLLELIEEPSGKQISQSILLLLQPLQTVIQKLHNKAYSIGLALSTLWNQLSLLPVPYSKEQIQMDDYGLCQCCKALIEFTKPFVEEVIDNKENSLENEKLKDELLKFCFKSLKCPLLTAQFFEQSEEGGNDPFRYFASEIIGFLSAIGHPFPKMIFNHGRKKRTWNYLEFEEEENKQLADSMASLAYLVFVQGIHIDQLPMVLSPLYLLQFNMGHIEVFLQRTEESVISKGLELLENSLLRIEDNSLLYQYLEIKSFLTVPQGLVKVMTLCPIETLRKKSLAMLQLYINKLDSQGKYTLFRCLLNTSNHSGVEAFIIQNIKNQIDMSLKRTRNNKWFTGPQLISLLDLVLFLPEGAETDLLQNSDRIMASLNLLRYLVIKDNENDNQTGLWTELGNIENNFLKPLHIGLNMSKAHYEAEIKNSQEAQKSKDLCSITVSGEEIPNMPPEMQLKVLHSALFTFDLIESVLARVEELIEIKTKSTSEENIGIK

SEQ ID NO: 277 - DNA, 3026 bp, Homo sapiens
caccgtccggcagactactctcccccatggcggacttcgctgggccgtcttctgccggccgcaaggccggggctccccgctgctctcgaaaagccgcaggtactaaacagacaagtactttgaaacaagaagatgcttctaaaaggaaagctgaactagaagcagctgtgagaaagaagattgaatttgagagaaaagctctacatattgttgaacagcttttagaggagaatattacagaagagttcctaatggagtgtgggaggttcattacacctgctcactacagtgatgtcgtggatgaacgttctattgtcaaactctgtggttatcctttatgtcagaagaagctgggaattgtaccaaaacagaaatataaaatttctaccaaaaccaataaagtctatgatattactgaaagaaagtctttttgcagcaatttttgttatcaagcatctaagttttttgaagcacaaattcccaaaactccagtatgggttcgagaagaagagaggcatcctgattttcaactgctaaaggaagaacaaagtggccattctggagaagaagtacagttatgcagtaaagccattaaaacatcagatatcgacaatcctagccactttgaaaagcaatatgaatctagttcttctagcactcacagtgatagtagcagtgacaatgagcaagactttgtttcctccattctaccaggaaacagaccaaattcaacaaatattagaccacagctgcaccaaaaaagcataatgaaaaagaaagctggtcacaaagctaactccaaacacaaagacaaagaacagacagtagtagatgtcactgagcagttaggcgattgcaaattagatagtcaggagaaagatgctacatgtgaacttcctttacagaaagtaaatactcagagttcttcaaatagcactttgcctgaaagattaaaagcgtcagaaaattctgaaagtgaatacagtaggtcagaaataactctagtaggcataagtaagaaaagtgcagagcattttaagagaaaatttgccaaatcaaaccaagtgtctaggtcagtgtctagttcagtgcaggtgtgtcctgaagttggaaagagaaacttacttaaagttttgaaggagactttgattgagtggaagacagaagaaacattgaggtttttgtatggccagaattatgcttctgtgtgtctgaaacccgaagcctctctggttaaagaagaacttgatgaagatgacataatctcagatccagatagtcatttccctgcctggagggaatctcagaacagcttggatgagtctttaccttttaggggctcaggtacagccattaaaccactgccaagttacgagaatttgaaaaaagaaactgaaaagttaaatctgaggatcagggagttttgcagaggacggtatgttttgggtgaagaaaccaccaaatcacaagactcagaagagcatgattccacctttccactgatagactcaagttcccagaaccagattagaaaacgcatcgtacttgaaaagttgagtaaagtgttgcctgggcttctggttcctcttcagattacattgggagatatttacacacaacttaaaaatcttgttcgaactttcaggttaacaaatagaaatattatacacaaacctgcggaatggactttaattgctatggtgttgctgtcattactgaccccaattcttggcattcagaaacattctcaggaaggtatggtgtttacacggtttctagacaccctccttgaagaattacatctaaaaaatgaagaccttgaaagtctaaccatcatatttagaaccagctgtttaccagagtgatatattccatgaagacaaaatagaagatgaacttctattcaccgtttctggaattctagccgccatgatggtctggtggtgactgataactagttttattccaagacatacctttacctctttaagtttcaatctcccatctcccagtccttcagtccccaactgcagaggatgacctccccagatagaggagaatcattactccaacaagaataaccaagtctttgtatccctagtacaagacatagtatttttattcgaaaatgaatgtttaagtattaaattgaaacttgaatgaatattcaagaaaatataatgatctctactttttctggatgatttccagccatcatatcagtttgccaaaaaaattgagaaagttatgattttgacctcccaacctaaactctaaattctaaagatcagtaagcaattaggtcaataaatacatacaatttaagatgaagccctttggaagtctagtccaaaacaggaaaatctcagaactttctggactcaaggaaatgctttaaatggaatctgtagtttgtttgcaggagagacaatttctagaatttagattgcttttcaaaatgtttatcaggtaggcaagttagcagttgaggcggaacacagacaacttggggagctttactggaaggccaagaaaatactcttggacactggaggaaatgacagctactaaagcccaatcatggaaaaggaccagaaagcagcccactggaatggggagcttagtgggcaaggaggtagggatataatttctcttcttggctccaccagtaattagctctgtggcccagtcacctaaactttctggacttcagttcaggttgtatggcagtaggccatagaattggctactgccatacaatctctatgggaaaggactgcaaaaactaaattttatctctgtatgggcaaaggctactgtcatcctgttgttggtctggggccactctgacaattttttttaacctcatttgattgtgtaagggtctaaccacaacaaaaaatcatagtgtaatagaattaatcaagttcagcaaggtcacaggctagatcaatatacagaaaatcaattgtatttttctgttcagaaaactccaaaaatgaaataaagaaaattgtgttcacaat

SEQ ID NO: 278 - protein, 612 aa, Homo sapiens
MADFAGPSSAGRKAGAPRCSRKAAGTKQTSTLKQEDASKRKAELEAAVRKKIEFERKALHIVEQLLEENITEEFLMECGRFITPAHYSDVVDERSIVKLCGYPLCQKKLGIVPKQKYKISTKTNKVYDITERKSFCSNFCYQASKFFEAQIPKTPVWVREEERHPDFQLLKEEQSGHSGEEVQLCSKAIKTSDIDNPSHFEKQYESSSSSTHSDSSSDNEQDFVSSILPGNRPNSTNIRPQLHQKSIMKKKAGHKANSKHKDKEQTVVDVTEQLGDCKLDSQEKDATCELPLQKVNTQSSSNSTLPERLKASENSESEYSRSEITLVGISKKSAEHFKRKFAKSNQVSRSVSSSVQVCPEVGKRNLLKVLKETLIEWKTEETLRFLYGQNYASVCLKPEASLVKEELDEDDIISDPDSHFPAWRESQNSLDESLPFRGSGTAIKPLPSYENLKKETEKLNLRIREFCRGRYVLGEETTKSQDSEEHDSTFPLIDSSSQNQIRKRIVLEKLSKVLPGLLVPLQITLGDIYTQLKNLVRTFRLTNRNIIHKPAEWTLIAMVLLSLLTPILGIQKHSQEGMVFTRFLDTLLEELHLKNEDLESLTIIFRTSCLPE

SEQ ID NO: 279 - DNA, 8192 bp, Homo sapiens
cttttggtgaacaaggttcacatttattgccaaaagatgtctactctcctggaaaacatctttgccataattaatcttttcaagcaatattcaaaaaaagataaaaacactgacacattgagtaaaaaagagctgaaggaacttctggaaaaggaatttcggcaaatcctgaagaatccagatgacccagatatggttgatgtcttcatggatcacttggatatagaccacaacaagaaaattgacttcactgagtttcttctgatggtattcaagttggctcaagcatattatgagtctaccagaaaagagaatttaccgatatcaggacacaagcacagaaagcacagtcatcatgataaacatgaagataataaacaggaagaaaacaaagaaaacagaaaaagaccctcaagtctggaaagaagaaacaatagaaaagggaataagggaagatccaagagcccaagagaaacaggggggaaaaggcatgaatctagttctgaaaaaaaagaaagaaaaggatattcacctactcatagagaagaagaatatggaaaaaaccatcataactcaagtaaaaaagagaaaaacaagactgaaaatactagattaggagacaataggaagaggctaagtgaaagacttgaagagaaagaagacaatgaagaaggagtatatgattatgaaaatacaggaagaatgactcaaaaatggatacaatcaggccatattgccacatattacacaatccaggatgaagcctatgacaccactgatagtctattagaagaaaacaaaatatatgaaagatcaaggtcatctgatggcaaatcatcatctcaagtgaacaggtcaagacatgaaaatacaagccaggtaccattgcaggagtccaggacaagaaagcgtaggggatccagagttagccaggacagggacagtgagggacactcagaagactctgagaggcactctgggtcggcttccagaaaccatcatggatctgcgtgggagcagtcaagagatggctccagacaccccaggtcccatgatgaagacagagccagtcatgggcactctgcagacagctccagacaatcaggcactcgtcacgcagagacttcctctcgtggacagactgcatcatcccatgaacaggcaagatcaagtccaggagaaagacatggatccggccaccagcagtcagcagacagctccagacactcagccactgggcgcgggcaagcttcatctgcagtcagcgatcgtggacaccgggggtctagcggtagtcaggccagtgacagtgagggacattcagaaaactcagacacacaatcagtgtcaggccacggaaaggctgggctgagacagcagagccaccaagagtccacacgtggccggtcaggggaacggtctggacgttcagggtcttccctctaccaggtgagcactcatgaacagcctgactctgcccatggacggaccgggaccagcactggaggaagacaaggatcgcaccacgagcaggcacgagacagctccaggcattcagcgtcccaagagggtcaggacaccattcgtggacacccggggtcaagcagaggaggaaggcagggatcccaccacgagcaatcggtaaataggtctggacactcaggttcccatcacagccacaccacatcccagggaaggtctgatgcctcccatgggcagtcaggatccagaagtgcaagcagacaaacacgaaatgaggaacaatcaggagacggcaccaggcactcagggtcacgtcatcatgaagcttcctctcaggctgacagctctagacactcacaggtgggccagggacaatcatcggggcccaggacaagtaggaaccagggatccagtgttagccaggacagtgacagtcagggacactcagaagactctgagaggtggtctgggtctgcttccagaaaccatcatggatctgctcaggagcagtcaagagatggctccagacaccccaggtcccatcacgaagacagagctggtcatgggcactctgcagacagctccagaaaatcaggcactcgtcacacacagaattcctctagtggacaggctgcgtcatcccatgaacaggcaagatcaagtgcaggagaaagacatggatcccgccaccagctccagtcagcagacagctccagacactcaggcactgggcacggacaagcttcatctgcagtcagagacagtggacaccgagggtccagtggtagtcaggccactgacagtgagggacattcagaagactcagacacacagtcagtgtcaggccatggacaggctggtcaccatcagcagagccaccaagagtccgcacgtgaccggtcaggggaaaggtctcgacgttcagggtctttcctctaccaggtgagcactcataaacagtctgagtcctcccatggatggacagggcccagcactggagtaagacaaggatcccaccatgagcaggcacgagacaactccaggcactcagcatcccaagatggtcaggacaccattcgtggacacccggggtcaagcagaagaggaaggcaggggtcccaccacgagcaatcggtagataggtctggacactcagggtcccatcacagccacaccacatcccagggaaggtctgatgcctcccgtgggcagtcaggatccagaagtgcaagcagaacaacacgtaatgaggaacaatcaagagacggctccaggcactcagggtcacgtcaccatgaagcttcctctcatgccgacatctctagacactcacaggcaggccagggacaatcagaggggtccaggacaagcaggcgccagggatccagtgttagccaggacagtgacagtgagggacattcagaagactctgagaggtggtctgggtctgcttccagaaaccatcgtggatctgctcaggagcagtcaagacatggctccagacaccccaggtcccatcacgaagacagagccggtcacgggcactctgcagacagctccagacaatcaggaactcctcacgcagagacttcctctggtggacaggctgcgtcatcccatgaacaggcaagatcaagtccaggagaaagacacggatcccgccaccagcagtcagcagacagctccagacactcaggcattccgcgcagacaagcttcatctgcagtcagagacagtggacactgggggtccagtggtagtcaggccagtgatagtgagggacattcagaggagtcagacacacagtcagtgtcaggccatggacaggatgggccccatcagcagagccaccaagagtccgcacgtgactggtcagggggaaggtctggacgttcagggtctttcatctaccaggtgagcactcatgaacagtctgagtctgcccatgggcggaccaggaccagcactggacgaagacaaggatcccaccacgagcaggcacgagacagctccaggcactcagcgtcccaagagggtcaggacaccattcgtgcacacccggggtcaaggagaggaggaaggcagggatcccaccatgagcaatcggtagatagatctggacactcagggtcccatcacagccacaccacatcccagggaaggtctgatgcctcccatgggcagtcaggatccagaagtgcaagcagacaaactcgtaaggacaaacaatcaggagacggctccaggcactcagggtcacgtcaccatgaagctgcctcttgggctgacagctctagacactcacaggtgggacaggaacaatcatcggggtccaggacaagcaggcaccagggatccagtgttagccaggacagtgacagtgagagacactcagacgactccgagaggttgtctgggtctgcttccagaaaccatcatggatcttctcgggagcagtcaagagatggctccagacaccctgggttccatcaagaagacagagccagtcacgggcactctgcagacagctccagacaatcaggcactcatcacacagagtcttcctctcatggacaggctgtgtcatcccatgaacaggcaagatcaagtccaggagaaagacatggatcccgccaccagcagtcagcagacagctccagacactcaggcattgggcacagacaagcttcatctgcagtcagagacagtggacaccgagggtccagtggtagtcaggtcactaacagtgagggacattcagaagactcagacacacagtcagtgtcagcccacggacaagctgggccccatcagcagagccacaaagagtccgcacgtggccagtcaggggaaagctctggacgttcaaggtctttcctctaccaggtgagctctcatgaacagtctgagtccacacacggacagactgcacccagcactggaggaagacaaggatcccgccatgagcaggcacgaaacagctctaggcactcagcatcccaagacggtcaggacaccattcgtggacacccggggtcaagcagaggaggaaggcagggatcctaccacgagcaatcagtagataggtctggacactcagggtaccatcacagccacaccacaccccagggaaggtctgatgcctcccatgggcagtcaggacccagaagtgcaagcaggcaaacaagaaatgaggaacaatcaggagacggctccaggcactcagggtcacgtcaccatgaaccttccactcgggccggcagctctagacactcacaggtgggccagggagaatcagcggggtccaagacaagcaggcgccagggatccagtgttagtcaggacagggacagtgagggacactcagaagactctgagaggcggtctgagtcggcttccagaaaccattatggatctgctcgggagcagtcaagacatggctccaggaaccccaggtcccatcaagaagatagagccagtcatgggcactctgcagagagctccagacaatcaggcactcgtcatgcagagacttcctctggtggacaggctgcatcatcccaggaacaggcaaggtcaagtccaggagaaagacatggatcccgccaccagcagtcagcagacagctccacagactcaggcactgggcgcagacaagattcatctgtagtcggagacagtggaaaccgagggtccagtggtagccaggccagtgacagcgagggacactcagaagagtcagacacacagtcagtgtcagcccacggacaggctgggccccatcagcagagccaccaagagtccacacgtggccagtcaggggaaaggtctggacgttcagggtctttcctctaccaggtgagcactcatgaacagtctgagtccgcccatggacgcacagggcccagcactggaggaagacaaagatcccgccacgagcaggcacgagacagctccaggcactcagcgtcccaagagggtcaggacaccattcgtggacacccagggtcaagcagaggaggaaggcagggatcccactatgagcaatcggtagatagttctggacactcagggtctcatcacagccacaccacgtcccaggaaaggtctgatgtctcccgtgggcagtcaggatccagaagtgtcagcagacaaacacgtaatgagaaacaatcaggagacggctccaggcactcagggtcgcgtcaccatgaagcttcctctcgggccgacagctctagacactcgcaggtgggccagggacaatcatcagggcccaggacaagcaggaaccagggatccagtgttagccaggacagtgacagtcagggacactcagaagactctgagaggtggtctgggtctgcttccagaaaccatcttggatctgcttgggagcagtcaagagatggctccagacaccctgggtcccatcacgaagacagagccggtcacgggcactctgcagacagctccagacaatcaggcactcgtcacacagagtcttcctctcgtggacaggctgcgtcatcccatgaacaggcaagatcaagtgcaggagaaagacatggatcccaccaccagctccagtcagcagacagctccagacactcaggcattgggcatggacaagcttcatctgcagtcagagacagtggacaccgagggtacagtggtagtcaggccagtgacagtgagggacattcagaagactcagacacacagtcagtgtcagcacagggaaaagctgggccccatcagcagagccacaaagagtccgcacgtggccagtcaggggaaagctctggacgttcagggtctttcctctaccaggtgagcactcatgaacagtctgagtccacccatggacagtctgcgcccagcactggaggaagacaaggatcccattatgatcaggcacaagacagctccaggcactcagcatcccaagagggtcaggacaccattcgtggacacccggggccaagcagaggaggaagacaggggtcccaccaagagcaatcggtagataggtctggacactcagggtctcatcacagccacaccacatcccagggaaggtctgatgcctcccgtgggcagtcaggatccagaagtgcaagcagaaaaacatatgacaaggaacaatcaggagatggctctaggcactcagggtcgcatcatcatgaagcttcctcttgggccgacagctctagacactcactggtgggccagggacaatcatcagggcccaggacaagcaggccccggggatccagtgttagccaggacagtgacagtgagggacactcagaagattctgagaggcggtctgggtctgcgtccagaaaccatcatggatctgctcaggagcagtcaagagatggctccagacaccccaggtcccatcacgaagacagagccggtcatgggcactctgcagagagctccagacaatcaggcactcatcatgcagagaattcctctggtggacaggctgcatcatcccatgaacaggcaagatcaagtgcaggagagagacacggatcccaccaccagcagtcagcagacagctccagacactcaggcattgggcacggacaagcttcatctgcagtcagagacagtggacaccgagggtccagtggtagtcaggccagtgacagtgagggacattcagaagactcagacacacagtcagtgtcagcccacggacaggctgggccccatcagcagagccaccaagagtccacacgtggccggtcagcaggaaggtctggacgttcagggtctttcctctaccaggtgagcactcatgaacagtctgagtccgcccatggacggaccgggaccagcactggaggaagacaaggatcccaccacaagcaggcacgagacagctccaggcactcaacgtcccaagagggtcaggacaccattcatggacacccggggtcaagcagtggaggaaggcagggatcccactacgagcaattggtagatagatctggacactcagggtctcatcacagccacaccacatcccagggaaggtctgatgcctcccatgggcactcaggatccagaagtgcaagcagacaaactcgtaacgatgaacaatcaggagacggctccaggcactcagggtcgcgtcaccatgaagcttcctctcgggccgacagctctggacactcgcaggtgggccagggacaatcagaggggcccaggacaagcaggaactggggatccagttttagccaggacagtgacagtcagggacactcagaagactctgagaggtggtctgggtctgcttccagaaaccatcatggatctgctcaggagcagctaagagatggctccagacaccccaggtcccatcaagaagacagagctggtcatgggcactctgcagacagctccagacaatcaggcactcgtcacacacagacttcctctggtggacaggctgcatcatcccatgaacaggcaagatcaagtgcaggagaaagacatggatcccaccaccagcagtcagcagacagctccagacactcaggcattgggcacggacaagcttcatctgcagtcagagacagtggacaccgagggtacagtggtagtcaggccagtgacaatgagggacattcagaagactcagacacacagtcagtgtcagcccacggacaggctgggtcccatcagcagag

SEQ ID NO: 280 - protein, 4061 aa, Homo sapiens
MSTLLENIFAIINLFKQYSKKDKNTDTLSKKELKELLEKEFRQILKNPDDPDMVDVFMDHLDIDHNKKIDFTEFLLMVFKLAQAYYESTRKENLPISGHKHRKHSHHDKHEDNKQEENKENRKRPSSLERRNNRKGNKGRSKSPRETGGKRHESSSEKKERKGYSPTHREEEYGKNHHNSSKKEKNKTENTRLGDNRKRLSERLEEKEDNEEGVYDYENTGRMTQKWIQSGHIATYYTIQDEAYDTTDSLLEENKIYERSRSSDGKSSSQVNRSRHENTSQVPLQESRTRKRRGSRVSQDRDSEGHSEDSERHSGSASRNHHGSAWEQSRDGSRHPRSHDEDRASHGHSADSSRQSGTRHAETSSRGQTASSHEQARSSPGERHGSGHQQSADSSRHSATGRGQASSAVSDRGHRGSSGSQASDSEGHSENSDTQSVSGHGKAGLRQQSHQESTRGRSGERSGRSGSSLYQVSTHEQPDSAHGRTGTSTGGRQGSHHEQARDSSRHSASQEGQDTIRGHPGSSRGGRQGSHHEQSVNRSGHSGSHHSHTTSQGRSDASHGQSGSRSASRQTRNEEQSGDGTRHSGSRHHEASSQADSSRHSQVGQGQSSGPRTSRNQGSSVSQDSDSQGHSEDSERWSGSASRNHHGSAQEQSRDGSRHPRSHHEDRAGHGHSADSSRKSGTRHTQNSSSGQAASSHEQARSSAGERHGSRHQLQSADSSRHSGTGHGQASSAVRDSGHRGSSGSQATDSEGHSEDSDTQSVSGHGQAGHHQQSHQESARDRSGERSRRSGSFLYQVSTHKQSESSHGWTGPSTGVRQGSHHEQARDNSRHSASQDGQDTIRGHPGSSRRGRQGSHHEQSVDRSGHSGSHHSHTTSQGRSDASRGQSGSRSASRTTRNEEQSRDGSRHSGSRHHEASSHADISRHSQAGQGQSEGSRTSRRQGSSVSQDSDSEGHSEDSERWSGSASRNHRGSAQEQSRHGSRHPRSHHEDRAGHGHSADSSRQSGTPHAETSSGGQAASSHEQARSSPGERHGSRHQQSADSSRHSGIPRRQASSAVRDSGHWGSSGSQASDSEGHSEESDTQSVSGHGQDGPHQQSHQESARDWSGGRSGRSGSFIYQVSTHEQSESAHGRTRTSTGRRQGSHHEQARDSSRHSASQEGQDTIRAHPGSRRGGRQGSHHEQSVDRSGHSGSHHSHTTSQGRSDASHGQSGSRSASRQTRKDKQSGDGSRHSGSRHHEAASWADSSRHSQVGQEQSSGSRTSRHQGSSVSQDSDSERHSDDSERLSGSASRNHHGSSREQSRDGSRHPGFHQEDRASHGHSADSSRQSGTHHTESSSHGQAVSSHEQARSSPGERHGSRHQQSADSSRHSGIGHRQASSAVRDSGHRGSSGSQVTNSEGHSEDSDTQSVSAHGQAGPHQQSHKESARGQSGESSGRSRSFLYQVSSHEQSESTHGQTAPSTGGRQGSRHEQARNSSRHSASQDGQDTIRGHPGSSRGGRQGSYHEQSVDRSGHSGYHHSHTTPQGRSDASHGQSGPRSASRQTRNEEQSGDGSRHSGSRHHEPSTRAGSSRHSQVGQGESAGSKTSRRQGSSVSQDRDSEGHSEDSERRSESASRNHYGSAREQSRHGSRNPRSHQEDRASHGHSAESSRQSGTRHAETSSGGQAASSQEQARSSPGERHGSRHQQSADSSTDSGTGRRQDSSVVGDSGNRGSSGSQASDSEGHSEESDTQSVSAHGQAGPHQQSHQESTRGQSGERSGRSGSFLYQVSTHEQSESAHGRTGPSTGGRQRSRHEQARDSSRHSASQEGQDTIRGHPGSSRGGRQGSHYEQSVDSSGHSGSHHSHTTSQERSDVSRGQSGSRSVSRQTRNEKQSGDGSRHSGSRHHEASSRADSSRHSQVGQGQSSGPRTSRNQGSSVSQDSDSQGHSEDSERWSGSASRNHLGSAWEQSRDGSRHPGSHHEDRAGHGHSADSSRQSGTRHTESSSRGQAASSHEQARSSAGERHGSHHQLQSADSSRHSGIGHGQASSAVRDSGHRGYSGSQASDSEGHSEDSDTQSVSAQGKAGPHQQSHKESARGQSGESSGRSGSFLYQVSTHEQSESTHGQSAPSTGGRQGSHYDQAQDSSRHSASQEGQDTIRGHPGPSRGGRQGSHQEQSVDRSGHSGSHHSHTTSQGRSDASRGQSGSRSASRKTYDKEQSGDGSRHSGSHHHEASSWADSSRHSLVGQGQSSGPRTSRPRGSSVSQDSDSEGHSEDSERRSGSASRNHHGSAQEQSRDGSRHPRSHHEDRAGHGHSAESSRQSGTHHAENSSGGQAASSHEQARSSAGERHGSHHQQSADSSRHSGIGHGQASSAVRDSGHRGSSGSQASDSEGHSEDSDTQSVSAHGQAGPHQQSHQESTRGRSAGRSGRSGSFLYQVSTHEQSESAHGRTGTSTGGRQGSHHKQARDSSRHSTSQEGQDTIHGHPGSSSGGRQGSHYEQLVDRSGHSGSHHSHTTSQGRSDASHGHSGSRSASRQTRNDEQSGDGSRHSGSRHHEASSRADSSGHSQVGQGQSEGPRTSRNWGSSFSQDSDSQGHSEDSERWSGSASRNHHGSAQEQLRDGSRHPRSHQEDRAGHGHSADSSRQSGTRHTQTSSGGQAASSHEQARSSAGERHGSHHQQSADSSRHSGIGHGQASSAVRDSGHRGYSGSQASDNEGHSEDSDTQSVSAHGQAGSHQQSHQESARGRSGETSGHSGSFLYQVSTHEQSESSHGWTGPSTRGRQGSRHEQAQDSSRHSASQDGQDTIRGHPGSSRGGRQGYHHEHSVDSSGHSGSHHSHTTSQGRSDASRGQSGSRSASRTTRNEEQSGDGSRHSGSRHHEASTHADISRHSQAVQGQSEGSRRSRRQGSSVSQDSDSEGHSEDSERWSGSASRNHHGSAQEQLRDGSRHPRSHQEDRAGHGHSADSSRQSGTRHTQTSSGGQAASSHEQARSSAGERHGSHHQQSADSSRHSGIGHGQASSAVRDSGHRGYSGSQASDNEGHSEDSDTQSVSAHGQAGSHQQSHQESARGRSGETSGHSGSFLYQVSTHEQSESSHGWTGPSTRGRQGSRHEQAQDSSRHSASQYGQDTIRGHPGSSRGGRQGYHHEHSVDSSGHSGSHHSHTTSQGRSDASRGQSGSRSASRTTRNEEQSGDSSRHSVSRHHEASTHADISRHSQAVQGQSEGSRRSRRQGSSVSQDSDSEGHSEDSERWSGSASRNHRGSVQEQSRHGSRHPRSHHEDRAGHGHSADRSRQSGTRHAETSSGGQAASSHEQARSSPGERHGSRHQQSADSSRHSGIPRGQASSAVRDSRHWGSSGSQASDSEGHSEESDTQSVSGHGQAGPHQQSHQESARDRSGGRSGRSGSFLYQVSTHEQSESAHGRTRTSTGRRQGSHHEQARDSSRHSASQEGQDTIRGHPGSSRRGRQGSHYEQSVDRSGHSGSHHSHTTSQGRSDASRGQSGSRSASRQTRNDEQSGDGSRHSWSHHHEASTQADSSRHSQSGQGQSAGPRTSRNQGSSVSQDSDSQGHSEDSERWSGSASRNHRGSAQEQSRDGSRHPTSHHEDRAGHGHSAESSRQSGTHHAENSSGGQAASSHEQARSSAGERHGSHHQQSADSSRHSGIGHGQASSAVRDSGHRGSSGSQASDSEGHSEDSDTQSVSAHGQAGPHQQSHQESTRGRSAGRSGRSGSFLYQVSTHEQSESAHGRAGPSTGGRQGSRHEQARDSSRHSASQEGQDTIRGHPGSRRGGRQGSYHEQSVDRSGHSGSHHSHTTSQGRSDASHGQSGSRSASRETRNEEQSGDGSRHSGSRHHEASTQADSSRHSQSGQGESAGSRRSRRQGSSVSQDSDSEAYPEDSERRSESASRNHHGSSREQSRDGSRHPGSSHRDTASHVQSSPVQSDSSTAKEHGHFSSLSQDSAYHSGIQSRGSPHSSSSYHYQSEGTERQKGQSGLVWRHGSYGSADYDYGESGFRHSQHGSVSYNSNPVVFKERSDICKASAFGKDHPRYYATYINKDPGLCGHSSDISKQLGFSQSQRYYYYE

SEQ ID NO: 281 - DNA, 8192 bp, Homo sapiens
accctgcaagctgcattaggctttatcctacttgttcctttggtgaaccagggttcacttaaacttgcaaaaagatgaccgacctcttgagaagtgttgtcaccgtaattgatgttttctacaaatacaccaagcaagatggggagtgtggcacactgagcaagggtgaactaaaggaacttctggagaaagagcttcatccagttctgaagaacccagatgatccagacacagtggatgtcatcatgcatatgctggatcgagatcatgacagaagattggactttactgagtttcttttgatgatattcaagctgactatggcctgcaacaaggtcctcagcaaagaatactgcaaagcttcagggtcaaagaagcataggcgtggtcaccgacaccaagaagaagaaagtgaaacagaagaggatgaagaggatacaccaggacataaatcaggttacagacattcaagttggagtgagggagaggagcatggatatagttctgggcactcaaggggaactgtgaaatgtagacatgggtccaactccaggaggctaggaagacaaggtaatttatccagctctgggaaccaagagggatctcagaaaagataccacaggtccagctgtggtcattcatggagtggtggcaaagacagacatggttccagctctgtagaactgagagaaagaataaacaagtcacacattagcccttctagggaatctggggaggagtatgaatctggatctggatcaaacagttgggaaaggaaaggtcatggtggtctgtcatgtggattggagactagtgggcatgaatcaaactctactcagtcaagaattagagaacaaaagcttgggtctagctgttcaggttcaggagacagtgggaggcgaagtcatgcatgtggttatagcaattcaagtgggtgtggaaggccacaaaatgcttcaagttcttgtcagtcacatagatttggagggcaaggaaatcaatttagctatattcagtcaggctgtcagtcaggaattaagggaggacaaggccatggctgtgtctcaggaggtcagccctctggatgtggtcaacctgagtctaacccctgtagtcagtcctatagtcagagaggatatggagctagagaaaatggtcaaccacagaactgtggaggacaatggagaacaggctcaagtcagtcctcttgctgtggacaatatgggtctggaggtagccagtcttgtagtaatggtcaacatgaatatggttcctgtggccgcttttcaaactcttctagttcaaatgaattttccaaatgtgatcaatatgggtctggttcaagtcagtctactagctttgaacaacatggaacaggcttgagtcagtcctctgggttcgaacaacatgtatgtggctcaggtcaaacttgtggccagcatgagtctacatcaagtcaatccttgggctatgaccagcatgggtctagctcaggtaagacatctggctttggacaacatgggtctggctcaggtcagtcctctggctttggacaatgtgggtcaggctcaggtcagtcctctggctttggacagcatgggtctgtctcaggacaatcctctggttttggacagcatgggtctgtctcaggacaatcctctggttttggacaacatgagtctagatcacgtcagtctagctatggccaacatggttctggctcaagtcaatcatctggctatggccaatatgggtctagagagacatctggctttggacaacatgggttgggctcaggtcaatccactggctttggccaatatggatcgggctcaggtcagtcctctggctttggacaacatgggtctggctcaggacaatcctctggctttggacaacatgagtctagatcaggtcagtctagttatggccaacacagttctggctcaagtcagtcatctggctatggccaacatgggtctagacagacatctggctttggacaacatgggtcaggctcaagtcaatccactggctttggccaatatggatcaggctcaggtcagtcctctggctttggacaacatgtttctggctcaggacaatcctctggttttggacaacatgagtctagatcaggtcattctagctatggccaacatggttttggctcaagtcaatcatctggctatggtcaacatgggtcaagttcaggacagacatctggatttggacaacacgagttaagctcaggtcagtcttccagctttggccaacatggatcaggctcaggtcagtcctctggctttggacaacatgggtctggctcaggacaatcctctggctttggacaacatgagtctagatcaggtcagtctagctatggccaacacagttctggctcaagtcagtcatctggctatggccaacatgggtctagacagacatctggctttggacaacatgggtcaggctcaagtcaatccactggctttggccaatatggatcaggctcaggtcagtccgctggctttggacaacatgggtctggctcaggacaatcctctggctttggacagcatgagtctagatcacatcagtccagctatggccaacatggttctggctcaagtcaatcatctggctatggtcaacatgggtcaagttcgggacagacatctggctttggacaacacaggtcaagctcaggtcaatactctggctttggacaacatggatcaggctcaggtcagtccagtggctttggacaacatgggactggctcaggacaatactctggttttggacaacatgagtctagatcacatcagtctagctatggccaacatggttctggctcaagtcagtcatctggctatggtcaacatgggtcaagttcaggacagacttttggatttggacaacacaggtcaggctcaggtcaatcctctggctttggccaacatggatcaggctcaggtcagtcctctggctttggacaacatgagtcaggctcaggaaaatcctctggctttggacagcatgagtctagatcaagtcagtctaattatggccaacatggttctggctcaagtcagtcatctggctatggtcaacatgggtctagttcaggacagacaactggctttggacaacacaggtcaagctcaggccaatactcaggctttggacaacatggatcaggctcagatcagtcctctggctttggacaacatgggactggttcaggacaatcctctggttttggacaatatgagtctagatcacgtcagtctagctatggccaacatggttctggctcaagtcaatcatctggctatggtcaacatgggtcaaattcaggacagacatctggatttggacaacacaggccaggctcaggtcagtcctctggctttggccaatatggatcgggctcaggtcagtcttctggctttggacaacatgggtcaggcacaggtaaatcctctggctttgcacagcatgagtacagatcaggtcagtctagctatggccaacatggtactggctccagtcaatcatctggctgtggccaacatgagtctggctcaggtccaaccacaagttttggacagcatgtgtctggctcagacaatttctctagttctggacaacatatatctgactcaggtcagtccactggatttggccaatatggttcaggctcaggtcaatcaactggcttgggccagggtgaatctcaacaagtagagtcaggatccacagttcatgggagacaggaaactactcatggtcagacaataaataccactagacatagccagtctggtcaaggacaatccacacagacagggtccagggtaactagaagacgaagatctagccaaagtgagaacagtgacagtgaagtgcactcaaaggtctcacacagacattcagaacacattcacacacaagctggatctcactacccaaagtcaggatccacagttcgcagaagacaaggaactactcatggacagagaggagataccactagacatggccattctggtcatggacagtctacacagacaggttccagaacatctggaagacagagatttagccacagtgatgccactgacagtgaagtgcactcaggggtctcacatagaccacactcacaagaacaaactcacagccaagctggatctcaacatggagagtcagaatccacagttcatgagagacatgaaactacttatggacagacaggagaggccactggacatggccactctggtcatggacagtccacacagagagggtccaggacaactggaagaaggggatctggccatagtgagtccagtgacagtgaagtgcactcagggggctcacacagaccacaatcacaagaacaaactcatggccaagccggatctcaacatggagagtcaggatccacagttcatgggagacacggaactactcatggacagacaggagataccactagacatgcccactatcatcatggaaaatccacacagagagggtccagtacaactggaagaaggggatctggccacagtgagtccagtgacagtgaagtgcactcagggggctcgcacacacattcaggacacactcacggccaaagtggatctcaacatggagagtcagaatccataattcatgacagacacagaattactcatggacagacaggagataccactagacattcctactctggtcatgaacaaaccacacagacagggtccaggacaactggaagacagagaactagccacagtgagtccactgacagtgaagtgcactcagggggctcacacagaccacactcacgagaacacacttacggccaagccggatctcaacatgaagagccagaattcacagttcatgagagacacggaactactcatggacagataggagataccactggacattcccactctggtcatggacagtccacacagagagggtccaggacaactggaagacagagatctagccacagtgagtccagtgacagtgaagtgcactcaggggtctcacacacacatacaggacacactcatggtcaagctggatctcaacatggacagtcagaatccatagttcctgagagacatggaactactcatggacagacaggagataccactagacatgcccactatcatcatggattaaccacacagacagggtccaggactactggaagaaggggatctggccacagtgagtacagtgacagtgaagggtactcaggagtctcacatacacattcaggacacactcatggccaagccagatctcaacatggagagtcagaatccatagttcatgagagacatggaactatacatggacagacaggcgataccaccagacatgcccactctggtcatggacagtccacacagacagggtccaggaccactggaagaaggtcatctggccacagtgagtacagtgacagtgaagggcactcagggttctcacaaagaccacactcacgaggacacactcacggccaggctggatctcaacatggagagtcagaatccatagttgacgagagacatggaactactcatggacagacaggagataccagtggacattctcaatctggtcatggacagtccacacagtcaggatccagtacaactggaagaaggagatctggccacagtgagtccagtgacagtgaagtgcactcagggggctcacatacacattcaggacacacacacagccaagccaggtctcaacatggagagtcagaatccacagttcacaagagacaccaaactactcatggacagacaggagataccactgaacatggccaccctagtcatggacaaaccatacagacagggtccaggacaactggaagaaggggatctggccacagtgagtacagtgacagtgaagggccctcaggggtctcacacacacattcaggacacactcacggtcaagctggatctcactatccagagtcaggatcctcagttcatgagagacacggaactactcatggacaaacagcagataccactagacatggccactctggtcatggacagtccacacagagagggtccaggacaactggaagaagggcatctggccacagtgagtacagtgacagtgaagggcactcaggggtctcacacacacattcaggacacgctcatggccaagccggatctcaacatggagagtcaggatcctcagttcatgagagacacggaactactcatggacagacaggagataccactagacatgctcactctggtcatggacagtccacacagagagggtcaaggacagctggaagaaggggatctggccacagtgagtccagtgacagtgaagtgcactcaggggtctcacacacacattcaggacacacttatggccaagccagatctcaacatggagagtcaggatctgccattcacgggagacagggaactatacatggacagacaggagataccactagacatggccagtctggtcatggacagtccacacagacaggttccaggacaactggaagacaaagatctagtcacagtgagtccagtgatagtgaagtgcactcagaggcctcacccacacattcaggacacactcacagccaagccggatctcgacatggacagtcaggatcctcaggtcatgggagacagggaactactcatggacagacaggagataccactagacatgcccactatggttatggacaatccacacagagagggtccaggacaactggaagaaggggatctggccacagtgagtccagtgacagtgaagtgcactcatggggctcacacacacattcaggacacattcagggccaagctggatctcaacaaagacagccaggatccacagttcatgggagactggaaactactcatggacagacaggagataccactagacatggccattctggttatggacaatccacacagacaggttccagatctagtagagcaagtcattttcagtcacatagtagtgaaaggcaaaggcatggatcaagtcaggtttggaaacatggcagctatggacctgcagaatatgactatgggcacactgggtatgggccttctggtggcagcagaaaaagcatcagtaattctcacctttcatggtcaacagacagcactgcaaacaagcaactgtctagacattgacagttattttctagttctgaccttatagtatccaaagcaactaaaagaacaggaagacacagtttaaatcatgaacagtcaatggtaagttatgaacattcagttgattctcagtatcagtctcgacctattattataagaagtcaggaatctagtcatggacattctatagtaactcataaacagtcaaacaacacctatgttcaacctggatataacacagccagaagggagggatgtacacatagccagtcaaatgaccaccttggatttggccatggacaatccatatcagttcatggccattcaaaatctagttcaatcagaaaacaggaatcccatactgataacaaaaagcattcagaagattgggagaaagacactcatgagcaattaggatctaggcatgggaagttagagttcaatacaataggtatacatggatctagccagcaacatttcggagatacaacttttcatgggcaggtaagatccagcacaggttttgccagataggtattaagtcatgggccatcaagagatgcctagggtcagtctggattcagtaccaatgaaagacaagtatacagccatggccaatcaaatgatagttatgagtagtcaaatgacagcaaaagtcaaagatacattttcagtcactttcttgacagccaagaccctgcaggaattgaagagtataggtatagatattcatcaagcagtgcaaccatatgcagtgggggagacaaaggcaagagtcagagtcaagtctgtcaggaggtatcagaatatacggtgaggatgtgggcaaaaaacaaagaggctctgaggccagcggttaccatacaaaggaaagaacaggctctggttccttctgcttagatagcaacaccccactctatgaatatgtccaagaacaaaggagttattactttgaataag

SEQ ID NO: 282 - protein, 2391 aa, Homo sapiens
MTDLLRSVVTVIDVFYKYTKQDGECGTLSKGELKELLEKELHPVLKNPDDPDTVDVIMHMLDRDHDRRLDFTEFLLMIFKLTMACNKVLSKEYCKASGSKKHRRGHRHQEEESETEEDEEDTPGHKSGYRHSSWSEGEEHGYSSGHSRGTVKCRHGSNSRRLGRQGNLSSSGNQEGSQKRYHRSSCGHSWSGGKDRHGSSSVELRERINKSHISPSRESGEEYESGSGSNSWERKGHGGLSCGLETSGHESNSTQSRIREQKLGSSCSGSGDSGRRSHACGYSNSSGCGRPQNASSSCQSHRFGGQGNQFSYIQSGCQSGIKGGQGHGCVSGGQPSGCGQPESNPCSQSYSQRGYGARENGQPQNCGGQWRTGSSQSSCCGQYGSGGSQSCSNGQHEYGSCGRFSNSSSSNEFSKCDQYGSGSSQSTSFEQHGTGLSQSSGFEQHVCGSGQTCGQHESTSSQSLGYDQHGSSSGKTSGFGQHGSGSGQSSGFGQCGSGSGQSSGFGQHGSVSGQSSGFGQHGSVSGQSSGFGQHESRSRQSSYGQHGSGSSQSSGYGQYGSRETSGFGQHGLGSGQSTGFGQYGSGSGQSSGFGQHGSGSGQSSGFGQHESRSGQSSYGQHSSGSSQSSGYGQHGSRQTSGFGQHGSGSSQSTGFGQYGSGSGQSSGFGQHVSGSGQSSGFGQHESRSGHSSYGQHGFGSSQSSGYGQHGSSSGQTSGFGQHELSSGQSSSFGQHGSGSGQSSGFGQHGSGSGQSSGFGQHESRSGQSSYGQHSSGSSQSSGYGQHGSRQTSGFGQHGSGSSQSTGFGQYGSGSGQSAGFGQHGSGSGQSSGFGQHESRSHQSSYGQHGSGSSQSSGYGQHGSSSGQTSGFGQHRSSSGQYSGFGQHGSGSGQSSGFGQHGTGSGQYSGFGQHESRSHQSSYGQHGSGSSQSSGYGQHGSSSGQTFGFGQHRSGSGQSSGFGQHGSGSGQSSGFGQHESGSGKSSGFGQHESRSSQSNYGQHGSGSSQSSGYGQHGSSSGQTTGFGQHRSSSGQYSGFGQHGSGSDQSSGFGQHGTGSGQSSGFGQYESRSRQSSYGQHGSGSSQSSGYGQHGSNSGQTSGFGQHRPGSGQSSGFGQYGSGSGQSSGFGQHGSGTGKSSGFAQHEYRSGQSSYGQHGTGSSQSSGCGQHESGSGPTTSFGQHVSGSDNFSSSGQHISDSGQSTGFGQYGSGSGQSTGLGQGESQQVESGSTVHGRQETTHGQTINTTRHSQSGQGQSTQTGSRVTRRRRSSQSENSDSEVHSKVSHRHSEHIHTQAGSHYPKSGSTVRRRQGTTHGQRGDTTRHGHSGHGQSTQTGSRTSGRQRFSHSDATDSEVHSGVSHRPHSQEQTHSQAGSQHGESESTVHERHETTYGQTGEATGHGHSGHGQSTQRGSRTTGRRGSGHSESSDSEVHSGGSHRPQSQEQTHGQAGSQHGESGSTVHGRHGTTHGQTGDTTRHAHYHHGKSTQRGSSTTGRRGSGHSESSDSEVHSGGSHTHSGHTHGQSGSQHGESESIIHDRHRITHGQTGDTTRHSYSGHEQTTQTGSRTTGRQRTSHSESTDSEVHSGGSHRPHSREHTYGQAGSQHEEPEFTVHERHGTTHGQIGDTTGHSHSGHGQSTQRGSRTTGRQRSSHSESSDSEVHSGVSHTHTGHTHGQAGSQHGQSESIVPERHGTTHGQTGDTTRHAHYHHGLTTQTGSRTTGRRGSGHSEYSDSEGYSGVSHTHSGHTHGQARSQHGESESIVHERHGTIHGQTGDTTRHAHSGHGQSTQTGSRTTGRRSSGHSEYSDSEGHSGFSQRPHSRGHTHGQAGSQHGESESIVDERHGTTHGQTGDTSGHSQSGHGQSTQSGSSTTGRRRSGHSESSDSEVHSGGSHTHSGHTHSQARSQHGESESTVHKRHQTTHGQTGDTTEHGHPSHGQTIQTGSRTTGRRGSGHSEYSDSEGPSGVSHTHSGHTHGQAGSHYPESGSSVHERHGTTHGQTADTTRHGHSGHGQSTQRGSRTTGRRASGHSEYSDSEGHSGVSHTHSGHAHGQAGSQHGESGSSVHERHGTTHGQTGDTTRHAHSGHGQSTQRGSRTAGRRGSGHSESSDSEVHSGVSHTHSGHTYGQARSQHGESGSAIHGRQGTIHGQTGDTTRHGQSGHGQSTQTGSRTTGRQRSSHSESSDSEVHSEASPTHSGHTHSQAGSRHGQSGSSGHGRQGTTHGQTGDTTRHAHYGYGQSTQRGSRTTGRRGSGHSESSDSEVHSWGSHTHSGHIQGQAGSQQRQPGSTVHGRLETTHGQTGDTTRHGHSGYGQSTQTGSRSSRASHFQSHSSERQRHGSSQVWKHGSYGPAEYDYGHTGYGPSGGSRKSISNSHLSWSTDSTANKQLSRH

SEQ ID NO: 283 - DNA, 1891 bp, Homo sapiens
cacttaacagccacttgtttcatcccacctgggcattaggttgacttcaaagatgcctcagttactgcaaaacattaatgggatcatcgaggccttcaggcgctatgcaaggacggagggcaactgcacagcgctcacccgaggggagctgaaaagactcttggagcaagagtttgccgatgtgattgtgaaaccccacgatccagcaactgtggatgaggtcctgcgtctgctggatgaagaccacacagggactgtggaattcaaggaattcctggtcttagtgtttaaagttgcccaggcctgtttcaagacactgagcgagagtgctgagggagcctgcggctctcaagagtctggaagcctccactctggggcctcgcaggagctgggcgaaggacagagaagtggcactgaagtgggaagggcggggaaagggcagcattatgaggggagcagccacagacagagccagcagggttccagagggcagaacaggcctggggttcagacccagggtcaggccactggctctgcgtgggtcagcagctatgacaggcaagctgagtcccagagccaggaaagaataagcccgcagatacaactctctgggcagacagagcagacccagaaagctggagaaggcaagaggaatcagacaacagagatgaggccagagagacagccacagaccagggaacaggacagagcccaccagacaggtgagactgtgactggatctggaactcagacccaggcaggtgccacccagactgtggagcaggacagcagccaccagacaggaagaaccagcaagcagacacaggaggccaccaatgaccagaacagagggactgagacccacggtcaaggcaggagccagaccagccaggctgtgacaggaggacatgctcagatacaggcagggacacacacccagacacccacccagaccgtggagcaggacagcagccaccagacaggaagcaccagcacccagacacaggagtccaccaatggccagaacagagggactgagatccacggtcaaggcaggagccagaccagccaggctgtgacaggaggacacactcagatacaggcagggtcacacaccgagactgtggagcaggacagaagccaaactgtaagccacggaggggctagagaacagggacagacccagacgcagccaggcagtggtcaaagatggatgcaagtgagcaaccctgaggcaggagagacagtaccgggaggacaggcccagactggggcaagcactgagtcaggaaggcaggagtggagcagcactcacccaaggcgctgtgtgacagaagggcagggagacagacagcccacagtggttggtgaggaatgggttgatgaccactcaagggagacagtgatcctcaggctggaccagggcaacttgcataccagtgtttcctcagcacagggccaggatgcagcccagtcagaagagaagcgaggcatcacagctagagagctgtattcctacttgagaagcaccaagccatgacttccccgactccaatgtccagtactggaagaagacagctggagagagtttggcttgtcctgcatggccaatccagtgggtgcatccctggacatcagctcttcattatgcagcttcccttttaggtctttctcaatgagataatttctgcaaggagctttctatcctgaactcttctttcttacctgctttgcggtgcagaccctctcaggagcaggaagactcagagcaagtcacccctttgtactgaattgtcctcatcttgtggggggtttcaggactatttttatctctgacatctctctattgccccatctaccctaatgcatcaataaaaccttaagccgctgg

SEQ ID NO: 284 - protein, 495 aa, Homo sapiens
MPQLLQNINGIIEAFRRYARTEGNCTALTRGELKRLLEQEFADVIVKPHDPATVDEVLRLLDEDHTGTVEFKEFLVLVFKVAQACFKTLSESAEGACGSQESGSLHSGASQELGEGQRSGTEVGRAGKGQHYEGSSHRQSQQGSRGQNRPGVQTQGQATGSAWVSSYDRQAESQSQERISPQIQLSGQTEQTQKAGEGKRNQTTEMRPERQPQTREQDRAHQTGETVTGSGTQTQAGATQTVEQDSSHQTGRTSKQTQEATNDQNRGTETHGQGRSQTSQAVTGGHAQIQAGTHTQTPTQTVEQDSSHQTGSTSTQTQESTNGQNRGTEIHGQGRSQTSQAVTGGHTQIQAGSHTETVEQDRSQTVSHGGAREQGQTQTQPGSGQRWMQVSNPEAGETVPGGQAQTGASTESGRQEWSSTHPRRCVTEGQGDRQPTVVGEEWVDDHSRETVILRLDQGNLHTSVSSAQGQDAAQSEEKRGITARELYSYLRSTKP

SEQ ID NO: 285 - DNA, 835 bp, Homo sapiens
caggtagagtgcttctcaggaccaggatgaactcttggtgctggtgttttgggcagaaagagcccctgggtggaggttgaggccattcttgaagaaagacaaggataaagaaggattttggaggggaaggttcttctggaaggggagggtggaagctttattcagcttctacagagatgtcctgccagcagagccagcagcagtgccagcctcctcccaaatgtacccctaaatgccctcccaagtgtactcctaagtgtcctcccaagtgtcccccaaaatgccctccccagtgttcagccccatgcccacctccagtctcttcctgctgtggttccagctctgggggctgctgcagctctgagggtggtggctgctgcctgagccaccacaggccccgccagtccctccgacgccgacctcagagttccagctgctgtggcagtggcagtggccagcagtctgggggctccagctgctgccacagctctgggggctctggctgctgccacagctctggaggctgctgctgacctgggccatgaggagcacggaggagaaggactggcagatcccaggtgctgaagatgtgtgtcagcctgaggcttcttttctctcatttcccatggaaggacttcggaaatgccttaagttcccctctttatcctgctcatgttcactccattgtagggttgaagtctagcttgtgatattttctggcctggctttccctctcagacatagctctttggagaactaggtgttgtaattcagttatgaagctattttctctgtaacaataaagctttttattcctgaaaaaaaaaaaaaaaaa

SEQ ID NO: 286 - protein, 118 aa, Homo sapiens
MSCQQSQQQCQPPPKCTPKCPPKCTPKCPPKCPPKCPPQCSAPCPPPVSSCCGSSSGGCCSSEGGGCCLSHHRPRQSLRRRPQSSSCCGSGSGQQSGGSSCCHSSGGSGCCHSSGGCC

SEQ ID NO: 287 - DNA, 699 bp, Homo sapiens
gcccattccagttggagaacgtagtgagtctttcagtggagccagggtctggtttgtcgtgaggagctccgcgatgtcctctcaacagagcgccgtttccgccaaaggcttttccaaggggtcgtcccagggccccgctccgtgtcccgccccggcgcccaccccggcgcccgcctcctcctcctcctgctgtggctccggcaggggctgctgcggcgactcaggctgctgcggctccagctccaccagttgctgctgcttcccaaggagacgccgtcgacagcggagtagtggttgctgctgctgcgggggcggcagccagaggtcccagcgctccaacaaccggagctcaggatgctgctccggctgctgagaggcccgcaacccccagcgctgcgctagagaaacccgcccagcccagagcgggcccgccccgctgcggctcccacgcggggctgggcctcggagtttgccccgtaaagcgaattgcactttgatgttcagaaacccactttgttctcagccacgcaaaactccctgaccccgatgtgatttttctccccggggattcgagagccatgcgtgggacactggaccctactgtctacacgggcttgcacacagcaggtgctcagcaaatgcctattgatttgattgtcttttgaagatgtcataataaagcttctacctcctgaaaaa

SEQ ID NO: 288 - protein, 99 aa, Homo sapiens
MSSQQSAVSAKGFSKGSSQGPAPCPAPAPTPAPASSSSCCGSGRGCCGDSGCCGSSSTSCCCFPRRRRRQRSSGCCCCGGGSQRSQRSNNRSSGCCSGC

SEQ ID NO: 289 - DNA, 611 bp, Homo sapiens
ctcaggaacagccttctcctgcctctctgcacctggacatctcaactcctgccaagatgtcctgccagcagaaccagaagcagtgccaacccccacccaagtgcccctcacccaagtgtcccccaaagaacccagtacagtgtctgcctccagcttcctctggctgtgccccaagctctgggggctgtggccctagctccgagggcggctgcttcctgaaccaccacaggcgccaccaccgatgccggcgccagaggtccaactcctgtgacaggggcagtggtcagcaaggcgggggctctggctgctgccacggttctgggggctgctgctgatccagatcctgatgctgagacaagcgatctttggaggaaacaagaatcccaagaggccaagaacagccccatctgacgcatgccttcccatataccctcttctgactttcacaggctgagctggaggttttcctgtgggggatctgagctctccccagaaggcacttcttgttttatgtacaggatgtcatatgtccccctacccctgtacctgccaaggattggcagtgcttgtgcccaacctcgtaaaaaagataaagttccttgtcctcatta

SEQ ID NO: 290 - protein, 92 aa, Homo sapiens
MSCQQNQKQCQPPPKCPSPKCPPKNPVQCLPPASSGCAPSSGGCGPSSEGGCFLNHHRRHHRCRRQRSNSCDRGSGQQGGGSGCCHGSGGCC

SEQ ID NO: 291 - DNA, 617 bp, Homo sapiens
ctcaggaacagccttctcctgcctcctctgcacctggacaactcaactcctgccaagatgtcctgccagcagaaccagcagcagtgccaacccccacccaagtgtccctcacccaagtgtcccccaaagagcccagtacagtgtctgcctccagcttcctctggctgtgccccaagctctgggggctgtggccctagctccgagggcggctgcttcctgaaccaccacaggcgccaccaccgatgccggcgccagaggcccaactcctgtgacaggggcagtggtcagcaaggcgggggctctggctgcggccatggctctggaggctgctgctgacctggatcctgatgctgagacaagcgattttggaggaaacaagaatcccaagggcccaggaaaaccccatcttgatgcatgagttcccagataccctcttctggctttcacaggctgagctaggggttttcctgtggaaggtctgagctctccccagaaggcacttcctgtctgatgtccaggatgtcacatgttcccttacccctgtacctgtgaaggattggcagtgcttgtgcctgacctcatcaaaaaataaagctccttgtcctcattaaaaaaaa

SEQ ID NO: 292 - protein, 92 aa, Homo sapiens
MSCQQNQQQCQPPPKCPSPKCPPKSPVQCLPPASSGCAPSSGGCGPSSEGGCFLNHHRRHHRCRRQRPNSCDRGSGQQGGGSGCGHGSGGCC

SEQ ID NO: 293 - DNA, 285 bp, Homo sapiens
atgtcctgccagcaaaaccagcagcagtgccagccccctcccagttgtccctcacccaagtgtcccccaaagagcccagcacagtgtctgcctccaccctcttctgactgtgctctaagctccgggggctgtggccccagttctgaaagtggctgctgcctgagccaccacaggcacttcaggtcccatcaatgccggcgccagagatccaactcctgtgacaggggcagtggtcagcaaggcgggggctcctgccgtggccatggctctgggggctgctgctga

SEQ ID NO: 294 - protein, 94 aa, Homo sapiens
MSCQQNQQQCQPPPSCPSPKCPPKSPAQCLPPPSSDCALSSGGCGPSSESGCCLSHHRHFRSHQCRRQRSNSCDRGSGQQGGGSCRGHGSGGCC

SEQ ID NO: 295 - DNA, 288 bp, Homo sapiens
atgtcctgccagcagaaccagcagcagtgccagcctctgcccaagtgcccctcacccaagtgccccccaaagagctcagcacagtgtctgcctccagcctcctcctgctgtgctccaagacctgggtgctgtggtggccccagctctgagggcggctgctgcctgagccaccacaggtgctgcaggtcccaccgatgccggcgccagagctccaactcctgtgacagaggcagtggtcagcaagatggtgcctccgactgtggctatggctctggaggctgctgctga

SEQ ID NO: 296 - protein, 95 aa, Homo sapiens
MSCQQNQQQCQPLPKCPSPKCPPKSSAQCLPPASSCCAPRPGCCGGPSSEGGCCLSHHRCCRSHRCRRQSSNSCDRGSGQQDGASDCGYGSGGCC

SEQ ID NO: 297 - DNA, 270 bp, Homo sapiens
atgtcctgccagcagaaccagcagcagtgccagcctccgcccaagtgccctgcaaagagcccagcacagtgtctgcctccagcttcctccagctgtgccccaagctctgggggctgtgggcccagctccgagcgcagctgctgcctgagtcaccacagatgccgcaggtctcaccgttgccgttgccagagctccaactcctgtgacaggggaagtggtcagcaaggcgggagctccagctgtggccacagttctgcgggctgctgctga

SEQ ID NO: 298 - protein, 89 aa, Homo sapiens
MSCQQNQQQCQPPPKCPAKSPAQCLPPASSSCAPSSGGCGPSSERSCCLSHHRCRRSHRCRCQSSNSCDRGSGQQGGSSSCGHSSAGCC

SEQ ID NO: 299 - DNA, 609 bp, Homo sapiens
cagggacgtgtctgtgcttttgcatgtgaccagggttgactaaactcctgccaggatgtcttgccagcaaaaccagcagcagtgccagccccctcccaaatgtcctcccaagtgtaccccaaaatgtccacctaagtgtccccccaaatgcccaccacagtgcccagctccatgttcccctgcagtctcttcctgctgtggtcccagctctgggagctgctgtggtcccagctctgggggctgctgcagctctgggggtggtggctgctgcctgagccaccacaggccccgtctcttccaccggcgccggcaccagagccccgattgctgtgagagtgaaccttctggggcctctggctgctgccacagctctgggggctgctgctgacctgggctgcagaagagctctggtactgaatggtcaaaaacctgctacagcctgatgcttaactatttccccttcctttcattccactcatgggtggacagggaccacaaagactcatggggcttccccagaactttgtgcttgatggagcaccccagatggaagccttctttttctcctttacctcatattgtaataaagctctgatttctgactcttta

SEQ ID NO: 300 - protein, 110 aa, Homo sapiens
MSCQQNQQQCQPPPKCPPKCTPKCPPKCPPKCPPQCPAPCSPAVSSCCGPSSGSCCGPSSGGCCSSGGGGCCLSHHRPRLFHRRRHQSPDCCESEPSGASGCCHSSGGCC

SEQ ID NO: 301 - DNA, 614 bp, Homo sapiens
cagggacgtgtctgtgctcctgcgtgtgaccagggttgactaaactcctgccagcatgtcttgccagcaaaaccagcagcagtgccagccccctcccaagtgtcctcccaagtgtaccccaaaatgtccacctaagtgtccccccaaatgcccaccacagtgcccagctccatgtttccctgcagtctcttcttgctgtggtcccagctctgggagctgctgtggtcccagctctgggggctgctgcagctctggggctggtggctgctccctgagccaccacaggccccgtctcttccaccggcgccggcaccagagccccgactgctgtgagagtgaaccttctgggggctctggctgctgccacagctctgggggctgctgctgacctgggctacagaagagctcttgggactgaatggccaagaacctgctacggcctgatggatactctttccacttcctctcattccattcattggttggcagagaccacaaagactcatggggctttcctggaagaacttcgtgcttgatgtaacaccccaattgcaagtcttcttttcctcctttacctcatgttataataaagctctgatctctgactcactaaa

SEQ ID NO: 302 - protein, 110 aa, Homo sapiens
MSCQQNQQQCQPPPKCPPKCTPKCPPKCPPKCPPQCPAPCFPAVSSCCGPSSGSCCGPSSGGCCSSGAGGCSLSHHRPRLFHRRRHQSPDCCESEPSGGSGCCHSSGGCC

SEQ ID NO: 303 - DNA, 619 bp, Homo sapiens
cagggacgtgtctgtgctcctgcgtgtgaccagggttgactaaactctgccaggatgtcttgccagcaaaaccagcagcagtgccagccccctcccaagtgtcctcccaagtgtaccccaaaatgtccacctaagtgtccccctaaatgcctgccccagtgcccagctccatgttcccctgcagtctcttcttgctgtggtcccatctctgggggctgctgtggtcccagctctgggggctgctgcaactctggggctggtggctgctgcctgagccaccacaggccccgtctcttccaccggcgccggcaccagagccccgactgctgtgagagtgaaccttctgggggctctggctgctgccacagctctgggggctgctgctgacctgggctaagaagaactctttggacagaatgtttaagaacctcctacagcctgatgcttaaccctttccatttcctctcattccattcatgggtggacagcgaccacaaagactcatggggcttccctgggagaactttgcacttgatggaacacctcaattgcaggttttgttttcctcctttacctcatgttgtaataaagctctgatttctgactcacaaaaaaaaaa

SEQ ID NO: 304 - protein, 110 aa, Homo sapiens
MSCQQNQQQCQPPPKCPPKCTPKCPPKCPPKCLPQCPAPCSPAVSSCCGPISGGCCGPSSGGCCNSGAGGCCLSHHRPRLFHRRRHQSPDCCESEPSGGSGCCHSSGGCC

SEQ ID NO: 305 - DNA, 592 bp, Homo sapiens
ggacgtgtctgtgctcctgtgtgtgaccagggttgaaaaagtcgcactgagatgtcctgccagcaaaaccagcagcagtgccagccccctcccaagtgccccccaaaatgcccacccaagtgtcctccaaagtgccgacctcagtgcccagccccatgcccacctccagtctcttcctgctgtggtcccagctctgggggctgctgcggctccagctctgggggctgctgcagctctgggggtggcggctgctgcctgagccaccacaggccccgtctcttccaccggcaccggcaccagagccccgattgttgtgagtgtgaaccttctgggggctctggctgctgccacagctctggggactgctgctgaccagacctcgaacatcacagagcaacccttatggagaaacttgcaaccaggacctgtcccagagtgatgcttctcctgcccctttttctcctttccttgggctgacacaccttgtgaggtgttttgtctgttgtcatggcccaagagcccatcctggatcctgatcttaccttcccactttacctcatacaacaataaagctcttttgcctcttcgtgaa

SEQ ID NO: 306 - protein, 106 aa, Homo sapiens
MSCQQNQQQCQPPPKCPPKCPPKCPPKCRPQCPAPCPPPVSSCCGPSSGGCCGSSSGGCCSSGGGGCCLSHHRPRLFHRHRHQSPDCCECEPSGGSGCCHSSGDCC

SEQ ID NO: 307 - DNA, 300 bp, Homo sapiens
atgtcctgccagcagaaccaacagcagtgccagccccctcccaagtgtcctatccccaagtatcccccaaaatgtccctcaaagtgtgcatcctcatgcccacctccaatctcttcctgctgtggctccagctctgggggctgtggttgctgcagctctgagggaggtggctgctgcctgagccaccacagacaccataggtcccactgccacagacccaagagctccaattgctatggcagtggcagtggccagcagtctgggggttctggctgctgctctggagggggctgttgctga

SEQ ID NO: 308 - protein, 99 aa, Homo sapiens
MSCQQNQQQCQPPPKCPIPKYPPKCPSKCASSCPPPISSCCGSSSGGCGCCSSEGGGCCLSHHRHHRSHCHRPKSSNCYGSGSGQQSGGSGCCSGGGCC

SEQ ID NO: 309 - DNA, 357 bp, Homo sapiens
atgtcttgccagcagagccagcagcagtgccagccccctcccaagtgcactcccaagtgccctcccaagtgccccacaccgaagtgccccccaaagtgtccccctaagtgccctcctgtctcttcctgctgcagcgtcagctccggaggctgctgtggctccagctctgggggctgctgcagctctgggggtggtggctgctgcagctctgggggaggcggctgttgcctgagccaccacagacggcgtaggtcccaccgccacagaccccagagctctgactgctgcagccagccctcagcgggctccagctgctgcggagggggcagtggccagcactctggaggctgctgctga

SEQ ID NO: 310 - protein, 118 aa, Homo sapiens
MSCQQSQQQCQPPPKCTPKCPPKCPTPKCPPKCPPKCPPVSSCCSVSSGGCCGSSSGGCCSSGGGGCCSSGGGGCCLSHHRRRRSHRHRPQSSDCCSQPSAGSSCCGGGSGQHSGGCC

SEQ ID NO: 311 - DNA, 1210 bp, Homo sapiens
gccgaaggaccctgtgctgcctgtgactttgctcctaagtacctactgccgagatgtcctgccagcagagccagcagcagtgccagccccctcccaagtgcactcccaagtgccctcccaagtgtcccacccccaaatgccctccaaagtgtccccctaagtgccctccagtctcttcctgctgcagtgtcagctccggaggctgctgtggctccagctctgggggcagctgtggctccagctctgggggctgctgcagctctgggggaggtggctgctgcctgagccaccacaggcaccacaggtcccaccgtcacagaccccagagctctgactgctgcagccagccctcagggggctccagctgctgtggagggggcagcggccagcactctggaggctgctgctgaagtggaccttgacttcctcttccttctgattctgcctgaatagctgagaggttccagcaaaagcttgaagtcttgcctggagaatccctctgctctggtgtcaggaaacccaaaatctttctccttaatggcatttagagactttcttctgcagatccatggctgccctgggaactccaaagcacacacctacttcctccccagctcacgctgctgtattctgtgctgcctgaactgaagaaataaaatccagaatctgccccccaacttgctaccagcctgcttgattttcctgtttgtgtcatccttgttctgctcccctgtgtctgctggtggctgctgaggccttggtggacagaggatggggaaaggggtcaggaggaaaaagcttgcatttctgtgtgttttgtgttttttcttctttcggtgttttccttttaaaccaagggactgaaatagcattgagaaatatttttctttcaaattctggttcctttcacctatgtaaccgcatccctcaggcatggccaggaggccgacttcatcctccttcccactatcacctcttcattcttgtgttcctcgttccccactccttccactaacaatctccctggactcctcctccatactgtatgtgcatgcattcacacacacatatgtacatgcacatagatgagatgaatctgcattgtaaaaaaattaaatcacatttagtgctgtataatttgcatgcaataaaattcaataaaattaaatgtaaaattaaaaaaaaaaaaaaaaaaaaaaaaaaaaaaaaa

SEQ ID NO: 312 - protein, 118 aa, Homo sapiens
MSCQQSQQQCQPPPKCTPKCPPKCPTPKCPPKCPPKCPPVSSCCSVSSGGCCGSSSGGSCGSSSGGCCSSGGGGCCLSHHRHHRSHRHRPQSSDCCSQPSGGSSCCGGGSGQHSGGCC

SEQ ID NO: 313 - DNA, 345 bp, Homo sapiens
atgtcctgccagcagagccagcagcagtgccagccccctcccaagtgcactcccaagtgcactcccaagtgccccgcccctaaatgtccccctaagtgccctccagtctcttcctgctgcagtgtcagctccggaggctgctgtggctccagctctgggggcggctgtggctccaactctgggggctgctgcagctctgggggtggtggctgctgcctgagccaccacaggcgccacaggtcccaccgtcgcagaccccagagctctgactgctgcagccagccctcggggggctccagctgctgcggtgggggcagcagccagcactctggaggctgctgctga

SEQ ID NO: 314 - protein, 114 aa, Homo sapiens
MSCQQSQQQCQPPPKCTPKCTPKCPAPKCPPKCPPVSSCCSVSSGGCCGSSSGGGCGSNSGGCCSSGGGGCCLSHHRRHRSHRRRPQSSDCCSQPSGGSSCCGGGSSQHSGGCC

SEQ ID NO: 315 - DNA, 695 bp, Homo sapiens
gctgaaggaccctgtgctgcctgtgaccccgctcctgaatccgccaccaagatgtcctgccagcagagccagcagcagtgccagccccctcccaagtgcacccccaagtgccctcccaagtgccccaccccaaagtgtcccccaaagtgtccccctaagtgccctcctgtctcttcctgctgcagtgtcagctccggaggctgctgtggctccagctctgggggcagctgtggctccagctctgggggatgctgcagttctgggggaggtggctgctgcctgagccaccacaggcgccgtaggtcccactgccacagaccccagagctctggctgctgcagccagccctcggggggctccagctgctgtggcggggggagtggccagcactctggaggctgctgctgaagtggaccctgagcctagaagagcagaatccaggaccgcaaactgccaaggacatcccccttctcctactaggcctgcctgagaggctcacaggtccaagggaaagctctgaacttgccaagagcatatcttttccctggagtccagaaactcagatcctctcctggatctccattcactggccttggacctcacctttgtggctaccctcccacgctctgtctaagcccctagcttactcaatgtcatttgcagcgtgcatctgctgattaaaggactaaaacaag

SEQ ID NO: 316 - protein, 118 aa, Homo sapiens
MSCQQSQQQCQPPPKCTPKCPPKCPTPKCPPKCPPKCPPVSSCCSVSSGGCCGSSSGGSCGSSSGGCCSSGGGGCCLSHHRRRRSHCHRPQSSGCCSQPSGGSSCCGGGSGQHSGGCC

SEQ ID NO: 317 - DNA, 1197 bp, Homo sapiens
gttctgaacttctatgtccttacaacaaggtaatctagaaaattcttccaagagagaatgactgtttccccttgagaaacaattttatttccaaacccctttctagattgttttcatgattcaggtgtgtagttgaagcagaatgtctcctctacatactacatgcttgattttgagaatactttcttaatatcttttggcttcggttttctaattataaaatagttgaaaatgctttatgattttataagtatataaaaagcattaggttcaaaacagaggctataagtgtgtttagccaactattagacacaatgaaacttcccgtgattaattagctacaactacactaagcagttcatcaaaatgtagggattagaaatgatgctgaaagggcaagaataggccggggtggcctctacctgggtctaacttgctgtctgactctctctcagctcctgaacacccgcaccaagatgtcctgccagcagaaccagcagcagtgccagccccctcccaagtgcatccccaagtgccctcccaagtgcctcacccctagatgccccccaaagtgtccccctaagtgtcctccagtctcttcctgctgcagtgtcagctccggaggctgctgtggctccagctctgggggaagctgtggctccagctctgggggttgctgcagttctgggggaggtggctgctgcctgagccaccacaggcgccgtaggtcccactgccacagaccccagagctctggctgctgcagccagccctccgggggctccagctgctgtggaggagggagtggccagcactctggaggctgctgctaaagtggatcctgagcctagaagaacacaaatggccaaatatttcccttccgtcttccttctccttctgggcctgcccatgttgttgagaggtcttggtgagggctcaactcaagcatagaggattcttctgtcttggagttcagaggcccaaaacttctcccccaaagccaagccatttaatgacctcagtttgcgtatgtgtggttgctctgggaagcccaaagcacagacctatatccctttgcagcttgtctttttgcatagctcagcctgatgtgaaacaataaaaccagaaatatgcattccaaaaaaaaaaaaaaaaaaaaaaaaaaaaaaaaaaaaaaaaaaaaaaaaaaaaaaaaaa

SEQ ID NO: 318 - protein, 118 aa, Homo sapiens
MSCQQNQQQCQPPPKCIPKCPPKCLTPRCPPKCPPKCPPVSSCCSVSSGGCCGSSSGGSCGSSSGGCCSSGGGGCCLSHHRRRRSHCHRPQSSGCCSQPSGGSSCCGGGSGQHSGGCC

SEQ ID NO: 319 - DNA, 333 bp, Homo sapiens
atgtcctgccagcagagccagcagcagtgccagccccctcccaagtgcacccccaagtgccctcccaagtgccccactcctaagtgccccccaaagtgtccccctaagtgccctccagtctcttcctgctgcagtgtcagctccggaggctgctgtggctccagctctgggggcggctgcagctctgggggaggtggctgctgcctgagccaccacaggcgccacaggtcccaccgtcacagactccagagctctggctgctgcagccagccctcgggaggctccagctgctgtggaggggacagcggccagcactctggaggctgctgctga

SEQ ID NO: 320 - protein, 110 aa, Homo sapiens
MSCQQSQQQCQPPPKCTPKCPPKCPTPKCPPKCPPKCPPVSSCCSVSSGGCCGSSSGGGCSSGGGGCCLSHHRRHRSHRHRLQSSGCCSQPSGGSSCCGGDSGQHSGGCC

SEQ ID NO: 321 - DNA, 784 bp, Homo sapiens
agaaggctttggcttctgatagtcatggactcactaggctgctgaggaagatcaataatacctactggaatcagtcatgagaagtcaagcatggaaattgtgaattgtgtgtgtggccagaccagtacctccaagtgttcagaagatgtgtgaccagacaaaacacagtaaatgctgcccagcaaaaggcaatcaatgctgcccaccacagcagaaccagtgctgccagtcaaaaggcaatcaatgctgcccaccaaaacagaaccagtgctgccagccaaaaggcagtcaatgctgcccaccaaaacacaatcactgctgccagccaaaacccccatgctgcattcaggccaggtgctgtggtttggagaccaagcctgaagtctcaccccttaacatggagtctgagcccaactcaccgcaaactcaggacaagggctgtcaaacccagcagcagccccatagcccacaaaatgagtccaggccaagcaaatgagagcagaagaagtcaaacaaagaagaagtccctggggccatgcctttcactttgtagggtgggggattactgagagtcaggctagacctgtgtttagagaagcagttttcacagtgactaccatttccacccaatgagaggctcctatttcccatcatagctccctaccctagggaggcctccatctggaaatgggaggatgaagaggctagaatcatctttcctagtgatcctgacatttagacagcacagaaataaagagcaataaaaagaaaaaaaaaaaaaaaa

SEQ ID NO: 322 - protein, 116 aa, Homo sapiens
MCDQTKHSKCCPAKGNQCCPPQQNQCCQSKGNQCCPPKQNQCCQPKGSQCCPPKHNHCCQPKPPCCIQARCCGLETKPEVSPLNMESEPNSPQTQDKGCQTQQQPHSPQNESRPSK

SEQ ID NO: 323 - DNA, 2165 bp, Homo sapiens
ctctgcctcagccttactgtgagtctggttgacagtagcttctaagatgtcccagcaacacacactgccagtgaccctctcccctgccctcagtcaggagctcctcaagactgttcctcctccagtcaatacccatcaggagcaaatgaaacagccaactccactgcctcccccatgccagaaggtgcctgtcgagctcccagtggaggtcccatcaaagcaagaggaaaagcacatgactgctgtaaagggactgcctgagcaagaatgtgagcaacagcagaaggagccacaggagcaggagctgcagcaacagcactgggaacagcatgaggaatatcagaaagcagaaaacccagagcagcagcttaagcaggagaaaacacaaagggatcagcagctaaacaaacagctggaagaagagaagaagctcttagaccagcaactggatcaagagctagtcaagagagatgagcaactgggaatgaagaaagagcaactgttggagctcccagagcagcaggaggggcacctgaagcacctagagcagcaggagggacagctgaagcacccggagcagcaggaggggcagctggagctcccagagcagcaggaggggcagctggagctcccagagcagcaggaggggcagctggagctcccagagcagcaggaggggcagctggagctcccagagcagcaggaggggcagctggagctcccagagcagcaggaggggcagctggagctcccacagcagcaggaggggcagctggagctctctgagcagcaggaggggcagctggagctctctgagcagcaggagggacagctgaagcacctggagcaccaggaggggcagctggaggtcccagaggagcagatggggcagctgaagtacctggaacagcaggaggggcagctgaagcacctggatcagcaggagaagcagccagagctcccagagcagcagatggggcagctgaagcacctggagcagcaggaggggcagcctaagcatctggagcagcaggaggggcaactggagcagctggaggagcaggaggggcagctgaagcacctggagcagcaggaggggcagctggagcacctggagcaccaggaagggcagctggggctcccagagcagcaggtgctgcagctgaagcagctagagaagcagcaggggcagccaaagcacctggaggaggaggaggggcagctgaagcacctggtgcagcaggaggggcagctgaagcatctggtgcagcaggaggggcagctggagcagcaggagaggcaggtggagcacctggagcagcaggtggggcagctgaagcacctagaggagcaggagggacaactgaagcatctggagcagcagcaggggcagttggaggtcccagagcagcaggtggggcagccaaagaacctggagcaggaggagaagcaactggagctcccagagcagcaagagggccaggtgaagcacctggagaagcaggaggcacagctggagctcccagagcagcaggtaggacagccaaagcacctggaacagcaggaaaagcacctagagcacccagagcagcaggacggacaactaaaacatctggagcagcaggaggggcagctgaaggacctggagcagcagaaggggcagctggagcagcctgtgtttgccccagctccaggccaggtccaagacattcaaccagccctgcccacaaagggagaagtattgcttcctgtagagcaccagcagcagaagcaggaggtgcagtggccacccaaacataaataaccacccgcagtgtccagaggccctcagatcgtctcatacaagggaagagagagccactggctccacttatttcgggtccgctaggtggcccgtctcatctgtgaacttgactctgtccctctacatgtctctttaatggggtgagggtgggggagagagggaattattgtccagtgccaaccccaatgaccccaatcccaacctcaggtgagcagagcctctacttgagggactattgttactataggaatccttacttccccagtattgaagctgaatcagtgagtgtgtacaatgatacataataaatcctggaagtcttgggatcctaaaaaaaaaaaaaaaaaaaaaaaaaaaaaaa

SEQ ID NO: 324 - protein, 585 aa, Homo sapiens
MSQQHTLPVTLSPALSQELLKTVPPPVNTHQEQMKQPTPLPPPCQKVPVELPVEVPSKQEEKHMTAVKGLPEQECEQQQKEPQEQELQQQHWEQHEEYQKAENPEQQLKQEKTQRDQQLNKQLEEEKKLLDQQLDQELVKRDEQLGMKKEQLLELPEQQEGHLKHLEQQEGQLKHPEQQEGQLELPEQQEGQLELPEQQEGQLELPEQQEGQLELPEQQEGQLELPEQQEGQLELPQQQEGQLELSEQQEGQLELSEQQEGQLKHLEHQEGQLEVPEEQMGQLKYLEQQEGQLKHLDQQEKQPELPEQQMGQLKHLEQQEGQPKHLEQQEGQLEQLEEQEGQLKHLEQQEGQLEHLEHQEGQLGLPEQQVLQLKQLEKQQGQPKHLEEEEGQLKHLVQQEGQLKHLVQQEGQLEQQERQVEHLEQQVGQLKHLEEQEGQLKHLEQQQGQLEVPEQQVGQPKNLEQEEKQLELPEQQEGQVKHLEKQEAQLELPEQQVGQPKHLEQQEKHLEHPEQQDGQLKHLEQQEGQLKDLEQQKGQLEQPVFAPAPGQVQDIQPALPTKGEVLLPVEHQQQKQEVQWPPKHK

SEQ ID NO: 325 - DNA, 766 bp, Homo sapiens
aagggctcagcctcctctcctggggtccagcttgtcgcctctggctcacctgttcctagagcaatgtcttcccagcagcagcagcggcagcagcagcagtgcccaccccagagggcccagcagcagcaagtgaagcagccttgtcagccaccccctgttaaatgtcaagagacatgtgcacccaaaaccaaggatccatgtgctccccaggtcaagaagcaatgcccaccgaaaggcaccatcattccagcccagcagaagtgtccctcagcccagcaagcctccaagagtaaacagaagtaaggatggactggatattaccatcatccaccatcctggctaccagatggaaccttctcttcttccttctcctcttccctccagctcttgagcctaccctcctctcacatctcctcctgcccaagatgtaaggaagcattgtaaggatttcttcccatcgtacccttccccacacataccaccttggcttcttctatatcccaccccgatgctctcccaggtgggtgtgagagagacctcattctctgcaggctccagcgtggccacagctaaggcccatccatttcccaaagtgaggaaagtgtctgggcttcttctggggttccaccctgacaagtagggtcacagaggctggtgcacagtttctgcctcattcctctccatgatgccccctgctctgggcttctctcctgttttccccaataaatatgtgcctcatgtaataaatgtgtctgcttcctgggct

SEQ ID NO: 326 - protein, 79 aa, Homo sapiens
MSSQQQQRQQQQCPPQRAQQQQVKQPCQPPPVKCQETCAPKTKDPCAPQVKKQCPPKGTIIPAQQKCPSAQQASKSKQK

SEQ ID NO: 327 - DNA, 664 bp, Homo sapiens
accaaacccaagggaccacacagcccattctgctccgtataccagaaaaaaacacatttgaagcatgaattctcagcagcagaagcagccttgcaccccaccccctcagcctcagcagcagcaggtgaaacaaccttgccagcctccaccccaggaaccatgcatccccaaaaccaaggagccctgccaccccaaggtgcctgagccctgccaccccaaagtgcctgagccctgccagcccaaggttccagagccctgccagcccaaggtgcctgagccctgcccttcaacggtcactccagcaccagcccagcagaagaccaagcagaagtaatgtggtccacagccatgcccttgaggagctggccactggatactgaacaccctactccattctgcttatgaatcccatttgcctattgaccctgcagttagcatgctgtcaccctgaatcataatcgctcctttgcacctctaaaaagatgtcccttaccctcattctggagggctcctgagcctctgcgtaaggctgaacgtctcactgactgagctagtcttcttgttgctcgggtgcatttgaggatggatttggggaaggatcaagtgaaccatccctagtcttccttcaataaataacttttaactccaaaaaaaaaaaaaaaaa

SEQ ID NO: 328 - protein, 89 aa, Homo sapiens
MNSQQQKQPCTPPPQPQQQQVKQPCQPPPQEPCIPKTKEPCHPKVPEPCHPKVPEPCQPKVPEPCQPKVPEPCPSTVTPAPAQQKTKQK

SEQ ID NO: 329 - DNA, 984 bp, Homo sapiens
accagatcccagaggctgaacacctcgaccttctctgcacagcagatgatccctgagcagctgaagaccagaaaagccactaagactttctgcttaattcaggagcttagaggattcttcaaagagtgtgtccacgatcctttgaagcatgagttcttaccagcagaagcagacctttaccccaccacctcagcttcaacagcagcaggtgaaacaacccagccagcctccacctcaggaaatatttgttcccacaaccaaggagccatgccactcaaaggttccacaacctggaaacacaaagattccagagccaggctgtaccaaggtccctgagccaggctgtaccaaggtccctgagccaggctgtaccaaggtccctgagccaggttgtaccaaggtccctgagccaggctgtaccaaggtccctgagccaggttgtaccaaggtccctgagccaggctacaccaaggtccctgaaccaggcagcatcaaggtccctgaccaaggcttcatcaagtttcctgagccaggtgccatcaaagttcctgagcaaggatacaccaaagttcctgtgccaggctacacaaagctaccagagccatgtccttcaacggtcactccaggcccagctcagcagaagaccaagcagaagtaatttggtgcacagacaagcccttgagaagccaaccaccagatgctggacaccctcttcccatctgtttctgtgtcttaattgtctgtagaccttgtaatcagcacattgtcaccccaagccatagtctctctcttatttgtatcctaaaaatacgtactataaagcttttgttcacacacactctgaagaatcctgtaagcccctgaattaagcagaaagtcttcatggcttttctggtcttcggctgctcagggttcatctgaagattcgaatgaaaagaaatgcatgtttcctgctcttccctcattaaattgcttttaattcca

SEQ ID NO: 330 - protein, 169 aa, Homo sapiens
MSSYQQKQTFTPPPQLQQQQVKQPSQPPPQEIFVPTTKEPCHSKVPQPGNTKIPEPGCTKVPEPGCTKVPEPGCTKVPEPGCTKVPEPGCTKVPEPGCTKVPEPGYTKVPEPGSIKVPDQGFIKFPEPGAIKVPEQGYTKVPVPGYTKLPEPCPSTVTPGPAQQKTKQK

SEQ ID NO: 331 - DNA, 641 bp, Homo sapiens
accagttctaagggaccatacagagtattcctctcttcacaccaggaccagtcactgttgcagcatgagttcccagcagcagaagcagccttgcaccccaccccctcagcttcagcagcagcaggtgaaacagccttgccagcctccacctcaggaaccatgcatccccaaaaccaaggagccctgccaccccaaggtgcctgagccctgccaccccaaagtgcccgagccctgccagcccaaggttccagagccatgccaccccaaggtgcctgagccctgcccttcaatagtcactccagcaccagcccagcagaagaccaagcagaagtaatgtggtccacagccatgcccttgaggagccggccaccagatgctgaatcccctatcccattctgcgtatgagtcccatttgccttgcaattagcattctgtctcccccaaaaaagaatgtgctatgaagctttctttcctacacactctgagtctctgaatgaagctgaaggtcttagtaccagagctagttttcagctgctcagaattcatctgaagagagacttaagatgaaagcaaatgattcagctcccttatacccccattaaattcactttcaattccaaaaaaaaaaaaaaaaaaaaaaa

SEQ ID NO: 332 - protein, 89 aa, Homo sapiens
MSSQQQKQPCTPPPQLQQQQVKQPCQPPPQEPCIPKTKEPCHPKVPEPCHPKVPEPCQPKVPEPCHPKVPEPCPSIVTPAPAQQKTKQK

SEQ ID NO: 333 - DNA, 662 bp, Homo sapiens
actcctggtactctagcaccgatctgctttggagaaactggttaattctgagactccagcaggatgtcttatcaacagcagcagtgcaagcagccctgccagccacctcctgtgtgccccacgccaaagtgcccagagccatgtccacccccgaagtgccctgagccctgcccaccaccaaagtgtccacagccctgcccacctcagcagtgccagcagaaatatcctcctgtgacaccttccccaccctgccagccaaagtatccaccgaagagcaagtaacagcttcaggattcatcaggagcatgagaggataaggataattggctcacctcgttccacagctccaccttcatcttctcatcaaagcttatcatggattcatagggagcttctttccccttagcctgtgatctgcccatgatgttccctgatagcaaaaggtttcctttctaaggctgccatactgccactgtccaggtggagactgagcaaaggaaccttggctttgtcagttcccagagcttcagcagaaagagctgcagctgtgtgcctgggaaccatcagagaattctgttgatgtgttctgtgtctgtctttcacctgggcatgagcttctaccacctgtgcaattgtcacttttctttcactccctgaataaa

SEQ ID NO: 334 - protein, 72 aa, Homo sapiens
MSYQQQQCKQPCQPPPVCPTPKCPEPCPPPKCPEPCPPPKCPQPCPPQQCQQKYPPVTPSPPCQPKYPPKSK

SEQ ID NO: 335 - DNA, 692 bp, Homo sapiens
aaacccctggtacctgagcactgatctgccttggagaacctgatcctgagactccagcaggatgtcttatcaacagcagcagtgcaagcagccctgccagccacctcctgtgtgccccacgccaaagtgcccagagccatgtccacccccgaagtgccctgagccctgcccaccaccaaagtgtccacagccctgcccacctcagcagtgccagcagaaatatcctcctgtgacaccttccccaccctgccagtcaaagtatccaccgaagagcaagtaacagcttcagaattcatcaggaccaagaaaggataaggatatttggctcacctcgttccacagctccaccttcatcttctcatcaaagcctaccatggatacacagggagcttctttctccttagccagtaatctgcccatgatgatccctgacagcaaaaagtttcttttctgaggctgccatactgccactgtccaggtggagactgagcaaaggaagtcctgggctgtgccagctcccagagcttcggaagaaagagcagcagctctctccctgggaaccatcagagaattctgttgatgtgttctgtgtctgtctgtcacctggtcacgagcttctaccacctttgcaattgtcacttatctttcactccctgaataaagtatctatgcatataaaaaaaaaaaaaaaa

SEQ ID NO: 336 - protein, 72 aa, Homo sapiens
MSYQQQQCKQPCQPPPVCPTPKCPEPCPPPKCPEPCPPPKCPQPCPPQQCQQKYPPVTPSPPCQSKYPPKSK

SEQ ID NO: 337 - DNA, 645 bp, Homo sapiens
atgctgttggcttgtatctctgatcaggtaccaccactggaaggtacacagagctatcagcaaggtttgttcagtgttcatgctgttacccgctgtactccttgtgaggtgaagaagcccctgaagaacttcaagctttgcctgaaaaccttcacagacttcacctgcccttatagcctcttctacagcactcggtcccaggacaatgagctgcttctccttgtcaacaaaatgggaatgtatctgctgcacattggaaatgctgcagtcactttcaatggccccaccccctgccctcgatctccttatgcttcgacccatgtcaatgtgagctgggagtctgcctctggaattgctacactctgggcaaatgggaagctggtggggaggaagggtgtgtggaaggggtactctgtgggagaagaggctaagatcatcctgggacaagagcaggattcctttgggggacattttgatgaaaatcaatcctttgttggggtgatatgggatgtgtttttgtgggatcatgtgctccctccaaaggagatgtgtgactcctgttacagcggcagcctcctgaatcggcataccctgacttatgaagataatggctatgtggtaactaagcccaaggtgtgggcttaa

SEQ ID NO: 338 - protein, 214 aa, Homo sapiens
MLLACISDQVPPLEGTQSYQQGLFSVHAVTRCTPCEVKKPLKNFKLCLKTFTDFTCPYSLFYSTRSQDNELLLLVNKMGMYLLHIGNAAVTFNGPTPCPRSPYASTHVNVSWESASGIATLWANGKLVGRKGVWKGYSVGEEAKIILGQEQDSFGGHFDENQSFVGVIWDVFLWDHVLPPKEMCDSCYSGSLLNRHTLTYEDNGYVVTKPKVWA

SEQ ID NO: 339 - DNA, 1191 bp, Homo sapiens
agtctccagcatcctccacctgtctaccaccgagcatgggcctatatttgaagccttagatctctccagcacagtaagcaccaggagtccatgaagaagatggctcctgccatggaatcccctactctactgtgtgtagccttactgttcttcgctccagatggcgtgttagcagtccctcagaaacctaaggtctccttgaaccctccatggaatagaatatttaaaggagagaatgtgactcttacatgtaatgggaacaatttctttgaagtcagttccaccaaatggttccacaatggcagcctttcagaagagacaaattcaagtttgaatattgtgaatgccaaatttgaagacagtggagaatacaaatgtcagcaccaacaagttaatgagagtgaacctgtgtacctggaagtcttcagtgactggctgctccttcaggcctctgctgaggtggtgatggagggccagcccctcttcctcaggtgccatggttggaggaactgggatgtgtacaaggtgatctattataaggatggtgaagctctcaagtactggtatgagaaccacaacatctccattacaaatgccacagttgaagacagtggaacctactactgtacgggcaaagtgtggcagctggactatgagtctgagcccctcaacattactgtaataaaagctccgcgtgagaagtactggctacaattttttatcccattgttggtggtgattctgtttgctgtggacacaggattatttatctcaactcagcagcaggtcacatttctcttgaagattaagagaaccaggaaaggcttcagacttctgaacccacatcctaagccaaaccccaaaaacaactgatataattactcaagaaatatttgcaacattagtttttttccagcatcagcaattgctactcaattgtcaaacacagcttgcaatatacatagaaacgtctgtgctcaaggatttatagaaatgcttcattaaactgagtgaaactggttaagtggcatgtaatagtaagtgctcaattaacattggttgaataaatgagagaatgaatagattcatttattagcatttgtaaaagagatgttcaatttcaataaaataaatataaaaccatgtaacagaatgcttctgagtaaaaaaaaaaaaaaaaaaaaaaaaaaa

SEQ ID NO: 340 - protein, 257 aa, Homo sapiens
MAPAMESPTLLCVALLFFAPDGVLAVPQKPKVSLNPPWNRIFKGENVTLTCNGNNFFEVSSTKWFHNGSLSEETNSSLNIVNAKFEDSGEYKCQHQQVNESEPVYLEVFSDWLLLQASAEVVMEGQPLFLRCHGWRNWDVYKVIYYKDGEALKYWYENHNISITNATVEDSGTYYCTGKVWQLDYESEPLNITVIKAPREKYWLQFFIPLLVVILFAVDTGLFISTQQQVTFLLKIKRTRKGFRLLNPHPKPNPKNN

SEQ ID NO: 341 - DNA, 990 bp, Homo sapiens
atgccaaagctaaattccacttttgtgactgagttcctctttgaaggtttctccagcttcaggcggcagcacaaacttgtcttctttgttgtcttcctaactttgtacctgctgactctctctggcaatgtgattatcatgaccattattcgcctggaccatcatcttcacacccccatgtacttcttcctgtgcatgctatccatctctgagacctgctacactgtggccatcattccccatatgctttctggtctcttgaatcctcatcagcccattgccacccaaagctgtgccactcagctcttcttctatctcacctttggcatcaacaactgcttcctgctcacagtcatgggatatgaccgctatgtggccatctgcaaccccctaaggtattcagtcatcatgggtaagagggcctgtatccaactggcctctggatcactggggattggccttggcatggccattgtccaagtaacatctgtgtttggcctgccattctgtgatgcctttgtcatctcccacttcttctgtgatgtgagacacctgctgaagctggcctgcacagacaccactgtcaatgagataatcaactttgttgtcagcgtctgtgtccttgttctacctatgggcctggtctttatctcctatgtcctcatcatctccaccattcttaagattgcctcagctgaaggtcagaagaaggcctttgccacctgcgcctcccacctcacagtggtcatcatccactatggctgtgcctccatcatctacctgaagcctaagtcccagagttccctgggacaggacagactcatctcagtgacctacactcatcactcccctactgaaccctgttgtgtacagcctgaagaacaaggaggtcaaagatgctctgcacagagccgtggggcaaaaaactctgtctccttaatgaagagaggttgtgaaggcttttcctttgcgtttataaatatgtactaa

SEQ ID NO: 342 - protein, 329 aa, Homo sapiens
MPKLNSTFVTEFLFEGFSSFRRQHKLVFFVVFLTLYLLTLSGNVIIMTIIRLDHHLHTPMYFFLCMLSISETCYTVAIIPHMLSGLLNPHQPIATQSCATQLFFYLTFGINNCFLLTVMGYDRYVAICNPLRYSVIMGKRACIQLASGSLGIGLGMAIVQVTSVFGLPFCDAFVISHFFCDVRHLLKLACTDTTVNEIINFVVSVCVLVLPMGLVFISYVLIISTILKIASAEGQKKAFATCASHLTVVIIHYGCASIIYLKPKSQSSLGQDRLISVTYTHHSPTEPCCVQPEEQGGQRCSAQSRGAKNSVSLMKRGCEGFSFAFINMY

SEQ ID NO: 343 - DNA, 963 bp, Homo sapiens
atgcttttatgtttcagatttgggaaccaatccatgaaaagagagaactttactctcatcactgactttgttttccaaggtttctctagcttccatgagcagcagatcaccctttttggcgtgttccttgcactatacatcttaaccttagcaggcaatatcatcattgtgaccatcatccgaattgatcttcatcttcacacacccatgtacttcttcctgagcatgctgtccacttcagagactgtatatacattggtcattctcccaagaatgctctccagcctcgtaggtatgagccagcccatgtcattggcagggtgtgccacacagatgttcttttttgtaacctttggcatcactaactgcttcctgctcacagcaatgggatatgaccgctatgtggccatctgcaaccccctgagatacatggttattatgaacaagaggctgcgtatccaacttgtcctgggggcctgcagcattgggctgattgtagcaataacgcaagtgacatctgtattcaggttacccttctgtgctagaaaggtgccccacttcttctgtgacatccgccctgtgatgaagctctcctgcattgacaccactgtcaatgaaatcctgactttgattatcagtgtgctggtgcttgttgtacctatgggtctggttttcatttcttatgttctcattatctctacaatcctcaagattgcttcagttgagggccggaagaaggcttttgccacctgtgcatcccacctcactgtggtcattgtccactacagctgtgcctccattgcctacctcaagcccaagtcagagaacaccagagaacatgaccagctgatctcggtgacctacactgtcatcactcccctactgaaccctgtggtatacaccctgagaaataaagaggtcaaagatgctctgtgcagggctgttggtgggaagttttcctga

SEQ ID NO: 344 - protein, 320 aa, Homo sapiens
MLLCFRFGNQSMKRENFTLITDFVFQGFSSFHEQQITLFGVFLALYILTLAGNIIIVTIIRIDLHLHTPMYFFLSMLSTSETVYTLVILPRMLSSLVGMSQPMSLAGCATQMFFFVTFGITNCFLLTAMGYDRYVAICNPLRYMVIMNKRLRIQLVLGACSIGLIVAITQVTSVFRLPFCARKVPHFFCDIRPVMKLSCIDTTVNEILTLIISVLVLVVPMGLVFISYVLIISTILKIASVEGRKKAFATCASHLTVVIVHYSCASIAYLKPKSENTREHDQLISVTYTVITPLLNPVVYTLRNKEVKDALCRAVGGKFS

SEQ ID NO: 345 - DNA, 6940 bp, Homo sapiens
ggggatgactctctctcttgagtaggcacacactcccttttctcgggtgtgtactttttgctttgtgatacatctctgcactttcagtattttccaactcatccttaaattccttctcacaacagtgtcaagagcctggacgccagccagaattgaggtcctacgggtgtttggggacctccccaagcccacgagtatcaatggcagtatcaattgtctgtgacagtgattaaggagcaaaacacttggaacccacaagactcccagaaggtgaagttaagagctcccagactcataaggttattagaacagcaaactggcaccccaaagaactttacggagacttgcaacctatcaacaagttggatgagggattaaaagccttcaacaaccaacaaccccaagcatcaaactgaaggaaacattctaaccttcacagacagactggaggctggatggggacctggctgaagacatctggagaatgaaagttaagtaccagcttgcatttttgtgcccctagattatttttgcattttaaaataagaagcatcaaattgcgtgtctctgtgtaaaagttctagcaatttgttttaaggtgaacttattttggcttagggactacaaaaagagaaggtaattcctagggaaggaagaagagaaagaaatgaaaattagagaataagattattttgaatgacttcaggtagcgaggagtgtgtgtttgtgagtgtgtatttgagagacttggctcatgcctgtgggtcttctcttctagtatcagtgaggggagggattactgaagaagaaggggggaaaaaaaaagaaagaaatctgagctttctgggaggaaattcaaaggaaccaagagaaattaacttcgttctgcaaggactaaagtacagcaagaggagagaggtcaagcgagaagcgtgcgggaagcacatgccctggggaggcatagaagccacactggcagagcggccagcacaggtagccagcagaggcattcttggggctatttgaaaaagtttggtctgtgaacaaaacagtttccctggtgactgcaaatccattgctagctgcctctttctcgtctgcccatcactctggtgtggtacccagaagttgacttctggttctgtagaaagagctaggggaggtatgatgtgcttaaagatcctaagaataagcctggcgattttggctgggtgggcactctgttctgccaactctgagctgggctggacacgcaagaaatccttggttgagagggaacacctgaatcaggtgctgttggaaggagaacgttgttggctgggggccaaggttcgaagacccagagcttctccacagcatcacctctttggagtctaccccagcagggctgggaactacctaaggccctaccccgtgggggagcaagaaatccatcatacaggacgcagcaaaccagacactgaaggaaatgctgtgagccttgttcccccagacctgactgaaaatccagcaggactgaggggtgcagttgaagagccggctgccccatgggtaggggatagtcctattgggcaatctgagctgctgggagatgatgacgcttatctcggcaatcaaagatccaaggagtctctaggtgaggccgggattcagaaaggctcagccatggctgccactactaccaccgccattttcacaaccctgaacgaacccaaaccagagacccaaaggaggggctgggccaagtccaggcagcgtcgccaagtgtggaagaggcgggcggaagatgggcagggagactccggtatctcttcacatttccaaccttggcccaagcattcccttaaacacagggtcaaaaagagtccaccggaggaaagcaaccaaaatggtggagagggctcctaccgagaagcagagacctttaactcccaagtaggactgcccatcttatacttctctgggaggcgggagcggctgctgctgcgtccagaagtgctggctgagattccccgggaggcgttcacagtggaagcctgggttaaaccggagggaggacagaacaacccagccatcatcgcaggtgtgtttgataactgctcccacactgtcagtgacaaaggctgggccctggggatccgctcagggaaggacaagggaaagcgggatgctcgcttcttcttctccctctgcaccgaccgcgtgaagaaagccaccatcttgattagccacagtcgctaccaaccaggcacatggacccatgtggcagccacttacgatggacggcacatggccctgtatgtggatggcactcaggtggctagcagtctagaccagtctggtcccctgaacagccccttcatggcatcttgccgctctttgctcctggggggagacagctctgaggatgggcactatttccgtggacacctgggcacactggttttctggtcgaccgccctgccacaaagccattttcagcacagttctcagcattcaagtgaggaggaggaagcgactgacttggtcctgacagcgagctttgagcctgtgaacacagagtgggttccctttagagatgagaagtacccacgacttgaggttctccagggctttgagccagagcctgagattctgtcgcctttgcagcccccactctgtgggcaaacagtctgtgacaatgtggaattgatctcccagtacaatggatactggccccttcggggagagaaggtgatacgctaccaggtggtgaacatctgtgatgatgagggcctaaaccccattgtgagtgaggagcagattcgtctgcagcacgaggcactgaatgaggccttcagccgctacaacatcagctggcagctgagcgtccaccaggtccacaattccaccctgcgacaccgggttgtgcttgtgaactgtgagcccagcaagattggcaatgaccattgtgaccccgagtgtgagcacccactcacaggctatgatgggggtgactgccgcctgcagggccgctgctactcctggaaccgcagggatgggctctgtcacgtggagtgtaacaacatgctgaacgactttgacgacggagactgctgcgacccccaggtggctgatgtgcgcaagacctgctttgaccctgactcacccaagagggcatacatgagtgtgaaggagctgaaggaggccctgcagctgaacagtactcacttcctcaacatctactttgccagctcagtgcgggaagaccttgcaggtgctgccacctggccttgggacaaggacgctgtcactcacctgggtggcattgtcctcagcccagcatattatgggatgcctggccacaccgacaccatgatccatgaagtgggacatgttctgggactctaccatgtctttaaaggagtcagtgaaagagaatcctgcaatgacccctgcaaggagacagtgccatccatggaaacgggagacctctgtgccgacaccgcccccactcccaagagtgagctgtgccgggaaccagagcccactagtgacacctgtggcttcactcgcttcccaggggctccgttcaccaactacatgagctacacggatgataactgcactgacaacttcactcctaaccaagtggcccgaatgcattgctatttggacctagtctatcagcagtggactgaaagcagaaagcccacccccacccccattccacctatggtcatcggacagaccaacaagtccctcactatccactggctgcctcctattagtggagttgtatatgacagggcctcaggcagcttgtgtggcgcttgcactgaagatgggacctttcgtcagtatgtgcacacagcttcctcccggcgggtgtgtgactcctcaggttattggaccccagaggaggctgtggggcctcctgatgtggatcagccctgcgagccaagcttacaggcctggagccctgaggtccacctgtaccacatgaacatgacggtcccctgccccacagaaggctgtagcttggagctgctcttccaacacccggtccaagccgacaccctcaccctgtgggtcacttccttcttcatggagtcctcgcaggtcctctttgacacagagatcttgctggaaaacaaggagtcagtgcacctgggccccttagacactttctgtgacatcccactcaccatcaaactgcacgtggatgggaaggtgtcgggggtgaaagtctacacctttgatgagaggatagagattgatgcagcactcctgacttctcagccccacagtcccttgtgctctggctgcaggcctgtgaggtaccaggttctccgcgatcccccatttgccagtggtttgcccgtggtggtgacacattctcacaggaagttcacggacgtggaggtcacacctggacagatgtatcagtaccaagttctagctgaagctggaggagaactgggagaagcttcgcctcctctgaaccacattcatggagctccttattgtggagatgggaaggtgtcagagagactgggagaagagtgtgatgatggagaccttgtgagcggagatggctgctccaaggtgtgtgagctggaggaaggtttcaactgtgtaggagagccaagcctttgctacatgtatgagggagatggcatatgtgaaccttttgagagaaaaaccagcattgtagactgtggcatctacactcccaaaggatacttggatcaatgggctacccgggcttactcctctcatgaagacaagaagaagtgtcctgtttccttggtaactggagaacctcattccctaatttgcacatcataccatccagatttacccaaccaccgtcccctaactggctggtttccctgtgttgccagtgaaaatgaaactcaggatgacaggagtgaacagccagaaggtagcctgaagaaagaggatgaggtttggctcaaagtgtgtttcaatagaccaggagaggccagagcaatttttatttttttgacaactgatggcctagttcccggagagcatcagcagccgacagtgactctctacctgaccgatgtccgtggaagcaaccactctcttggaacctatggactgtcatgccagcataatccactgattatcaatgtgacccatcaccagaatgtccttttccaccataccacctcagtgctgccgaatttctcatccccacgggtcggcatctcagctgtggctctaaggacatcctcccgcattggtctttcggctcccagtaactgcatctcagaggacgaggggcagaatcatcagggacagagctgtatccatcggccctgtgggaagcaggacagctgtccgtcattgctgcttgatcatgctgatgtggtgaactgtacctctataggcccaggtctcatgaagtgtgctatcacttgtcaaaggggatttgcccttcaggccagcagtgggcagtacatcaggcccatgcagaaggaaattctgctcacatgttcttctgggcactgggaccagaatgtgagctgccttcccgtggactgcggtgttcccgacccgtctttggtgaactatgcaaacttctcctgctcagagggaaccaaatttctgaaacgctgctcaatctcttgtgtcccaccagccaagctgcaaggactgagcccatggctgacatgtcttgaagatggtctctggtctctccctgaagtctactgcaagttggagtgtgatgctccccctattattctgaatgccaacttgctcctgcctcactgcctccaggacaaccacgacgtgggcaccatctgcaaatatgaatgcaaaccagggtactatgtggcagaaagtgcagagggtaaagtcaggaacaagctcctgaagatacaatgcctggaaggtggaatctgggagcaaggcagctgcattcctgtggtgtgtgagccaccccctcctgtgtttgaaggcatgtatgaatgtaccaatggcttcagcctggacagccagtgtgtgctcaactgtaaccaggaacgtgaaaagcttcccatcctctgcactaaagagggcctgtggacccaggagtttaagttgtgtgagaatctgcaaggagaatgcccaccacccccctcagagctgaattctgtggagtacaaatgtgaacaaggatatgggattggtgcagtgtgttccccattgtgtgtaatcccccccagtgaccccgtgatgctacctgagaatatcactgctgacactctggagcactggatggaacctgtcaaagtccagagcattgtgtgcactggccggcgtcaatggcacccagaccccgtcttagtccactgcatccagtcatgtgagcccttccaagcagatggttggtgtgacactatcaacaaccgagcctactgccactatgacgggggagactgctgctcttccacactctcctccaagaaggtcattccatttgctgctgactgtgacctggatgagtgcacctgccgggaccccaaggcagaagaaaatcagtaactgtgggaacaagcccctccctccactgcctcagaggcagtaagaaagagaggccgacccaggaggaaacaaagggtgaatgaagaagaacaatcatgaaatggaagaaggaggaagagcatgaaggatcttataagaaatgcaagaggatattgataggtgtgaactagttcatcaagtagcccaagtaggagagaatcataggcaaaagtttctttaaagtggcagttgattaacatggaaggggaaatatgatagatatataaggaccctcctccctcacttatattctattaaatcctatcctcaactcttgccctgctctccgctccaccccctgccaactactcagtcccacccaacttgtaaaccaataccaaaaaaaaaaaaaaaaaaaaaa

SEQ ID NO: 346 - protein, 1790 aa, Homo sapiens
MCLKILRISLAILAGWALCSANSELGWTRKKSLVEREHLNQVLLEGERCWLGAKVRRPRASPQHHLFGVYPSRAGNYLRPYPVGEQEIHHTGRSKPDTEGNAVSLVPPDLTENPAGLRGAVEEPAAPWVGDSPIGQSELLGDDDAYLGNQRSKESLGEAGIQKGSAMAATTTTAIFTTLNEPKPETQRRGWAKSRQRRQVWKRRAEDGQGDSGISSHFQPWPKHSLKHRVKKSPPEESNQNGGEGSYREAETFNSQVGLPILYFSGRRERLLLRPEVLAEIPREAFTVEAWVKPEGGQNNPAIIAGVFDNCSHTVSDKGWALGIRSGKDKGKRDARFFFSLCTDRVKKATILISHSRYQPGTWTHVAATYDGRHMALYVDGTQVASSLDQSGPLNSPFMASCRSLLLGGDSSEDGHYFRGHLGTLVFWSTALPQSHFQHSSQHSSEEEEATDLVLTASFEPVNTEWVPFRDEKYPRLEVLQGFEPEPEILSPLQPPLCGQTVCDNVELISQYNGYWPLRGEKVIRYQVVNICDDEGLNPIVSEEQIRLQHEALNEAFSRYNISWQLSVHQVHNSTLRHRVVLVNCEPSKIGNDHCDPECEHPLTGYDGGDCRLQGRCYSWNRRDGLCHVECNNMLNDFDDGDCCDPQVADVRKTCFDPDSPKRAYMSVKELKEALQLNSTHFLNIYFASSVREDLAGAATWPWDKDAVTHLGGIVLSPAYYGMPGHTDTMIHEVGHVLGLYHVFKGVSERESCNDPCKETVPSMETGDLCADTAPTPKSELCREPEPTSDTCGFTRFPGAPFTNYMSYTDDNCTDNFTPNQVARMHCYLDLVYQQWTESRKPTPTPIPPMVIGQTNKSLTIHWLPPISGVVYDRASGSLCGACTEDGTFRQYVHTASSRRVCDSSGYWTPEEAVGPPDVDQPCEPSLQAWSPEVHLYHMNMTVPCPTEGCSLELLFQHPVQADTLTLWVTSFFMESSQVLFDTEILLENKESVHLGPLDTFCDIPLTIKLHVDGKVSGVKVYTFDERIEIDAALLTSQPHSPLCSGCRPVRYQVLRDPPFASGLPVVVTHSHRKFTDVEVTPGQMYQYQVLAEAGGELGEASPPLNHIHGAPYCGDGKVSERLGEECDDGDLVSGDGCSKVCELEEGFNCVGEPSLCYMYEGDGICEPFERKTSIVDCGIYTPKGYLDQWATRAYSSHEDKKKCPVSLVTGEPHSLICTSYHPDLPNHRPLTGWFPCVASENETQDDRSEQPEGSLKKEDEVWLKVCFNRPGEARAIFIFLTTDGLVPGEHQQPTVTLYLTDVRGSNHSLGTYGLSCQHNPLIINVTHHQNVLFHHTTSVLPNFSSPRVGISAVALRTSSRIGLSAPSNCISEDEGQNHQGQSCIHRPCGKQDSCPSLLLDHADVVNCTSIGPGLMKCAITCQRGFALQASSGQYIRPMQKEILLTCSSGHWDQNVSCLPVDCGVPDPSLVNYANFSCSEGTKFLKRCSISCVPPAKLQGLSPWLTCLEDGLWSLPEVYCKLECDAPPIILNANLLLPHCLQDNHDVGTICKYECKPGYYVAESAEGKVRNKLLKIQCLEGGIWEQGSCIPVVCEPPPPVFEGMYECTNGFSLDSQCVLNCNQEREKLPILCTKEGLWTQEFKLCENLQGECPPPPSELNSVEYKCEQGYGIGAVCSPLCVIPPSDPVMLPENITADTLEHWMEPVKVQSIVCTGRRQWHPDPVLVHCIQSCEPFQADGWCDTINNRAYCHYDGGDCCSSTLSSKKVIPFAADCDLDECTCRDPKAEENQ

SEQ ID NO: 347 - DNA, 4076 bp, Homo sapiens
ggggatgactctctctcttgagtaggcacacactcccttttctcgggtgtgtactttttgctttgtgatacatctctgcactttcagtattttccaactcatccttaaattccttctcacaacagtgtcaagagcctggacgccagccagaattgaggtcctacgggtgtttggggacctccccaagcccacgagtatcaatggcagtatcaattgtctgtgacagtgattaaggagcaaaacacttggaacccacaagactcccagaaggtgaagttaagagctcccagactcataaggttattagaacagcaaactggcaccccaaagaactttacggagacttgcaacctatcaacaagttggatgagggattaaaagccttcaacaaccaacaaccccaagcatcaaactgaaggaaacattctaaccttcacagacagactggaggctggatggggacctggctgaagacatctggagaatgaaagttaagtaccagcttgcatttttgtgcccctagattatttttgcattttaaaataagaagcatcaaattgcgtgtctctgtgtaaaagttctagcaatttgttttaaggtgaacttattttggcttagggactacaaaaagagaaggtaattcctagggaaggaagaagagaaagaaatgaaaattagagaataagattattttgaatgacttcaggtagcgaggagtgtgtgtttgtgagtgtgtatttgagagacttggctcatgcctgtgggtcttctcttctagtatcagtgaggggagggattactgaagaagaaggggggaaaaaaaaagaaagaaatctgagctttctgggaggaaattcaaaggaaccaagagaaattaacttcgttctgcaaggactaaagtacagcaagaggagagaggtcaagcgagaagcgtgcgggaagcacatgccctggggaggcatagaagccacactggcagagcggccagcacaggtagccagcagaggcattcttggggctatttgaaaaagtttggtctgtgaacaaaacagtttccctggtgactgcaaatccattgctagctgcctctttctcgtctgcccatcactctggtgtggtacccagaagttgacttctggttctgtagaaagagctaggggaggtatgatgtgcttaaagatcctaagaataagcctggcgattttggctgggtgggcactctgttctgccaactctgagctgggctggacacgcaagaaatccttggttgagagggaacacctgaatcaggtgctgttggaaggagaacgttgttggctgggggccaaggttcgaagacccagagcttctccacagcatcacctctttggagtctaccccagcagggctgggaactacctaaggccctaccccgtgggggagcaagaaatccatcatacaggacgcagcaaaccagacactgaaggaaatgctgtgagccttgttcccccagacctgactgaaaatccagcaggactgaggggtgcagttgaagagccggctgccccatgggtaggggatagtcctattgggcaatctgagctgctgggagatgatgacgcttatctcggcaatcaaagatccaaggagtctctaggtgaggccgggattcagaaaggctcagccatggctgccactactaccaccgccattttcacaaccctgaacgaacccaaaccagagacccaaaggaggggctgggccaagtccaggcagcgtcgccaagtgtggaagaggcgggcggaagatgggcagggagactccggtatctcttcacatttccaaccttggcccaagcattcccttaaacacagggtcaaaaagagtccaccggaggaaagcaaccaaaatggtggagagggctcctaccgagaagcagagacctttaactcccaagtaggactgcccatcttatacttctctgggaggcgggagcggctgctgctgcgtccagaagtgctggctgagattccccgggaggcgttcacagtggaagcctgggttaaaccggagggaggacagaacaacccagccatcatcgcaggtgtgtttgataactgctcccacactgtcagtgacaaaggctgggccctggggatccgctcagggaaggacaagggaaagcgggatgctcgcttcttcttctccctctgcaccgaccgcgtgaagaaagccaccatcttgattagccacagtcgctaccaaccaggcacatggacccatgtggcagccacttacgatggacggcacatggccctgtatgtggatggcactcaggtggctagcagtctagaccagtctggtcccctgaacagccccttcatggcatcttgccgctctttgctcctggggggagacagctctgaggatgggcactatttccgtggacacctgggcacactggttttctggtcgaccgccctgccacaaagccattttcagcacagttctcagcattcaagtggggaggaggaagcgactgacttggtcctgacagcgagctttgagcctgtgaacacagagtgggttccctttagagatgagaagtacccacgacttgaggttctccagggctttgagccagagcctgagattctgtcgcctttgcagcccccactctgtgggcaaacagtctgtgacaatgtggaattgatctcccagtacaatggatactggccccttcggggagagaaggtgatacgctaccaggtggtgaacatctgtgatgatgagggcctaaaccccattgtgagtgaggagcagattcgtctgcagcacgaggcactgaatgaggccttcagccgctacaacatcagctggcagctgaacgtccaccaggtccacaattccaccctgcgacaccgggttgtgcttgtgaactgcgagcccagcaagattggcaatgaccattgtgaccccgagtgtgagcacccactcacaggctatgatgggggtgactgccgcctgcagggccgctgctactcctggaaccgcagggatgggctctgtcacgtggagtgtaacaacatgctgaacgactttgacgacggagactgctgcgacccccaggtggctgatgtgcgcaagacctgctttgaccctgactcacccaagagggcatacatgagtgtgaaggagctgaaggaggccctgcagctgaacagtactcacttcctcaacatctactttgccagctcagtgcgggaagaccttgcaggtgctgccacctggccttgggacaaggacgctgtcactcacctgggtggcattgtcctcagcccagcatattatgggatgcctggccacaccgacaccatgatccatgaagtgggacatgttctgggactctaccatgtctttaaaggagtcagtgaaagagaatcctgcaatgacccctgcaaggagacagtgccatccatggaaacgggagacctctgtgccgacaccgcccctactcccaagagtgagctgtgccgggaaccagagcccactagtgacacctgtggcttcactcgcttcccaggggctccgttcaccaactacatgagctacacgggtatcaccactgtcttgttttgttttctgttaagaatacatgggggcctttgagagctgggagggtggaggtgtgggagctgatgggagaatgattaagtggtcatttgtgtcggagagttgaagtgtatttattataaggtattattattttttcatgtctttgaagaacttgaagaaatactgacatattaaggtactttgttcactgaattctctcctacagatattttaaaatatacttctatcctcgatagtaaaaaaggcacagagccaaaagccctcttgtgatccccttgacttctagaatgtggttattcttatttttggccgcattcttagacatttactctgagagagtccatggaataaaggaaagagttatgggccaggggccatgtactgttttgaagtggcaacaaggggctggtaattaggccacatgtttactgatgtacgaaaaaaaaaaaaaaaaaaaaaaa

SEQ ID NO: 348 - protein, 826 aa, Homo sapiens
MCLKILRISLAILAGWALCSANSELGWTRKKSLVEREHLNQVLLEGERCWLGAKVRRPRASPQHHLFGVYPSRAGNYLRPYPVGEQEIHHTGRSKPDTEGNAVSLVPPDLTENPAGLRGAVEEPAAPWVGDSPIGQSELLGDDDAYLGNQRSKESLGEAGIQKGSAMAATTTTAIFTTLNEPKPETQRRGWAKSRQRRQVWKRRAEDGQGDSGISSHFQPWPKHSLKHRVKKSPPEESNQNGGEGSYREAETFNSQVGLPILYFSGRRERLLLRPEVLAEIPREAFTVEAWVKPEGGQNNPAIIAGVFDNCSHTVSDKGWALGIRSGKDKGKRDARFFFSLCTDRVKKATILISHSRYQPGTWTHVAATYDGRHMALYVDGTQVASSLDQSGPLNSPFMASCRSLLLGGDSSEDGHYFRGHLGTLVFWSTALPQSHFQHSSQHSSGEEEATDLVLTASFEPVNTEWVPFRDEKYPRLEVLQGFEPEPEILSPLQPPLCGQTVCDNVELISQYNGYWPLRGEKVIRYQVVNICDDEGLNPIVSEEQIRLQHEALNEAFSRYNISWQLNVHQVHNSTLRHRVVLVNCEPSKIGNDHCDPECEHPLTGYDGGDCRLQGRCYSWNRRDGLCHVECNNMLNDFDDGDCCDPQVADVRKTCFDPDSPKRAYMSVKELKEALQLNSTHFLNIYFASSVREDLAGAATWPWDKDAVTHLGGIVLSPAYYGMPGHTDTMIHEVGHVLGLYHVFKGVSERESCNDPCKETVPSMETGDLCADTAPTPKSELCREPEPTSDTCGFTRFPGAPFTNYMSYTGITTVLFCFLLRIHGGL

SEQ ID NO: 349 - DNA, 7331 bp, Homo sapiens
gctccgggaaacaaagaatccggggctctccagacatcagagcttaaacccaggactctgcaagcggcatctcattccggggtccagggctctcccggctctccatcccctccctaacctcccccgcctcccgcgctcgctccctcgctccctccccgctcgcttcctcccccaccatcgcagcgctaggaggaaggcggccggggctcaagatggctttagccgggctctgcgccctgctcgcctgctgctgggggccggcggcggtgctggccacggccgccggcgacgtggatccatccaaggagctggagtgcaagctcaaaagcatcacggtgtcggcactgcccttcctgcgcgagaacgacctgagcatcatgcacagcccctcggcctcggagcccaagctcctcttctcggtgcgcaacgacttcccgggagaaatggtcgtggtggacgacctggagaacacggagctgccctacttcgtgctggagatctcagggaacacagaggatatccctttggtgcgctggaggcagcagtggctggagaatggcactttgctttttcacattcatcaccaagatggtgccccaagccttcctggacaagaccccactgaagaaccccaacatgagtcggcagaagaggagctgaggatcctccacatctcagtcatgggtggcatgatcgctctgctgctgtccatcttgtgcctggtgatgatcctgtatactcgccggcgctggtgcaaacgccgccgggtcccgcagccccagaagagtgccagtgctgaggcagccaatgagattcactacattccttctgtgctgatcggcgggcacggacgggagagcctgcgcaatgcccgcgtgcagggccacaactccagtggcaccctgagcatccgggagacacctatcctggacggctatgagtatgacatcactgatctgcgccaccatctgcagagggagtgcatgaacggaggggaggactttgccagccaggtcacgcgcaccctcgactccctgcagggctgcaatgaaaagtcggggatggacctcacaccaggaagtgacaatgccaagctgtcactgatgaacaagtataaagataatattatagccactagccctgtggactccaaccaccagcaagccacccttctctctcacacctccagcagccagagaaagcggatcaacaacaaagcaagagctggttccgccttcttgaaccctgaaggggattctggcacagaggcagaaaacgacccccagctgaccttttacacggatccttcaaggagcaggaggcgtagtagagtgggttctccccgaagtcctgtgaataagaccaccttgaccctgatcagcatcaccagctgtgtgattggcctcgtgtgctcctctcacgtcaactgccctctcgttgtcaagatcaccctgcatgtccctgagcacctgattgctgatgggagccgcttcatcttgctggaggggagccagctggatgccagtgactggctgaaccctgcccaagtggttctcttctctcagcagaactccagcggaccctgggccatggacctctgtgcccggcggctcctggacccctgtgaacaccaatgtgaccccgaaactggggaatgcctctgctatgaaggctacatgaaggatccagtacataagcacctttgcattcggaacgaatgggggacaaaccaggggccatggccttacacaatatttcagcgaggctttgacctggttttgggagagcagccctctgataaaatatttagattcacctacactcttggggagggcatgtggttgcccctcagcaagagctttgtgattccaccagccgaactggccatcaatccatcagcaaagtgcaagacggacatgactgtgatggaggatgctgtggaggtcagagaggagctgatgacttcatcctccttcgacagcctggaggttctcttagattcctttgggccggtgcgcgactgcagcaaagataacgggggctgcagtaagaatttccgctgtatttcagatcgcaagctggactccactggttgcgtgtgcccatctggactcagtcccatgaaggacagctctggctgctatgaccgccacatcggggtggactgttccgacggcttcaacggcggctgtgagcagctgtgcctccagcagatggcgcccttcccggacgaccccaccttgtataacatcctcatgttctgtgggtgcatcgaggactacaagcttggtgtggatggacgctcttgccaactcatcacggagacctgtccagagggaagtgactgtggggaaagcagggagcttcccatgaaccagaccctctttggggagatgttctttggttacaacaaccattccaaggaagtggctgccggacaggtgctgaaaggaacattcaggcaaaacaactttgctcgtggtttagaccagcaactgccagatggtcttgtggtggccactgtgcccctggagaatcaatgcctagaggagatctcggagcccacccctgaccctgacttcctgactgggatggtgaacttcagtgaagtgtctgggtaccctgtgctgcagcactggaaggtccggtctgtgatgtaccacatcaaactcaaccaagtggccatctctcaggccctcagcaatgctctccactcgctggatggggctacatctcgtgcagattttgtggcgctgttggaccagttcggcaaccattacatccaggaagctatctacggctttgaggagtcctgttctatctggtacccaaacaagcaggtccagcggcgactctggctggagtatgaagacatcagtaaaggcaactccccatcagatgagtctgaggagcgggaaagagaccccaaggtgctgacattcccagaatacatcaccagcttgtcagactccggcaccaagcacatggcggctggagtccgcatggagtgccacagcaagggacgatgcccctcgtcctgccccctgtgtcatgtgacatccagccctgacacccctgctgagccggttctgctggaggtgaccaaagcagcccccatctatgaactagtgaccaacaaccagacccagaggctcttgcaggaggctaccatgagctctctctggtgctcagggactggagatgtcatcgaggactggtgtcgatgtgactccactgcttttggagctgatggactccccacctgtgcgcctctcccacagcctgtgctgagactctccacggttcacgagcccagcagcactcttgtggtcctggagtgggaacactcagagccaccaatcggggtgcagattgtagattacctcctccgtcaagagaaagtcactgacaggatggaccactccaaagtggagacagaaacagtgctgagctttgtggacgacatcatctctggagcaaagtctccttgtgcaatgccatctcaggtgccggacaagcagctcaccaccatctctctgatcatacgatgcctggaacctgacaccatttacatgttcacgctgtggggagtggacaacacaggacggcgctccaggccaagcgacgtgatcgtgaagaccccatgccccgtggtggatgatgtcaaggctcaagaaatagcagacaagatctacaatctcttcaatggctacactagtgggaaggagcagcagaccgcctacaacaccctcctggatctgggttcccccaccttacaccgggtcctctaccactataaccagcactatgagagttttggggaattcacctggcgatgtgaggatgagttaggtcccaggaaagctggtctcatcctttcccagcttggggacctcagcagttggtgcaatggactccttcaggaacccaagataagcttgcggcgcagctcactcaagtacctggggtgccgctacagcgagatcaaaccctacggacttgactgggcggagctcagccgggacctcaggaagacgtgtgaggagcagaccctgagtatcccctacaacgactatggggacagcaaagagatctagcaccataaggccagggagctgctgccagaatgaagtaggaaagaggagggatccatctgggttggtctgtggatttttaatattttttaatggaacatgaaaacctccacagcaacatcgaaaccagggagaaagtgatccttgctccctgcagaacttcttcagtatgatgttctccatctgcatgattgggaaatctgccagccagtggcttcatgcagtgccatatttctttagaggattactttggggtttgctttgccattaatttgttccattcatttttttttccctgagaagtttaccaaaatgctcaagagctctgccgtgctccccatgaaaagtctattaagtaggcaccctgtgctcactcagttcctaaatccattgcaactgggagcagaggtgaggccagaaagttgttaggcctgccgcaggccccaccctcaagcattcctcaggaagcgtctcactctgggagccttggccctgctcacagagagagacaatagaaaattgaggaaggtggcccttgtctgtgtctcctggttttcttcctaggccttgctatcactatttccatacccgaaaggtgaaaccagctttcattataggccccagtgggccacttgggttttgagatccttccttattttaagccaggactgggattaaatctccctctgtcagatctctgtcccttcctctgaacaacatgatctttgagagggaacaagatgccatctgtcaactgcaccttcagaaaagtctacctgggagactagttagcagtccacattcaagagaagacttggagtttattgttttttaaaaaaaccatgcttcctttggatagacttctccagcctaccaatatatatccatgtgcctggattatctttaacccccacacctcttaccttggacaggtaaggcttggccgatgtctgattgggaccaggaggggtcaacactttcatatcagtgttacagtgaactaaagctattattgatcacaaaaaacttctgttcatccccaccttgctaaatttgcttgtgttgctagttttgcaaatcgtttctctgatgaccataagcaggaggattccaccatggtcactgcccatccagtcacagggattctgtgtagggaagcaccactgattgcagttaacatctagagtgttgtttccatcccactgcccaagcattggcatggtcatgaatggtggcccagccaacaggaagcccagcctttcagaaagagcctggcaaggccctgttgactagcaatggccttagctgtcccacacaactcagtggcctgaacacacaccttcagccaccatgcctttgaccagggctcctcatctggaaacatatgagaaaggtcagcaaacagatgcaagacctataaggctagtcattgagctatattggttttttttctaaatagtagtagtgacagataacatttattgagtgcttgctgtatgccaggcgctgatgtaagcactttaggtatcattgaattctcacagcaactcctgaggaaagtgctattcttgtctccattttagtgttgaggaaaacgaggcaaagagaggttatacaacttgcctcaaatcccttgtgcactgtaactcacactgagtttcagtgtgatttcaggctgttggtctccagggcacaggatcttagctactctgggatacccagttctgttttcagtatcatctggcacacaactgtccaagctctcagccccacagggaacctgcccagagagctttacctttcccaagcatctgtggcatggacatgtcctctgtgcagtggaaggaggaggggcgaaagtacgcccttagcctttggagctagagcacccttgggacccctagttccactgcacatggccctcctccccaccctcatgactgggaaggaagcctgtgatgaggctgagataaagcacagggtggtttcactctcctctctccttctttccaaacactgaaggatttatttcaaactctctaatgcacctgcctcagagattcccctactttcaaagcaaagatcagcagaaaaattggctgtcccacctgtggcaaatgctggagcctcagttaaagtgcctcaaggggcaaatatttcaccattgccagagaagatgtgacaggccaatcagacagggcccagagcatctctttgctgctactgttttgccatccttctattcatatctgtgcagaacacggtgttttaagcttgagtgaaaggagggtgaggctgccgatgccttcctgcccagaagtggatgatgtgggagttgacaggccagggagagggtgaagcaggtatcagagtcactcctctgtaccctctccttctgtttttattttaggcacactatcttcctctctcctatctttccctcaatctcccaagttcctctaccttctttatctttgtcttttacttcttctttctgtgaccctccttttttggcctcctctttccccaagactttcttcctcctgtttctcgttgagttctccccactgaatgtgtgtatgtatgtacacacacacacacgtgtgcacacacaatgcacacaactcctatgactggctcctacttacattcaagttaaaaaggctgatatgaacagggcaggggaaaatcttaggatggttgtacaattgactggaggattttttccccttggaagacactattgatctcaacctgctgacttttcctaatgcttacctgaaggaacccatcctggctagaaagggtgatggtactggaccggtattcaaccttgagttttcaagctgccaaacaggtcttaagggaggtgcttatatcccaccaacactctcccagctcccatgtccccaagacctctggagtttcctcttgaatgtacatgaaccactgtaatagcattagacttttaattgagtgtgcaatcgttttccatggagtttggtccgttcattattttttagttaactacacttcttgatattcaaatgttctattaaaaaaactgagtatgaagaaaaacactttactactgcagaaggaagaaagaatataatatgaccatcttcaggtataacagtgttgtttaaaagagaattattgtatgattataaaagatgaaataattaactgaataataaaacaaagctattagtaagcaaaaaaaaaaaaaaaaaa

SEQ ID NO: 350 - protein, 1294 aa, Homo sapiens
MALAGLCALLACCWGPAAVLATAAGDVDPSKELECKLKSITVSALPFLRENDLSIMHSPSASEPKLLFSVRNDFPGEMVVVDDLENTELPYFVLEISGNTEDIPLVRWRQQWLENGTLLFHIHHQDGAPSLPGQDPTEEPQHESAEEELRILHISVMGGMIALLLSILCLVMILYTRRRWCKRRRVPQPQKSASAEAANEIHYIPSVLIGGHGRESLRNARVQGHNSSGTLSIRETPILDGYEYDITDLRHHLQRECMNGGEDFASQVTRTLDSLQGCNEKSGMDLTPGSDNAKLSLMNKYKDNIIATSPVDSNHQQATLLSHTSSSQRKRINNKARAGSAFLNPEGDSGTEAENDPQLTFYTDPSRSRRRSRVGSPRSPVNKTTLTLISITSCVIGLVCSSHVNCPLVVKITLHVPEHLIADGSRFILLEGSQLDASDWLNPAQVVLFSQQNSSGPWAMDLCARRLLDPCEHQCDPETGECLCYEGYMKDPVHKHLCIRNEWGTNQGPWPYTIFQRGFDLVLGEQPSDKIFRFTYTLGEGMWLPLSKSFVIPPAELAINPSAKCKTDMTVMEDAVEVREELMTSSSFDSLEVLLDSFGPVRDCSKDNGGCSKNFRCISDRKLDSTGCVCPSGLSPMKDSSGCYDRHIGVDCSDGFNGGCEQLCLQQMAPFPDDPTLYNILMFCGCIEDYKLGVDGRSCQLITETCPEGSDCGESRELPMNQTLFGEMFFGYNNHSKEVAAGQVLKGTFRQNNFARGLDQQLPDGLVVATVPLENQCLEEISEPTPDPDFLTGMVNFSEVSGYPVLQHWKVRSVMYHIKLNQVAISQALSNALHSLDGATSRADFVALLDQFGNHYIQEAIYGFEESCSIWYPNKQVQRRLWLEYEDISKGNSPSDESEERERDPKVLTFPEYITSLSDSGTKHMAAGVRMECHSKGRCPSSCPLCHVTSSPDTPAEPVLLEVTKAAPIYELVTNNQTQRLLQEATMSSLWCSGTGDVIEDWCRCDSTAFGADGLPTCAPLPQPVLRLSTVHEPSSTLVVLEWEHSEPPIGVQIVDYLLRQEKVTDRMDHSKVETETVLSFVDDIISGAKSPCAMPSQVPDKQLTTISLIIRCLEPDTIYMFTLWGVDNTGRRSRPSDVIVKTPCPVVDDVKAQEIADKIYNLFNGYTSGKEQQTAYNTLLDLGSPTLHRVLYHYNQHYESFGEFTWRCEDELGPRKAGLILSQLGDLSSWCNGLLQEPKISLRRSSLKYLGCRYSEIKPYGLDWAELSRDLRKTCEEQTLSIPYNDYGDSKEI

SEQ ID NO: 351 - DNA, 3914 bp, Homo sapiens
gctccgggaaacaaagaatccggggctctccagacatcagagcttaaacccaggactctgcaagcggcatctcattccggggtccagggctctcccggctctccatcccctccctaacctcccccgcctcccgcgctcgctccctcgctccctccccgctcgcttcctcccccaccatcgcagcgctaggaggaaggcggccggggctcaagatggctttagccgggctctgcgccctgctcgcctgctgctgggggccggcggcggtgctggccacggccgccggcgacgtggatccatccaaggagctggagtgcaagctcaaaagcatcacggtgtcggcactgcccttcctgcgcgagaacgacctgagcatcatgcacagcccctcggcctcggagcccaagctcctcttctcggtgcgcaacgacttcccgggagaaatggtcgtggtggacgacctggagaacacggagctgccctacttcgtgctggagatctcagggaacacagaggatatccctttggtgcgctggaggcagcagtggctggagaatggcactttgctttttcacattcatcaccaagatggtgccccaagccttcctggacaagaccccactgaagaaccccaacatgagtcggcagaagaggagctgaggatcctccacatctcagtcatgggtggcatgatcgctctgctgctgtccatcttgtgcctggtgatgatcctgtatactcgccggcgctggtgcaaacgccgccgggtcccgcagccccagaagagtgccagtgctgaggcagccaatgagattcactacattccttctgtgctgatcggcgggcacggacgggagagcctgcgcaatgcccgcgtgcagggccacaactccagtggcaccctgagcatccgggagacacctatcctggacggctatgagtatgacatcactgatctgcgccaccatctgcagagggagtgcatgaacggaggggaggactttgccagccaggtcacgcgcaccctcgactccctgcagggctgcaatgaaaagtcggggatggacctcacaccaggaagtgacaatgccaagctgtcactgatgaacaagtataaagataatattatagccactagccctgtggactccaaccaccagcaagccacccttctctctcacacctccagcagccagagaaagcggatcaacaacaaagcaagagctggttccgccttcttgaaccctgaaggggattctggcacagaggcagaaaacgacccccagctgaccttttacacggatccttcaaggagcaggaggcgtagtagagtgggttctccccgaagtcctgtgaataagaccaccttgaccctgatcagcatcaccagctgtgtgattggcctcgtgtgctcctctcacgtcaactgccctctcgttgtcaagatcaccctgcatgtccctgagcacctgattgctgatgggagccgcttcatcttgctggaggggagccagctggatgccagtgactggctgaaccctgcccaagtggttctcttctctcagcagaactccagcggaccctgggccatggacctctgtgcccggcggctcctggacccctgtgaacaccaatgtgaccccgaaactggggaatgcctctgctatgaaggctacatgaaggatccagtacataagcacctttgcattcggaacgaatgggggacaaaccaggggccatggccttacacaatatttcagcgaggctttgacctggttttgggagagcagccctctgataaaatatttagattcacctacactcttggggagggcatgtggttgcccctcagcaagagctttgtgattccaccagccgaactggccatcaatccatcagcaaagtgcaagacggacatgactgtgatggaggatgctgtggaggtcagagaggagctgatgacttcatcctccttcgacagcctggaggttctcttagattcctttgggccggtgcgcgactgcagcaaagataacgggggctgcagtaagaatttccgctgtatttcagatcgcaagctggactccactggttgcgtgtgcccatctggactcagtcccatgaaggacagctctggctgctatgaccgccacatcggggtggactgttccgacggcttcaacggcggctgtgagcagctgtgcctccagcagatggcgcccttcccggacgaccccaccttgtataacatcctcatgttctgtgggtgcatcgaggactacaagcttggtgtggatggacgctcttgccaactcatcacggagacctgtccagagggaagtgactgtggggaaagcagggagcttcccatgaaccagaccctctttggggagatgttctttggttacaacaaccattccaaggaagtggctgccggacaggtgctgaaaggaacattcaggcaaaacaactttgctcgtggtttagaccagcaactgccagatggtcttgtggtggccactgtgcccctggagaatcaatgcctagaggagatctcggagcccacccctgaccctgacttcctgactgggatggtgaacttcagtgaagtgtctgggtaccctgtgctgcagcactggaaggtccggtctgtgatgtaccacatcaaactcaaccaagtggccatctctcaggccctcagcaatgctctccactcgctggatggggctacatctcgtgcagattttgtggcgctgttggaccagttcggcaaccattacatccaggaagctatctacggctttgaggagtcctgttctatctggtacccaaacaagcaggtccagcggcgactctggctggagtatgaagacatcagtaaaggcaactccccatcagatgagtctgaggagcgggaaagagaccccaaggtgctgacattcccagaatacatcaccagcttgtcagactccggcaccaagcacatggcggctggagtccgcatggagtgccacagcaagggacgatgcccctcgtcctgccccctgtgtcatgtgacatccagccctgacacccctgctgagccggttctgctggaggtgaccaaagcagcccccatctatgaactagtgaccaacaaccagacccagaggctcttgcaggaggctaccatgagctctctctggtgctcagggactggagatgtcatcgaggactggtgtcgatgtgactccactgcttttggagctgatggactccccacctgtgcgcctctcccacagcctgtgctgagactctccacggttcacgagcccagcagcactcttgtggtcctggagtgggaacactcagagccaccaatcggggtgcagattgtagattacctcctccgtcaagagaaagtcactgacaggatggaccactccaaagtggagacagaaacagtgctgagctttgtggacgacatcatctctggagcaaagtctccttgtgcaatgccatctcaggtgccggacaagcagctcaccaccatctctctgatcatacgatgcctggaacctgacaccatttacatgttcacgctgtggggagtggacaacacaggacggcgctccaggccaagcgacgtgatcgtgaagaccccatgccccgtggtggatgatgtcaaggctcaagaaatagcagacaagatctacaatctcttcaatggctacactagtgggaaggagcagcagaccgcctacaacaccctcctggatctgggttcccccaccttacaccgggtcctctaccactataaccagcactatgagagttttggggaattcacctggcgatgtgaggatgagttaggtcccaggtaatcaataaactaagtcaacccttaaaaaaaaaaaaaaaaaaaaaaaaaaaaa

SEQ ID NO: 352 - protein, 1216 aa, Homo sapiens
MALAGLCALLACCWGPAAVLATAAGDVDPSKELECKLKSITVSALPFLRENDLSIMHSPSASEPKLLFSVRNDFPGEMVVVDDLENTELPYFVLEISGNTEDIPLVRWRQQWLENGTLLFHIHHQDGAPSLPGQDPTEEPQHESAEEELRILHISVMGGMIALLLSILCLVMILYTRRRWCKRRRVPQPQKSASAEAANEIHYIPSVLIGGHGRESLRNARVQGHNSSGTLSIRETPILDGYEYDITDLRHHLQRECMNGGEDFASQVTRTLDSLQGCNEKSGMDLTPGSDNAKLSLMNKYKDNIIATSPVDSNHQQATLLSHTSSSQRKRINNKARAGSAFLNPEGDSGTEAENDPQLTFYTDPSRSRRRSRVGSPRSPVNKTTLTLISITSCVIGLVCSSHVNCPLVVKITLHVPEHLIADGSRFILLEGSQLDASDWLNPAQVVLFSQQNSSGPWAMDLCARRLLDPCEHQCDPETGECLCYEGYMKDPVHKHLCIRNEWGTNQGPWPYTIFQRGFDLVLGEQPSDKIFRFTYTLGEGMWLPLSKSFVIPPAELAINPSAKCKTDMTVMEDAVEVREELMTSSSFDSLEVLLDSFGPVRDCSKDNGGCSKNFRCISDRKLDSTGCVCPSGLSPMKDSSGCYDRHIGVDCSDGFNGGCEQLCLQQMAPFPDDPTLYNILMFCGCIEDYKLGVDGRSCQLITETCPEGSDCGESRELPMNQTLFGEMFFGYNNHSKEVAAGQVLKGTFRQNNFARGLDQQLPDGLVVATVPLENQCLEEISEPTPDPDFLTGMVNFSEVSGYPVLQHWKVRSVMYHIKLNQVAISQALSNALHSLDGATSRADFVALLDQFGNHYIQEAIYGFEESCSIWYPNKQVQRRLWLEYEDISKGNSPSDESEERERDPKVLTFPEYITSLSDSGTKHMAAGVRMECHSKGRCPSSCPLCHVTSSPDTPAEPVLLEVTKAAPIYELVTNNQTQRLLQEATMSSLWCSGTGDVIEDWCRCDSTAFGADGLPTCAPLPQPVLRLSTVHEPSSTLVVLEWEHSEPPIGVQIVDYLLRQEKVTDRMDHSKVETETVLSFVDDIISGAKSPCAMPSQVPDKQLTTISLIIRCLEPDTIYMFTLWGVDNTGRRSRPSDVIVKTPCPVVDDVKAQEIADKIYNLFNGYTSGKEQQTAYNTLLDLGSPTLHRVLYHYNQHYESFGEFTWRCEDELGPR

SEQ ID NO: 353 - DNA, 1552 bp, Homo sapiens
acttaatgggctcaaggtcacctacctgacctaccagcagctcaatggccttcccaaagaagaaacttcagggtcttgtggctgcaaccatcacgccaatgactgagaatggagaaatcaacttttcagtaattggtcagtatgtggattatcttgtgaaagaacagggagtgaagaacatttttgtgaatggcacaacaggagaaggcctgtccctgagcgtctcagagcgtcgccaggttgcagaggagtgggtgacaaaagggaaggacaagctggatcaggtgataattcacgtaggagcactgagcttgaaggagtcacaggaactggcccaacatgcagcagaaataggagctgatggcatcgctgtcattgcaccgttcttcctcaagccatggaccaaagatatcctgattaatttcctaaaggaagtggctgctgccgcccctgccctgccattttattactatcacattcctgccttgacaggggtaaagattcgtgctgaggagttgttggatgggattctggataagatccccaccttccaagggctgaaattcagtgatacagatctcttagacttcgggcaatgtgttgatcagaatcgccagcaacagtttgctttcctttttggggtggatgagcaactgttgagtgctctggtgatgggagcaactggagcagtgggcagtacctataactacctgggaaaaaagacaaaccagatgttggaggcttttgaacaaaaggacttctctttagccctgaactatcagttttgtatccagagatttatcaactttgttgtcaaactaggttttggagtgtcacagaccaaagccatcatgactctggtctctgggattccaatgggcccaccccggcttccactgcagaaagcctccagggagtttactgatagtgctgaagctaaactgaagagcctggatttcctttctttcactgatttaaaggatggaaacttggaagctggtagctagtgcctctctatcaaatcagggtttgcaccttgagacataatctaccttaaatagtgcatttttttctcagggaattttagatgaacttgaataaactctcctagcaaatgaaatctcacaataagcattgaggtaccttttgtgagccttaaaaagtcttattttgtgaaggggcaaaaactctaggagtcacaactctcagtcattcatttcacagatttttttgtggagaaatttctgtttatatggatgaaatggaatcaagaggaaaattgtaattgattaattccatctgtctttaggagctctcattatctcggtctctggttcctaatcctattttaaagttgtctaattttaaaccactataatatgtcttcattttaataaatattcatttggaatctaggaaaactctgagctactgcatttaggcaggcactttaataccaaactgtaacatgtctcaactgtatacaactcaaaatacaccagctcatttggctgctcagtctaactctagaatggatgcttttgaattcatt

SEQ ID NO: 354 - protein, 320 aa, Homo sapiens
MAFPKKKLQGLVAATITPMTENGEINFSVIGQYVDYLVKEQGVKNIFVNGTTGEGLSLSVSERRQVAEEWVTKGKDKLDQVIIHVGALSLKESQELAQHAAEIGADGIAVIAPFFLKPWTKDILINFLKEVAAAAPALPFYYYHIPALTGVKIRAEELLDGILDKIPTFQGLKFSDTDLLDFGQCVDQNRQQQFAFLFGVDEQLLSALVMGATGAVGSTYNYLGKKTNQMLEAFEQKDFSLALNYQFCIQRFINFVVKLGFGVSQTKAIMTLVSGIPMGPPRLPLQKASREFTDSAEAKLKSLDFLSFTDLKDGNLEAGS

SEQ ID NO: 355 - DNA, 4308 bp, Homo sapiens
gctggccccgccccctagcgccgcggtcggagccatttcgccgattcctccatgcgagttgctgtgcgtttctctgttgtctcggtagaaggccagagtcacacacggtcctaagagctgggcaccaggaagcgaaggctgatctgaagaagacacttgaatcatgggtgacgttaaaaattttctgtatgcctggtgtggcaaaaggaagatgaccccatcctatgaaattagagcagtggggaacaaaaacaggcagaaattcatgtgtgaggttcaggtggaaggttataattacactggcatgggaaattccaccaataaaaaagatgcacaaagcaatgctgccagagactttgttaactatttggttcgaataaatgaaataaagagtgaagaagttccagcttttggggtagcatctccgcccccacttactgatactcctgacactacagcaaatgctgaaggagatttaccaacaaccatgggaggacctcttcctccacatctggctctcaaagcagaaaataattctgaggtaggggcctctggctatggtgttcctgggcccacctgggaccgaggagccaacttgaaggattactactcaagaaaggaagaacaagaagtgcaagcgactctagaatcagaagaagtggatttaaatgctgggcttcatggaaactggaccttggaaaatgctaaagctcgtctaaaccaatattttcagaaagaaaagatccaaggagaatataagtacacccaagtgggtcctgatcacaacaggagctttattgcagaaatgaccatttatatcaagcagctgggcagaaggatttttgcacgagaacatggatcaaataagaaattggcagcacagtcctgtgccctgtcacttgtcagacaactgtaccatcttggagtggttgaagcttactccggacttacaaagaagaaggaaggagagacagtggagccttacaaagtaaacctctctcaagatttagagcatcagctgcaaaacatcattcaagagctaaatcttgagattttgcccccgcctgaagatccttctgtgccagttgcactcaacattggcaaattggctcagttcgaaccatctcagcgacaaaaccaagtgggtgtggttccttggtcacctccacaatccaactggaatccttggactagtagcaacattgatgaggggcctctggcttttgctactccagagcaaataagcatggacctcaagaatgaattgatgtaccagttggaacaggatcatgatttgcaagcaatcttgcaggagagagagttactgcctgtgaagaaatttgaaagtgagattctggaagcaatcagccaaaattcagttgtcattattagaggggctactggatgtgggaaaaccacacaggttccccagttcattctagatgactttatccagaatgaccgagcagcagagtgtaacatcgtagtaactcagcccagaagaatcagtgcggtttctgtggcagagcgagttgcatttgaaagaggagaagagcctggaaaaagctgtggctacagcgttcgatttgagtctatacttcctcgtcctcatgccagtataatgttttgtactgtaggtgtgctcctgagaaaattagaagcaggcattcgaggaatcagtcatgtaattgtagatgaaatacatgaaagagatattaatactgacttccttttggtagtactgcgtgatgttgttcaggcttatcctgaagttcgcattgttcttatgtctgctactattgataccagcatgttttgtgaatatttcttcaattgccccatcattgaagtttatgggaggacttacccagttcaagaatattttctggaagactgcattcagatgacccactttgttcctccaccaaaagacaaaaagaagaaggataaggatgatgatggtggtgaggatgatgatgcaaattgcaacttgatctgtggtgatgaatatggtccagaaacaaggttgagcatgtctcaattgaacgaaaaggaaactccttttgaactcatcgaggctctacttaagtacattgaaacccttaatgttcctggagctgtgttggtttttttgcctggctggaatctgatttatactatgcagaagcatttggaaatgaatccacattttggaagccatcggtatcagattctacccctgcattctcagattcctcgagaggaacagcgcaaagtgtttgatccagtaccagttggagtaaccaaggttattttgtccacaaatattgctgaaacaagcattaccataaacgatgttgtttatgtcattgactcctgcaagcagaaagtgaaactcttcactgctcacaacaatatgaccaactatgctaccgtatgggcatcaaaaacaaaccttgagcaacggaaagggcgagctggccgagtacggcctggattctgctttcacctgtgcagccgagctcgttttgagagacttgaaacccacatgacaccagagatgttccgaacaccattgcatgaaattgctcttagcataaaacttctgcgtctaggaggaattggccaatttctggccaaagcaattgaacctccccctttggatgctgtgattgaagcagaacacactcttagagagcttgatgcattagatgccaatgatgagttgactcctttgggacgaatcctggctaaactccccattgagcctcgttttggcaaaatgatgataatggggtgtattttctacgtgggagatgctatctgtaccattgctgctgctacctgctttccagagcctttcatcaatgaaggaaagcggctgggctatatccatcgaaattttgctggaaacagattttctgatcacgtagcccttttatcagtattccaagcctgggatgatgctagaatgggtggagaagaagcagagatacgtttttgtgagcacaaaagacttaatatggctacactaagaatgacctgggaagccaaagttcagctcaaagagattttgattaattctgggtttccagaagattgtttgttgacacaagtgtttactaacactggaccagataataatttggatgttgttatctccctcctggcctttggtgtgtaccccaatgtatgctatcataaggaaaagaggaagattctcaccactgaagggcgtaatgcacttatccacaaatcatctgttaattgtccttttagtagccaagacatgaagtacccatctcccttctttgtatttggtgaaaagattcgaactcgagccatctctgctaaaggcatgactttagtcacccccctgcagttgcttctctttgcctccaagaaagtccaatctgatgggcagattgtgcttgtagatgactggattaaactgcaaatatctcatgaagctgctgcctgtatcactggtctccgggcagccatggaggctttggttgttgaagtaaccaaacaacctgctatcatcagccagttggaccccgtaaatgaacgtatgctgaacatgatccgtcagatctctagaccctcagctgctggtatcaaccttatgattggcagtacacggtatggagatggtccacgtcctcccaagatggcccgatacgacaatggaagcggatatagaaggggaggttctagttacagtggtggaggctatggcggtggctatagcagtggaggctatggtagcggaggctatggtggcagcgccaactcctttcgggcaggatatggtgcaggtgttggtggaggctatagaggagtttcccgaggtggctttagaggcaactctggaggagactacagagggcctagtggaggctacagaggatctgggggattccagcgaggaggtggtaggggggcctatggaactggctactttggacagggaagaggaggtggcggctattaaaacttggttatgtcagttcctgtgtgtagacagtaaggaaaaaaaggcatgctatgtgttacgtgttttttccagtatgtttatttgccaccaaaaagtaaatgcattttcacccattctgtggttcattgtagtttaaggaaaccaagcatatagatgcattagtgattttgtttatattatgtaaaatataacgatctcttaaaaataccacagtttgtattttttctttaaggagtaaagatttgcctttaaataacttggtattttcctggctttcgtttaatacaatagaaaataaagtattacaccgaaaaaaaaaaaaaaaaaaa

SEQ ID NO: 356 - protein, 1270 aa, Homo sapiens
MGDVKNFLYAWCGKRKMTPSYEIRAVGNKNRQKFMCEVQVEGYNYTGMGNSTNKKDAQSNAARDFVNYLVRINEIKSEEVPAFGVASPPPLTDTPDTTANAEGDLPTTMGGPLPPHLALKAENNSEVGASGYGVPGPTWDRGANLKDYYSRKEEQEVQATLESEEVDLNAGLHGNWTLENAKARLNQYFQKEKIQGEYKYTQVGPDHNRSFIAEMTIYIKQLGRRIFAREHGSNKKLAAQSCALSLVRQLYHLGVVEAYSGLTKKKEGETVEPYKVNLSQDLEHQLQNIIQELNLEILPPPEDPSVPVALNIGKLAQFEPSQRQNQVGVVPWSPPQSNWNPWTSSNIDEGPLAFATPEQISMDLKNELMYQLEQDHDLQAILQERELLPVKKFESEILEAISQNSVVIIRGATGCGKTTQVPQFILDDFIQNDRAAECNIVVTQPRRISAVSVAERVAFERGEEPGKSCGYSVRFESILPRPHASIMFCTVGVLLRKLEAGIRGISHVIVDEIHERDINTDFLLVVLRDVVQAYPEVRIVLMSATIDTSMFCEYFFNCPIIEVYGRTYPVQEYFLEDCIQMTHFVPPPKDKKKKDKDDDGGEDDDANCNLICGDEYGPETRLSMSQLNEKETPFELIEALLKYIETLNVPGAVLVFLPGWNLIYTMQKHLEMNPHFGSHRYQILPLHSQIPREEQRKVFDPVPVGVTKVILSTNIAETSITINDVVYVIDSCKQKVKLFTAHNNMTNYATVWASKTNLEQRKGRAGRVRPGFCFHLCSRARFERLETHMTPEMFRTPLHEIALSIKLLRLGGIGQFLAKAIEPPPLDAVIEAEHTLRELDALDANDELTPLGRILAKLPIEPRFGKMMIMGCIFYVGDAICTIAAATCFPEPFINEGKRLGYIHRNFAGNRFSDHVALLSVFQAWDDARMGGEEAEIRFCEHKRLNMATLRMTWEAKVQLKEILINSGFPEDCLLTQVFTNTGPDNNLDVVISLLAFGVYPNVCYHKEKRKILTTEGRNALIHKSSVNCPFSSQDMKYPSPFFVFGEKIRTRAISAKGMTLVTPLQLLLFASKKVQSDGQIVLVDDWIKLQISHEAAACITGLRAAMEALVVEVTKQPAIISQLDPVNERMLNMIRQISRPSAAGINLMIGSTRYGDGPRPPKMARYDNGSGYRRGGSSYSGGGYGGGYSSGGYGSGGYGGSANSFRAGYGAGVGGGYRGVSRGGFRGNSGGDYRGPSGGYRGSGGFQRGGGRGAYGTGYFGQGRGGGGY

SEQ ID NO: 357 - DNA, 2381 bp, Homo sapiens
ccctgtcctgagcccaggcgcttcgccctgtcccacctagctctgagcagcgccccccagcaccctgaatgcgtccgcaggaccccgcgctctacccgcaggccccgcaccccctagctctgggccgcgcctcacatccctcccagagccgcaacaccccacccggcgggacgccctcgagcagccgctcgttgcgggcctgaagcgcagagcgcctattggccagagcggccgagggcgggaaaagtggccaacggctgcctcggccctcgggctgctgaggagatggcgtcgggctccaaggcctcggtgcccgcggactcattccgcaccatcagcccggacaggcgaggcgagaagtccgcctccgctgtctccggggacacggcggccgcgaccaccctgaagggcaccgcgatcccagtgcggtcggtggtggcctcccctcgcccggtgaaggggaaagcgggccgggagacggccaggctgcggctccagcgcctgcccgcggctcaggccgaggacacgggagaggcggcggcggcggcggcggaggagcccctgctgccagtgcctgaggatgaagaggaggcgcagcccctgcccccagtctgcgtgtcccgtatgagggggatgtggcgggacgagaaggtgtcgctgtattgcgacgaagtgctgcaggactgtaaggcagaagatgctgatgaagttatgggtaaatacctatcagaaaaattaaagttgaaagacaaatggcttggagtctggaagactaatcccagtgtattctttgtgaaatatgaagaagcttctatcccttttgttggtatattggttgaggtaacttgtgaaccataccaagactcatcatctcgtttcaaagttactgtttctgttgctgagcccttttcttccaacattgcaaatattccaagagatttggttgatgagattttggaggaactggaacacagtgtgcctcttttggaagtgtatcctgttgagggacaagatactgatatacatgttattgctttggccttggaagttgtcaggtttttttatgactttctttggagagactgggatgatgaagaaagttgtgagaattatactgcacttattgaagaaagaattaatttgtggtgtgatatacaggatggaacaatacctggtcctatcgcacaacgttttaaaaaaactttggagaaatataaaaacaaacgtgtcgagctcattgagtatcagagcaatattaaagaagatccatctgcagcagaggctgttgaatgctggaaaaaatactatgagatagtcatgctctgtggattactgaaaatgtgggaagatttacgcctccgagttcatggacctttctttccaagaattctgaggcgtaggaaaggaaaaagagaatttggaaagactataacacatattgtagcaaaaatgatgactactgaaatgataaaggatttatcttcagacacacttctccaacagcatggtgatttggatttggctttggataattgttatagtggagatacagtaataatttttccaggagaatatcaagctgcaaatcttgctttgttgacagatgacatcattataaagggagttggaaagagagaggaaattatgattacttctgaaccttctcgtgacagttttgtggtgtccaaagctgacaatgtgaaactaatgcatctatctttgatacaacaagggacggttgatggtatcgtggtggtggagtctggtcacatgactctagaaaactgcatattaaaatgtgaaggaacaggagtgtgtgttcttacaggggctgctttgacaattacagacagtgaaataactggcgcccagggtgctggtgttgaactgtatcctggaagcatagctattttggaaagaaatgaaattcatcactgtaataacctcagaaccagtaacagttcaaaaagcaccttaggtggagttaatatgaaggttcttccagcacccaaattgaagatgactaataatcatatttatagcaacaaaggctatggagtaagcattcttcaaccaatggaacagttttttatcgtagcagaagaagctctcaacaaaagggcttcttcaggagataaaaaagatgataaaatgctcttcaaagtaatgcaaaatctgaatctggaaatgaataataataagatagaagcaaacgtcaagggggatatcagaatagtcacaagttaaagcgtctgaattgatgttaaagttttatatttcacaaatttgtttaatacatgattctcataccccactgaaatggtagtttcaattcaaagcttaattaaaaaatatttaaatatcaaaaaaaaaaaaaaaaa

SEQ ID NO: 358 - protein, 653 aa, Homo sapiens
MASGSKASVPADSFRTISPDRRGEKSASAVSGDTAAATTLKGTAIPVRSVVASPRPVKGKAGRETARLRLQRLPAAQAEDTGEAAAAAAEEPLLPVPEDEEEAQPLPPVCVSRMRGMWRDEKVSLYCDEVLQDCKAEDADEVMGKYLSEKLKLKDKWLGVWKTNPSVFFVKYEEASIPFVGILVEVTCEPYQDSSSRFKVTVSVAEPFSSNIANIPRDLVDEILEELEHSVPLLEVYPVEGQDTDIHVIALALEVVRFFYDFLWRDWDDEESCENYTALIEERINLWCDIQDGTIPGPIAQRFKKTLEKYKNKRVELIEYQSNIKEDPSAAEAVECWKKYYEIVMLCGLLKMWEDLRLRVHGPFFPRILRRRKGKREFGKTITHIVAKMMTTEMIKDLSSDTLLQQHGDLDLALDNCYSGDTVIIFPGEYQAANLALLTDDIIIKGVGKREEIMITSEPSRDSFVVSKADNVKLMHLSLIQQGTVDGIVVVESGHMTLENCILKCEGTGVCVLTGAALTITDSEITGAQGAGVELYPGSIAILERNEIHHCNNLRTSNSSKSTLGGVNMKVLPAPKLKMTNNHIYSNKGYGVSILQPMEQFFIVAEEALNKRASSGDKKDDKMLFKVMQNLNLEMNNNKIEANVKGDIRIVTS

SEQ ID NO: 359 - DNA, 7923 bp, Homo sapiens
gcgcactcgggcacgcgctcggaagtcgggggtcggcgcggagtgcaggctgctcccggggtaggtgagggaagcgcggaggcggggcgcgggggcagtggtcggcgagcagcgcggtcctcgctaggggcgcccacccgtcagtctctccggcgcgagccgccgccaccgcccgcgccggagtcaggcccctgggcccccaggctcaagcagcgaagcggcctccgggggacgccgctaggcgagaggaacgcgccggtgcccttgccttcgccgtgacccagcgtgcgggcggcgggatgagagggagccatcgggccgcgccggccctgcggccccgggggcggctctggcccgtgctggccgtgctggcggcggccgccgcggcgggctgtgcccaggcagccatggacgagtgcacggacgagggcgggcggccgcagcgctgcatgcccgagttcgtcaacgccgctttcaacgtgactgtggtggccaccaacacgtgtgggactccgcccgaggaatactgtgtgcagaccggggtgaccggggtcaccaagtcctgtcacctgtgcgacgccgggcagccccacctgcagcacggggcagccttcctgaccgactacaacaaccaggccgacaccacctggtggcaaagccagaccatgctggccggggtgcagtaccccagctccatcaacctcacgctgcacctgggaaaagcttttgacatcacctatgtgcgtctcaagttccacaccagccgcccggagagctttgccatttacaagcgcacacgggaagacgggccctggattccttaccagtactacagtggttcctgcgagaacacctactccaaggcaaaccgcggcttcatcaggacaggaggggacgagcagcaggccttgtgtactgatgaattcagtgacatttctcccctcactgggggcaacgtggccttttctaccctggaaggaaggcccagcgcctataactttgacaatagccctgtgctgcaggaatgggtaactgccactgacatcagagtaactcttaatcgcctgaacacttttggagatgaagtgtttaacgatcccaaagttctcaagtcctattattatgccatctctgattttgctgtaggtggcagatgtaaatgtaatggacacgcaagcgagtgtatgaagaacgaatttgataagctggtgtgtaattgcaaacataacacatatggagtagactgtgaaaagtgtcttcctttcttcaatgaccggccgtggaggagggcaactgcggaaagtgccagtgaatgcctgccctgtgattgcaatggtcgatcccaggaatgctacttcgaccctgaactctatcgttccactggccatgggggccactgtaccaactgccaggataacacagatggcgcccactgtgagaggtgccgagagaacttcttccgccttggcaacaatgaagcctgctcttcatgccactgtagtcctgtgggctctctaagcacacagtgtgatagttacggcagatgcagctgtaagccaggagtgatgggggacaaatgtgaccgttgccagcctggattccattctctcactgaagcaggatgcaggccatgctcttgtgatccctctggcagcatagatgaatgtaatgttgaaacaggaagatgtgtttgcaaagacaatgtcgaaggcttcaattgtgaaagatgcaaacctggattttttaatctggaatcatctaatcctcggggttgcacaccctgcttctgctttgggcattcttctgtctgtacaaacgctgttggctacagtgtttattctatctcctctacctttcagattgatgaggatgggtggcgtgcggaacagagagatggctctgaagcatctctcgagtggtcctctgagaggcaagatatcgccgtgatctcagacagctactttcctcggtacttcattgctcctgcaaagttcttgggcaagcaggtgttgagttatggtcagaacctctccttctcctttcgagtggacaggcgagatactcgcctctctgccgaagaccttgtgcttgagggagctggcttaagagtatctgtacccttgatcgctcagggcaattcctatccaagtgagaccactgtgaagtatgtcttcaggctccatgaagcaacagattacccttggaggcctgctcttaccccttttgaatttcagaagctcctaaacaacttgacctctatcaagatacgtgggacatacagtgagagaagtgctggatatttggatgatgtcaccctggcaagtgctcgtcctgggcctggagtccctgcaacttgggtggagtcctgcacctgtcctgtgggatatggagggcagttttgtgagatgtgcctctcaggttacagaagagaaactcctaatcttggaccatacagtccatgtgtgctttgcgcctgcaatggacacagcgagacctgtgatcctgagacaggtgtttgtaactgcagagacaatacggctggcccgcactgtgagaagtgcagtgatgggtactatggagattcaactgcaggcacctcctccgattgccaaccctgtccgtgtcctggaggttcaagttgtgctgttgttcccaagacaaaggaggtggtgtgcaccaactgtcctactggcaccactggtaagagatgtgagctctgtgatgatggctactttggagaccccctgggtagaaacggccctgtgagactttgccgcctgtgccagtgcagtgacaacatcgatcccaacgcagttggaaattgcaatcgcttgacgggagaatgcctgaagtgcatctataacactgctggcttctattgtgaccggtgcaaagacggattttttggaaatcccctggctcccaatccagcagacaaatgcaaagcctgcaattgcaatccgtatgggaccatgaagcagcagagcagctgtaaccccgtgacggggcagtgtgaatgtttgcctcacgtgactggccaggactgtggtgcttgtgaccctggattctacaatctgcagagtgggcaaggctgtgagaggtgtgactgccatgccttgggctccaccaatgggcagtgtgacatccgcaccggccagtgtgagtgccagcccggcatcactggtcagcactgtgagcgctgtgaggtcaaccactttgggtttggacctgaaggctgcaaaccctgtgactgtcatcctgagggatctctttcacttcagtgcaaagatgatggtcgctgtgaatgcagagaaggctttgtgggaaatcgctgtgaccagtgtgaagaaaactatttctacaatcggtcttggcctggctgccaggaatgtccagcttgttaccggctggtaaaggataaggttgctgatcatagagtgaagctccaggaattagagagtctcatagcaaaccttggaactggggatgagatggtgacagatcaagccttcgaggatagactaaaggaagcagagagggaagttatggacctccttcgtgaggcccaggatgtcaaagatgttgaccagaatttgatggatcgcctacagagagtgaataacactctgtccagccaaattagccgtttacagaatatccggaataccattgaagagactggaaacttggctgaacaagcgcgtgcccatgtagagaacacagagcggttgattgaaatcgcatccagagaacttgagaaagcaaaagtcgctgctgccaatgtgtcagtcactcagccagaatctacaggggacccaaacaacatgactcttttggcagaagaggctcgaaagcttgctgaacgtcataaacaggaagctgatgacattgttcgagtggcaaagacagccaatgatacgtcaactgaggcatacaacctgcttctgaggacactggcaggagaaaatcaaacagcatttgagattgaagagcttaataggaagtatgaacaagcgaagaacatctcacaggatctggaaaaacaagctgcccgagtacatgaggaggccaaaagggccggtgacaaagctgtggagatctatgccagcgtggctcagctgagccctttggactctgagacactggagaatgaagcaaataacataaagatggaagctgagaatctggaacaactgattgaccagaaattaaaagattatgaggacctcagagaagatatgagagggaaggaacttgaagtcaagaaccttctggagaaaggcaagactgaacagcagaccgcagaccaactcctagcccgagctgatgctgccaaggccctcgctgaagaagctgcaaagaagggacgggataccttacaagaagctaatgacattctcaacaacctgaaagattttgataggcgcgtgaacgataacaagacggccgcagaggaggcactaaggaagattcctgccatcaaccagaccatcactgaagccaatgaaaagaccagagaagcccagcaggccctgggcagtgctgcggcggatgccacagaggccaagaacaaggcccatgaggcggagaggatcgcaagcgctgtccaaaagaatgccaccagcaccaaggcagaagctgaaagaacttttgcagaagttacagatctggataatgaggtgaacaatatgttgaagcaactgcaggaagcagaaaaagagctaaagagaaaacaagatgacgctgaccaggacatgatgatggcagggatggcttcacaggctgctcaagaagccgagatcaatgccagaaaagccaaaaactctgttactagcctcctcagcattattaatgacctcttggagcagctggggcagctggatacagtggacctgaataagctaaacgagattgaaggcaccctaaacaaagccaaagatgaaatgaaggtcagcgatcttgataggaaagtgtctgacctggagaatgaagccaagaagcaggaggctgccatcatggactataaccgagatatcgaggagatcatgaaggacattcgcaatctggaggacatcaggaagaccttaccatctggctgcttcaacaccccgtccattgaaaagccctagtgtctttagggctggaaggcagcatccctctgacaggggggcagttgtgaggccacagagtgccttgacacaaagattacatttttcagacccccactcctctgctgctgtccatcactgtccttttgaaccaggaaaagtcacagagtttaaagagaagcaaattaaacatcctgaatcgggaacaaagggttttatctaataaagtgtctcttccatcacgttgctaccttacccacacttccctctgatttgcgtgaggacgtggcatcctacttacgtacgtggcataacacatcgtgtgagcccatgtatgctggggtagagcaagtagccctcccctgtctcatcgatccagcagaacctcctcagtctcagtactcttgtttctataaggaaaagttttgctactaacagtagcattgtgatggccagtatatccagtccatggataaagaaaatgcatctgcatctcctgcccctcttccttctaagcaaaaggaaataaacatcctgtgccaaaggtattggtcatttagaatgtcggtagccatccatcagtgcttttagctattatgagtgtaggacactgagccatccgtgggtcaggatgcaattatttataaaagtccccaggtgaacatggctgaagatttttctagtatattaataattgactaggaagatgaactttttttcagatctttgggcagctgataatttaaatctggatgggcagcttgcactcaccaatagaccaaaagacatcttttgatattcttataaatggaacttacacagaagaaatagggatatgataaccactaaagttttgttttcaaaatcaaactaattcttacagcttttttattagttagtcttggaactagtgttaagtatctggcagagaacagttaatccctaaggtcttgacaaaacagaagaaaaacaagcctcctcgtcctagtcttttctagcaaagggataaaacttagatggcagcttgtactgtcagaatcccgtgtatccatttgttcttctgttggagagatgagacatttgacccttagctccagttttcttctgatgtttccatcttccagaatccctcaaaaaacattgtttgccaaatcctggtggcaaatacttgcactcagtatttcacacagctgccaacgctatcgagttcctgcactttgtgatttaaatccactctaaaccttccctctaagtgtagagggaagacccttacgtggagtttcctagtgggcttctcaacttttgatcctcagctctgtggttttaagaccacagtgtgacagttccctgccacacacccccttcctcctaccaacccacctttgagattcatatatagcctttaacactatgcaactttgtactttgcgtagcaggggctggggtggggggaaagaaacctattatcatggacacactggtgctattaattatttcaaatttatatttttgtgtgaatgttttgtgttttgtttatccatgctatagaacaaggaatttatgtagatatacttagtcctatttctagaatgacactctgttcactttgctcaatttttcctcttcactggcacaagtatctgaatacctccttccctcccttctagagttctttggattgtactccaaagaattgtgccttgtgtttgcagcatctccattctctaaattaatataattgctttcctccacacccagccacgtaaagaggtaacttgggtcctcttccattgcagtcctgatgatcctaacctgcagcacggtggttttacaatgttccagagcaggaacgccaggttgacaagctatggtaggattaggaaagtttgctgaagaggatctttgacgccacagtgggactagccaggaatgagggagaaatgccctttttggcaattgttggagctggataggtaagttttataagggagtacattttgactgagcacttagggcatcaggaacagtgctacttactggtgggtagactgggagaggtggtgtaacttagttcttgatgatcccacttcctgtttccatctgcttgggatataccagagtttaccacaagtgttttgacgatatactcctgagctttcactctgctggcttctcccaggcctcttctactatggcaggagatgtggtgtgctgttgcaaagttttcacgtcatcgtttcctggctagttcatttcattaagtggctacatcctaacatatgcattggtcaaggttgcagcaagaggactgaagattgactgccaagctagtttgggtgaagttcactccagcaagtctcaggccacaatggggtggtttggtttggtttccttttaactttctttttgttatttgcttttctcctccacctgtgtggtatattttttaagcagaattttattttttaaaataaaaggttctttacaagatgataccttaattacactcccgcaacacagccattattttattgtctagctccagttatctgtattttatgtaatgtaattgacaggatggctgctgcagaatgctggttgacacagggattattatactgctatttttccctgaattcttttccttggaattccaactgtggaccttttatatgtgccttcactttagctgtttgccttactctacagccttgctctccggggtggttaataaaatgcaacacttggcatttttatgttataagaaaaacagtattttatttataataaaatctgaatattttgtaacccttta

SEQ ID NO: 360 - protein, 1609 aa, Homo sapiens
MRGSHRAAPALRPRGRLWPVLAVLAAAAAAGCAQAAMDECTDEGGRPQRCMPEFVNAAFNVTVVATNTCGTPPEEYCVQTGVTGVTKSCHLCDAGQPHLQHGAAFLTDYNNQADTTWWQSQTMLAGVQYPSSINLTLHLGKAFDITYVRLKFHTSRPESFAIYKRTREDGPWIPYQYYSGSCENTYSKANRGFIRTGGDEQQALCTDEFSDISPLTGGNVAFSTLEGRPSAYNFDNSPVLQEWVTATDIRVTLNRLNTFGDEVFNDPKVLKSYYYAISDFAVGGRCKCNGHASECMKNEFDKLVCNCKHNTYGVDCEKCLPFFNDRPWRRATAESASECLPCDCNGRSQECYFDPELYRSTGHGGHCTNCQDNTDGAHCERCRENFFRLGNNEACSSCHCSPVGSLSTQCDSYGRCSCKPGVMGDKCDRCQPGFHSLTEAGCRPCSCDPSGSIDECNVETGRCVCKDNVEGFNCERCKPGFFNLESSNPRGCTPCFCFGHSSVCTNAVGYSVYSISSTFQIDEDGWRAEQRDGSEASLEWSSERQDIAVISDSYFPRYFIAPAKFLGKQVLSYGQNLSFSFRVDRRDTRLSAEDLVLEGAGLRVSVPLIAQGNSYPSETTVKYVFRLHEATDYPWRPALTPFEFQKLLNNLTSIKIRGTYSERSAGYLDDVTLASARPGPGVPATWVESCTCPVGYGGQFCEMCLSGYRRETPNLGPYSPCVLCACNGHSETCDPETGVCNCRDNTAGPHCEKCSDGYYGDSTAGTSSDCQPCPCPGGSSCAVVPKTKEVVCTNCPTGTTGKRCELCDDGYFGDPLGRNGPVRLCRLCQCSDNIDPNAVGNCNRLTGECLKCIYNTAGFYCDRCKDGFFGNPLAPNPADKCKACNCNPYGTMKQQSSCNPVTGQCECLPHVTGQDCGACDPGFYNLQSGQGCERCDCHALGSTNGQCDIRTGQCECQPGITGQHCERCEVNHFGFGPEGCKPCDCHPEGSLSLQCKDDGRCECREGFVGNRCDQCEENYFYNRSWPGCQECPACYRLVKDKVADHRVKLQELESLIANLGTGDEMVTDQAFEDRLKEAEREVMDLLREAQDVKDVDQNLMDRLQRVNNTLSSQISRLQNIRNTIEETGNLAEQARAHVENTERLIEIASRELEKAKVAAANVSVTQPESTGDPNNMTLLAEEARKLAERHKQEADDIVRVAKTANDTSTEAYNLLLRTLAGENQTAFEIEELNRKYEQAKNISQDLEKQAARVHEEAKRAGDKAVEIYASVAQLSPLDSETLENEANNIKMEAENLEQLIDQKLKDYEDLREDMRGKELEVKNLLEKGKTEQQTADQLLARADAAKALAEEAAKKGRDTLQEANDILNNLKDFDRRVNDNKTAAEEALRKIPAINQTITEANEKTREAQQALGSAAADATEAKNKAHEAERIASAVQKNATSTKAEAERTFAEVTDLDNEVNNMLKQLQEAEKELKRKQDDADQDMMMAGMASQAAQEAEINARKAKNSVTSLLSIINDLLEQLGQLDTVDLNKLNEIEGTLNKAKDEMKVSDLDRKVSDLENEAKKQEAAIMDYNRDIEEIMKDIRNLEDIRKTLPSGCFNTPSIEKP

SEQ ID NO: 361 - DNA, 5175 bp, Homo sapiens
acagcggagcgcagagtgagaaccaccaaccgaggcgccgggcagcgacccctgcagcggagacagagactgagcggcccggcaccgccatgcctgcgctctggctgggctgctgcctctgcttctcgctcctcctgcccgcagcccgggccacctccaggagggaagtctgtgattgcaatgggaagtccaggcagtgtatctttgatcgggaacttcacagacaaactggtaatggattccgctgcctcaactgcaatgacaacactgatggcattcactgcgagaagtgcaagaatggcttttaccggcacagagaaagggaccgctgtttgccctgcaattgtaactccaaaggttctcttagtgctcgatgtgacaactctggacggtgcagctgtaaaccaggtgtgacaggagccagatgcgaccgatgtctgccaggcttccacatgctcacggatgcggggtgcacccaagaccagagactgctagactccaagtgtgactgtgacccagctggcatcgcagggccctgtgacgcgggccgctgtgtctgcaagccagctgttactggagaacgctgtgataggtgtcgatcaggttactataatctggatggggggaaccctgagggctgtacccagtgtttctgctatgggcattcagccagctgccgcagctctgcagaatacagtgtccataagatcacctctacctttcatcaagatgttgatggctggaaggctgtccaacgaaatgggtctcctgcaaagctccaatggtcacagcgccatcaagatgtgtttagctcagcccaacgactagaccctgtctattttgtggctcctgccaaatttcttgggaatcaacaggtgagctatgggcaaagcctgtcctttgactaccgtgtggacagaggaggcagacacccatctgcccatgatgtgattctggaaggtgctggtctacggatcacagctcccttgatgccacttggcaagacactgccttgtgggctcaccaagacttacacattcaggttaaatgagcatccaagcaataattggagcccccagctgagttactttgagtatcgaaggttactgcggaatctcacagccctccgcatccgagctacatatggagaatacagtactgggtacattgacaatgtgaccctgatttcagcccgccctgtctctggagccccagcaccctgggttgaacagtgtatatgtcctgttgggtacaaggggcaattctgccaggattgtgcttctggctacaagagagattcagcgagactggggccttttggcacctgtattccttgtaactgtcaagggggaggggcctgtgatccagacacaggagattgttattcaggggatgagaatcctgacattgagtgtgctgactgcccaattggtttctacaacgatccgcacgacccccgcagctgcaagccatgtccctgtcataacgggttcagctgctcagtgatgccggagacggaggaggtggtgtgcaataactgccctcccggggtcaccggtgcccgctgtgagctctgtgctgatggctactttggggacccctttggtgaacatggcccagtgaggccttgtcagccctgtcaatgcaacaacaatgtggaccccagtgcctctgggaattgtgaccggctgacaggcaggtgtttgaagtgtatccacaacacagccggcatctactgcgaccagtgcaaagcaggctacttcggggacccattggctcccaacccagcagacaagtgtcgagcttgcaactgtaaccccatgggctcagagcctgtaggatgtcgaagtgatggcacctgtgtttgcaagccaggatttggtggccccaactgtgagcatggagcattcagctgtccagcttgctataatcaagtgaagattcagatggatcagtttatgcagcagcttcagagaatggaggccctgatttcaaaggctcagggtggtgatggagtagtacctgatacagagctggaaggcaggatgcagcaggctgagcaggcccttcaggacattctgagagatgcccagatttcagaaggtgctagcagatcccttggtctccagttggccaaggtgaggagccaagagaacagctaccagagccgcctggatgacctcaagatgactgtggaaagagttcgggctctgggaagtcagtaccagaaccgagttcgggatactcacaggctcatcactcagatgcagctgagcctggcagaaagtgaagcttccttgggaaacactaacattcctgcctcagaccactacgtggggccaaatggctttaaaagtctggctcaggaggccacaagattagcagaaagccacgttgagtcagccagtaacatggagcaactgacaagggaaactgaggactattccaaacaagccctctcactggtgcgcaaggccctgcatgaaggagtcggaagcggaagcggtagcccggacggtgctgtggtgcaagggcttgtggaaaaattggagaaaaccaagtccctggcccagcagttgacaagggaggccactcaagcggaaattgaagcagataggtcttatcagcacagtctccgcctcctggattcagtgtctcggcttcagggagtcagtgatcagtcctttcaggtggaagaagcaaagaggatcaaacaaaaagcggattcactctcaacgctggtaaccaggcatatggatgagttcaagcgtacacaaaagaatctgggaaactggaaagaagaagcacagcagctcttacagaatggaaaaagtgggagagagaaatcagatcagctgctttcccgtgccaatcttgctaaaagcagagcacaagaagcactgagtatgggcaatgccactttttatgaagttgagagcatccttaaaaacctcagagagtttgacctgcaggtggacaacagaaaagcagaagctgaagaagccatgaagagactctcctacatcagccagaaggtttcagatgccagtgacaagacccagcaagcagaaagagccctggggagcgctgctgctgatgcacagagggcaaagaatggggccggggaggccctggaaatctccagtgagattgaacaggagattgggagtctgaacttggaagccaatgtgacagcagatggagccttggccatggaaaagggactggcctctctgaagagtgagatgagggaagtggaaggagagctggaaaggaaggagctggagtttgacacgaatatggatgcagtacagatggtgattacagaagcccagaaggttgataccagagccaagaacgctggggttacaatccaagacacactcaacacattagacggcctcctgcatctgatggaccagcctctcagtgtagatgaagaggggctggtcttactggagcagaagctttcccgagccaagacccagatcaacagccaactgcggcccatgatgtcagagctggaagagagggcacgtcagcagaggggccacctccatttgctggagacaagcatagatgggattctggctgatgtgaagaacttggagaacattagggacaacctgcccccaggctgctacaatacccaggctcttgagcaacagtgaagctgccataaatatttctcaactgaggttcttgggatacagatctcagggctcgggagccatgtcatgtgagtgggtgggatggggacatttgaacatgtttaatgggtatgctcaggtcaactgacctgaccccattcctgatcccatggccaggtggttgtcttattgcaccatactccttgcttcctgatgctgggcaatgaggcagatagcactgggtgtgagaatgatcaaggatctggaccccaaagaatagactggatggaaagacaaactgcacaggcagatgtttgcctcataatagtcgtaagtggagtcctggaatttggacaagtgctgttgggatatagtcaacttattctttgagtaatgtgactaaaggaaaaaactttgactttgcccaggcatgaaattcttcctaatgtcagaacagagtgcaacccagtcacactgtggccagtaaaatactattgcctcatattgtcctctgcaagcttcttgctgatcagagttcctcctacttacaacccagggtgtgaacatgttctccattttcaagctggaagaagtgagcagtgttggagtgaggacctgtaaggcaggcccattcagagctatggtgcttgctggtgcctgccaccttcaagttctggacctgggcatgacatcctttcttttaatgatgccatggcaacttagagattgcatttttattaaagcatttcctaccagcaaagcaaatgttgggaaagtatttactttttcggtttcaaagtgatagaaaagtgtggcttgggcattgaaagaggtaaaattctctagatttattagtcctaattcaatcctacttttcgaacaccaaaaatgatgcgcatcaatgtattttatcttattttctcaatctcctctctctttcctccacccataataagagaatgttcctactcacacttcagctgggtcacatccatccctccattcatccttccatccatctttccatccattacctccatccatccttccaacatatatttattgagtacctactgtgtgccaggggctggtgggacagtggtgacatagtctctgccctcatagagttgattgtctagtgaggaagacaagcatttttaaaaaataaatttaaacttacaaactttgtttgtcacaagtggtgtttattgcaataaccgcttggtttgcaacctctttgctcaacagaacatatgttgcaagaccctcccatgggggcacttgagttttggcaaggctgacagagctctgggttgtgcacatttctttgcattccagctgtcactctgtgcctttctacaactgattgcaacagactgttgagttatgataacaccagtgggaattgctggaggaaccagaggcacttccaccttggctgggaagactatggtgctgccttgcttctgtatttccttggattttcctgaaagtgtttttaaataaagaacaattgttagatgcc

SEQ ID NO: 362 - protein, 1193 aa, Homo sapiens
MPALWLGCCLCFSLLLPAARATSRREVCDCNGKSRQCIFDRELHRQTGNGFRCLNCNDNTDGIHCEKCKNGFYRHRERDRCLPCNCNSKGSLSARCDNSGRCSCKPGVTGARCDRCLPGFHMLTDAGCTQDQRLLDSKCDCDPAGIAGPCDAGRCVCKPAVTGERCDRCRSGYYNLDGGNPEGCTQCFCYGHSASCRSSAEYSVHKITSTFHQDVDGWKAVQRNGSPAKLQWSQRHQDVFSSAQRLDPVYFVAPAKFLGNQQVSYGQSLSFDYRVDRGGRHPSAHDVILEGAGLRITAPLMPLGKTLPCGLTKTYTFRLNEHPSNNWSPQLSYFEYRRLLRNLTALRIRATYGEYSTGYIDNVTLISARPVSGAPAPWVEQCICPVGYKGQFCQDCASGYKRDSARLGPFGTCIPCNCQGGGACDPDTGDCYSGDENPDIECADCPIGFYNDPHDPRSCKPCPCHNGFSCSVMPETEEVVCNNCPPGVTGARCELCADGYFGDPFGEHGPVRPCQPCQCNNNVDPSASGNCDRLTGRCLKCIHNTAGIYCDQCKAGYFGDPLAPNPADKCRACNCNPMGSEPVGCRSDGTCVCKPGFGGPNCEHGAFSCPACYNQVKIQMDQFMQQLQRMEALISKAQGGDGVVPDTELEGRMQQAEQALQDILRDAQISEGASRSLGLQLAKVRSQENSYQSRLDDLKMTVERVRALGSQYQNRVRDTHRLITQMQLSLAESEASLGNTNIPASDHYVGPNGFKSLAQEATRLAESHVESASNMEQLTRETEDYSKQALSLVRKALHEGVGSGSGSPDGAVVQGLVEKLEKTKSLAQQLTREATQAEIEADRSYQHSLRLLDSVSRLQGVSDQSFQVEEAKRIKQKADSLSTLVTRHMDEFKRTQKNLGNWKEEAQQLLQNGKSGREKSDQLLSRANLAKSRAQEALSMGNATFYEVESILKNLREFDLQVDNRKAEAEEAMKRLSYISQKVSDASDKTQQAERALGSAAADAQRAKNGAGEALEISSEIEQEIGSLNLEANVTADGALAMEKGLASLKSEMREVEGELERKELEFDTNMDAVQMVITEAQKVDTRAKNAGVTIQDTLNTLDGLLHLMDQPLSVDEEGLVLLEQKLSRAKTQINSQLRPMMSELEERARQQRGHLHLLETSIDGILADVKNLENIRDNLPPGCYNTQALEQQ

SEQ ID NO: 363 - DNA, 4297 bp, Homo sapiens
acagcggagcgcagagtgagaaccaccaaccgaggcgccgggcagcgacccctgcagcggagacagagactgagcggcccggcaccgccatgcctgcgctctggctgggctgctgcctctgcttctcgctcctcctgcccgcagcccgggccacctccaggagggaagtctgtgattgcaatgggaagtccaggcagtgtatctttgatcgggaacttcacagacaaactggtaatggattccgctgcctcaactgcaatgacaacactgatggcattcactgcgagaagtgcaagaatggcttttaccggcacagagaaagggaccgctgtttgccctgcaattgtaactccaaaggttctcttagtgctcgatgtgacaactctggacggtgcagctgtaaaccaggtgtgacaggagccagatgcgaccgatgtctgccaggcttccacatgctcacggatgcggggtgcacccaagaccagagactgctagactccaagtgtgactgtgacccagctggcatcgcagggccctgtgacgcgggccgctgtgtctgcaagccagctgttactggagaacgctgtgataggtgtcgatcaggttactataatctggatggggggaaccctgagggctgtacccagtgtttctgctatgggcattcagccagctgccgcagctctgcagaatacagtgtccataagatcacctctacctttcatcaagatgttgatggctggaaggctgtccaacgaaatgggtctcctgcaaagctccaatggtcacagcgccatcaagatgtgtttagctcagcccaacgactagaccctgtctattttgtggctcctgccaaatttcttgggaatcaacaggtgagctatgggcaaagcctgtcctttgactaccgtgtggacagaggaggcagacacccatctgcccatgatgtgattctggaaggtgctggtctacggatcacagctcccttgatgccacttggcaagacactgccttgtgggctcaccaagacttacacattcaggttaaatgagcatccaagcaataattggagcccccagctgagttactttgagtatcgaaggttactgcggaatctcacagccctccgcatccgagctacatatggagaatacagtactgggtacattgacaatgtgaccctgatttcagcccgccctgtctctggagccccagcaccctgggttgaacagtgtatatgtcctgttgggtacaaggggcaattctgccaggattgtgcttctggctacaagagagattcagcgagactggggccttttggcacctgtattccttgtaactgtcaagggggaggggcctgtgatccagacacaggagattgttattcaggggatgagaatcctgacattgagtgtgctgactgcccaattggtttctacaacgatccgcacgacccccgcagctgcaagccatgtccctgtcataacgggttcagctgctcagtgatgccggagacggaggaggtggtgtgcaataactgccctcccggggtcaccggtgcccgctgtgagctctgtgctgatggctactttggggacccctttggtgaacatggcccagtgaggccttgtcagccctgtcaatgcaacaacaatgtggaccccagtgcctctgggaattgtgaccggctgacaggcaggtgtttgaagtgtatccacaacacagccggcatctactgcgaccagtgcaaagcaggctacttcggggacccattggctcccaacccagcagacaagtgtcgagcttgcaactgtaaccccatgggctcagagcctgtaggatgtcgaagtgatggcacctgtgtttgcaagccaggatttggtggccccaactgtgagcatggagcattcagctgtccagcttgctataatcaagtgaagattcagatggatcagtttatgcagcagcttcagagaatggaggccctgatttcaaaggctcagggtggtgatggagtagtacctgatacagagctggaaggcaggatgcagcaggctgagcaggcccttcaggacattctgagagatgcccagatttcagaaggtgctagcagatcccttggtctccagttggccaaggtgaggagccaagagaacagctaccagagccgcctggatgacctcaagatgactgtggaaagagttcgggctctgggaagtcagtaccagaaccgagttcgggatactcacaggctcatcactcagatgcagctgagcctggcagaaagtgaagcttccttgggaaacactaacattcctgcctcagaccactacgtggggccaaatggctttaaaagtctggctcaggaggccacaagattagcagaaagccacgttgagtcagccagtaacatggagcaactgacaagggaaactgaggactattccaaacaagccctctcactggtgcgcaaggccctgcatgaaggagtcggaagcggaagcggtagcccggacggtgctgtggtgcaagggcttgtggaaaaattggagaaaaccaagtccctggcccagcagttgacaagggaggccactcaagcggaaattgaagcagataggtcttatcagcacagtctccgcctcctggattcagtgtctcggcttcagggagtcagtgatcagtcctttcaggtggaagaagcaaagaggatcaaacaaaaagcggattcactctcaacgctggtaaccaggcatatggatgagttcaagcgtacacaaaagaatctgggaaactggaaagaagaagcacagcagctcttacagaatggaaaaagtgggagagagaaatcagatcagctgctttcccgtgccaatcttgctaaaagcagagcacaagaagcactgagtatgggcaatgccactttttatgaagttgagagcatccttaaaaacctcagagagtttgacctgcaggtggacaacagaaaagcagaagctgaagaagccatgaagagactctcctacatcagccagaaggtttcagatgccagtgacaagacccagcaagcagaaagagccctggggagcgctgctgctgatgcacagagggcaaagaatggggccggggaggccctggaaatctccagtgagattgaacaggagattgggagtctgaacttggaagccaatgtgacagcagatggagccttggccatggaaaagggactggcctctctgaagagtgagatgagggaagtggaaggagagctggaaaggaaggagctggagtttgacacgaatatggatgcagtacagatggtgattacagaagcccagaaggttgataccagagccaagaacgctggggttacaatccaagacacactcaacacattagacggcctcctgcatctgatgggtatgtgaacccacaacccacaaccttccagctccatgctccagggctttgctccagaacactcactatacctagccccagcaaaggggagtctcagctttccttaaggatatcagtaaatgtgctttgtttccaggcccagataactttcggcaggttcccttacatttactggaccctgttttaccgttgctaagatgggtcactgaacacctattgcacttgggggtaaaggtctgtgggccaaagaacaggtgtatataagcaacttcacagaacacgagacagcttgggaatcctgctaaagagtctggcctggaccctgagaagccagtggacagttttaagcagaggaataacatcaccactgtatatttcagaaagatcactagggcagccgagtggaggaaagcttgaagagggggttagagagaaggcaggttgagactacttaagatattgttgaaataattgaagagagaaatgacaggagcctgctctaaggcagtagaatggtggctgggaagatgtgaaggaagattttcccagtctgtgaagtcaagaatcacttgccggccgggtgtggtggctcacgcctgtaattctagcactttgggagactgaagcgggtggatcacccgaggtcaggagttgaagaccagcctggccaacatggtgaaaccctgtctctactaaaagtacaaaaattagctggatgtggtggtgggcgcctgtaattccagctactcaggagtctgaggcaggagaatcgcttgaacccaggaggcggaggttacagtgagccaagattgcaccactgctctccagcctggggaacagagcaagactgtctcaaaaaaaaaaaaaaaaggaaaaataa

SEQ ID NO: 364 - protein, 1111 aa, Homo sapiens
MPALWLGCCLCFSLLLPAARATSRREVCDCNGKSRQCIFDRELHRQTGNGFRCLNCNDNTDGIHCEKCKNGFYRHRERDRCLPCNCNSKGSLSARCDNSGRCSCKPGVTGARCDRCLPGFHMLTDAGCTQDQRLLDSKCDCDPAGIAGPCDAGRCVCKPAVTGERCDRCRSGYYNLDGGNPEGCTQCFCYGHSASCRSSAEYSVHKITSTFHQDVDGWKAVQRNGSPAKLQWSQRHQDVFSSAQRLDPVYFVAPAKFLGNQQVSYGQSLSFDYRVDRGGRHPSAHDVILEGAGLRITAPLMPLGKTLPCGLTKTYTFRLNEHPSNNWSPQLSYFEYRRLLRNLTALRIRATYGEYSTGYIDNVTLISARPVSGAPAPWVEQCICPVGYKGQFCQDCASGYKRDSARLGPFGTCIPCNCQGGGACDPDTGDCYSGDENPDIECADCPIGFYNDPHDPRSCKPCPCHNGFSCSVMPETEEVVCNNCPPGVTGARCELCADGYFGDPFGEHGPVRPCQPCQCNNNVDPSASGNCDRLTGRCLKCIHNTAGIYCDQCKAGYFGDPLAPNPADKCRACNCNPMGSEPVGCRSDGTCVCKPGFGGPNCEHGAFSCPACYNQVKIQMDQFMQQLQRMEALISKAQGGDGVVPDTELEGRMQQAEQALQDILRDAQISEGASRSLGLQLAKVRSQENSYQSRLDDLKMTVERVRALGSQYQNRVRDTHRLITQMQLSLAESEASLGNTNIPASDHYVGPNGFKSLAQEATRLAESHVESASNMEQLTRETEDYSKQALSLVRKALHEGVGSGSGSPDGAVVQGLVEKLEKTKSLAQQLTREATQAEIEADRSYQHSLRLLDSVSRLQGVSDQSFQVEEAKRIKQKADSLSTLVTRHMDEFKRTQKNLGNWKEEAQQLLQNGKSGREKSDQLLSRANLAKSRAQEALSMGNATFYEVESILKNLREFDLQVDNRKAEAEEAMKRLSYISQKVSDASDKTQQAERALGSAAADAQRAKNGAGEALEISSEIEQEIGSLNLEANVTADGALAMEKGLASLKSEMREVEGELERKELEFDTNMDAVQMVITEAQKVDTRAKNAGVTIQDTLNTLDGLLHLMGM

SEQ ID NO: 365 - DNA, 8192 bp, Homo sapiens
ggagccgcggggcttccatccttcctttgactgatttttaaattttaatttgtattttccccgccgccccgccccttttcctccgaccccgccctatcgctccccggcttccctgctctttcctttttcccggcttccttcctcgcgtttctttcccctgcgccctcggcttgcctctctccctcctccctcgctctctcccccttctctccccttcttcctcggtttcttccgtcctctctctccccctcctcctcccccgcctcctcctcctgcgctcccgccccctgccccctccccccgtgcctgcagacgcgcggatcgtccatgcgctcctcgcgggcagaatgctgggcagcagcgtcaagagcgtgcagcccgaggtggagctgagcagcggcggcggcgacgagggcgcggacgaaccgcggggcgccggcaggaaggcggcagcggcggacggcagaggcatgctgcccaagcgcgccaaggcgcccggcggcggcggcggcatggccaaggccagcgcggctgagctgaaggtcttcaagtccggcagcgtggacagccgtgtccccggcgggccgcccgcctccaacctgcgcaagcagaagtcactcaccaacctctcttttctcacggactccgagaaaaagctgcagctttatgagcccgaatggagcgacgatatggccaaggcgcccaaaggcttaggcaaggtggggtccaagggccgtgaagctccgctgatgtccaagacgctgtccaagtcggagcactcgctcttccaggccaagggcagcccggcgggcggtgccaagacccccctggctccgctcgcgcccaacctgggaaagccgagccggatccctcgaggaccctatgcggaggtcaagccgctcagcaaggcgcctgaagcggccgtgagcgaagatggcaaatcggacgacgagctgctctccagcaaggccaaggcgcaaaagagctctgggcctgtcccctctgccaagggccaggaggagcgcgccttcctcaaggtggaccccgagctggtggtgaccgtgctgggagacctggagcagctgctcttcagccagatgctggacccagagtcccagagaaagaggacagtgcagaatgtcctggatctccggcagaacctggaagagaccatgtccagcctgcgagggtcccaggtgactcacagctccctggagatgacctgctacgacagcgatgatgccaacccacgcagcgtgtccagcctctccaaccgctcgtcccctctgtcatggcgctatggccagtccagtccgcggctgcaggctggtgacgcgccctctgtgggtgggagctgccgctcggaggggacgcccgcctggtacatgcacggcgaacgggcccactactcccacaccatgcccatgcgcagccccagcaagctcagccatatctcccgcctggagctggtcgaatccctggactcggatgaggtggacctcaagtccggctacatgagcgacagtgacctcatgggcaagaccatgacggaggatgatgacatcactaccggctgggatgaaagcagctccatcagtagtggactcagcgatgcctcagacaatctcagttcagaagaattcaatgccagctcctcactcaactccctcccaagtactcccactgcttctcgcaggaactcaacaatagtgctacgcacagactcagagaagcgctcactggcagaaagtgggctgagctggtttagtgaatcagaggagaaagcccctaaaaaactggagtacgacagtggtagcctgaagatggaacctgggacttctaagtggcggagggagcggcctgagagctgtgatgattcatccaagggtggagaactgaaaaagcccatcagcctgggccaccctggttccctgaagaagggcaagaccccacctgtggctgtaacttcccccatcactcacacagcccagagtgccctcaaagtcgcaggcaaacctgagggcaaagctacagacaagggtaagcttgcagtgaagaatactgggctccaacgctcctcctctgatgctggtcgggaccgcctgagtgatgctaagaagcccccctcgggcattgctcgcccctccacttcgggatcctttggctacaagaagcctcctcctgccacaggcacagccactgtcatgcaaactggtggttcagccactctcagcaagatccagaagtcctcaggcatccctgtcaagccagtaaatgggcgcaagactagcttagatgtttccaacagtgcagagccaggattcctggctcctggagcccgttctaacatccagtaccgcagcctgccccggccagccaagtcaagttctatgagcgtgaccggcgggcggggtggacctcgccctgtgagcagcagcattgaccccagtctcctcagcaccaagcagggaggccttacgccttccagactgaaggagcctaccaaggtagccagtgggcggaccactccagcccctgtcaatcagacagatcgggaaaaggagaaggccaaagccaaggcagtggccttggactcagacaacatctccttgaagagtattggctccccagaaagtactcccaagaaccaagcaagccaccccacagccaccaagctggcagagctgccaccaacccctctcagggccacagcgaagagctttgtcaaaccaccctcactagccaatcttgacaaggtcaactccaacagtctggatctaccatcatccagtgataccacccatgcttcaaaggtcccagatctgcatgctacaagctcagcatctgggggccctctcccttcctgcttcacccccagtccggcacccatcctcaatattaactcagccagcttctcccagggcctggagctaatgagtggtttcagtgtgccaaaagagacccgcatgtaccccaaactctcaggcctgcacaggagcatggagtccctccagatgccaatgagcctccccagtgccttccccagcagtactcccgtccccaccccacctgctccccctgctgctcccacagaagaagagacggaagagctgacttggagtggaagccccagagctgggcaactggacagtaatcagcgggatcggaacactcttcccaagaaagggctcaggtaccagcttcagtcccaggaggagaccaaggagaggcgacattcccataccattggtgggctgcctgaatccgatgaccagtcagagctgccttctccccctgcacttcccatgtctctgagtgcaaagggccaacttaccaacatagtgagtcccactgcggccaccacgccaagaatcacccgctccaacagcatccccacccacgaggcggccttcgagctgtacagcggctcccaaatggggagcaccctgtccctggccgagagacccaagggaatgattcggtcaggatccttccgagaccccacggacgatgttcacggctcagtgctgtccctggcctccagtgcctcctccacctactcctcagctgaggagaggatgcaatctgagcaaatccggaagcttcgtagggaactggaatcatcccaggaaaaagtggccaccttgacgtctcagctttctgccaatgctaatctggtggctgcttttgagcagagcctggtgaatatgacatcccgcctgcgacacctggcagagacggccgaggagaaggacactgagctgctggatttgcgagaaaccatagactttctgaagaaaaagaactctgaggcccaggcagtcattcagggagcccttaatgcctcagaaaccacacccaaagaacttcggatcaagagacaaaactcctcagatagcatctcaagcctcaacagcatcactagccattccagcatcggcagcagcaaggatgctgatgcgaaaaagaagaaaaaaaagagttggcttcgaagttccttcaacaaagcgttcagtataaaaaaggggcccaagtcagcttcctcatactcggatatagaggagattgctacacccgactcttcagccccctcatcccccaaactacagcatggttctacagagactgcttcaccctccatcaagtcctccacctcgtcctccgtgggcactgatgtcaccgagggccctgctcacccagccccccacactaggctgttccatgcaaatgaggaggaggagccagagaagaaggaggtatcggagctgcgctctgagctatgggagaaggaaatgaagcttacagacatccgcttggaggccctcaactctgcccaccaactggatcagcttcgggagaccatgcacaacatgcagttggaggtggacctgctgaaagcagagaatgaccgactgaaggtagccccaggcccctcatcaggctccactccagggcaggtccctggatcatctgcattatcttccccacgccgctccctaggcctggcactcacccattccttcggccccagtcttgcagacacagacctgtcacccatggatggcatcagtacttgtggtccaaaggaggaagtgaccctccgggtggtggtgaggatgcccccgcagcacatcatcaaaggggacttgaagcagcaggaattcttcctgggctgtagcaaggtcagtggaaaagttgactggaagatgctggatgaagctgttttccaagtgttcaaggactatatttctaaaatggacccagcctctaccctgggactaagcactgagtccatccatggctacagcatcagccacgtgaaacgagtgttggatgcagagccccccgagatgcctccttgccgtcgaggtgtcaataacatatcagtctccctcaaaggtctgaaggagaaatgcgtcgacagcctggtgttcgagacgctgatccccaagccgatgatgcagcactacataagcctcctgctgaagcaccggcgcctcgtcctctcgggccccagcggcacgggcaagacctacctgaccaatcgcttggccgagtacctggtggagcgctctggccgtgaggtcacagagggcatcgtcagcaccttcaacatgcaccagcagtcttgcaaggatctgcaactgtatctttccaacctagccaaccagatagaccgggaaacaggaattggggatgtgcccctggtgattctattggatgacctgagtgaagcaggctccatcagtgagttggtcaatggggccctcacctgcaagtatcataaatgtccctatattataggtaccaccaatcagcctgtaaaaatgacacccaaccatggcttgcacttgagcttcaggatgttgaccttctccaacaacgtggagccagccaatggcttcctggttcgttacctgaggaggaagctggtagagtcagacagcgacatcaatgccaacaaggaagagctgcttcgggtgctcgactgggtacccaagctgtggtatcatctccacaccttccttgagaagcacagcacctcagacttcctcatcggcccttgcttctttctgtcgtgtcccattggcattgaggacttccggacctggttcattgacctgtggaacaactctatcattccctatctacaggaaggagccaaggatgggataaaggtccatggacagaaagctgcttgggaggacccagtggaatgggtccgggacacacttccctggccatcagcccaacaagaccaatcaaagctgtaccacctgcccccacccaccgtgggccctcacagcattgcctcacctcccgaggataggacagtcaaagacagcaccccaagttctctggactcagatcctctgatggccatgctgctgaaacttcaagaagctgccaactacattgagtctccagatcgagaaaccatcctggaccccaaccttcaggcaacactttaagggttcggcaatcactgtcacccccggacagcagaacgctggcatcagctatcttagctcctcctctcccctctcctctttcagagcactggctctccagccccaggaggagaacaggagggaggaggagatgaaagaggagggacaggttcttggtgctgtacctttgagaacttcctaggaaggaatggtggggtggcgtttgggaacttgtgccccctaaacacatttactggcctcctctaatgactttggggaaaagatgattctgggtctttcccttgacttcttgtttcaattacaaactcctgggctttctggggaggggttcagaaaacatcaaaacactgcagcagttcctaaatgattctcacaagcaaccctgagagagacagtcttgtgagggagatctgggggaggcaggaagctcctcagattttctcacagacccttcccaattccatcaccactgccaacaactcctcccccagagatctggctggagcccagaaaaagaagcatgtggtttaaaaaatgtttaaatcaatctgtaaaaggtaaaaatgaaaaacaaaaacaagcaaacaaacaaaaaacaatggaaaagatgaagctggagagagaggaaccagttgccaaggtagagagctgcccgctcctgccctctggatgacataggggacatcaacaagacggctgccaacctgagaagtcaccaaaccacaaaaataaccttacagccttcagggaaagactaccagctctgtctttctaccctctaatttaacaatgcataagagtcaataaaccctacttttttatttttggtttttattttgttttcatttttttctcccatttgcctatttatttttttgtttcccttttttttttctttttccgtttttccatttcctcacatgtccacgagatgcttgggttgcttttccaggggctagtttggcttttccaagtgggttttctttggagaatctgatgccatgcaattggcatgacacctgccatgccactatctttggcatccatggggcttatatgagacatgaagcattggctcagaagtagagggagaagaggaacccagttcccttgacttcccttttgagagcacacgttctgctgggtagctcaattgccagcctctgtcatgagaaggtatagccccatcttgatagaagagttactccgagctttatcatggaccagaggaaaaccagaaaactgaaaacattcctctgtcttgtggccagtttggcctttcactgcactattctgatggtgcctgactgaatccaaatatcctagctggctcttactatttttcacaaatgagtattcacatataagagatgaacatccatgtgagatcatcccaatcagaatataagactcaaggagtttgacttggtggccaatacctgccttccaaagagatcctacctttgcagatttgctcctttcccattgccttgaaggtctggcaatccctgttctttcatttgacaagtacttactgagtactcactatatacaaatcattaggttaaaacagacacacacacacacacacacacacacacacacacacacacacacaagacctgggcccttaagtttacagtccagcaggaaatgttaacctccattcagctacgcccccttgttatctagaccttcgggatcatctaagaaatgtagctgaaacccaaggagccagctagaaagaagcttttgattagatgtacaatacattgggggcagaagatctgggatcaattaagatggagcctgaaggactatggaatcttgcttgtcaggaatgggcaagtctacttcctgccatttctgaaagccccgcgggaccagcttctaggctgagctgcctagtaggctgaagcttcaggactctgcaggtcaaggatatgtgatgagcaccggcctaagtgtttgctcttcagattcctaagtagcacaagactttatcagaatctataggcataccaacctggatcactcttccacccaaccgaggagtagatgcatctgaatcttcatatcggtatattaagtccaaaagatggtccgggctgcccctcacaaaagcttctgcatccacgtggtaagctcccatggatgacagggttctgtatgatggagactattattgctattgctgctaattccatgagctgtgaagat

SEQ ID NO: 366 - protein, 1874 aa, Homo sapiens
MLGSSVKSVQPEVELSSGGGDEGADEPRGAGRKAAAADGRGMLPKRAKAPGGGGGMAKASAAELKVFKSGSVDSRVPGGPPASNLRKQKSLTNLSFLTDSEKKLQLYEPEWSDDMAKAPKGLGKVGSKGREAPLMSKTLSKSEHSLFQAKGSPAGGAKTPLAPLAPNLGKPSRIPRGPYAEVKPLSKAPEAAVSEDGKSDDELLSSKAKAQKSSGPVPSAKGQEERAFLKVDPELVVTVLGDLEQLLFSQMLDPESQRKRTVQNVLDLRQNLEETMSSLRGSQVTHSSLEMTCYDSDDANPRSVSSLSNRSSPLSWRYGQSSPRLQAGDAPSVGGSCRSEGTPAWYMHGERAHYSHTMPMRSPSKLSHISRLELVESLDSDEVDLKSGYMSDSDLMGKTMTEDDDITTGWDESSSISSGLSDASDNLSSEEFNASSSLNSLPSTPTASRRNSTIVLRTDSEKRSLAESGLSWFSESEEKAPKKLEYDSGSLKMEPGTSKWRRERPESCDDSSKGGELKKPISLGHPGSLKKGKTPPVAVTSPITHTAQSALKVAGKPEGKATDKGKLAVKNTGLQRSSSDAGRDRLSDAKKPPSGIARPSTSGSFGYKKPPPATGTATVMQTGGSATLSKIQKSSGIPVKPVNGRKTSLDVSNSAEPGFLAPGARSNIQYRSLPRPAKSSSMSVTGGRGGPRPVSSSIDPSLLSTKQGGLTPSRLKEPTKVASGRTTPAPVNQTDREKEKAKAKAVALDSDNISLKSIGSPESTPKNQASHPTATKLAELPPTPLRATAKSFVKPPSLANLDKVNSNSLDLPSSSDTTHASKVPDLHATSSASGGPLPSCFTPSPAPILNINSASFSQGLELMSGFSVPKETRMYPKLSGLHRSMESLQMPMSLPSAFPSSTPVPTPPAPPAAPTEEETEELTWSGSPRAGQLDSNQRDRNTLPKKGLRYQLQSQEETKERRHSHTIGGLPESDDQSELPSPPALPMSLSAKGQLTNIVSPTAATTPRITRSNSIPTHEAAFELYSGSQMGSTLSLAERPKGMIRSGSFRDPTDDVHGSVLSLASSASSTYSSAEERMQSEQIRKLRRELESSQEKVATLTSQLSANANLVAAFEQSLVNMTSRLRHLAETAEEKDTELLDLRETIDFLKKKNSEAQAVIQGALNASETTPKELRIKRQNSSDSISSLNSITSHSSIGSSKDADAKKKKKKSWLRSSFNKAFSIKKGPKSASSYSDIEEIATPDSSAPSSPKLQHGSTETASPSIKSSTSSSVGTDVTEGPAHPAPHTRLFHANEEEEPEKKEVSELRSELWEKEMKLTDIRLEALNSAHQLDQLRETMHNMQLEVDLLKAENDRLKVAPGPSSGSTPGQVPGSSALSSPRRSLGLALTHSFGPSLADTDLSPMDGISTCGPKEEVTLRVVVRMPPQHIIKGDLKQQEFFLGCSKVSGKVDWKMLDEAVFQVFKDYISKMDPASTLGLSTESIHGYSISHVKRVLDAEPPEMPPCRRGVNNISVSLKGLKEKCVDSLVFETLIPKPMMQHYISLLLKHRRLVLSGPSGTGKTYLTNRLAEYLVERSGREVTEGIVSTFNMHQQSCKDLQLYLSNLANQIDRETGIGDVPLVILLDDLSEAGSISELVNGALTCKYHKCPYIIGTTNQPVKMTPNHGLHLSFRMLTFSNNVEPANGFLVRYLRRKLVESDSDINANKEELLRVLDWVPKLWYHLHTFLEKHSTSDFLIGPCFFLSCPIGIEDFRTWFIDLWNNSIIPYLQEGAKDGIKVHGQKAAWEDPVEWVRDTLPWPSAQQDQSKLYHLPPPTVGPHSIASPPEDRTVKDSTPSSLDSDPLMAMLLKLQEAANYIESPDRETILDPNLQATL

SEQ ID NO: 367 - DNA, 3126 bp, Homo sapiens
atggcggcggcggcggcagctggtgcggcctccgggctgccgggtccagtggcacaaggattaaaggaagcgttagtggatacgctcaccgggatcctatccccagtacaggaggtgcgggcggctgctgaagaacagattaaggtgctggaggtgacggaggaatttggtgttcacttggcagaactgactgtagatccccagggggcactggcaatccgtcagctggcatcagtcatcttgaaacaatatgtggagactcactggtgtgcccaatcagagaaatttaggcctcctgaaactacagaaagggcaaaaattgttatccgggagctattgcctaatgggttgagagaatcgataagcaaagtgcgctccagtgtggcctatgcagtgtcagccattgcccactgggactggcctgaagcttggccccaactcttcaacctgctcatggagatgttggtgagcggagacttaaatgccgtccatggagccatgcgtgtgctgacagaattcactcgtgaagttacagacacacagatgccacttgttgctcctgtcattctcccagagatgtataagatcttcaccatggctgaggtgtatggtattcgaacccgttcccgagccgtggagatttttaccacttgtgcccatatgatctgtaacatggaggagctggaaaagggtgcagccaaagtcctgatctttcccgtggtacagcagttcacagaggcctttgttcaggccctccagataccagatggccccacatctgacagtgggtttaagatggaggtcctaaaggcagtgacagccctagtgaaaaacttcccaaagcacatggtgtcctccatgcagcagattctgcctattgtttggaacaccctaaccgagagtgcagctttttatgtgaggacagaagtaaattacacagaagaagtagaagatcctgtggattctgatggtgaagtcctgggctttgaaaatctcgtctttagcatttttgaatttgtccatgctctactagaaaatagcaaattcaaaagcactgttaagaaagccttgcctgaattgatttattatattatcctgtacatgcaaatcactgaggagcagattaaagtatggacagccaacccccaacaatttgtagaagatgaagatgatgatacattctcctatactgttagaatagcagctcaagacttgttgctggctgtggccacagatttccagaatgaaagtgcagcagccctggctgctgcagccactcgacatttacaagaagctgagcaaaccaaaaacagtggcactgagcactggtggaagatccatgaggcatgcatgcttgccctaggctcagtgaaggccatcatcactgacagtgtgaaaaatggcaggattcattttgacatgcatgggttcctgaccaatgtcatccttgcagacctcaacctctcagtgtctcctttcctcttgggccgggcactttgggctgccagtcggttcactgttgctatgtcccctgaactgatccagcagttcctacaggcaacagttagtggtcttcacgagacacagcccccatcagttcgaatttctgcagtgagagccatctggggttattgtgaccaactgaaagtctcagagagtacccacgtgctccagcccttcctccccagcatccttgatggcttaattcacctagcagcccagttcagctcagaggtcctcaacctggtgatggagaccctgtgcatcgtttgtacagtagaccccgaattcacagcaagcatggaaagcaaaatctgccccttcaccatcgccattttcctaaagtacagtaatgatcccgtcgtcgcctcactggctcaggacatcttcaaggagctgtcccagattgaagcctgtcagggcccaatgcaaatgaggctgattcccactctggtcagcataatgcaggccccagcagacaagattcctgcagggctttgtgcgacagccattgatatcctgacaacagtagtacgaaatacaaagcctcccctttcccagcttctcatctgccaagctttccctgctgtggcacagtgtacccttcacacagatgacaatgccaccatgcagaatggcggagagtgcttgcgggcctatgtgtcagtgaccctggaacaagtagcccagtggcatgatgagcagggccacaatggactgtggtatgtgatgcaagtggtgagccagctcctggacccccgcacctcagagttcactgcggcctttgtgggccgccttgtttccaccctcatctccaaggcagggcgggaactcggggagaatctagaccagattcttcgtgccatcctcagtaagatgcagcaggcagagacgctcagtgtcatgcagtccctgatcatggtgttcgctcatctggtgcacactcagctagaacctctcttggagttcctgtgtagcctcccaggacctactggcaaacctgctctagagtttgtgatggctgagtggacaagccgacagcacctgttctatggacagtatgaaggcaaagtcagctctgtggcactctgtaagctgctccagcatggcatcaatgcagatgacaaacggctacaggatatccgtgtgaagggagaggagatctacagcatggatgagggcatccgcacccgctctaagtcagccaaaaacccagaacgctggacaaacattcctttgctggtcaagatcctaaagctgatcatcaacgagctctccaacgtcatggaggctaatgccgctcgccaggccactcctgcagagtggagtcaagatgactccaatgatatgtgggaggaccaggaggaggaagaggaggaggaggaggatggtttagctggccaacttttatctgacattcttgctacaagtaaatatgaggaggattactacgaggatgatgaggaagatgaccctgatgccctgaaggatcctctctatcagattgatctgcaggcatatctcacagatttcctctgccagtttgctcagcagccctgctacataatgttttcaggccaccttaatgacaatgagaggcgagttctacagaccatcggcatctaa

SEQ ID NO: 368 - protein, 1041 aa, Homo sapiens
MAAAAAAGAASGLPGPVAQGLKEALVDTLTGILSPVQEVRAAAEEQIKVLEVTEEFGVHLAELTVDPQGALAIRQLASVILKQYVETHWCAQSEKFRPPETTERAKIVIRELLPNGLRESISKVRSSVAYAVSAIAHWDWPEAWPQLFNLLMEMLVSGDLNAVHGAMRVLTEFTREVTDTQMPLVAPVILPEMYKIFTMAEVYGIRTRSRAVEIFTTCAHMICNMEELEKGAAKVLIFPVVQQFTEAFVQALQIPDGPTSDSGFKMEVLKAVTALVKNFPKHMVSSMQQILPIVWNTLTESAAFYVRTEVNYTEEVEDPVDSDGEVLGFENLVFSIFEFVHALLENSKFKSTVKKALPELIYYIILYMQITEEQIKVWTANPQQFVEDEDDDTFSYTVRIAAQDLLLAVATDFQNESAAALAAAATRHLQEAEQTKNSGTEHWWKIHEACMLALGSVKAIITDSVKNGRIHFDMHGFLTNVILADLNLSVSPFLLGRALWAASRFTVAMSPELIQQFLQATVSGLHETQPPSVRISAVRAIWGYCDQLKVSESTHVLQPFLPSILDGLIHLAAQFSSEVLNLVMETLCIVCTVDPEFTASMESKICPFTIAIFLKYSNDPVVASLAQDIFKELSQIEACQGPMQMRLIPTLVSIMQAPADKIPAGLCATAIDILTTVVRNTKPPLSQLLICQAFPAVAQCTLHTDDNATMQNGGECLRAYVSVTLEQVAQWHDEQGHNGLWYVMQVVSQLLDPRTSEFTAAFVGRLVSTLISKAGRELGENLDQILRAILSKMQQAETLSVMQSLIMVFAHLVHTQLEPLLEFLCSLPGPTGKPALEFVMAEWTSRQHLFYGQYEGKVSSVALCKLLQHGINADDKRLQDIRVKGEEIYSMDEGIRTRSKSAKNPERWTNIPLLVKILKLIINELSNVMEANAARQATPAEWSQDDSNDMWEDQEEEEEEEEDGLAGQLLSDILATSKYEEDYYEDDEEDDPDALKDPLYQIDLQAYLTDFLCQFAQQPCYIMFSGHLNDNERRVLQTIGI

SEQ ID NO: 369 - DNA, 1141 bp, Homo sapiens
gggctgggccccgccgcagctccagctggccggcttggtcctgcggtcccttctctgggaggcccgaccccggccgcgcccagcccccaccatgccacccgcggggctccgccgggccgcgccgctcaccgcaatcgctctgttggtgctgggggctcccctggtgctggccggcgaggactgcctgtggtacctggaccggaatggctcctggcatccggggtttaactgcgagttcttcaccttctgctgcgggacctgctaccatcggtactgctgcagggacctgaccttgcttatcaccgagaggcagcagaagcactgcctggccttcagccccaagaccatagcaggcatcgcctcagctgtgatcctctttgttgctgtggttgccaccaccatctgctgcttcctctgttcctgttgctacctgtaccgccggcgccagcagctccagagcccatttgaaggccaggagattccaatgacaggcatcccagtgcagccagtatacccatacccccaggaccccaaagctggccctgcacccccacagcctggcttcatgtacccacctagtggtcctgctccccaatatccactctacccagctgggcccccagtctacaaccctgcagctcctcctccctatatgccaccacagccctcttacccgggagcctgaggaaccagccatgtctctgctgccccttcagtgatgccaaccttgggagatgccctcatcctgtacctgcatctggtcctgggggtggcaggagtcctccagccaccaggccccagaccaagccaagccctgggccctactggggacagagccccagggaagtggaacaggagctgaactagaactatgaggggttggggggagggcttggaattatgggctatttttactgggggcaagggagggagatgacagcctgggtcacagtgcctgttttcaaatagtccctctgctcccaagatcccagccaggaaggctggggccctactgtttgtcccctctgggctggggtggggggagggaggaggttccgtcagcagctggcagtagccctcctctctggctgccccactggccacatctctggcctgctagattaaagctgtaaagacaaaa

SEQ ID NO: 370 - protein, 197 aa, Homo sapiens
MPPAGLRRAAPLTAIALLVLGAPLVLAGEDCLWYLDRNGSWHPGFNCEFFTFCCGTCYHRYCCRDLTLLITERQQKHCLAFSPKTIAGIASAVILFVAVVATTICCFLCSCCYLYRRRQQLQSPFEGQEIPMTGIPVQPVYPYPQDPKAGPAPPQPGFMYPPSGPAPQYPLYPAGPPVYNPAAPPPYMPPQPSYPGA

SEQ ID NO: 371 - DNA, 3881 bp, Homo sapiens
gctgaagtgttcgaccagcaggaggttttctcctcagcccactcgctgcatccagatcagctcaccccgcgccctttcctgcccaccaggactctgatagcccctggcagccacagcccattttgccaagatgtctagagtagccaaatatcgccggcagtgagtgaagaccccgacatcgacagcctgctgggaccctgtctcccgaggagatggaggagctggagaaggagctggacgtggtggacccagacgggagtgttcccgtggggctgcggcagagaaaccagacggagaaacagtccacgggtgtgtacaaccgggaggccatgctcaacttctgtgaaaaggagaccaagaaacttatgcagagggagatgtccatggatgaaagcaagcaagtggagaccaagacagatgccaagaatggacaggaaaggggcagagatgccagcaaaaaagccctgggccccagacggaactcagatctggggaaggagccaaagaggggtggtttaaagaaaagcttctctagagacagagatgaagctggtggcaagagtggcgagaagcccaaggaggagaagatcatccggggcattgacaagggccgggtcagggctgcagtggataagaaggaggcagggaaggatgggagaggagaggagagggcagtggccaccaagaaggaagaggagaagaaagggggtgacaggaacacaggcttgagcagggacaaggataaaaagagagaggagatgaaggaggtggccaagaaagaggatgatgagaaggtaaaaggggagcgtaggaacacagacaccagaaaagagggtgagaagatgaaaagagcaggtgggaacacagacatgaaaaaggaggatgagaaggtaaaaagaggaactgggaacacagacaccaaaaaggacgatgaaaaagtcaagaagaatgaacccttacatgaaaaggaagccaaggatgacagcaagaccaaaacacccgagaaacagacgcccagtggccccaccaagccctctgaaggaccggccaaggtggaggaggaggcagctcccagcatatttgatgagcctctggagagagtgaagaacaatgaccccgagatgactgaggtgaacgtcaacaactcagactgcatcacaaatgagatcttggtccggtttactgaggctctggagttcaacactgtggttaagctgttcgccttggccaacacgcgagccgatgaccacgtggcctttgccattgccatcatgctcaaggccaacaagaccatcaccagcctcaacctggactccaaccacatcacaggcaaaggcatcctggccatcttccgggccctcctccagaacaacacgctgaccgagctccgcttccacaaccagcgacacatctgtggaggcaagacggagatggagatcgccaagctgctgaaggagaatacctccctgctcaagctgggctaccattttgagctggccgggccccgaatgactgtcaccaatctgctcagccgcaacatggacaagcagagacaaaagcggctgcaggagcaaaggcaggcacaggaagccaagggagagaagaaggatctgctggaggtacccaaggccggggccgtggctaagggctccccaaaaccttcacctcaaccatctccaaagccctctccaaagaactcacccaaaaaagggggtgctccagctgccccaccaccccctccccctcccttggctccaccccttatcatggagaacctgaagaattcactctcaccagctacccagaggaagatgggagacaaagtcctccctgcccaggagaagaactcccgtgaccagctattggctgccatccgctccagcaacctcaagcagctcaagaaggtggaagtgcccaaactgcttcagtaggaccaggctgccaggcaccatctgccaatgccatgactgctcaggcctcacctcccagggctacacagaccctgcccaccccatccctggctgacctgctgtggatgtccctattctgccatgggagcgtccaggcctgggtcacgctcaaggaaggatgccttatctcttctcactttccttttcttgtctctgaggctctccaaattttgctttagtacatggagctcaggtttctggacaagaagagtccttttagcacatcactgagaagatggcactgtccagggcccatgtagctggcaagctgcaaaaggcctgtgatccaggaaagatgtcccacagggaccacatccaccccagccccactgccctccagggccaggattcaggcctctgaggagcccacggggcaaagctgctgggccagtggcactctgtgtgggaaaatggcagaaagatggagaggcatgggggcccaaaggggagcgtggggaggggctgaggataccccaaagtccaggctaattagaggatgtggcaggggcagtggcctggatgcacagtgcctgatgggagtaggctccagacaggaggagtgggacagacagcagctggacttgaaggtttgatgccaaagcagacattttcctcacacccacctgctgctgtatgaatagctgtgtatctgtttttccataagattttgataatatatacaaacctttagctgtgaatggctgtgccccacctgttgtcctgaactgtgagtcctgatcctaaccctgggctccctggaggactctagaagctcaggttccctgccacactatttgagttggccaagaaataaattcacatcctcagaaagtgcagcatggaggaaaatctgaactctaagcagaagactctccactgacctggttgtccaggtctagaaggccaggcctctactaggtctgctcctgaaccagtcctgctgcctggagtcagtagccagagttgttctcaggggtgctggggcagagtggagcccagggtgctgggatggctatattaggcatgttcagggatgctcattccatgactctgcctaaccatgggctcagggccaggtcctcacagcagtcacaggcccaggaaggcggcaggcagagaagtggagtgactatttggagaatagcacccatatctgtgtgccctagggctcagaggggcctcatcttccccagccctccccacctgctcaccaattccacttcctgccccaactgcaggaatgctgacaatgctgccatgcccaccatcgggtgtaggtgaaaggcatctttctgaatttcattctcttgaaggtgctgccaccccttggcactgtggaactgccaccttgggtctgtgtcacttgtaggtttctctgcctccaggttgcctcaacagcaggaggcacagcagtttcaccatctttgaggtgagggtggggtgccccagctaggaagcaagatcgctgtgctaggtctgaccaaaaccagagggcagtctagtcctgggggtaaagccctcagatcccagggtacactcttctccattccctccacccacttgcctgtcaccccagtcacctaagcaatcactgggcccagaggagaggagacagacacacactggctcctggacctaaagggtatgagctggagctaaggccagctagagcttccactgtcagccctcactgtcagccccactgcacccccctgtgcctgctgggcactgggcactagctagatgctttaggttgcttcagctgatccttcaactctgtgaggtggataccaatattctattttgcagatagaatttggcccagagaggttaactaatatatccatgatcacacagctaataaaagtcagagctcaggaaaaaaaaaaaaaaaaaaaaaaaaaaaaaaaa

SEQ ID NO: 372 - protein, 572 aa, Homo sapiens
MEELEKELDVVDPDGSVPVGLRQRNQTEKQSTGVYNREAMLNFCEKETKKLMQREMSMDESKQVETKTDAKNGQERGRDASKKALGPRRNSDLGKEPKRGGLKKSFSRDRDEAGGKSGEKPKEEKIIRGIDKGRVRAAVDKKEAGKDGRGEERAVATKKEEEKKGGDRNTGLSRDKDKKREEMKEVAKKEDDEKVKGERRNTDTRKEGEKMKRAGGNTDMKKEDEKVKRGTGNTDTKKDDEKVKKNEPLHEKEAKDDSKTKTPEKQTPSGPTKPSEGPAKVEEEAAPSIFDEPLERVKNNDPEMTEVNVNNSDCITNEILVRFTEALEFNTVVKLFALANTRADDHVAFAIAIMLKANKTITSLNLDSNHITGKGILAIFRALLQNNTLTELRFHNQRHICGGKTEMEIAKLLKENTSLLKLGYHFELAGPRMTVTNLLSRNMDKQRQKRLQEQRQAQEAKGEKKDLLEVPKAGAVAKGSPKPSPQPSPKPSPKNSPKKGGAPAAPPPPPPPLAPPLIMENLKNSLSPATQRKMGDKVLPAQEKNSRDQLLAAIRSSNLKQLKKVEVPKLLQ

SEQ ID NO: 373 - DNA, 1645 bp, Homo sapiens
agtcaagatggaggagtacgcgcgagagccttgcccatggcgaattgtggatgactgtggtggggcctttacgatgggtaccattggtggtggtatctttcaagcaatcaaaggttttcgcaattctccagtgggagtaaaccacagactacgagggagtttgacagctattaaaaccagggctccacagttaggaggtagctttgcagtttggggagggctgttttccatgattgactgtagtatggttcaagtcagaggaaaggaagatccctggaactccatcacaagtggtgccttaacgggagccatactggcagcaagaaatggaccagtggccatggttgggtcagccgcaatgggtggcattctcctagctttaattgaaggagctggtatcttgttgacaagatttgcctctgcacagtttcccaatggtcctcagtttgcagaagacccctcccagttgccttcaactcagttaccttcctcaccttttggagactatcgacaatatcagtaggacttctttcctaggatttctttaacagaacgagttgtggttcgagaaggatttcagaagatcaagttacagtctgtttttaaaaccataggtgggacagctatggccaataggctataaagagacatttagcacttttttctatttaaaggaacaagcggggaagggtgctaaaagataatacgtttatttattcacacttgaattgcatttgtgatcaaaataaatgtttaaatcgctaaaggaaaatacagtaagtgcttgaaagatgaaggaccaaaaggccaaaaaacagtgaaatatgatcatcatctcttgcggacttctctgcctggttttgtgtgttctgttattcaaacaataaaaagctggtggaacttactctttcttttaagataagttgtagacttcgatgtttcatgctcatgtacttcaaataatgcatgttttatagttagtccctcatcacttgaagtgacttctgagaattatgcagagtcaacatggatcatttcacagtgagatgctttatggattgaaggatatggtaaaatgtttatagtttactttgaaagtaaaatatactatgtcttggttttgaggatattggatacaaaactctcttcctttagggctactgagtcttgattcctgatcatcagaaatttcaccagaaacaacttgcttccaatatacccaattctatatgaagaattcatggagagtgtactggcactggaagagtttagtgtttcttgtatgcttgaaaataaagtatgtactgttttgaatgtgttccaagtcctctgcataaacgatgtattttggggtctggttgggcctggaaaatggatgagcacttcagaacaggtcattttcctgatattggaagtgacatgtggccctataggaggcatgatgttagttaattacacatttgcctacatctgtgggaaatggagaacaaagccatgtgggtactgtaaacacacgtttatcttttggcccaatgccatacatatggtaggcatttaattactgattgtgtttggataatttgggaattttcgactgtggtaaaatatacataaaataatacttattaaaaaaaaaaaaaaaaaa

SEQ ID NO: 374 - protein, 171 aa, Homo sapiens
MEEYAREPCPWRIVDDCGGAFTMGTIGGGIFQAIKGFRNSPVGVNHRLRGSLTAIKTRAPQLGGSFAVWGGLFSMIDCSMVQVRGKEDPWNSITSGALTGAILAARNGPVAMVGSAAMGGILLALIEGAGILLTRFASAQFPNGPQFAEDPSQLPSTQLPSSPFGDYRQYQ

SEQ ID NO: 375 - DNA, 2430 bp, Homo sapiens
cccggccggtgagcaacggctctgcggccatggcgagcggcgagcattcccccggcagcggcgcggcccggcggccgctgcactccgcgcaggctgtggacgtggcctcggcctccaacttccgggcctttgagctgctgcacttgcacctggacctgcgggctgagttcgggcctccagggcccggcgcagggagccgggggctgagcggcaccgcggtcctggacctgcgctgcctggagcccgagggcgccgccgagctgcggctggactcgcacccgtgcctggaggtgacggcggcggcgctgcggcgggagcggcccggctcggaggagccgcctgcggagcccgtgagcttctacacgcagcccttctcgcactatggccaggccctgtgcgtgtccttcccgcagccctgccgcgccgccgagcgcctccaggtgctgctcacctaccgcgtcggggagggacccggggtttgctggttggctcccgagcagacagcaggaaagaagaagcccttcgtgtacacccagggccaggctgtcctaaaccgggccttcttcccttgcttcgacacgcctgctgttaaatacaagtattcagctcttattgaggtcccagatggcttcacagctgtgatgagtgctagcacctgggagaagagaggtccaaataagttcttcttccagatgtgtcagcccatcccctcctatctgatagctttggccatcggagatctggtttcggctgaagttggacccaggagccgggtgtgggctgagccctgcctgattgatgctgccaaggaggagtacaacggggtgatagaagaatttttggcaacaggagagaagctttttggaccttatgtttggggaaggtatgacttgctcttcatgccaccgtcctttccatttggaggaatggagaacccttgtctgacctttgtcaccccctgcctgctagctggggaccgctccttggcagatgtcatcatccatgagatctcccacagttggtttgggaacctggtcaccaacgccaactggggtgaattctggctcaatgaaggtttcaccatgtacgcccagaggaggatctccaccatcctctttggcgctgcgtacacctgcttggaggctgcaacggggcgggctctgctgcgtcagcacatggacatcactggagaggaaaacccactcaacaagctccgcgtgaagattgaaccaggcgttgacccggacgacacctataatgagaccccctacgagaaaggtttctgctttgtctcatacctggcccacttggtgggtgatcaggatcagtttgacagttttctcaaggcctatgtgcatgaattcaaattccgaagcatcttagccgatgactttctggacttctacttggaatatttccctgagcttaagaaaaagagagtggatatcattccaggttttgagtttgatcgatggctgaatacccccggctggcccccgtacctccctgatctctcccctggggactcactcatgaagcctgctgaagagctagcccaactgtgggcagccgaggagctggacatgaaggccattgaagccgtggccatctctccctggaagacctaccagctggtctacttcctggataagatcctccagaaatcccctctccctcctgggaatgtgaaaaaacttggagacacatacccaagtatctcaaatgcccggaatgcagagctccggctgcgatggggccaaatcgtccttaagaacgaccaccaggaagatttctggaaagtgaaggagttcctgcataaccaggggaagcagaagtatacacttccgctgtaccacgcaatgatgggtggcagtgaggtggcccagaccctcgccaaggagacttttgcatccaccgcctcccagctccacagcaatgttgtcaactatgtccagcagatcgtggcacccaagggcagttagaggctcgtgtgcatggcccctgcctcttcaggctctccaggctttcagaataattgtttgttcccaaattcctgttccctgatcaacttcctggagtttatatcccctcaggataatctattctctagcttaggtatctgtgactcttgggcctctgctctggtgggaacttacttctctatagcccactgagccccgagacagagaacctgcccacagctctccccgctacaggctgcaggcactgcagggcagcgggtattctcctccccacctaagtctctgggaagaagtggagaggactgatgctcttcttttttctctttctgtcctttttcttgctgattttatgcaaagggctggcattctgattgttcttttttcaggtttaatccttattttaataaagttttcaagcaaaaattaagttaaaaaaaaaaaaaaaaaa

SEQ ID NO: 376 - protein, 650 aa, Homo sapiens
MASGEHSPGSGAARRPLHSAQAVDVASASNFRAFELLHLHLDLRAEFGPPGPGAGSRGLSGTAVLDLRCLEPEGAAELRLDSHPCLEVTAAALRRERPGSEEPPAEPVSFYTQPFSHYGQALCVSFPQPCRAAERLQVLLTYRVGEGPGVCWLAPEQTAGKKKPFVYTQGQAVLNRAFFPCFDTPAVKYKYSALIEVPDGFTAVMSASTWEKRGPNKFFFQMCQPIPSYLIALAIGDLVSAEVGPRSRVWAEPCLIDAAKEEYNGVIEEFLATGEKLFGPYVWGRYDLLFMPPSFPFGGMENPCLTFVTPCLLAGDRSLADVIIHEISHSWFGNLVTNANWGEFWLNEGFTMYAQRRISTILFGAAYTCLEAATGRALLRQHMDITGEENPLNKLRVKIEPGVDPDDTYNETPYEKGFCFVSYLAHLVGDQDQFDSFLKAYVHEFKFRSILADDFLDFYLEYFPELKKKRVDIIPGFEFDRWLNTPGWPPYLPDLSPGDSLMKPAEELAQLWAAEELDMKAIEAVAISPWKTYQLVYFLDKILQKSPLPPGNVKKLGDTYPSISNARNAELRLRWGQIVLKNDHQEDFWKVKEFLHNQGKQKYTLPLYHAMMGGSEVAQTLAKETFASTASQLHSNVVNYVQQIVAPKGS

SEQ ID NO: 377 - DNA, 1914 bp, Homo sapiens
agttgaccaaccatgccttgaggataaattggatgggatcagatgggaagatgtgacaagaagagaaatcctcctctatataggatgctctgctgtttcctaaggattttcagcaccttgccccaaaatcaaaatgatgcttcaacacccaggccaggtctctgcctcggaagtgagtgcttctgccatcgtcccctgcctgtcccctcctgggtcactggtgtttgaggattttgctaacctgacgccctttgtcaaggaagagctgaggtttgccatccagaacaagcacctctgccaccggatgtcctctgcgctggaatcagtcactgtcagcgacagacccctcggggtgtccatcacaaaagccgaggtagcccctgaagaagatgaaaggaaaaagaggcgacgagaaagaaataagattgcagctgcaaagtgccgaaacaagaagaaggagaagacggagtgcctgcagaaagagtcggagaagctggaaagtgtgaatgctgaactgaaggctcagattgaggagctcaagaacgagaagcagcatttgatatacatgctcaaccttcatcggcccacgtgtattgtccgggctcagaatgggaggactccagaagatgagagaaacctctttatccaacagataaaagaaggaacattgcagagctaagcagtcgtggtatgggggcgactggggagtcctcattgaatcctcattttatacccaaaaccctgaagccattggagagctgtcttcctgtgtacctctagaatcccagcagcagagaaccatcaaggcgggagggcctgcagtgattcagcaggcccttcccattctgccccagagtgggtcttggaccagggcaagtgcatctttgcctcaactccaggatttaggccttaacacactggccattcttatgttccagatggcccccagctggtgtcctgcccgcctttcatctggattctacaaaaaaccaggatgcccaccgttaggattcaggcagcagtgtctgtacctcgggtgggagggatggggccatctccttcaccgtggctaccattgtcactcgtaggggatgtggagtgagaacagcatttagtgaagttgtgcaacggccagggttgtgctttctagcaaatatgctgttatgtccagaaattgtgtgtgcaagaaaactaggcaatgtactcttccgatgtttgtgtcacacaacactgatgtgacttttatatgctttttctcagatctggtttctaagagttttggggggcggggctgtcaccacgtgcagtatctcaagatattcaggtggccagaagagcttgtcagcaagaggaggacagaattctcccagcgttaacacaaaatccatgggcagtatgatggcaggtcctctgttgcaaactcagttccaaagtcacaggaagaaagcagaaagttcaacttccaaagggttaggactctccactcaatgtcttaggtcaggagttgtgtctaggctggaagagccaaagaatattccattttcctttccttgtggttgaaaaccacagtcagtggagagatgtttggaaaccacagtcagtggagcctgggtggtacccaggctttagcattattggatgtcaatagcattgtttttgtcatgtagctgttttaagaaatctggcccagggtgtttgcagctgtgagaagtcactcacactggccacaaggacgctggctactgtctattaaaattctgatgtttctgtgaaattctcagagtgtttaattgtactcaatggtatcattacaattttctgtaagagaaaatattacttatttatcctagtattcctaacctgtcagaataataaatattggaaccaagacatggtaaaaaaaaaaaaaaaaaa

SEQ ID NO: 378 - protein, 181 aa, Homo sapiens
MMLQHPGQVSASEVSASAIVPCLSPPGSLVFEDFANLTPFVKEELRFAIQNKHLCHRMSSALESVTVSDRPLGVSITKAEVAPEEDERKKRRRERNKIAAAKCRNKKKEKTECLQKESEKLESVNAELKAQIEELKNEKQHLIYMLNLHRPTCIVRAQNGRTPEDERNLFIQQIKEGTLQS

SEQ ID NO: 379 - DNA, 2361 bp, Homo sapiens
cgggaagctattaatagcattacgtcagcctgggactggcaacacggagtaaacgaccgcgccgccagcctgagggctataaaaggggtgatgcaacgctctccaagccacagtcgcacgcagccaggcgcgcactgcacagctctcttctctcgccgccgcccgagcgcacccttcagcccgcgcgccggccgtgagtcctcggtgctcgcccgccggccagacaaacagcccgcccgaccccgtcccgaccctggccgccccgagcggagcctggagcaaaatgatgcttcaacacccaggccaggtctctgcctcggaagtgagtgcttctgccatcgtcccctgcctgtcccctcctgggtcactggtgtttgaggattttgctaacctgacgccctttgtcaaggaagagctgaggtttgccatccagaacaagcacctctgccaccggatgtcctctgcgctggaatcagtcactgtcagcgacagacccctcggggtgtccatcacaaaagccgaggtagcccctgaagaagatgaaaggaaaaagaggcgacgagaaagaaataagattgcagctgcaaagtgccgaaacaagaagaaggagaagacggagtgcctgcagaaactcccaaggcccttttgggtccagaagacctgcatatgggctgttgactcatgcaaatgaggtatctgaactgcagcttcagtattagcagagccacaggccgcctctgtggcatcaccagggtttctctgaagaagagggtctgcattttcctaaacccagtgctgctctcccatctcccatcttcctctcgcagcttgatgagccccggtgtgtcccaggtacacccctgcatccaggcagcagcccaggccaccccctcctcactggcccttggctcctttcttgatgcctctgttgcttgtcccccaggagtcggagaagctggaaagtgtgaatgctgaactgaaggctcagattgaggagctcaagaacgagaagcagcatttgatatacatgctcaaccttcatcggcccacgtgtattgtccgggctcagaatgggaggactccagaagatgagagaaacctctttatccaacagataaaagaaggaacattgcagagctaagcagtcgtggtatgggggcgactggggagtcctcattgaatcctcattttatacccaaaaccctgaagccattggagagctgtcttcctgtgtacctctagaatcccagcagcagagaaccatcaaggcgggagggcctgcagtgattcagcaggcccttcccattctgccccagagtgggtcttggaccagggcaagtgcatctttgcctcaactccaggatttaggccttaacacactggccattcttatgttccagatggcccccagctggtgtcctgcccgcctttcatctggattctacaaaaaaccaggatgcccaccgttaggattcaggcagcagtgtctgtacctcgggtgggagggatggggccatctccttcaccgtggctaccattgtcactcgtaggggatgtggagtgagaacagcatttagtgaagttgtgcaacggccagggttgtgctttctagcaaatatgctgttatgtccagaaattgtgtgtgcaagaaaactaggcaatgtactcttccgatgtttgtgtcacacaacactgatgtgacttttatatgctttttctcagatctggtttctaagagttttggggggcggggctgtcaccacgtgcagtatctcaagatattcaggtggccagaagagcttgtcagcaagaggaggacagaattctcccagcgttaacacaaaatccatgggcagtatgatggcaggtcctctgttgcaaactcagttccaaagtcacaggaagaaagcagaaagttcaacttccaaagggttaggactctccactcaatgtcttaggtcaggagttgtgtctaggctggaagagccaaagaatattccattttcctttccttgtggttgaaaaccacagtcagtggagagatgtttggaaaccacagtcagtggagcctgggtggtacccaggctttagcattattggatgtcaatagcattgtttttgtcatgtagctgttttaagaaatctggcccagggtgtttgcagctgtgagaagtcactcacactggccacaaggacgctggctactgtctattaaaattctgatgtttctgtgaaattctcagagtgtttaattgtactcaatggtatcattacaattttctgtaagagaaaatattacttatttatcctagtattcctaacctgtcagaataataaatattggaaccaagacatggtaaa

SEQ ID NO: 380 - protein, 135 aa, Homo sapiens
MMLQHPGQVSASEVSASAIVPCLSPPGSLVFEDFANLTPFVKEELRFAIQNKHLCHRMSSALESVTVSDRPLGVSITKAEVAPEEDERKKRRRERNKIAAAKCRNKKKEKTECLQKLPRPFWVQKTCIWAVDSCK

SEQ ID NO: 381 - DNA, 2049 bp, Homo sapiens
cgggaagctattaatagcattacgtcagcctgggactggcaacacggagtaaacgaccgcgccgccagcctgagggctataaaaggggtgatgcaacgctctccaagccacagtcgcacgcagccaggcgcgcactgcacagctctcttctctcgccgccgcccgagcgcacccttcagcccgcgcgccggccgtgagtcctcggtgctcgcccgccggccagacaaacagcccgcccgaccccgtcccgaccctggccgccccgagcggagcctggagcaaaatgatgcttcaacacccaggccaggtctctgcctcggaagtgagtgcttctgccatcgtcccctgcctgtcccctcctgggtcactggtgtttgaggattttgctaacctgacgccctttgtcaaggaagagctgaggtttgccatccagaacaagcacctctgccaccggatgtcctctgcgctggaatcagtcactgtcagcgacagacccctcggggtgtccatcacaaaagccgaggtagcccctgaagaagatgaaaggaaaaagaggcgacgagaaagaaataagattgcagctgcaaagtgccgaaacaagaagaaggagaagacggagtgcctgcagaaagagtcggagaagctggaaagtgtgaatgctgaactgaaggctcagattgaggagctcaagaacgagaagcagcatttgatatacatgctcaaccttcatcggcccacgtgtattgtccgggctcagaatgggaggactccagaagatgagagaaacctctttatccaacagataaaagaaggaacattgcagagctaagcagtcgtggtatgggggcgactggggagtcctcattgaatcctcattttatacccaaaaccctgaagccattggagagctgtcttcctgtgtacctctagaatcccagcagcagagaaccatcaaggcgggagggcctgcagtgattcagcaggcccttcccattctgccccagagtgggtcttggaccagggcaagtgcatctttgcctcaactccaggatttaggccttaacacactggccattcttatgttccagatggcccccagctggtgtcctgcccgcctttcatctggattctacaaaaaaccaggatgcccaccgttaggattcaggcagcagtgtctgtacctcgggtgggagggatggggccatctccttcaccgtggctaccattgtcactcgtaggggatgtggagtgagaacagcatttagtgaagttgtgcaacggccagggttgtgctttctagcaaatatgctgttatgtccagaaattgtgtgtgcaagaaaactaggcaatgtactcttccgatgtttgtgtcacacaacactgatgtgacttttatatgctttttctcagatctggtttctaagagttttggggggcggggctgtcaccacgtgcagtatctcaagatattcaggtggccagaagagcttgtcagcaagaggaggacagaattctcccagcgttaacacaaaatccatgggcagtatgatggcaggtcctctgttgcaaactcagttccaaagtcacaggaagaaagcagaaagttcaacttccaaagggttaggactctccactcaatgtcttaggtcaggagttgtgtctaggctggaagagccaaagaatattccattttcctttccttgtggttgaaaaccacagtcagtggagagatgtttggaaaccacagtcagtggagcctgggtggtacccaggctttagcattattggatgtcaatagcattgtttttgtcatgtagctgttttaagaaatctggcccagggtgtttgcagctgtgagaagtcactcacactggccacaaggacgctggctactgtctattaaaattctgatgtttctgtgaaattctcagagtgtttaattgtactcaatggtatcattacaattttctgtaagagaaaatattacttatttatcctagtattcctaacctgtcagaataataaatattggaaccaagacatggtaaa

SEQ ID NO: 382 - protein, 181 aa, Homo sapiens; identical to SEQ ID NO: 378

SEQ ID NO: 383 - DNA, 2270 bp, Homo sapiens
cgggaagctattaatagcattacgtcagcctgggactggcaacacggagtaaacgaccgcgccgccagcctgagggctataaaaggggtgatgcaacgctctccaagccacagtcgcacgcagccaggcgcgcactgcacagctctcttctctcgccgccgcccgagcgcacccttcagcccgcgcgccggccgtgagtcctcggtgctcgcccgccggccagacaaacagcccgcccgaccccgtcccgaccctggccgccccgagcggagcctggagcaaaatgatgcttcaacacccaggccaggtctctgcctcggaagtgagtgcttctgccatcgtcccctgcctgtcccctcctgggtcactggtgtttgaggattttgctaacctgacgccctttgtcaaggaagagctgaggtttgccatccagaacaagcacctctgccaccggatgtcctctgcgctggaatcagtcactgtcagcgacagacccctcggggtgtccatcacaaaagccgaggtagcccctgaagaagatgaaaggaaaaagaggcgacgagaaagaaataagattgcagctgcaaagtgccgaaacaagaagaaggagaagacggagtgcctgcagaaactcccaaggcccttttgggtccagaagacctgcatatgggctgttgactcatgcaaatgaggtatctgaactgcagcttcagtattagcagagccacaggccgcctctgtggcatcaccagggtttctctgaagaagagggtctgcattttcctaaacccagtgctgctctcccatctcccatcttcctctcgcagcttgatgagccccggtgtgtcccaggagtcggagaagctggaaagtgtgaatgctgaactgaaggctcagattgaggagctcaagaacgagaagcagcatttgatatacatgctcaaccttcatcggcccacgtgtattgtccgggctcagaatgggaggactccagaagatgagagaaacctctttatccaacagataaaagaaggaacattgcagagctaagcagtcgtggtatgggggcgactggggagtcctcattgaatcctcattttatacccaaaaccctgaagccattggagagctgtcttcctgtgtacctctagaatcccagcagcagagaaccatcaaggcgggagggcctgcagtgattcagcaggcccttcccattctgccccagagtgggtcttggaccagggcaagtgcatctttgcctcaactccaggatttaggccttaacacactggccattcttatgttccagatggcccccagctggtgtcctgcccgcctttcatctggattctacaaaaaaccaggatgcccaccgttaggattcaggcagcagtgtctgtacctcgggtgggagggatggggccatctccttcaccgtggctaccattgtcactcgtaggggatgtggagtgagaacagcatttagtgaagttgtgcaacggccagggttgtgctttctagcaaatatgctgttatgtccagaaattgtgtgtgcaagaaaactaggcaatgtactcttccgatgtttgtgtcacacaacactgatgtgacttttatatgctttttctcagatctggtttctaagagttttggggggcggggctgtcaccacgtgcagtatctcaagatattcaggtggccagaagagcttgtcagcaagaggaggacagaattctcccagcgttaacacaaaatccatgggcagtatgatggcaggtcctctgttgcaaactcagttccaaagtcacaggaagaaagcagaaagttcaacttccaaagggttaggactctccactcaatgtcttaggtcaggagttgtgtctaggctggaagagccaaagaatattccattttcctttccttgtggttgaaaaccacagtcagtggagagatgtttggaaaccacagtcagtggagcctgggtggtacccaggctttagcattattggatgtcaatagcattgtttttgtcatgtagctgttttaagaaatctggcccagggtgtttgcagctgtgagaagtcactcacactggccacaaggacgctggctactgtctattaaaattctgatgtttctgtgaaattctcagagtgtttaattgtactcaatggtatcattacaattttctgtaagagaaaatattacttatttatcctagtattcctaacctgtcagaataataaatattggaaccaagacatggtaaa

SEQ ID NO: 384 - protein, 135 aa, Homo sapiens; identical to SEQ ID NO: 380

SEQ ID NO: 385 - DNA, 2321 bp, Homo sapiens
agagagagggtcgtcacttcctgtcactaggactacagtttgtagtctctctcagggagagagactacaaactgtagttaaaaaaatcagaggtggaggtcagggggttaggtccagaagaaaacctctctggagcccaccctgcatctctacgtcttggaagagtctggagtccaggcaccctacagcaccccccacagcaatcatccgtgctcccacccccaccccggcctctgggaggctctgaggcaacagtgggggcctgtggggtggggtgggattgagagaccagctgcagagacatctttgtgacccaggagcaccactggtccctcatctgccaccgaggccaaggaagacccagagacctgcctcaccagtgctgccgttgtgctgaaagacaaccatgaatgctgattttctgctgccgtattatacggcccagagtggctccagcatgagcatgttcgacaccaccatggggaaactgcagcgacaactgtacaagggggagtacgatatattcaagtatgcaccgatatttgagagcgactttatccagatcaccaaaaggggagaagtgattgatgtgcacaaccgtgtccgtatggtgaccatgggcattgcacgtaccagccccatcctcccactcccagatgtcatgctactggcacgaccggccaccggctgcgaagagtatgctggacatggccaggccaccaagagaaaaaaacgcaaggcagcaaagaacttagagctcaccaggcttctgcccctgaggtttgtacggatctctgttcaagaccatgagaaacaacagctgcgcctgaagttcgccactggcagatcttgctatctgcaattgtgtcccgctcttgacacacgggatgacctctttgcctattgggaaaaactaatttacctcttgcggccacccatggagagtaacagcagtacctgtggcattccagctgaagacatgatgtggatgcctgtgtttcaggaagacaggaggagcctgggagccgtgaaccttcaaggaaagggggatcaggaccaggtcagcatccaaagcctccacatggtctctgaggtgtgtggggccacctctgctgcttatgctggaggggagggactccaaaatgactttaacaaacccactaatgtgctcaatgcatccatccccaaaacatctacagaacttgctgaggagccagcaacaggggggattaaagaggcagcagcagcaggggcagctgcaggggcagcaacaggcaccgtagcaggtgccttgagtgtggcagcagccaattctgcccctggacaggtgagcgcagccatagctggggcggccaccatcgatgcaggaggaaacaaaggcaacatggcccttgcaggcactgccagcatggctccaaacagcacgaaggtggctgtggcaggggctgcaggcaagtcctcagagcatgtttccagcgcatccatgagcctttcccgagagggcagtgtgagcctggccattgcaggagtagtactgaccagcaggacagctgcagaagcagacatggatgcagcagcgggacctcccgtctccacccggcagagcaagagcagcctgagtggacagcatggaagggagcgaacccaggccagcgctgaaggctgcaaggaggggagggaaagaagggaaaaggacagggctctcggaaggagttcccatcgccgcaggacaggtgaaagccgccacaaaacaaggggagacaagattgcccaaaagtcctccagcaggtcctcattcagccacagagccaatagagatgacaaaaaggagaaaggctgtggcaacccggggagcagcaggcacagggactcgcataaaggtgtcagccacacgcccatctcaaaggagtccaggacctctcacaaatctgggaggagcttatggaccaccagttccggttccagcaagggacttggcagggtcagctctttcctgaggaacgtcagagccaaccttactacaaaagtagtgggcacaccacatggcagagatgtggacgtcatggctaagatggcggagaggagcaccaacgtggccatcgccgagacagcagagggtggccaggggctggagatggttggttctatgacaccggacatcatggagacagtgacctttgaagcccattaaataagacccagagctggaagctgcaaaggagcccagagctcatgggagtgtccctggaaagcctattccagcgttctttactgccgtttaaataaagaatcatacatctgaaaacaaaaaaaaaaaaaaa

SEQ ID NO: 386 - protein, 594 aa, Homo sapiens
MNADFLLPYYTAQSGSSMSMFDTTMGKLQRQLYKGEYDIFKYAPIFESDFIQITKRGEVIDVHNRVRMVTMGIARTSPILPLPDVMLLARPATGCEEYAGHGQATKRKKRKAAKNLELTRLLPLRFVRISVQDHEKQQLRLKFATGRSCYLQLCPALDTRDDLFAYWEKLIYLLRPPMESNSSTCGIPAEDMMWMPVFQEDRRSLGAVNLQGKGDQDQVSIQSLHMVSEVCGATSAAYAGGEGLQNDFNKPTNVLNASIPKTSTELAEEPATGGIKEAAAAGAAAGAATGTVAGALSVAAANSAPGQVSAAIAGAATIDAGGNKGNMALAGTASMAPNSTKVAVAGAAGKSSEHVSSASMSLSREGSVSLAIAGVVLTSRTAAEADMDAAAGPPVSTRQSKSSLSGQHGRERTQASAEGCKEGRERREKDRALGRSSHRRRTGESRHKTRGDKIAQKSSSRSSFSHRANRDDKKEKGCGNPGSSRHRDSHKGVSHTPISKESRTSHKSGRSLWTTSSGSSKGLGRVSSFLRNVRANLTTKVVGTPHGRDVDVMAKMAERSTNVAIAETAEGGQGLEMVGSMTPDIMETVTFEAH

SEQ ID NO: 387 - DNA, 980 bp, Homo sapiens
ggggcagacgtgggacgggaaggacggctgccgggactggcgcgcggggacactgggccgacgcgtggagtagcggggagagcgggaagcctgagggggcggggccggcgcgaggccgtgggtgcggcacgaggatgccggcggcgggacagcgcccgtaggcagccccacgggcagggcgcgcgggcggggcggggcgggccgggccagaggagctcccggcatgtcgcaagggctcccggccgccggcagcgtcctgcagaggagcgtcgcggcgcccgggaaccagccgcagccgcagccgcagcagcagagccctgaggatgatgacaggaaggtccgaaggagagaaaaaaaccgagttgctgctcagagaagtcggaagaagcagacccagaaggctgacaagctccatgaggaatatgagagcctggagcaagaaaacaccatgctgcggagagagatcgggaagctgacagaggagctgaagcacctgacagaggcactgaaggagcacgagaagatgtgcccgctgctgctctgccctatgaactttgtgccagtgcctccccggccggaccctgtggccggctgcttgccccgatgaagccggggacactcctctgcccagcaaggagccttggtcattttcatacctgggaggaaggcttttccttcacaattgtatacagggggcacctgtggccaggcctcctcctgggagctccaggaccagccagctgtgttccctgcagactgggctcagcccgacatccaacaggcgccaaactcacagagcccttgtgcagatccagcatggaggccaccctcaggagtgacttctcatccaccctggcagctagtaggttctgctgttatgcagagccatttcctctagaatttggataataaagatgcttattgtctctcccttctccagttctgggaatttacaggcacaatacacttccttttcctgg

SEQ ID NO: 388 - protein, 127 aa, Homo sapiens
MSQGLPAAGSVLQRSVAAPGNQPQPQPQQQSPEDDDRKVRRREKNRVAAQRSRKKQTQKADKLHEEYESLEQENTMLRREIGKLTEELKHLTEALKEHEKMCPLLLCPMNFVPVPPRPDPVAGCLPR

SEQ ID NO: 389 - DNA, 1712 bp, Homo sapiens
cccacagttttcgacgaaaaatggcggggtctcctgagttggtggtccttgaccctccatgggacaaggagctcgcggctggcacagagagccaggccttggtctccgccactccccgagaagactttcgggtgcgctgcacctcgaagcgggctgtgaccgaaatgctacaactgtgcggccgcttcgtgcaaaagctcggggacgctctgccggaggagattcgggagcccgctctgcgagatgcgcagtggacttttgaatcagctgtgcaagagaatatcagcattaatgggcaagcatggcaggaagcttcagataattgttttatggattctgacatcaaagtacttgaagatcagtttgatgaaatcatagtagatatagccacaaaacgtaagcagtatcccagaaagatcctggaatgtgtcatcaaaaccataaaagcaaaacaagaaattctgaagcagtaccaccctgttgtacatccactggacctaaaatatgaccctgatccagcccctcatatggaaaatttgaaatgcagaggggaaacagtagcaaaggagatcagtgaagccatgaagtccttgcctgcattaattgaacaaggagagggattttcccaagttctcaggatgcagcctgttatccacctccagaggattcaccaagaagtcttttccagttgtcataggaaaccagatgctaaacctgagaactttataacacagatagaaaccacaccaacagagactgcttccaggaaaacctctgacgtggtactgaaaagaaagcaaactaaagactgcccccagagaaaatggtatccattgcggccaaagaaaattaatcttgatacatgagctctttctgtttattttgggagttgaaaataggcaccatcaacatttagattacagcctaattaatacctagataagacttcatttgaaataagaaataactcttttactagtgattcatttatacagatatagtatctctgtgcggggatatgatataatattgtatttccttactgttttatctattgtaaataaaaagcattttaaaaagtattgacacaaagcccatcagtgggcattaaaaatattaaaagtgcagacttttactgtccttaagtgccatcaactctcagctcccttgtagcttttgtgggatttaacaagtaacaaattctgttgtgtttccctggtatacatctttctaggaaaaaaaaaaaaagagagagagctgtataatgatttttcgtttacatgctgaaaagtaattatcagtttctgcacagcagcagatgcagggtttttttttaaagatgtagtttgatttatcaaattaatgtgctgatgataatactggctttgactttgttactccatgttcagctaatttaggtttgtgagattaactttaggattttttgttgtgtaagacaatgataactattatttgtgcaacattactctttgaaataaaaattggcatgtagccaatgtttcctgcccacactcacttttttctatagaccattaacataatttgacttggaactaatggtttctttttagggtttcttatttatttctttacaaatcattccagttcaaaatatatatcagattaatacactgaaaaaaaagtgtcattgtggtttattggaacctattttcaccttggagggtggttta

SEQ ID NO: 390 - protein, 281 aa, Homo sapiens
MAGSPELVVLDPPWDKELAAGTESQALVSATPREDFRVRCTSKRAVTEMLQLCGRFVQKLGDALPEEIREPALRDAQWTFESAVQENISINGQAWQEASDNCFMDSDIKVLEDQFDEIIVDIATKRKQYPRKILECVIKTIKAKQEILKQYHPVVHPLDLKYDPDPAPHMENLKCRGETVAKEISEAMKSLPALIEQGEGFSQVLRMQPVIHLQRIHQEVFSSCHRKPDAKPENFITQIETTPTETASRKTSDVVLKRKQTKDCPQRKWYPLRPKKINLDT

SEQ ID NO: 391 - DNA, 2362 bp, Homo sapiens
tcaggacgctgcagctgaaacgttccggctccggctctgctggccggtctaaagcggcagccgccggggcgcaatgcgagcggctggcgtaggcttggtggactgtcactgccacctctccgccccggactttgaccgcgatttggatgatgtgttggagaaagccaagaaggccaatgttgtggcccttgtggcagttgccgaacattcaggagaatttgaaaagattatgcaactttcagaaaggtataatgggtttgtcctgccatgcttgggtgttcatccagttcaaggacttccaccagaagaccaaagaagtgtcacactaaaggatttggatgtagctttgcccattattgagaattataaggatcggttgttggcaattggagaggttggactagatttctcccccagatttgctggcactggtgaacagaaggaagagcaaagacaagtcctaatcagacagatccagttagccaaaagactaaatttgcctgtaaatgtgcactcacgctctgctggaagacctaccatcaaccttttacaagagcaaggtgctgagaaggtactgctgcatgcatttgatggtcggccatctgtagccatggaaggagtaagagctgggtacttcttctcaattcccccttctatcataagaagtggacagaagcagaaacttgtgaaacaattgcctttaacttctatatgcttagaaacagattcacctgcactaggaccagaaaaacaggtacggaatgagccctggaacatttctatttcagcagaatatattgcccaggtgaaagggatctcagtggaagaagttatagaagtgacgacacagaatgcattaaaactgtttcctaagctccgacacttgctccagaaatagcttcaaaaccatccattacaaaatcgaatcaactgcagggggcagcatttgaaaaatagaaatgttctgatgaagaatctgaactgaagaagctgttttatagggttatagaagattgtaattgtagagaaatatttctcttagaaataaaactgggcttggatcctgaaaccctgggttctgattctagccttgtgctgcttttcaattagccgagttctggcaggatattgggaaaatactgctacttcttacattgcccttttatatagaaccaccacctgaactgaaaccattgctactgggaagggtggctcccacaggaagagtataagcactactgtgatgaggatggagtaagctaaagtatacttttttttttttttgatggagtttcgctgttgttgcccaggctggagtgcaatggcacgatcttggctcactgcaacctccacttcccaggttctagcgagtctcctccctcagcctcccaagtagctgggattacaggcatgtgccaccatgcccagctaattttgtatttttagtagagacagggtttctccatgttggtcaggctggtctcgaactcccgacctcaggtgatccgcccgcctcggcctcccaaagtgctgggattacaggcatgagccactgcgccagcctaaagtgtgttcttaccacctatttttcttcccataggagttagccagtgaagggagaatgtctggttttctatgctgtcagaaatctcttttctaggtttgtaaaattgaacttttagtacttcgaattatttctctttaagataaaaatgcatacgatttttacactgatcttagatttttgacttatgaggccagtggtttaaacaatcattattgaataccaagcccaaaagtttagttaatacaccaattgtaagttctggtctgaattttgtcaacatatttagaatgtaaatggcattattaaaaatgtatctgatttctctgtgaacagtaatatttcatatttttaagtttaaaaatgttagtgtaagccaggcacagtggcattcacctgtagtgccaaccactcaggaggctgagatgggagaccttttaagcctgagtttgagtcaggcctgggcaacatagatgtgagcacctatctctaaaaatgtaaataaataaaaatctcaaaaaaattaaaaatctcaagtgtaaaaacagttctgtagatagatggtagtgatggtagcacatcaatgtgaaggtatttaatgccactgaactgtacacttataacgaattaggataaattttatgttatgtgtatttactacaattttttaaaaatcgtatatgtagtttaacaggtgtggtcaatatcaaaacttaggtatttaatcttgttaaattatataagcagaaaatgctggaaaaagtacctgtcatagaaaaaaataaacttcctaaatca

SEQ ID NO: 392 - protein, 274 aa, Homo sapiens
MRAAGVGLVDCHCHLSAPDFDRDLDDVLEKAKKANVVALVAVAEHSGEFEKIMQLSERYNGFVLPCLGVHPVQGLPPEDQRSVTLKDLDVALPIIENYKDRLLAIGEVGLDFSPRFAGTGEQKEEQRQVLIRQIQLAKRLNLPVNVHSRSAGRPTINLLQEQGAEKVLLHAFDGRPSVAMEGVRAGYFFSIPPSIIRSGQKQKLVKQLPLTSICLETDSPALGPEKQVRNEPWNISISAEYIAQVKGISVEEVIEVTTQNALKLFPKLRHLLQK

SEQ ID NO: 393 - DNA, 567 bp, Homo sapiens
tcaggacgctgcagctgaaacgttccggctccggctctgctggccggtctaaagcggcagccgccggggcgcaatgcgagcggctggcgtaggcttggtggactgtcactgccacctctccgccccggactttgaccgcgatttggatgatgtgttggagaaagccaagaaggccaatgttgtggcccttgtggcagttgccgaacattcaggagaatttgaaaagattatgcaactttcagaaaggtataatgggtttgtcctgccatgcttgggtgttcatccagttcaaggacttccaccagaagaccaaagaagtgtcacactaaaggatttggatgtagctttgcccattattgagaattataaggatcggttgttggcaattggagaggttggactagatttctcccccagatttgctggcactggtgaacagaaggaagagcaaagacaagtcctaatcagacagatccagttagccaaaagactaaatttgcctgtgtaggttaattattttcctatgttaatagctatagagcaaattaaataatgatcagagttctc

SEQ ID NO: 394 - protein, 144 aa, Homo sapiens
MRAAGVGLVDCHCHLSAPDFDRDLDDVLEKAKKANVVALVAVAEHSGEFEKIMQLSERYNGFVLPCLGVHPVQGLPPEDQRSVTLKDLDVALPIIENYKDRLLAIGEVGLDFSPRFAGTGEQKEEQRQVLIRQIQLAKRLNLPV

SEQ ID NO: 395 - DNA, 2246 bp, Homo sapiens
tcaggacgctgcagctgaaacgttccggctccggctctgctggccggtctaaagcggcagccgccggggcgcaatgcgagcggctggcgtaggcttggtggactgtcactgccacctctccgccccggactttgaccgcgatttggatgatgtgttggagaaagccaagaaggccaatgttgtggcccttgtggcagttgccgaacattcaggagaatttgaaaagattatgcaactttcagaaaggtataatgggtttgtcctgccatgcttgggtgttcatccagttcaaggacttccaccagaagaccaaagaagtgtcacactaaaggatttggatgtagctttgcccattattgagaattataaggatcggttgttggcaattggagaggttggactagatttctcccccagatttgctggcactggtgaacagaaggaagagcaaagacaagtcctaatcagacagatccagttagccaaaagactaaatttgcctgtaaatgtgcactcacgctctgctggaagacctaccatcaaccttttacaagagcaagcagaaacttgtgaaacaattgcctttaacttctatatgcttagaaacagattcacctgcactaggaccagaaaaacaggtacggaatgagccctggaacatttctatttcagcagaatatattgcccaggtgaaagggatctcagtggaagaagttatagaagtgacgacacagaatgcattaaaactgtttcctaagctccgacacttgctccagaaatagcttcaaaaccatccattacaaaatcgaatcaactgcagggggcagcatttgaaaaatagaaatgttctgatgaagaatctgaactgaagaagctgttttatagggttatagaagattgtaattgtagagaaatatttctcttagaaataaaactgggcttggatcctgaaaccctgggttctgattctagccttgtgctgcttttcaattagccgagttctggcaggatattgggaaaatactgctacttcttacattgcccttttatatagaaccaccacctgaactgaaaccattgctactgggaagggtggctcccacaggaagagtataagcactactgtgatgaggatggagtaagctaaagtatacttttttttttttttgatggagtttcgctgttgttgcccaggctggagtgcaatggcacgatcttggctcactgcaacctccacttcccaggttctagcgagtctcctccctcagcctcccaagtagctgggattacaggcatgtgccaccatgcccagctaattttgtatttttagtagagacagggtttctccatgttggtcaggctggtctcgaactcccgacctcaggtgatccgcccgcctcggcctcccaaagtgctgggattacaggcatgagccactgcgccagcctaaagtgtgttcttaccacctatttttcttcccataggagttagccagtgaagggagaatgtctggttttctatgctgtcagaaatctcttttctaggtttgtaaaattgaacttttagtacttcgaattatttctctttaagataaaaatgcatacgatttttacactgatcttagatttttgacttatgaggccagtggtttaaacaatcattattgaataccaagcccaaaagtttagttaatacaccaattgtaagttctggtctgaattttgtcaacatatttagaatgtaaatggcattattaaaaatgtatctgatttctctgtgaacagtaatatttcatatttttaagtttaaaaatgttagtgtaagccaggcacagtggcattcacctgtagtgccaaccactcaggaggctgagatgggagaccttttaagcctgagtttgagtcaggcctgggcaacatagatgtgagcacctatctctaaaaatgtaaataaataaaaatctcaaaaaaattaaaaatctcaagtgtaaaaacagttctgtagatagatggtagtgatggtagcacatcaatgtgaaggtatttaatgccactgaactgtacacttataacgaattaggataaattttatgttatgtgtatttactacaattttttaaaaatcgtatatgtagtttaacaggtgtggtcaatatcaaaacttaggtatttaatcttgttaaattatataagcagaaaatgctggaaaaagtacctgtcatagaaaaaaataaacttcctaaatca

SEQ ID NO: 396 - protein, 191 aa, Homo sapiens
MRAAGVGLVDCHCHLSAPDFDRDLDDVLEKAKKANVVALVAVAEHSGEFEKIMQLSERYNGFVLPCLGVHPVQGLPPEDQRSVTLKDLDVALPIIENYKDRLLAIGEVGLDFSPRFAGTGEQKEEQRQVLIRQIQLAKRLNLPVNVHSRSAGRPTINLLQEQAETCETIAFNFYMLRNRFTCTRTRKTGTE

SEQ ID NO: 397 - DNA, 2383 bp, Homo sapiens
tcaggacgctgcagctgaaacgttccggctccggctctgctggccggtctaaagcggcagccgccggggcgcaatgcgagcggctggcgtaggcttggtggactgtcactgccacctctccgccccggactttgaccgcgatttggatgatgtgttggagaaagccaagaaggccaatgttgtggcccttgtggcagttgccgaacattcaggagaatttgaaaagattatgcaactttcagaaaggtataatgggtttgtcctgccatgcttgggtgttcatccagttcaaggacttccaccagaagaccaaagaagtgtcacactaaaggatttggatgtagctttgcccattattgagaattataaggatcggttgttggcaattggagaggttggactagatttctcccccagatttgctggcactggtgaacagaaggaagagcaaagacaagtcctaatcagacagatccagttagccaaaagactaaatttgcctgtaaatgtgcactcacgctctgctggaagacctaccatcaaccttttacaagagcaaggtgctgagaaggtactgctgcatgcatttgatggtcggccatctgtagccatggaaggagtaagagctgggtacttcttctcaattcccccttctatcataagaagtggacagctgctttctcttttctctaagaagcagaaacttgtgaaacaattgcctttaacttctatatgcttagaaacagattcacctgcactaggaccagaaaaacaggtacggaatgagccctggaacatttctatttcagcagaatatattgcccaggtgaaagggatctcagtggaagaagttatagaagtgacgacacagaatgcattaaaactgtttcctaagctccgacacttgctccagaaatagcttcaaaaccatccattacaaaatcgaatcaactgcagggggcagcatttgaaaaatagaaatgttctgatgaagaatctgaactgaagaagctgttttatagggttatagaagattgtaattgtagagaaatatttctcttagaaataaaactgggcttggatcctgaaaccctgggttctgattctagccttgtgctgcttttcaattagccgagttctggcaggatattgggaaaatactgctacttcttacattgcccttttatatagaaccaccacctgaactgaaaccattgctactgggaagggtggctcccacaggaagagtataagcactactgtgatgaggatggagtaagctaaagtatacttttttttttttttgatggagtttcgctgttgttgcccaggctggagtgcaatggcacgatcttggctcactgcaacctccacttcccaggttctagcgagtctcctccctcagcctcccaagtagctgggattacaggcatgtgccaccatgcccagctaattttgtatttttagtagagacagggtttctccatgttggtcaggctggtctcgaactcccgacctcaggtgatccgcccgcctcggcctcccaaagtgctgggattacaggcatgagccactgcgccagcctaaagtgtgttcttaccacctatttttcttcccataggagttagccagtgaagggagaatgtctggttttctatgctgtcagaaatctcttttctaggtttgtaaaattgaacttttagtacttcgaattatttctctttaagataaaaatgcatacgatttttacactgatcttagatttttgacttatgaggccagtggtttaaacaatcattattgaataccaagcccaaaagtttagttaatacaccaattgtaagttctggtctgaattttgtcaacatatttagaatgtaaatggcattattaaaaatgtatctgatttctctgtgaacagtaatatttcatatttttaagtttaaaaatgttagtgtaagccaggcacagtggcattcacctgtagtgccaaccactcaggaggctgagatgggagaccttttaagcctgagtttgagtcaggcctgggcaacatagatgtgagcacctatctctaaaaatgtaaataaataaaaatctcaaaaaaattaaaaatctcaagtgtaaaaacagttctgtagatagatggtagtgatggtagcacatcaatgtgaaggtatttaatgccactgaactgtacacttataacgaattaggataaattttatgttatgtgtatttactacaattttttaaaaatcgtatatgtagtttaacaggtgtggtcaatatcaaaacttaggtatttaatcttgttaaattatataagcagaaaatgctggaaaaagtacctgtcatagaaaaaaataaacttcctaaatca

SEQ ID NO: 398 - protein, 281 aa, Homo sapiens
MRAAGVGLVDCHCHLSAPDFDRDLDDVLEKAKKANVVALVAVAEHSGEFEKIMQLSERYNGFVLPCLGVHPVQGLPPEDQRSVTLKDLDVALPIIENYKDRLLAIGEVGLDFSPRFAGTGEQKEEQRQVLIRQIQLAKRLNLPVNVHSRSAGRPTINLLQEQGAEKVLLHAFDGRPSVAMEGVRAGYFFSIPPSIIRSGQLLSLFSKKQKLVKQLPLTSICLETDSPALGPEKQVRNEPWNISISAEYIAQVKGISVEEVIEVTTQNALKLFPKLRHLLQK

SEQ ID NO: 399 - DNA, 537 bp, Homo sapiens
tcccagtgggctaatccacaccagtggacttgaaacacgctttgggttgctgtatggtagtatgctaaaggacagcaagaatcacttgacaattggtttgtgaccataatggcatctataaacagaaccattgaaataatgaaaaaacatggagtaagcaaacaacatctcctggaggagataaacaaaaagcgtgaatccaactgcttggtggaacgaagcaatcaagtcagcttactgagagttcaaaagaggcacttcccggatgcctatcagtcctttactgataccacaaccaaagagcctgttcccaacagtggcaggagctcctggatcaagctgagtctccttgctcacatggagagaaagcactttccaccaaaaaataatgccatatttggataaagtgcatctccagagacacacggaaatacattctctttgattcttcttcagtgtgtctaaattatttacaaattattaattataaacaaagctaaacaaaaaaaaaaaaaaaaaaaaaaaaaaaaaaaaaaa

SEQ ID NO: 400 - protein, 98 aa, Homo sapiens
MASINRTIEIMKKHGVSKQHLLEEINKKRESNCLVERSNQVSLLRVQKRHFPDAYQSFTDTTTKEPVPNSGRSSWIKLSLLAHMERKHFPPKNNAIFG

SEQ ID NO: 401 - DNA, 2008 bp, Homo sapiens
gccgcgcggcgcgggggaggagaccttcatctgttcacgcggtagcgcggattgcggttcgcggcgcgcgccaccggggaaggagcggtgggccgaggggttggaggtggggccccaggaggacctcgggctgtgggccgggagagcggagtcggggagtggggcgggggagcgaggtggcgccggggagcctgggatatggcgcggccagacgatgaggagggggcggcggtggcgcccggacacccgctcgcgaaaggatacctcccgttgccgaggggcgcgcccgttgggaaggagagcgtggagctgcagaacgggcccaaagcgggcaccttcccggtgaatggggccccccgggacagcctcgctgccgcctcgggagttctgggcgggcctcagactccactggccccagaagaggagacccaggcccggctgctgcctgcgggcgcgggagctgagaccccgggggccgagagcagcccgctgccccttacggcgctctccccgcggcgcttcgtggtgctcctgatcttcagcctgtactcgctggtcaacgcctttcagtggatccagtacagcatcattagcaacgtcttcgagggcttctacggtgtcaccttgctgcacatcgactggctgtccatggtgtacatgctggcctacgtgcccctcatcttcccggccacctggctgctggacaccagaggcctgcggctcaccgccctgctgggctccggcctcaactgcctgggtgcctggatcaagtgcggcagtgtgcaacaacatctcttctgggtcaccatgttgggccagtgcttgtgctcggtggcccaggtgttcatcctgggcttgccctcccgcatcgcctcagtgtggtttgggcccaaagaggtgtccacagcttgtgccaccgccgtgctgggcaatcagcttggaactgcagttggctttttgctaccaccagttttagtacccaacacacagaatgacacaaatctcctggcttgtaatatcagcaccatgttttatggaacatcagctgttgccacacttttatttattttaacagcaattgccttcaaagaaaaacctcggtatccaccaagtcaggctcaagcagctcttcaagacagtccccctgaagagtactcctataagaaatcaataagaaacctgtttaaaaacattccttttgtccttctgttgatcacttatggtatcatgactggtgccttttattcagtctcaacgttattaaatcaaatgatattgacatattatgagggagaagaagtcaatgctggaaggattgggctaacgctagtagtagctggaatggtgggctctattctttgtggcttatggctggattatactaaaacatacaaacagactaccctgatagtttatattttgtcttttattggaatggttatctttactttcacattggaccttagatatattatcatcgtgtttgttactggaggggtgcttggcttcttcatgactggttacctccctttgggttttgaatttgctgttgaaatcacttaccctgaatctgaaggtacttcatctggtcttcttaatgcttctgcacagatatttggaattttgttcacattggctcaaggaaagctcacatcagactatggtcctaaggcagggaacatttttctctgtgtctggatgtttataggcatcatattaacagcattaatcaagtctgatctgcgaagacacaacataaatataggaattacaaatgttgatgttaaagctataccagctgacagtcccacagaccaagaaccaaaaacggttatgttgtccaagcagtcagaatcagcaatttgaagagaaaggcaaagttactgtcccgtagtaattggggacaatgtgatcatccttggagagagatgtgagcaccaaggctgggtttgtatgtggtgggggaataaacacacttacttgaaaattaaaaaaaaaaaaaaaaaaa

SEQ ID NO: 402 - protein, 555 aa, Homo sapiens
MARPDDEEGAAVAPGHPLAKGYLPLPRGAPVGKESVELQNGPKAGTFPVNGAPRDSLAAASGVLGGPQTPLAPEEETQARLLPAGAGAETPGAESSPLPLTALSPRRFVVLLIFSLYSLVNAFQWIQYSIISNVFEGFYGVTLLHIDWLSMVYMLAYVPLIFPATWLLDTRGLRLTALLGSGLNCLGAWIKCGSVQQHLFWVTMLGQCLCSVAQVFILGLPSRIASVWFGPKEVSTACATAVLGNQLGTAVGFLLPPVLVPNTQNDTNLLACNISTMFYGTSAVATLLFILTAIAFKEKPRYPPSQAQAALQDSPPEEYSYKKSIRNLFKNIPFVLLLITYGIMTGAFYSVSTLLNQMILTYYEGEEVNAGRIGLTLVVAGMVGSILCGLWLDYTKTYKQTTLIVYILSFIGMVIFTFTLDLRYIIIVFVTGGVLGFFMTGYLPLGFEFAVEITYPESEGTSSGLLNASAQIFGILFTLAQGKLTSDYGPKAGNIFLCVWMFIGIILTALIKSDLRRHNINIGITNVDVKAIPADSPTDQEPKTVMLSKQSESAI

SEQ ID NO: 403 - DNA, 3580 bp, Homo sapiens
gccccagcagccccagccccagccccaggcccagcagcagcagcagcagcccctgctctcccgccgcccggagaggctctgcagccatgaagccaaccgtcccgaggcaccgccggtaagcagggagcctccgcggagctcccgccgccgctcccccttggtgagtcctgccgcagcgagaggcatggagaaggccgcccccgcggggcgctgatcccctcgccgcgcccgcgcgcacacgccccccgccgccgccgccgctgccgccgccgcgcgcccccagtacctcgctccccacccaggccccaccatgaccggctccgcggccgacactcaccgctgcccccaccccaaaggcgccaaaggcacccggtcccggagcagccacgcgcggcccgtgagcctcgccaccagcgggggctcagaggaggaggacaaagacggcggggtgctgttccacgtcaacaagagcggcttccccatcgacagccacacctgggagcgcatgtggatgcacgtggccaaggtgcaccctaaggggggagaaatggtgggcgccatcaggaacgccgccttcttggcaaagccttcaataccccaggtcccaaactacaggctgtcgatgacgatcccagactggctccaggcgatccagaattacatgaagaccctacactacttaaccaatgggcagccttccattgagcggttccccatcagctttaaaacctacttctcaggaaactactttcaccacgttgtgctggggatttactgcaatggccgctatggctcattgggcatgagccgcagggctgagctgatggacaagccattgacttttcggactctgagtgacctcatctttgactttgaggactcttacaagaaatacctgcacacagtcaagaaggtcaagattgggctgtacgtcccccatgagcctcatagcttccagcccattgagtggaagcagctggtcctcaacgtctcaaagatgctgagggctgacataaggaaggagctggagaaatatgccagggacatgagaatgaagatcctgaaacctgcaagtgcccactctccgacccaagtgagaagccggggaaaatccctgtcccccagaaggagacaggcaagccccccgaggaggctcggccggcgagagaagtcgcctgcactgcctgaaaagaaggtggctgatctgagcactctgaatgaagtgggctatcaaatccgaatttagccaagccataccggccagcaagagggtttctgtggtgcttctctctgcactttacccagcatcttcaggaggaactgcaactatttattaagaacttgtgaattttatttttaaggattcacctggaaatagaatctgagtgggtggtaaccattagctttaaaaaattcactaaaaggcaccatgaaaaggctgaagtaataagccccactggggttgaactatgtccctcactcaagatcttaaggataaccgtaactgaagttttatatttttccatttacctactttcttttacttgctttgaacattatgcctcaccaatagtaaatgttcatgaaataatctcttgaacttttggtatagtaaggtaactctaacagtattactgtctttttcagcaataacagaaagcaaaaatgggtgggttttttttaagcagttattacctcagcattttgacatcagatatgcaaacttaatggcgttttgtttttttatattctatttgtattctttccccagtatttcccatggggatctccacaagtttggagttttttcctggtgcacacacgtgaggagatttaaggtactatatgcaagtgttttactaaaaagcactgaaattcttctggcaatacaagaaccattttcaggatcttggagttacttccttcttaatctttcttaaagcattcactgatgtttttgttttttcaaaatgaaacaaaaatatcacattgagaagctagtctatgttctgtcactaacatttaaactttgcagactctaacaaaaagcacaagaggtcacgtactattatacaaatttagcggtactggatttacctctgacattaacacactcaggcagagaccaggagtgatcagcaggtcttcagaaccaaaaaacctttctgttcacatttcatctgatttttaaactgaggcaggctttgattcttctgaaggatgccaagaatcaaactaagggaggactcactgttaaagatgtgttctgatgtcttatattaagaccaaatgtgacatgatgtgattatcttccagtactttgcttttaggtaccatttcatgacattttaggaatgagtattggaaaatataaagaattagaaaagcagcactttttttttaatggaaaagtcttcggtccagtgttacaccttatagtgtaattcagtccctaagcacagaatgaatgtctggcctgcatatggtagttacagtgtaacctctggctgcagaccacacaggacaaccctaacagcctagtcttgtatggtgtaaatatcaagagtacagcttcaatttcatttgctttatcttagcaacaatgccaactcaggagagcagacggccgatttcagtgaagtctggtagtcaacagatgttatttcagtctcagtgcatctcctctggctttctttgactgaaggtgtttataggaaggaagttaaaaaaaaaaaagctcattgagattctttaccaattctttacaagatttctgggggtgacagggaaagcaaaaggacttcaaagcaaaagggtgcacaagagcttacttcaccctgaaaatcagtattattaatgaaaagtactgttttcttaaagaagtcgaatgtcctttagatgaacaagaccaagtatacatctccattagattaaaatgtagcacagggttaaaaattatcagtttaatctctttaagaacagtattatcagagtttaaaatgagttagctctgtttatctacacacagcaaacccattcgcagcctcttggccacatgtattcagatgtttgaaatagtgaatcatttcattttcattctaaaacaatactgacttagccatataccttctgtttgtcaatctgaaacttgcttacatctaataagtagacctcttataacactgcaaccattctaagagttggaatttatttttgccaagtattaagtactgttacatctaaaatacagaatgtcaaatggttgcatagcttgtttcccacaacaaggaggaaaagaacaggaatacaaactctgtaatatgctgataaagaagccttagaactgccaactggcttgatggttcaattagtaagctaatttctcccacacccgctccttgatttttagactaattttcccaaagcaaggtttagtcacacaaacttgaaagtacatttaaaatgttcttagttgtcatcctacttttattgcctatggaatatgctaatttctaaaaaaaatacgggagaggcaccaaacccctaaattctagtgcaataatttaaaaaaaaaaaaaaa

SEQ ID NO: 404 - protein, 311 aa, Homo sapiens
MTGSAADTHRCPHPKGAKGTRSRSSHARPVSLATSGGSEEEDKDGGVLFHVNKSGFPIDSHTWERMWMHVAKVHPKGGEMVGAIRNAAFLAKPSIPQVPNYRLSMTIPDWLQAIQNYMKTLHYLTNGQPSIERFPISFKTYFSGNYFHHVVLGIYCNGRYGSLGMSRRAELMDKPLTFRTLSDLIFDFEDSYKKYLHTVKKVKIGLYVPHEPHSFQPIEWKQLVLNVSKMLRADIRKELEKYARDMRMKILKPASAHSPTQVRSRGKSLSPRRRQASPPRRLGRREKSPALPEKKVADLSTLNEVGYQIRI

SEQ ID NO: 405 - DNA, 4668 bp, Homo sapiens
cggcgagactgcacctcccagcatgccttgcagccaggactggagtcggtacttaagagtgatggggttccctagatactttaggccgtcgcatcgattatagagattgaggtggaacccggggcctgggaactggacgcacgcggagggcgaagatggaagcctggcgctgtgtgaggaagggctacggccactgtgtggtgggaagaggccgataccccatgtttccccatcactcgaggagtctgggcagagactggactacaccgtgggagaatctgcaaaggtgttgctggaacagacatatttctagttgtatgaggtggcctggacattactctcgagctccttacccatacttcagtagtaggcatttttcactaaattggagaccaccctgtttgtttgagtctagaactcagttccagtactgtaactggagacctgacaacctgagccagacatctttgattcatctctctagttacgtcatgaacgctgagggagatgagccttcatcaaaacgaagaaaacaccaaggtgtgataaagcggaattgggaatatatatgtagccatgataaagaaaaaacgaagatcctaggagacaaaaatgttgatcccaaatgtgaagacagtgagaacaagtttgacttttcagtgatgtcctataatatactttcacaagatttactggaagataactctcacctttatagacattgccggcggccagtattacactggagttttaggtttcccaatattctgaaagaaattaaacattttgatgcagacgtactttgtttgcaagaagttcaagaagatcattatggagcagagatcaggccaagtttggaatcactgggttatcactgtgaatataagatgcggacaggaaggaaacctgatggctgtgctatttgcttcaaacattccaaattttcactcttgtcagtgaacccagtggaattcttccgccctgatatttctctgttggacagagacaatgttggattagttttactcttacagcccaaaattccatatgctgcctgccctgcaatctgcgtagcaaatacgcatctgttgtataatccaaggcgaggtgatattaagctgacgcaattggcaatgctactggcagagatttccagtgttgcccaccagaaagatggcagcttctgccctattgttatgtgtggtgactttaattctgttcctggttctccactatatagtttcataaaggaaggaaaattgaattatgaaggacttcccataggaaaggtatctggccaggaacagtcttcacggggacaaagaattttatctattccaatttggcccccaaacctaggtatctcacagaactgtgtgtatgaggtacagcaggtaccaaaagtagaaaagacagacagtgatctgacacaaacacagctgaagcaaacagaggtcctagtgacagctgaaaaattgtcttcaaatttacagcaccatttcagtttgtcatctgtttattcacattactttcctgacactggaattccagaagtgaccacctgtcattcccgaagtgccataactgtggattatattttctactctgcagaaaaggaagatgttgctgggcacccaggagctgaagttgctttggttggtggcttgaaacttctagctagactgtcacttcttacagaacaagacttatggactgttaatggacttccaaacgaaaataactcttcagatcatctgcctttattggcaaagttcagacttgagctctgactctctttgatcacatactaattttctttccaatttgtattgtttttcaaagaatgtaaagttcttaagtgtatgcatgttgtttatttttgcactgtggagattctgaagcggttatgttagatgctttgaaactccatatcagaagaaataactttataacaattttttttaataatgaaaaatattttcgtgacaagtgagctctaaattctctttattgtaaaagagatgtaaaggttttatattctaaatcctagtaaaattgacagtgatttttaaatataatgcatcttcctttgtctgcttagtaaaaaatttcatttcataattttggcaagctctgtagtggatccaaagtatctttgagttcttgcaaactacaagttgtttcctttccagaaggcttgatttcattaggagacccctctattgagttctaaatagtttatcttagaaagccttgggtcattcacaggtatccaaccagccattgtttagtttgtttttgaaggggtttgataatgctttttaagttgtacagaatgcttaatccatcttattactgtcctgagccatgtaatatgcctgcatcgtgttggggaaatgtttgggaaatataagccagcataacgtgtaaagctcactctttcaccctggaacagacaagaggtgggcttaatagaggcagagactggggatatacctttgtttccctagcatttttatttatttatttttattttattttattttttgagatggagtttcactcttgttgcccaggctgggggtgcaatggcgcaatctttgctcactgcaacccctgcctcccgggctcaagcgattctcctgcctcagcctctcgagtagctgggattacaggcatgcgtcaccactcccagctaattttgtattttcagtagagacagggtttccccatgttggttaggctggtctcgaactcccaacctcaggtgatccgcccacctcagctctcaaagtgctgggattacaggcgggagccactgcacatggcagcattttttaaaaattcagttttaagatctctggtttaggggagagattttattttactgaaccagttctatagaaatttattttattaggaaatttgtctttggaacaaagtggcagctataaaattatttttgttaagcctcagaaatatgaggaagcctgtaaaactctagtggggagatattaacttggagacctaatgctctgtaaatagtcatttaaactgttggttttagtggttttgtttctaaaatgttttcttttaccgtgatgcaccagtatgagatggtgctgacactttctatgaagtggttatgagcaggtttaataaatcctctatacaagtgtttgaatcaattttaaaacataaaaagtggaaatttccttttttgtagacagtaggaacaaggaattatatgcatttttactaagtagtaattttacactgaattgtaaatgtttttacagtgagttttattaatagaatgcttcaccttaaattggaaaacaataatagtcttggactaagtctttgtactaaagcatttgctataattatttttaaaaaaacaaacagatgaaaacctcagagaaggcatgtggattataagatttgtctagtaaaaattgtaattgaatatgtttaaatatttaatttctcattttggggggtttttatttttttattttttagatggtgtctcacgctatcgcccaggctggagtgcagtggcgcgaactcggctcactgcaacctccgcctcctgggttcaagcaattctccttcctcagcctcccaagtagctgggattacaggcatgcaccaccatgcccagctaatttttgtatttttagtagagatggaattttgccatgttggccaggctggtcttgaactcctgacctcaggggtgatccacccgcctcgggctcccaaagtgctgtgattacaggcatgagccaccatgcctggcctttggggggattttaattacagtattaattatagttctaggatttcccacattttatagtagtagtttgcaggatattatgtgccctaattagcagatatagacattatcaaattataatgatagtataattatccctttttaatattggggaaagaaaaatgaaaattcattagttaattactgctttgtgttgtgtgaatttattaacaaataacattattacatataggtcattgttaacaaacaaacatccctgaaaacctctgtgaaaatttaattttttatatcctgattaatatattgtgactttaggcccatttttcatgtgcttcactttgatagagttaatccataaaattgctctttactttagcttatcaaatgaagtattattttgtggactggaggccaaaaagtcaatgtgagcttctcacaggtttttaaagctccactaaaaataattatccacttgtctttacttttgttgaccagaatagttggtaactctgccagagcctgtacttacctgccaaaaacaattaaatctggttaatgcctgaaaccaaatctctcagtctcaagtgttatactatccaagttttaaatggaaaggtaaactgtggagtaatgaaattttggttttactgtaccttttgctatcaagataatattcatgtttgaaatcttgtctttatttggaatttagttactgtctgcttttaacctttgctttcctaaagaaagtttgagatccagagagttcaagggattggggaaagagaggcgtcaagtcatttgcactttgtacctgtaagttaggtaataaactattatactcgtaaaaaaaaaaaaaaaaaaaa

SEQ ID NO: 406 - protein, 544 aa, Homo sapiens
MEAWRCVRKGYGHCVVGRGRYPMFPHHSRSLGRDWTTPWENLQRCCWNRHISSCMRWPGHYSRAPYPYFSSRHFSLNWRPPCLFESRTQFQYCNWRPDNLSQTSLIHLSSYVMNAEGDEPSSKRRKHQGVIKRNWEYICSHDKEKTKILGDKNVDPKCEDSENKFDFSVMSYNILSQDLLEDNSHLYRHCRRPVLHWSFRFPNILKEIKHFDADVLCLQEVQEDHYGAEIRPSLESLGYHCEYKMRTGRKPDGCAICFKHSKFSLLSVNPVEFFRPDISLLDRDNVGLVLLLQPKIPYAACPAICVANTHLLYNPRRGDIKLTQLAMLLAEISSVAHQKDGSFCPIVMCGDFNSVPGSPLYSFIKEGKLNYEGLPIGKVSGQEQSSRGQRILSIPIWPPNLGISQNCVYEVQQVPKVEKTDSDLTQTQLKQTEVLVTAEKLSSNLQHHFSLSSVYSHYFPDTGIPEVTTCHSRSAITVDYIFYSAEKEDVAGHPGAEVALVGGLKLLARLSLLTEQDLWTVNGLPNENNSSDHLPLLAKFRLEL

SEQ ID NO: 407 - DNA, 4196 bp, Homo sapiens
gctgtgcagctgaggcgccgccgtggagccgccttggagccaccgcccccgatcgccttcgccgctgcgttggggaacctggaccgcgcggcgccgggtttccctcatgatcccgggcgggtggcggcggcggcagaggcggcgggaggatgacctcttaccgggagcggagtgccgacctggcccgtttctacactgtcaccgagccccagcgacacccgaggggctacacagtatataaggtcaccgcccgggttgtttcacgaagaaatccagaggatgtccaggagataattgtatggaagagatacagtgattttaagaaactacacaaagaactatggcaaattcacaaaaacttattccgacattcagagttgtttcctccatttgctaaaggaatagtgtttgggcgatttgatgaaactgttatcgaagagagaagacaatgtgctgaagacctgctacagttctctgccaatattcctgctctttacaatagtaaacagcttgaagactttttcaagggtggaataattaatgatagttctgaattaattggtcctgctgaagctcactcagattccctcattgatacctttcctgagtgtagtacggaaggcttctccagtgacagtgatctggtatctcttactgttgatgtggattctcttgctgagttagatgatggaatggcttccaatcaaaattctcccattagaacttttggtctcaatctttcttcggattcttcagcactaggggctgttgcttctgacagtgaacagagcaaaacagaagaagaacgggaaagtcgtagcctctttcctggcagtttaaagccgaagcttggcaagagagattatttggagaaagcaggagaattaataaagctggctttaaaaaaggaagaagaagacgactatgaagctgcttctgatttttataggaagggagttgatttactcctagaaggtgttcaaggagagtcaagccctacccgtcgagaagctgtgaagagaagaacagccgagtacctcatgcgggcagaaagtatctctagtctttatgggaaacctcagcttgatgatgtatctcagcctccaggatcactaagttcaaggcccctttggaacctaaggagccctgccgaggagctgaaggccttcagagtccttggggtgattgacaaggttttacttgtaatggacacaaggacagaacagactttcattttaaaaggtctaaggaaaagcagtgaatacagcaggaacagaaagaccatcatcccccgctgtgtgcccaacatggtgtgtctgcataagtacatcatctctgaggagtcagtatttcttgtgctgcagcatgcggaaggtggcaaactgtggtcatatatcagtaaatttctaaacagaagtcctgaagaaagctttgacatcaaggaagtgaaaaaacctacacttgcaaaagttcacctgcagcagccaacttctagtcctcaggacagcagtagctttgaatccagaggaagtgatggtggaagcatgcttaaagctctgcctttgaagagtagtcttactccaagttctcaagatgacagcaaccaggaagatgatggccaagatagctctccaaagtggccagattctggttcaagttcagaagaagaatgtactactagttatttaacattatgcaatgaatatgggcaagaaaagattgaaccagggtctttgaatgaggagcccttcatgaagactgaagggaatggtgttgatacaaaagctattaaaagcttcccagcacaccttgctgctgacagtgacagccccagcacacagctgagagctcacgagctgaagttcttccccaacgatgacccagaagcagttagttctccaagaacatcagattccctcagtagatcaaaaaatagccccatggaattctttaggatagacagtaaggatagcgcaagtgaactcctgggacttgactttggagaaaaattgtatagtctaaaatcagaacctttgaaaccattctttactcttccagatggagacagtgcttctaggagttttaatactagtgaaagcaaggtagagtttaaagctcaggacaccattagcaggggctcagatgactcagtgccagttatttcatttaaagatgctgcttttgatgatgtcagtggtactgatgaaggaagacctgatcttcttgtaaatttacctggtgaattggagtcaacaagagaagctgcagcaatgggacctactaagtttacacaaactaatatagggataatagaaaataaactcttggaagcccctgatgttttatgcctcaggcttagtactgaacaatgccaagcacatgaggagaaaggcatagaggaactgagtgatccctctgggcccaaatcctatagtataacagagaaacactatgcacaggaggatcccaggatgttatttgtagcagctgttgatcatagtagttcaggagatatgtctttgttacccagctcagatcctaagtttcaaggacttggagtggttgagtcagcagtaactgcaaacaacacagaagaaagcttattccgtatttgtagtccactctcaggtgctaatgaatatattgcaagcacagacactttaaaaacagaagaagtattgctgtttacagatcagactgatgatttggctaaagaggaaccaacttctttattccagagagactctgagactaagggtgaaagtggtttagtgctagaaggagacaaggaaatacatcagatttttgaggaccttgataaaaaattagcactagcctccaggttttacatcccagagggctgcattcaaagatgggcagctgaaatggtggtagcccttgatgctttacatagagagggaattgtgtgccgcgatttgaacccaaacaacatcttattgaatgatagaggacacattcagctaacgtattttagcaggtggagtgaggttgaagattcctgtgacagcgatgccatagagagaatgtactgtgccccagaggttggagcaatcactgaagaaactgaagcctgtgattggtggagtttgggtgctgtcctctttgaacttctcactggcaagactctggttgaatgccatccagcaggaataaatactcacactactttgaacatgccagaatgtgtctctgaagaggctcgctcactcattcaacagctcttgcagttcaatcctctggaacgacttggtgctggagttgctggtgttgaagatatcaaatctcatccattttttacccctgtggattgggcagaactgatgagatgaacgtaatgcagggttatcttcacacattctgatcttctctgtgacaggcatctccagcactgaggcacctctgactcacagttacttatggagcaccaaagcatttggataaagaccgttataggaaatgggggggaaatggctaaaagagaacaattcgtttacaattacaagatattagctaattgtgccaggggctgttatatacatatatacacaaccaaggtgtgatctgaatttaatccacatttggtgttgcagatgagttgtaaagccaactgaaagagttccttcaagaagttcctctgataggaagctagaagtgtagaatgaagttttacttgacagaaggacctttacatggcagctaacagtgctttttgctgaccaggattggtttatatgattaaattaatatttgcttaataatacactaaaagtatatgaacaatgtcatcaatgaaacttaaaagcgagaaaaaagaatatacacataatttctgacggaaaacctgtaccctgatgctgtataatgtatgttgaatgtggtcccagattatttctgtaagaagacactccatgttgtcagctttgtactctttgttgatactgcttatttagagaagggttcatataaacactcactctgtgtcttcaacagcatctttctttccccatctttctattttctgcaccctctgcttgttccctcatattctgttcttccgactcctgctaacacacatgcaacaaaaaagggaagggagtgcttatttccctttgtgtaaggactaagaaatcatgatatcaaataaacatggtgaaacattaaaaaaaaaaaaaaaa

SEQ ID NO: 408 - protein, 1066 aa, Homo sapiens
MTSYRERSADLARFYTVTEPQRHPRGYTVYKVTARVVSRRNPEDVQEIIVWKRYSDFKKLHKELWQIHKNLFRHSELFPPFAKGIVFGRFDETVIEERRQCAEDLLQFSANIPALYNSKQLEDFFKGGIINDSSELIGPAEAHSDSLIDTFPECSTEGFSSDSDLVSLTVDVDSLAELDDGMASNQNSPIRTFGLNLSSDSSALGAVASDSEQSKTEEERESRSLFPGSLKPKLGKRDYLEKAGELIKLALKKEEEDDYEAASDFYRKGVDLLLEGVQGESSPTRREAVKRRTAEYLMRAESISSLYGKPQLDDVSQPPGSLSSRPLWNLRSPAEELKAFRVLGVIDKVLLVMDTRTEQTFILKGLRKSSEYSRNRKTIIPRCVPNMVCLHKYIISEESVFLVLQHAEGGKLWSYISKFLNRSPEESFDIKEVKKPTLAKVHLQQPTSSPQDSSSFESRGSDGGSMLKALPLKSSLTPSSQDDSNQEDDGQDSSPKWPDSGSSSEEECTTSYLTLCNEYGQEKIEPGSLNEEPFMKTEGNGVDTKAIKSFPAHLAADSDSPSTQLRAHELKFFPNDDPEAVSSPRTSDSLSRSKNSPMEFFRIDSKDSASELLGLDFGEKLYSLKSEPLKPFFTLPDGDSASRSFNTSESKVEFKAQDTISRGSDDSVPVISFKDAAFDDVSGTDEGRPDLLVNLPGELESTREAAAMGPTKFTQTNIGIIENKLLEAPDVLCLRLSTEQCQAHEEKGIEELSDPSGPKSYSITEKHYAQEDPRMLFVAAVDHSSSGDMSLLPSSDPKFQGLGVVESAVTANNTEESLFRICSPLSGANEYIASTDTLKTEEVLLFTDQTDDLAKEEPTSLFQRDSETKGESGLVLEGDKEIHQIFEDLDKKLALASRFYIPEGCIQRWAAEMVVALDALHREGIVCRDLNPNNILLNDRGHIQLTYFSRWSEVEDSCDSDAIERMYCAPEVGAITEETEACDWWSLGAVLFELLTGKTLVECHPAGINTHTTLNMPECVSEEARSLIQQLLQFNPLERLGAGVAGVEDIKSHPFFTPVDWAELMR

SEQ ID NO: 409 - DNA, 6332 bp, Homo sapiens
tgtttgctctgcagaatactttacctgggcacccaagtcttccttccagcattcctgctgctacagcctatttgctgagtaaccaggggttacagcagcgttgccaggcaacgagggacagcggtcctgttgaagagccatttgtcacactgaggggactggttgaaatgcaataaagaaatgataccagcagctactcatgtcttcgccattgctaagaacgtcgttggtattaccttactctgagaacgtgtctgcagtttccagaaaatggagtatcgcaacatcacttaaagtaccctgcttcaaagtattgctggcaagtggcgtgggcctgattatttatttagaaatgctttatcaggaggagaatgcttttttgtaaacatgaattgcccagttctttcattgggctctggcttcttgtttcaggtcattgaaatgttgatctttgcctattttgcttcaatatccttgactgagtcacgaggtcttttcccaaggctggagaacgtgggagctttcaagaaagtttccatcgtgccaacccaagcagtatgtggactcccagaccgaagcactttttgtcacagctctgctgctgctgaaagtattcagttctgtacccagcggttttgtattcaggattgcccatacagatcttcacaccctacctacactgcccttttctcagcaggcctcagtagctgcatcacaccagacaagaatgatctgcatcctaacgcccatagcaattctgcaagttttatttttggaaatcacaagagctgcttttcttctcctccttctccaaagctgatggcatcatttaccttagctgtatggctgaaacctgagcaacaaggtgtaatgtgtgttatagaaaagacagtagatgggcagattgtgttcaaacttacaatatctgagaaagagaccatgttttattatcgcacagtaaatggtttgcaacctccaataaaagtaatgacactggggagaattcttgtgaagaaatggattcatcttagtgtgcaggtgcatcagacaaaaatcagcttctttatcaatggcgtggagaaggatcatacacctttcaatgcaagaactctaagtggttcaattacagattttgcatctggtactgtgcaaataggacagagtttaaatggtttagagcagtttgtcggaagaatgcaagattttcgattataccaagtggcacttacaaacagagagattctggaagtcttctctggagatcttctcagattgcatgcccaatcacattgccgttgccctggcagccacccgcgggtccaccctttggcacagcggtactgcattcctaatgatgcaggagacacagctgataatagagtgtcacggttgaatcctgaagcccatcctctctcttttgtcaatgataatgatgttggtacttcatgggtttcaaatgtgtttacaaacattacacagcttaatcaaggagtgactatttcagttgatttggaaaatggacagtatcaggtgttttatattatcattcagttctttagtccacaaccaacggaaataaggattcaaaggaagaaggaaaatagtttagattgggaggactggcaatattttgccaggaattgtggtgcttttggaatgaaaaacaatggagatttggaaaaacctgattctgtcaactgtcttcagctttccaattttactccatattcccgtggcaatgtcacatttagcatcctgacacctggaccaaattatcgtcctggatacaataacttctataataccccatctcttcaagagttcgtaaaagccacgcaaataaggtttcattttcatgggcagtactatacaactgagactgctgttaacctcagacacagatattatgcagtggacgaaatcaccattagtgggagatgtcagtgccatggtcatgccgataactgcgacacaacaagccagccatatagatgcctctgctcccaggagagcttcactgaaggacttcattgtgatcgctgcttgcctctttataatgacaagcctttccgccaaggtgatcaagtttacgctttcaattgtaaaccttgtcaatgcaacagccattccaaaagctgccattacaacatctctgtagacccatttccttttgagcacttcagagggggaggaggagtttgtgatgattgtgagcataacactacaggaaggaactgtgagctgtgcaaggattactttttccgacaagttggtgcagatccttcggccatagatgtttgcaaaccctgtgactgtgatacagttggcactagaaatggtagcattctttgtgatcagattggaggacagtgtaattgtaagagacacgtgtctggcaggcagtgcaatcagtgccagaatggattctacaatctacaagagttggatcctgatggctgcagtccctgtaactgcaatacctctgggacagtggatggagatattacctgtcaccaaaattcaggccagtgcaagtgcaaagcaaacgttattgggcttaggtgtgatcattgcaattttggatttaaatttctccgaagctttaatgatgttggatgtgagccctgccagtgtaacctccatggctcagtgaacaaattctgcaatcctcactctgggcagtgtgagtgcaaaaaagaagccaaaggacttcagtgtgacacctgcagagaaaacttttatgggttagatgtcaccaattgtaaggcctgtgactgtgacacagctggatccctccctgggactgtctgtaatgctaagacagggcagtgcatctgcaagcccaatgttgaagggagacagtgcaataaatgtttggagggaaacttctacctacggcaaaataattctttcctctgtctgccttgcaactgtgataagactgggacaataaatggctctctgctgtgtaacaaatcaacaggacaatgtccttgcaaattaggggtaacaggtcttcgctgtaatcagtgtgagcctcacaggtacaatttgaccattgacaattttcaacactgccagatgtgtgagtgtgattccttggggacattacctgggaccatttgtgacccaatcagtggccagtgcctgtgtgtgcctaatcgtcaaggaagaaggtgtaatcagtgtcaaccaggtttttatatttctccaggcaatgccactggctgcctgccatgctcatgccatacaactggtgcagttaatcacatctgtaatagcctgactggtcagtgtgtttgccaagatgcttccattgctgggcaacgttgtgaccaatgcaaagaccattactttggatttgatcctcagactggaagatgtcagccttgtaattgtcatctctcaggagccttgaatgaaacctgtcacttggtcacaggccagtgtttctgtaaacaatttgtcactggctcaaagtgtgatgcttgtgttcccagtgcaagccacttggatgtcaacaatctattgggttgcagcaaaactccattccagcaacctccgcccagaggacaagttcaaagttcttctgctatcaatctctcctggagtccacctgattctccaaatgcccactggcttacttacagtttactcagggatggttttgaaatctacacaacagaggatcaatacccatacagtattcaatacttcttagacacagacctgttaccatataccaaatattcctattacattgagaccaccaatgtgcatggttcaacaaggagtgtagctgtcacttacaagacaaaaccaggggtcccagagggaaacttgactttaagttatatcattcctattggctcagactctgtgacacttacctggacaacactctcaaatcaatctggtcccatagagaaatatattttgtcctgtgcccctttggctggtggtcagccatgtgtttcctacgaaggtcatgaaacctcagctaccatctggaatctggttccatttgccaagtacgatttttctgtacaggcgtgtactagcgggggctgtttacacagcttgcccattacagtgaccacagcccaggcccctccccaaagactaagtccacctaagatgcagaaaatcagttctacagaacttcatgtagaatggtctccaccagcggaactaaatggaataattataagatatgaactatacatgagaagactgagatctactaaagaaaccacatctgaggaaagtcgagtttttcagagcagtggttggctcagtcctcattcatttgtagaatcggccaatgaaaatgcattaaaacctcctcaaacaatgacaaccatcactggcttggagccatacaccaagtatgagttcagagtcttagctgtgaatatggctggaagtgtgtcttctgcctgggtctcagaaagaacgggagaatcagcacctgtattcatgatccctccttcagtctttcccctctcttcgtactctctcaatatctcctgggagaagccagcagataatgttacaagaggaaaagttgtggggtatgacatcaatatgctttctgaacaatcacctcaacagtctattcccatggcgttttcacagctgttgcacactgctaaatcccaagaactatcttacactgtagaaggactgaaaccttataggatatatgagtttactattactctctgcaattcagttggttgtgtgaccagtgcttcgggagcaggacaaactttagcagcagcaccagcacaactgaggccacctctggttaaaggaatcaacagcacaacaatccatcttaggtggtttccacctgaagaactgaatggaccctctcctatatatcagctggaaaggagagagtcatctctaccagctctgatgaccacgatgatgaaaggaatccgtttcataggaaatgggtattgtaaatttcccagctccactcacccagtcaatacagacttcactggtaagtgtgtttgacattgctttatttaggagacacgaagctccaaaatgttttctatattttcatatccctttacaatgaatttttattatacctacttagagaaatactaattcagccctttgatagcttttgcctgattgtttcagcatgtccatctttttagaattctggggaaaaaagtcaggtaagtgaaggaaaggaaaaataaaagatgaagatgaagaagcagccttattggatcaaagtatgtgctttgtatttgtctttttgtgaagtatgtgccaggacatgtttcttgaaatattattcactgtgttctctgagcaaatgagtttgcaaaatgccctcatgctattggagattctcagtatgcaccccgttactgaaactccaaaaagcattgtaagaaagctattcaactttgcttagctaatcatgcctaacagatatttgatgtaatgttttctttttctttctcttgctgtttccttcttctttttttcactgtgacaacttaatatctcatgttctatgaagaacattgtggggaaaactaatcccagggaaaagataacttctctaagccaggactatggtaaagcaagtgaggctcttgtttcggtcacaaaatttaaaggcactaaaaaactcagtgttaatgtaaattttaatgcaatatttttaaaaatgaaaatcaatgtgaaagcactataaaaatattatcaaaagcttaaataaagacagattgaactctgtaccagcacaatcctgcctcactggccttaccctcctcctggccttactagtaccgcaatattttggaagtcccatgacctctgtgacttacagcttctaatagcatgatttcaatatagctgtaaaaaaactctacttatggtacaccatttttccaatttttaaaaaaatttacaaagtataagatatatattattatgtaaactcataaagatgttcatttaatcatccatgagaaagtcattttggagcaaatagctagtctttaaaatattgcatatgtgaagacaatgaaatggaattcgagctataaaaatttgtattgttttatttttacttaaaatagtaaatagtttgcttttcattgagactggctgctgatgcaccttggtaatgaatcatgattatattctaactgagatatattgagattaatgcatgattaactactctctcagtacatcaaaatcattgcagagtattagaaattgaaccattgagctaaaaatgctcaacttctgctttatattcttaaaatggcaaaaaaaaaaaaaaaaaa

SEQ ID NO: 410 - protein, 1546 aa, Homo sapiens
MNCPVLSLGSGFLFQVIEMLIFAYFASISLTESRGLFPRLENVGAFKKVSIVPTQAVCGLPDRSTFCHSSAAAESIQFCTQRFCIQDCPYRSSHPTYTALFSAGLSSCITPDKNDLHPNAHSNSASFIFGNHKSCFSSPPSPKLMASFTLAVWLKPEQQGVMCVIEKTVDGQIVFKLTISEKETMFYYRTVNGLQPPIKVMTLGRILVKKWIHLSVQVHQTKISFFINGVEKDHTPFNARTLSGSITDFASGTVQIGQSLNGLEQFVGRMQDFRLYQVALTNREILEVFSGDLLRLHAQSHCRCPGSHPRVHPLAQRYCIPNDAGDTADNRVSRLNPEAHPLSFVNDNDVGTSWVSNVFTNITQLNQGVTISVDLENGQYQVFYIIIQFFSPQPTEIRIQRKKENSLDWEDWQYFARNCGAFGMKNNGDLEKPDSVNCLQLSNFTPYSRGNVTFSILTPGPNYRPGYNNFYNTPSLQEFVKATQIRFHFHGQYYTTETAVNLRHRYYAVDEITISGRCQCHGHADNCDTTSQPYRCLCSQESFTEGLHCDRCLPLYNDKPFRQGDQVYAFNCKPCQCNSHSKSCHYNISVDPFPFEHFRGGGGVCDDCEHNTTGRNCELCKDYFFRQVGADPSAIDVCKPCDCDTVGTRNGSILCDQIGGQCNCKRHVSGRQCNQCQNGFYNLQELDPDGCSPCNCNTSGTVDGDITCHQNSGQCKCKANVIGLRCDHCNFGFKFLRSFNDVGCEPCQCNLHGSVNKFCNPHSGQCECKKEAKGLQCDTCRENFYGLDVTNCKACDCDTAGSLPGTVCNAKTGQCICKPNVEGRQCNKCLEGNFYLRQNNSFLCLPCNCDKTGTINGSLLCNKSTGQCPCKLGVTGLRCNQCEPHRYNLTIDNFQHCQMCECDSLGTLPGTICDPISGQCLCVPNRQGRRCNQCQPGFYISPGNATGCLPCSCHTTGAVNHICNSLTGQCVCQDASIAGQRCDQCKDHYFGFDPQTGRCQPCNCHLSGALNETCHLVTGQCFCKQFVTGSKCDACVPSASHLDVNNLLGCSKTPFQQPPPRGQVQSSSAINLSWSPPDSPNAHWLTYSLLRDGFEIYTTEDQYPYSIQYFLDTDLLPYTKYSYYIETTNVHGSTRSVAVTYKTKPGVPEGNLTLSYIIPIGSDSVTLTWTTLSNQSGPIEKYILSCAPLAGGQPCVSYEGHETSATIWNLVPFAKYDFSVQACTSGGCLHSLPITVTTAQAPPQRLSPPKMQKISSTELHVEWSPPAELNGIIIRYELYMRRLRSTKETTSEESRVFQSSGWLSPHSFVESANENALKPPQTMTTITGLEPYTKYEFRVLAVNMAGSVSSAWVSERTGESAPVFMIPPSVFPLSSYSLNISWEKPADNVTRGKVVGYDINMLSEQSPQQSIPMAFSQLLHTAKSQELSYTVEGLKPYRIYEFTITLCNSVGCVTSASGAGQTLAAAPAQLRPPLVKGINSTTIHLRWFPPEELNGPSPIYQLERRESSLPALMTTMMKGIRFIGNGYCKFPSSTHPVNTDFTGKCV

SEQ ID NO: 411 - DNA, 8192 bp, Homo sapiens
tgtttgctctgcagaatactttacctgggcacccaagtcttccttccagcattcctgctgctacagcctatttgctgagtaaccaggggttacagcagcgttgccaggcaacgagggacagcggtcctgttgaagagccatttgtcacactgaggggactggttgaaatgcaataaagaaatgataccagcagctactcatgtcttcgccattgctaagaacgtcgttggtattaccttactctgagaacgtgtctgcagtttccagaaaatggagtatcgcaacatcacttaaagtaccctgcttcaaagtattgctggcaagtggcgtgggcctgattatttatttagaaatgctttatcaggaggagaatgcttttttgtaaacatgaattgcccagttctttcattgggctctggcttcttgtttcaggtcattgaaatgttgatctttgcctattttgcttcaatatccttgactgagtcacgaggtcttttcccaaggctggagaacgtgggagctttcaagaaagtttccatcgtgccaacccaagcagtatgtggactcccagaccgaagcactttttgtcacagctctgctgctgctgaaagtattcagttctgtacccagcggttttgtattcaggattgcccatacagatcttcacaccctacctacactgcccttttctcagcaggcctcagtagctgcatcacaccagacaagaatgatctgcatcctaacgcccatagcaattctgcaagttttatttttggaaatcacaagagctgcttttcttctcctccttctccaaagctgatggcatcatttaccttagctgtatggctgaaacctgagcaacaaggtgtaatgtgtgttatagaaaagacagtagatgggcagattgtgttcaaacttacaatatctgagaaagagaccatgttttattatcgcacagtaaatggtttgcaacctccaataaaagtaatgacactggggagaattcttgtgaagaaatggattcatcttagtgtgcaggtgcatcagacaaaaatcagcttctttatcaatggcgtggagaaggatcatacacctttcaatgcaagaactctaagtggttcaattacagattttgcatctggtactgtgcaaataggacagagtttaaatggtttagagcagtttgtcggaagaatgcaagattttcgattataccaagtggcacttacaaacagagagattctggaagtcttctctggagatcttctcagattgcatgcccaatcacattgccgttgccctggcagccacccgcgggtccaccctttggcacagcggtactgcattcctaatgatgcaggagacacagctgataatagagtgtcacggttgaatcctgaagcccatcctctctcttttgtcaatgataatgatgttggtacttcatgggtttcaaatgtgtttacaaacattacacagcttaatcaaggagtgactatttcagttgatttggaaaatggacagtatcaggtgttttatattatcattcagttctttagtccacaaccaacggaaataaggattcaaaggaagaaggaaaatagtttagattgggaggactggcaatattttgccaggaattgtggtgcttttggaatgaaaaacaatggagatttggaaaaacctgattctgtcaactgtcttcagctttccaattttactccatattcccgtggcaatgtcacatttagcatcctgacacctggaccaaattatcgtcctggatacaataacttctataataccccatctcttcaagagttcgtaaaagccacgcaaataaggtttcattttcatgggcagtactatacaactgagactgctgttaacctcagacacagatattatgcagtggacgaaatcaccattagtgggagatgtcagtgccatggtcatgccgataactgcgacacaacaagccagccatatagatgcctctgctcccaggagagcttcactgaaggacttcattgtgatcgctgcttgcctctttataatgacaagcctttccgccaaggtgatcaagtttacgctttcaattgtaaaccttgtcaatgcaacagccattccaaaagctgccattacaacatctctgtagacccatttccttttgagcacttcagagggggaggaggagtttgtgatgattgtgagcataacactacaggaaggaactgtgagctgtgcaaggattactttttccgacaagttggtgcagatccttcggccatagatgtttgcaaaccctgtgactgtgatacagttggcactagaaatggtagcattctttgtgatcagattggaggacagtgtaattgtaagagacacgtgtctggcaggcagtgcaatcagtgccagaatggattctacaatctacaagagttggatcctgatggctgcagtccctgtaactgcaatacctctgggacagtggatggagatattacctgtcaccaaaattcaggccagtgcaagtgcaaagcaaacgttattgggcttaggtgtgatcattgcaattttggatttaaatttctccgaagctttaatgatgttggatgtgagccctgccagtgtaacctccatggctcagtgaacaaattctgcaatcctcactctgggcagtgtgagtgcaaaaaagaagccaaaggacttcagtgtgacacctgcagagaaaacttttatgggttagatgtcaccaattgtaaggcctgtgactgtgacacagctggatccctccctgggactgtctgtaatgctaagacagggcagtgcatctgcaagcccaatgttgaagggagacagtgcaataaatgtttggagggaaacttctacctacggcaaaataattctttcctctgtctgccttgcaactgtgataagactgggacaataaatggctctctgctgtgtaacaaatcaacaggacaatgtccttgcaaattaggggtaacaggtcttcgctgtaatcagtgtgagcctcacaggtacaatttgaccattgacaattttcaacactgccagatgtgtgagtgtgattccttggggacattacctgggaccatttgtgacccaatcagtggccagtgcctgtgtgtgcctaatcgtcaaggaagaaggtgtaatcagtgtcaaccaggtttttatatttctccaggcaatgccactggctgcctgccatgctcatgccatacaactggtgcagttaatcacatctgtaatagcctgactggtcagtgtgtttgccaagatgcttccattgctgggcaacgttgtgaccaatgcaaagaccattactttggatttgatcctcagactggaagatgtcagccttgtaattgtcatctctcaggagccttgaatgaaacctgtcacttggtcacaggccagtgtttctgtaaacaatttgtcactggctcaaagtgtgatgcttgtgttcccagtgcaagccacttggatgtcaacaatctattgggttgcagcaaaactccattccagcaacctccgcccagaggacaagttcaaagttcttctgctatcaatctctcctggagtccacctgattctccaaatgcccactggcttacttacagtttactcagggatggttttgaaatctacacaacagaggatcaatacccatacagtattcaatacttcttagacacagacctgttaccatataccaaatattcctattacattgagaccaccaatgtgcatggttcaacaaggagtgtagctgtcacttacaagacaaaaccaggggtcccagagggaaacttgactttaagttatatcattcctattggctcagactctgtgacacttacctggacaacactctcaaatcaatctggtcccatagagaaatatattttgtcctgtgcccctttggctggtggtcagccatgtgtttcctacgaaggtcatgaaacctcagctaccatctggaatctggttccatttgccaagtacgatttttctgtacaggcgtgtactagcgggggctgtttacacagcttgcccattacagtgaccacagcccaggcccctccccaaagactaagtccacctaagatgcagaaaatcagttctacagaacttcatgtagaatggtctccaccagcggaactaaatggaataattataagatatgaactatacatgagaagactgagatctactaaagaaaccacatctgaggaaagtcgagtttttcagagcagtggttggctcagtcctcattcatttgtagaatcggccaatgaaaatgcattaaaacctcctcaaacaatgacaaccatcactggcttggagccatacaccaagtatgagttcagagtcttagctgtgaatatggctggaagtgtgtcttctgcctgggtctcagaaagaacgggagaatcagcacctgtattcatgatccctccttcagtctttcccctctcttcgtactctctcaatatctcctgggagaagccagcagataatgttacaagaggaaaagttgtggggtatgacatcaatatgctttctgaacaatcacctcaacagtctattcccatggcgttttcacagctgttgcacactgctaaatcccaagaactatcttacactgtagaaggactgaaaccttataggatatatgagtttactattactctctgcaattcagttggttgtgtgaccagtgcttcgggagcaggacaaactttagcagcagcaccagcacaactgaggccacctctggttaaaggaatcaacagcacaacaatccatcttaggtggtttccacctgaagaactgaatggaccctctcctatatatcagctggaaaggagagagtcatctctaccagctctgatgaccacgatgatgaaaggaatccgtttcataggaaatgggtattgtaaatttcccagctccactcacccagtcaatacagacttcactggcattaaggccagctttcgaacaaaagtgcctgaaggtttgattgtctttgcagcatcacctggcaatcaggaagagtattttgcacttcagttgaagaagggacgtctttattttctttttgatcctcaggggtcaccagtggaagtaactacaactaatgatcatggcaaacaatatagtgatggaaaatggcatgaaataattgctattaggcatcaggcttttggccaaatcactctggatgggatatatacaggttcctctgccatcctgaatggtagtactgttattggagataacacaggagtctttctgggagggctcccgcgaagttataccatcctcaggaaggatcctgagataatccaaaaaggttttgtgggctgtctcaaggatgtacattttatgaagaattacaatccgtcagctatttgggaacctctggattggcagagttctgaagaacaaatcaacgtgtataacagctgggagggatgtcccgcttcattaaatgagggagctcagttcctaggagcagggttcctggaacttcatccatatatgtttcatggtggaatgaactttgagatttcctttaagttcagaactgaccaattaaatggattgcttcttttcgtttataacaaagatggacctgattttcttgctatggagctgaaaagtggaatattgaccttccggttaaataccagtcttgcctttacacaagtggatctattgctggggctatcctattgtaatggaaagtggaataaagtcattattaaaaaggaaggctctttcatatcagcaagtgtgaatggactgatgaagcatgcatcggagtccggagaccagccactggtggtgaattcaccagtttatgtgggaggaatcccacaggaactgctgaactcttatcaacatttgtgtttggaacaaggtttcggtggttgcatgaaggatgttaaatttacacggggtgctgtcgttaacttggcatctgtgtccagcggtgctgtcagagtcaatctggatggatgcctatcaactgacagtgctgttaactgcaggggaaatgactccatcctggtttaccagggaaaagagcagagtgtttacgagggtggtctccagccttttacagaatacctgtatcgagtgatagcctcgcatgaaggaggttcagtatatagtgattggagtcgaggacgtacaacaggagcagctccacaaagtgtgccaactccctcaagagtccgcagcttaaatggatacagcattgaggtgacctgggatgaacctgttgtcagaggtgtaattgagaagtacattctgaaagcctatagtgaggacagcacccgtccaccccgcatgccctctgccagtgctgaatttgtcaatacaagcaacctcacaggcatattgacaggcttgctacccttcaaaaactatgcagtaaccctaactgcttgcactttggctggctgtactgagagctcacatgcattgaacatctctactccacaagaagccccacaagaggttcagccaccagtagccaaatcccttcccagttctttgctgctctcctggaacccacccaaaaaggcaaatggtattataactcagtactgtttatacatggatgggaggctgatctattcaggcagtgaggagaactacatagtcacagatttagcagtatttacaccccaccagtttctactaagtgcatgcacacatgtgggctgtacaaacagttcctgggtcctactgtacacagcacagctgccaccagaacacgtggattccccagttctgactgtcctggattctagaactatacacatacagtggaaacaaccaagaaaaataagtgggattctggaacgctatgtattatatatgtcaaaccatacacatgattttacaatttggagtgtcatctataacagtacagaacttttccaggatcatatgctacaatacgttttacctggtaataaatatctcatcaagctgggagcttgcacaggtggtgggtgcacagtgagtgaggccagtgaggccctaactgacgaggacatacccgaaggcgtgccagcccccaaagcccactcatattcacctgactcctttaatgtctcctggactgagcctgaatatccgaatggtgttatcacgagttatggattatatctagatggtatattaatccacaattcctcagaactcagctatcgtgcttacggatttgctccttggagtttacattccttcagagtccaagcatgcacggccaaaggttgtgctctgggcccactggtggaaaatcgaactctagaagctcctcctgaaggaacagtaaatgtgtttgtcaaaacacagggatcccggaaagcccacgtgaggtgggaagcaccttttcgccctaatggactcttaacacactcagtccttttcactgggatattctatgtagacccagtaggtaataactacacccttctgaatgtcacaaaagtcatgtacagcggagaagagacaaacctttgggtgctcatcgatgggctggttccttttaccaactatactgtacaagtgaatatttcaaatagccaaggcagcttgataactgatcctataacaattgcaatgcctccaggagctccagatggcgtgctgcctcccaggctttcatctgccactccaaccagtcttcaggttgtctggtctacaccagctcgtaataacgctcctggctctcccagataccaactccagatgaggtctggcgactccacccatggatttctagagttattttccaatccttctgcatcgttaagctatgaagtgagtgatctccaaccgtacacagagtatatgtttcggttggttgcctccaatggatttggcagtgcacatagttcttggattccattcatgaccgcagaggacaaacctggacctgtagttcctccgattcttctggatgtgaagtcaagaatgatgttggtcacctggcagcatcctagaaaatccaatggggttattacccattataacatttatctacatggccgtctatacttgagaactcctggaaatgtcactaattgcacagtgatgcatttacacccatacactgcctataagtttcaggtagaagc

SEQ ID NO: 412 - protein, 5202 aa, Homo sapiens
MNCPVLSLGSGFLFQVIEMLIFAYFASISLTESRGLFPRLENVGAFKKVSIVPTQAVCGLPDRSTFCHSSAAAESIQFCTQRFCIQDCPYRSSHPTYTALFSAGLSSCITPDKNDLHPNAHSNSASFIFGNHKSCFSSPPSPKLMASFTLAVWLKPEQQGVMCVIEKTVDGQIVFKLTISEKETMFYYRTVNGLQPPIKVMTLGRILVKKWIHLSVQVHQTKISFFINGVEKDHTPFNARTLSGSITDFASGTVQIGQSLNGLEQFVGRMQDFRLYQVALTNREILEVFSGDLLRLHAQSHCRCPGSHPRVHPLAQRYCIPNDAGDTADNRVSRLNPEAHPLSFVNDNDVGTSWVSNVFTNITQLNQGVTISVDLENGQYQVFYIIIQFFSPQPTEIRIQRKKENSLDWEDWQYFARNCGAFGMKNNGDLEKPDSVNCLQLSNFTPYSRGNVTFSILTPGPNYRPGYNNFYNTPSLQEFVKATQIRFHFHGQYYTTETAVNLRHRYYAVDEITISGRCQCHGHADNCDTTSQPYRCLCSQESFTEGLHCDRCLPLYNDKPFRQGDQVYAFNCKPCQCNSHSKSCHYNISVDPFPFEHFRGGGGVCDDCEHNTTGRNCELCKDYFFRQVGADPSAIDVCKPCDCDTVGTRNGSILCDQIGGQCNCKRHVSGRQCNQCQNGFYNLQELDPDGCSPCNCNTSGTVDGDITCHQNSGQCKCKANVIGLRCDHCNFGFKFLRSFNDVGCEPCQCNLHGSVNKFCNPHSGQCECKKEAKGLQCDTCRENFYGLDVTNCKACDCDTAGSLPGTVCNAKTGQCICKPNVEGRQCNKCLEGNFYLRQNNSFLCLPCNCDKTGTINGSLLCNKSTGQCPCKLGVTGLRCNQCEPHRYNLTIDNFQHCQMCECDSLGTLPGTICDPISGQCLCVPNRQGRRCNQCQPGFYISPGNATGCLPCSCHTTGAVNHICNSLTGQCVCQDASIAGQRCDQCKDHYFGFDPQTGRCQPCNCHLSGALNETCHLVTGQCFCKQFVTGSKCDACVPSASHLDVNNLLGCSKTPFQQPPPRGQVQSSSAINLSWSPPDSPNAHWLTYSLLRDGFEIYTTEDQYPYSIQYFLDTDLLPYTKYSYYIETTNVHGSTRSVAVTYKTKPGVPEGNLTLSYIIPIGSDSVTLTWTTLSNQSGPIEKYILSCAPLAGGQPCVSYEGHETSATIWNLVPFAKYDFSVQACTSGGCLHSLPITVTTAQAPPQRLSPPKMQKISSTELHVEWSPPAELNGIIIRYELYMRRLRSTKETTSEESRVFQSSGWLSPHSFVESANENALKPPQTMTTITGLEPYTKYEFRVLAVNMAGSVSSAWVSERTGESAPVFMIPPSVFPLSSYSLNISWEKPADNVTRGKVVGYDINMLSEQSPQQSIPMAFSQLLHTAKSQELSYTVEGLKPYRIYEFTITLCNSVGCVTSASGAGQTLAAAPAQLRPPLVKGINSTTIHLRWFPPEELNGPSPIYQLERRESSLPALMTTMMKGIRFIGNGYCKFPSSTHPVNTDFTGIKASFRTKVPEGLIVFAASPGNQEEYFALQLKKGRLYFLFDPQGSPVEVTTTNDHGKQYSDGKWHEIIAIRHQAFGQITLDGIYTGSSAILNGSTVIGDNTGVFLGGLPRSYTILRKDPEIIQKGFVGCLKDVHFMKNYNPSAIWEPLDWQSSEEQINVYNSWEGCPASLNEGAQFLGAGFLELHPYMFHGGMNFEISFKFRTDQLNGLLLFVYNKDGPDFLAMELKSGILTFRLNTSLAFTQVDLLLGLSYCNGKWNKVIIKKEGSFISASVNGLMKHASESGDQPLVVNSPVYVGGIPQELLNSYQHLCLEQGFGGCMKDVKFTRGAVVNLASVSSGAVRVNLDGCLSTDSAVNCRGNDSILVYQGKEQSVYEGGLQPFTEYLYRVIASHEGGSVYSDWSRGRTTGAAPQSVPTPSRVRSLNGYSIEVTWDEPVVRGVIEKYILKAYSEDSTRPPRMPSASAEFVNTSNLTGILTGLLPFKNYAVTLTACTLAGCTESSHALNISTPQEAPQEVQPPVAKSLPSSLLLSWNPPKKANGIITQYCLYMDGRLIYSGSEENYIVTDLAVFTPHQFLLSACTHVGCTNSSWVLLYTAQLPPEHVDSPVLTVLDSRTIHIQWKQPRKISGILERYVLYMSNHTHDFTIWSVIYNSTELFQDHMLQYVLPGNKYLIKLGACTGGGCTVSEASEALTDEDIPEGVPAPKAHSYSPDSFNVSWTEPEYPNGVITSYGLYLDGILIHNSSELSYRAYGFAPWSLHSFRVQACTAKGCALGPLVENRTLEAPPEGTVNVFVKTQGSRKAHVRWEAPFRPNGLLTHSVLFTGIFYVDPVGNNYTLLNVTKVMYSGEETNLWVLIDGLVPFTNYTVQVNISNSQGSLITDPITIAMPPGAPDGVLPPRLSSATPTSLQVVWSTPARNNAPGSPRYQLQMRSGDSTHGFLELFSNPSASLSYEVSDLQPYTEYMFRLVASNGFGSAHSSWIPFMTAEDKPGPVVPPILLDVKSRMMLVTWQHPRKSNGVITHYNIYLHGRLYLRTPGNVTNCTVMHLHPYTAYKFQVEACTSKGCSLSPESQTVWTLPGAPEGIPSPELFSDTPTSVIISWQPPTHPNGLVENFTIERRVKGKEEVTTLVTLPRSHSMRFIDKTSALSPWTKYEYRVLMSTLHGGTNSSAWVEVTTRPSRPAGVQPPVVTVLEPDAVQVTWKPPLIQNGDILSYEIHMPDPHITLTNVTSAVLSQKVTHLIPFTNYSVTIVACSGGNGYLGGCTESLPTYVTTHPTVPQNVGPLSVIPLSESYVVISWQPPSKPNGPNLRYELLRRKIQQPLASNPPEDLNRWHNIYSGTQWLYEDKGLSRFTTYEYMLFVHNSVGFTPSREVTVTTLAGLPERGANLTASVLNHTAIDVRWAKPTVQDLQGEVEYYTLFWSSATSNDSLKILPDVNSHVIGHLKPNTEYWIFISVFNGVHSINSAGLHATTCDGEPQGMLPPEVVIINSTAVRVIWTSPSNPNGVVTEYSIYVNNKLYKTGMNVPGSFILRDLSPFTIYDIQVEVCTIYACVKSNGTQITTVEDTPSDIPTPTIRGITSRSLQIDWVSPRKPNGIILGYDLLWKTWYPCAKTQKLVQDQSDELCKAVRCQKPESICGHICYSSEAKVCCNGVLYNPKPGHRCCEEKYIPFVLNSTGVCCGGRIQEAQPNHQCCSGYYARILPGEVCCPDEQHNRVSVGIGDSCCGRMPYSTSGNQICCAGRLHDGHGQKCCGRQIVSNDLECCGGEEGVVYNRLPGMFCCGQDYVNMSDTICCSASSGESKAHIKKNDPVPVKCCETELIPKSQKCCNGVGYNPLKYVCSDKISTGMMMKETKECRILCPASMEATEHCGRCDFNFTSHICTVIRGSHNSTGKASIEEMCSSAEETIHTGSVNTYSYTDVNLKPYMTYEYRISAWNSYGRGLSKAVRARTKEDVPQGVSPPTWTKIDNLEDTIVLNWRKPIQSNGPIIYYILLRNGIERFRGTSLSFSDKEGIQPFQEYSYQLKACTVAGCATSSKVVAATTQGVPESILPPSITALSAVALHLSWSVPEKSNGVIKEYQIRQVGKGLIHTDTTDRRQHTVTGLQPYTNYSFTLTACTSAGCTSSEPFLGQTLQAAPEGVWVTPRHIIINSTTVELYWSLPEKPNGLVSQYQLSRNGNLLFLGGSEEQNFTDKNLEPNSRYTYKLEVKTGGGSSASDDYIVQTPMSTPEEIYPPYNITVIGPYSIFVAWIPPGILIPEIPVEYNVLLNDGSVTPLAFSVGHHQSTLLENLTPFTQYEIRIQACQNGSCGVSSRMFVKTPEAAPMDLNSPVLKALGSACIEIKWMPPEKPNGIIINYFIYRRPAGIEEESVLFVWSEGALEFMDEGDTLRPFTLYEYRVRACNSKGSVESLWSLTQTLEAPPQDFPAPWAQATSAHSVLLNWTKPESPNGIISHYRVVYQERPDDPTFNSPTVHAFTVKGTSHQAHLYGLEPFTTYRIGVVAANHAGEILSPWTLIQTLESSPSGLRNFIVEQKENGRALLLQWSEPMRTNGVIKTYNIFSDGFLEYSGLNRQFLFRRLDPFTLYTLTLEACTRAGCAHSAPQPLWTDEAPPDSQLAPTVHSVKSTSVELSWSEPVNPNGKIIRYEVIRRCFEGKAWGNQTIQADEKIVFTEYNTERNTFMYNDTGLQPWTQCEYKIYTWNSAGHTCSSWNVVRTLQAPPEGLSPPVISYVSMNPQKLLISWIPPEQSNGIIQSYRLQRNEMLYPFSFDPVTFNYTDEELLPFSTYSYALQACTSGGCSTSKPTSITTLEAAPSEVSPPDLWAVSATQMNVCWSPPTVQNGKITKYLVRYDNKESLAGQGLCLLVSHLQPYSQYNFSLVACTNGGCTASVSKSAWTMEALPENMDSPTLQVTGSESIEITWKPPRNPNGQIRSYELRRDGTIVYTGLETRYRDFTLTPGVEYSYTVTASNSQGGILSPLVKDRTSPSAPSGMEPPKLQARGPQEILVNWDPPVRTNGDIINYTLFIRELFERETKIIHINTTHNSFGMQSYIVNQLKPFHRYEIRIQACTTLGCASSDWTFIQTPEIAPLMQPPPHLEVQMAPGGFQPTVSLLWTGPLQPNGKVLYYELYRRQIATQPRKSNPVLIYNGSSTSFIDSELLPFTEYEYQVWAVNSAGKAPSSWTWCRTGPAPPEGLRAPTFHVISSTQAVVNISAPGKPNGIVSLYRLFSSSAHGAETVLSEGMATQQTLHGLQAFTNYSIGVEACTCFNCCSKGPTAELRTHPAPPSGLSSPQIGTLASRTASFRWSPPMFPNGVIHSYELQFHVACPPDSALPCTPSQIETKYTGLGQKASLGGLQPYTTYKLRVVAHNEVGSTASEWISFTTQKELPQYRAPFSVDSNLSVVCVNWSDTFLLNGQLKEYVLTDGGRRVYSGLDTTLYIPRTADKTFFFQVICTTDEGSVKTPLIQYDTSTGLGLVLTTPGKKKGSRSKSTEFYSELWFIVLMAMLGLILLAIFLSLILQRKIHKEPYIRERPPLVPLQKRMSPLNVYPPGENHMGLADTKIPRSGTPVSIRSNRSACVLRIPSQNQTSLTYSQGSLHRSVSQLMDIQDKKVLMDNSLWEAIMGHNSGLYVDEEDLMNAIKDFSSVTKERTTFTDTHL

SEQ ID NO: 413 - DNA, 1368 bp, Homo sapiens
cagaaaaatggcagccgccgctccggactcacgtgtgagtgaggaagaaaacctgaaaaagaccccaaagaagaagatgaaaatggtaactggagccgtagcgtcggtgctggaagacgaggccacagacacttctgatagtgaaggaagctgtggatcggaaaaggaccacttttattctgatgatgacgcaatagaagctgacagtgagggtgatgctgagccctgtgacaaagaaaatgaaaatgatggagaatcaagtgttgggactaatatgggctgggcagatgctatggctaaagtcctcaacaagaaaactcctgaaagtaaacctactattctggtcaaaaataagaagctggaaaaggaaaaagaaaagttaaagcaagaaagactagagaaaataaaacagcgtgataagaggctggagtgggaaatgatgtgcagagtaaagccagatgttgtccaagacaaagagacagagagaaatcttcagagaattgcaacaaggggtgtggtgcaattatttaatgctgttcagaaacatcaaaagaatgttgatgaaaaggttaaggaagctggaagttctatgagaaagcgtgctaagttgatatcaactgtttccaagaaagatttcatcagtgttttgagagggatggatggaagtacaaatgagactgcttcaagcaggaagaaaccaaaagccaaacagactgaagtgaaatcagaagaaggcccaggttggacgatcctacgtgatgatttcatgatgggagcatctatgaaagactgggacaaggaaagtgatgggccagatgacagcagaccagaatctgcaagtgactctgatacataaagcatcataggaaatacaattgcagtcgttttattttttctagaaaaatatgtcatcctctgatagttggggaattataaggataccatttgtaagaaagccaaaagacttttgccagatttcatatttccccttttcatgtacactttatatatacttcattaaaattatattttaaacccttgtataattttaagcattgttcctcagaacatttgtaaaaggatatatttctgcttgaccagcgagatgtgcattttgccaggatcatattggtcatgtctattggtgtattatttcagtatcaccaatgttttcagaaatacagtactaattcatcattaaactctttgaagttaatatttttctgccttctaacttatagactcaactatgtatctgtagtttttgggaatggttggtgttttttgctttgtgttgggaagttattgagaaaacctatataataaaatttaaaattataaaaaaaaaaaaaaaaaaaaaaaaaaaaa

SEQ ID NO: 414 - protein, 259 aa, Homo sapiens
MKMVTGAVASVLEDEATDTSDSEGSCGSEKDHFYSDDDAIEADSEGDAEPCDKENENDGESSVGTNMGWADAMAKVLNKKTPESKPTILVKNKKLEKEKEKLKQERLEKIKQRDKRLEWEMMCRVKPDVVQDKETERNLQRIATRGVVQLFNAVQKHQKNVDEKVKEAGSSMRKRAKLISTVSKKDFISVLRGMDGSTNETASSRKKPKAKQTEVKSEEGPGWTILRDDFMMGASMKDWDKESDGPDDSRPESASDSDT

SEQ ID NO: 415 - DNA, 498 bp, Homo sapiens
atgctctttcgggtcctcacttccaaggtgacaaaaggaacaatgatcatgccaaaaagggtggcagccacatgtgtgcccaaggacagggctattaagaatttctttattcaaaacacagtagaggctgcagcaagtgtcttcaatgcatatgtgcttcccgagctgtatgtgaagctacattattgtgtgagttgtgccattcacagcaggaagcctgcaagaactgaacatctccacttctatttagacctgcagatgctggcaccaaagctcatgaataaaactccccagccagggtgtcgcaagggctgccgttgtgatccgcagggggtgaacgcaaccgcgacggctgatcgtctgtggctgggttggcgtttggagcaagagaaggaggagcaggagaaggagggagctggaggctggaagcgtttgcaagcggcggcggcagcaacgtggagtaaccaagcgggtcagcgcgcgcccgccagggtgtag

SEQ ID NO: 416 - protein, 165 aa, Homo sapiens
MLFRVLTSKVTKGTMIMPKRVAATCVPKDRAIKNFFIQNTVEAAASVFNAYVLPELYVKLHYCVSCAIHSRKPARTEHLHFYLDLQMLAPKLMNKTPQPGCRKGCRCDPQGVNATATADRLWLGWRLEQEKEEQEKEGAGGWKRLQAAAAATWSNQAGQRAPARV

SEQ ID NO: 417 - DNA, 1695 bp, Homo sapiens
caagcaggatacgtttttctgttgggcattgactagattgtttgcaaaagtttcgcatcaaaaacaaacaacaacaacaaaaaaccaaacaactctccttgatctatactttgagaattgttgatttctttttttttattctgacttttaaaaacaacttttttttccacttttttaaaaaatgcactactgtgtgctgagcgcttttctgatcctgcatctggtcacggtcgcgctcagcctgtctacctgcagcacactcgatatggaccagttcatgcgcaagaggatcgaggcgatccgcgggcagatcctgagcaagctgaagctcaccagtcccccagaagactatcctgagcccgaggaagtccccccggaggtgatttccatctacaacagcaccagggacttgctccaggagaaggcgagccggagggcggccgcctgcgagcgcgagaggagcgacgaagagtactacgccaaggaggtttacaaaatagacatgccgcccttcttcccctccgaaaatgccatcccgcccactttctacagaccctacttcagaattgttcgatttgacgtctcagcaatggagaagaatgcttccaatttggtgaaagcagagttcagagtctttcgtttgcagaacccaaaagccagagtgcctgaacaacggattgagctatatcagattctcaagtccaaagatttaacatctccaacccagcgctacatcgacagcaaagttgtgaaaacaagagcagaaggcgaatggctctccttcgatgtaactgatgctgttcatgaatggcttcaccataaagacaggaacctgggatttaaaataagcttacactgtccctgctgcacttttgtaccatctaataattacatcatcccaaataaaagtgaagaactagaagcaagatttgcaggtattgatggcacctccacatataccagtggtgatcagaaaactataaagtccactaggaaaaaaaacagtgggaagaccccacatctcctgctaatgttattgccctcctacagacttgagtcacaacagaccaaccggcggaagaagcgtgctttggatgcggcctattgctttagaaatgtgcaggataattgctgcctacgtccactttacattgatttcaagagggatctagggtggaaatggatacacgaacccaaagggtacaatgccaacttctgtgctggagcatgcccgtatttatggagttcagacactcagcacagcagggtcctgagcttatataataccataaatccagaagcatctgcttctccttgctgcgtgtcccaagatttagaacctctaaccattctctactacattggcaaaacacccaagattgaacagctttctaatatgattgtaaagtcttgcaaatgcagctaaaattcttggaaaagtggcaagaccaaaatgacaatgatgatgataatgatgatgacgacgacaacgatgatgcttgtaacaagaaaacataagagagccttggttcatcagtgttaaaaaatttttgaaaaggcggtactagttcagacactttggaagtttgtgttctgtttgttaaaactggcatctgacacaaaaaaagttgaaggccttattctacatttcacctactttgtaagtgagagagacaagaagcaaatttttttaaa

SEQ ID NO: 418 - protein, 414 aa, Homo sapiens
MHYCVLSAFLILHLVTVALSLSTCSTLDMDQFMRKRIEAIRGQILSKLKLTSPPEDYPEPEEVPPEVISIYNSTRDLLQEKASRRAAACERERSDEEYYAKEVYKIDMPPFFPSENAIPPTFYRPYFRIVRFDVSAMEKNASNLVKAEFRVFRLQNPKARVPEQRIELYQILKSKDLTSPTQRYIDSKVVKTRAEGEWLSFDVTDAVHEWLHHKDRNLGFKISLHCPCCTFVPSNNYIIPNKSEELEARFAGIDGTSTYTSGDQKTIKSTRKKNSGKTPHLLLMLLPSYRLESQQTNRRKKRALDAAYCFRNVQDNCCLRPLYIDFKRDLGWKWIHEPKGYNANFCAGACPYLWSSDTQHSRVLSLYNTINPEASASPCCVSQDLEPLTILYYIGKTPKIEQLSNMIVKSCKCS

SEQ ID NO: 419 - DNA, 845 bp, Homo sapiens
ggggggcatcagcgatggcggctgcgtcggggtcggttctgcagcgctgtatcgtgtcgccggcagggaggcatagcgcctctctgatcttcctgcatggctcaggtgattctggacaaggattaagaatgtggatcaagcaggttttaaatcaagatttaacattccaacacataaaaattatttatccaacagctcctcccagatcatatactcctatgaaaggaggaatctccaatgtatggtttgacagatttaaaataaccaatgactgcccagaacaccttgaatcaattgatgtcatgtgtcaagtgcttactgatttgattgatgaagaagtaaaaagtggcatcaagaagaacaggatattaataggaggattctctatgggaggatgcatggcaatgcatttagcatatagaaatcatcaagatgtggcaggagtatttgctctttctagttttctgaataaagcatctgctgtttaccaggctcttcagaagagtaatggtgtacttcctgaattatttcagtgtcatggtactgcagatgagttagttcttcattcttgggcagaagagacaaactcaatgttaaaatctctaggagtgaccacgaagtttcatagttttccaaatgtttaccatgagctaagcaaaactgagttagacatattgaagttatggattcttacaaagctgccaggagaaatggaaaaacaaaaatgaatgaatcaagagtgatttgttaatgtaagtgtaatgtctttgtgaaaagtgatttttactgccaaattataatgataattaaaatattaaaaaaaaaaaaaaaaaaaaaaaaaaaaa

SEQ ID NO: 420 - protein, 237 aa, Homo sapiens
MAAASGSVLQRCIVSPAGRHSASLIFLHGSGDSGQGLRMWIKQVLNQDLTFQHIKIIYPTAPPRSYTPMKGGISNVWFDRFKITNDCPEHLESIDVMCQVLTDLIDEEVKSGIKKNRILIGGFSMGGCMAMHLAYRNHQDVAGVFALSSFLNKASAVYQALQKSNGVLPELFQCHGTADELVLHSWAEETNSMLKSLGVTTKFHSFPNVYHELSKTELDILKLWILTKLPGEMEKQK

SEQ ID NO: 421 - DNA, 1128 bp, Homo sapiens
atggtgcaggtttgcggcctcatctggtggactttctggcacagcccttcttcaaggttgctgcatctgaagctctttaagacggcctttcccttctgccagattgcacactgtgcacagtgcagttgcttctccctgcggagtgagatgggcccacattggctgtggctccacctggccttggtgctcttgtcgccctctgctctgctgctcccttcatgtaagaaggatgtgttaagagtccgtttttatcatgaaaaatgtatctatgtccataaagaaagcacaaaagaaaggcatggctattgcaccttgggagaagcctttaatcggttagacttctcaagtgcaattcaagatatccgaaggttcaattatgtggtcaaacttgaaggtgtgcctgtttgctgtgaattaatcgaaaaacagaagggaacaagttcaggagaaaacagtgaggttggaggatttctccattaccagtttaacctgaaatgtaatcttgtcaactatgaacacggcccttctcacctctatgcttattttcggctggagaaacagtgtccatcagactggatgtcagtgaatctctacagcgtcagctgtgtggctgagggtgatggagcagagtgtgagtggagggcagaggagaaaaaaaaggcagcctcagagggggccgaccctacccaggatgagcggcgccaggtagccggggacgctcccggggatccccgggccctggctgggggaggcgttgtggggcgcacgtacccaggctcagatgaggcgagtgggcggccggggctgcagctggcgctggccattgaggagcttctgcgcgacagtgcgatcggttgcaccttctgcgacaggtgccggccggttggcgcgcagcgcctgctagcgcagagtctggcccttgctgcgcccggccccgaagaccgggaagtcgtaaagctcctcctcgcagcttatgtgcggcggcggccgggcagaagcctagcgacacagaactgccagctcagcagccggttacatcccgcccggccacccgtaggcagcgtccgctcatgcgcgctcctggaagaaccagcagccccaccgcgagttccgattggctctgcgtga

SEQ ID NO: 422 - protein, 375 aa, Homo sapiens [sequence omitted]

SEQ ID NO: 423 - DNA, 2923 bp, Homo sapiens
aaggaatcaagcccccaagatggcggcagcggcggaggagcggatggcagaggaaggaggcggcggccaaggcgacggcggttcctctttggcctccggctctacccagcgacagcctccaccgcccgcgccacagcacccgcagccggggtcccaggcgctcccagcccccgcgctggctccggaccagctgcctcaaaacaacacgcttgtggcgctgcccatcgtagccatcgagaacatcctcagctttatgtcctacgacgaaattagccagctccgcctggtttgtaaaagaatggacttggtctgccagagaatgttgaatcagggatttctgaaagtggagaggtaccataatctatgtcagaaacaagttaaagcacaactcccaaggagagagtcagaaaggagaaaccattcattagctcgtcatgcagacattcttgctgctgttgaaacaaggctgtcactattaaatatgactttcatgaaatatgtggattccaatctctgttgcttcatcccaggaaaggtgattgatgagatttatcgtgtgttgagatatgtcaattctaccagagcccctcaacgagctcatgaagtacttcaagaattaagggatatatcctctatggcaatggagtactttgatgaaaagattgttccaattttaaagaggaaattaccaggatcagatgtttctggaagactcatgggctctcctccagttccaggaccgtctgcagccctaacaacaatgcagctcttctccaagcaaaatccttcaagacaagaggttaccaaactccagcagcaggttaaaacaaatggtgctggcgtgactgttctcaggcgtgaaatttctgagcttcgcaccaaagtgcaagaacagcaaaaacagcttcaagaccaggaccagaaactgctagagcagacccagatcataggtgaacaaaatgcacggttggcagagctagaacgcaaactacgagaagtaatggaaagtgctgtaggaaattcctcagggtccgggcagaatgaggagtctcctcggaaacgaaaaaaggccacggaagccatagactctcttaggaaatctaaacgtcttcggaatagaaagtaaattggaatgtggttctagttccagaggaagacacagcttagtagcttaagcagttatgcatatcaggatactgtgagcaacatggtgtcccttaagcttctaggctttcagaacacaacttaaacttgaactcttatggttgggacattcttttcctgcttctcctgattgaactgatgcacagaatctttttactttgcaatagatttgtactaaccagacctgttctatcatgttttgaggagttaacttttttctgtgcagataatgttgaaagtaagttaatttgtttctgcatatatgcacatacatacgtaaggatcttaaacccagtcttgacagactagaagttaagtttaatacagaaaatgtcctgttcacttgaaagaaaagacctactttttaaatggacactatcttggttctttttttttaagtcatctttttgttataagtgacctttgtctggaatgtctgaaaagtagttaatgctttttggtattgaagtaatgggtaactaaaatggacttccatagtattgactgtagaaggagcctctacaatattgactatatatttttataaactactggcaaggaacttacccagctgttatacatgttttcagttctctttgggggccatgtcctacatttgcatggatggatgcatgcattgcctagtcaactcacttaaaaagctcttgcactggtattgatcttgaacctctatacttctccactttttagagcggcgtcttagtttatttaaacgcttaacatcttccaccgcaacagcttgcctctagagggggaattgttcatccatttgtcctccagttttataggaacaagagactattaaagcccattgctttatctgctctctgtagggttcaggtacactggctaaggcagaaccccaaatttcaaggctctttctatcaatattggacctctgggagctaatactcctctttgctcaccaccatgtgatcattgatcagatgtggtgagtgagtaggggactcgacttgcgggatgcagttttgccattgcagcaaagttcattgaggaaaattgtaccatgaaaaagcattttgattatttcatttctggaggatgaccttgagggaagctttttaatattagtttcaagctttccttaccctacaactttaaacaaaagctttaattttgtttgcactcctattttgagcttgtaactggaaaagcatgtcttgcactgttcaacctcctgagtggtcgctttaacaacctccaaattgtgtacagtggttattttccccagttgtatagttttgagacattcaattatcactgtcttagttgtattttaatttactaaattatgtagctatctgactgttaagttcttttaaacaactgtttccttgggcttcagttatttaaagtaaatttaggtgtaatatagaaaactgtccctttccaggtgggagcttaacacctgtataaaacctaaggttttagtaagtaccttagttgaataaaagcacaaggttatcaccttttttatccgtccaccgtgacatggttatgcatcctttagattaacctcaccaaatgaagctttttctatccatttttaatattgtccttacataatattgtccttagattttgatcaattctatgtctgactttgaaataccatttacaatgtagtatgttttcaatgaaaaaccataaagtaacatccaagtgtttcatggtttgttgggaaggtaattttaaaataaaacaatttccaaaaaac

SEQ ID NO: 424 - protein, 368 aa, Homo sapiens
MAAAAEERMAEEGGGGQGDGGSSLASGSTQRQPPPPAPQHPQPGSQALPAPALAPDQLPQNNTLVALPIVAIENILSFMSYDEISQLRLVCKRMDLVCQRMLNQGFLKVERYHNLCQKQVKAQLPRRESERRNHSLARHADILAAVETRLSLLNMTFMKYVDSNLCCFIPGKVIDEIYRVLRYVNSTRAPQRAHEVLQELRDISSMAMEYFDEKIVPILKRKLPGSDVSGRLMGSPPVPGPSAALTTMQLFSKQNPSRQEVTKLQQQVKTNGAGVTVLRREISELRTKVQEQQKQLQDQDQKLLEQTQIIGEQNARLAELERKLREVMESAVGNSSGSGQNEESPRKRKKATEAIDSLRKSKRLRNRK

SEQ ID NO: 425 - DNA, 2058 bp, Homo sapiens
cacagccggccgacaccacaccagccggggagccgccgccgccgccgccacctctgagcagccggctgggagcgagagccgacagctagtctgcaagccaccgctgtcgccatggggagccgcgtctcgcgggaagacttcgagtgggtctacaccgaccagccgcacgccgaccggcgccgggagatcctggcaaagtatccagagataaagtccttgatgaaacctgatcccaatttgatatggattataattatgatggttctcacccagttgggtgcattttacatagtaaaagacttggactggaaatgggtcatatttggggcctatgcgtttggcagttgcattaaccactcaatgactctggctattcatgagattgcccacaatgctgcctttggcaactgcaaagcaatgtggaatcgctggtttggaatgtttgctaatcttcctattgggattccatattcaatttcctttaagaggtatcacatggatcatcatcggtaccttggagctgatggcgtcgatgtagatattcctaccgattttgagggctggttcttctgtaccgctttcagaaagtttatatgggttattcttcagcctctcttttatgcctttcgacctctgttcatcaaccccaaaccaattacgtatctggaagttatcaataccgtggcacaggtcacttttgacattttaatttattactttttgggaattaaatccttagtctacatgttggcagcatctttacttggcctgggtttgcacccaatttctggacattttatagctgagcattacatgttcttaaagggtcatgaaacttactcatattatgggcctctgaatttacttaccttcaatgtgggttatcataatgaacatcatgatttccccaacattcctggaaaaagtcttccactggtgaggaaaatagcagctgaatactatgacaacctccctcactacaattcctggataaaagtactgtatgattttgtgatggatgatacaataagtccctactcaagaatgaagaggcaccaaaaaggagagatggtgctggagtaaatatcattagtgccaaagggattcttctccaaaactttagatgataaaatggaatttttgcattattaaacttgagaccagtgatgctcagaagctcccctggcacaatttcagagtaagagctcggtgataccaagaagtgaatctggcttttaaacagtcagcctgactctgtactgctcagtttcactcacaggaaacttgtgacttgtgtattatcgtcattgaggatgtttcactcatgtctgtcattttataagcatatcatttaaaaagcttctaaaaagctatttcgccaggcacggtggctcatgcctataatcccagcactttgggaggccaaggtgggtggatcacctgaggtcaggagttcgagaccagcctggccaacacggtgaaaccccatctctactaaaaatgcaaaaattagccgggcgtggcggcacatgcctgtaatcccagctacatgggaggctgaggtgggagaattgcttgaacccaggaggcggaggcagaggctgcagtgacccaagattgtgccactgcactccaccctgggcaacagagcaagaccccatctcaaaaataaataaatatatataaaaaataaaaagctatttctagtttatttcactataaagttttgctttattaaaaagctaataaacagctattaatcacagtgtattagtatttgttacatttttgtatttcactatctttatactatataatatggtaacttgggtaccgggggaactttaaaatttcatctcaaaaataatttttaaaaagcctgaggtatgatatagcataaaagattgagatgaaaatatatttccctgtaagctgaattactcatttaaaaattttaacttctatatgggacccgaattagacactgctgaatcctgtacagccttactcataaataaagtacttactgaatttccaccattcaaaaaaaaaaaaaaa

SEQ ID NO: 426 - protein, 323 aa, Homo sapiens
MGSRVSREDFEWVYTDQPHADRRREILAKYPEIKSLMKPDPNLIWIIIMMVLTQLGAFYIVKDLDWKWVIFGAYAFGSCINHSMTLAIHEIAHNAAFGNCKAMWNRWFGMFANLPIGIPYSISFKRYHMDHHRYLGADGVDVDIPTDFEGWFFCTAFRKFIWVILQPLFYAFRPLFINPKPITYLEVINTVAQVTFDILIYYFLGIKSLVYMLAASLLGLGLHPISGHFIAEHYMFLKGHETYSYYGPLNLLTFNVGYHNEHHDFPNIPGKSLPLVRKIAAEYYDNLPHYNSWIKVLYDFVMDDTISPYSRMKRHQKGEMVLE

SEQ ID NO: 427 - DNA, 1681 bp, Homo sapiens
cacagccggccgacaccacaccagccggggagccgccgccgccgccgccacctctgagcagccggctgggagcgagagccgacagctagtctgcaagccaccgctgtcgccatggggagccgcgtctcgcgggaagacttcgagtgggtctacaccgaccagccgcacgccgaccggcgccgggagatcctggcaaagtatccagagataaagtccttgatgaaacctgatcccaatttgatatggattataattatgatggttctcacccagttgggtgcattttacatagtaaaagacttggactggaaatgggtcatatttggggcctatgcgtttggcagttgcattaaccactcaatgactctggctattcatgagattgcccacaatgctgcctttggcaactgcaaagcaatgtggaatcgctggtttggaatgtttgctaatcttcctattgggattccatattcaatttcctttaagaggtatcacatggatcatcatcggtaccttggagctgatggcgtcgatgtagatattcctaccgattttgagggctggttcttctgtaccgctttcagaaagtttatatgggttattcttcagcctctcttttatgcctttcgacctctgttcatcaaccccaaaccaattacgtatctggaagttatcaataccgtggcacaggtcacttttgacattttaatttattactttttgggaattaaatccttagtctacatgttggcagcatctttacttggcctgggtttgcacccaatttctggacattttatagctgagcattacatgttcttaaagggtcatgaaacttactcatattatgggcctctgaatttacttaccttcaatgtgggttatcataatgaacatcatgatttccccaacattcctggaaaaagtcttccactggtgaggaaaatagcagctgaatactatgacaacctccctcactacaattcctggataaaagtactgtatgattttgtgatggatgatacaataagtccctactcaagaatgaagaggcaccaaaaaggagagatggtgctggagtaaatatcattagtgccaaagggattcttctccaaaactttagatgataaaattagccgggcgtggcggcacatgcctgtaatcccagctacatgggaggctgaggtgggagaattgcttgaacccaggaggcggaggcagaggctgcagtgacccaagattgtgccactgcactccaccctgggcaacagagcaagaccccatctcaaaaataaataaatatatataaaaaataaaaagctatttctagtttatttcactataaagttttgctttattaaaaagctaataaacagctattaatcacagtgtattagtatttgttacatttttgtatttcactatctttatactatataatatggtaacttgggtaccgggggaactttaaaatttcatctcaaaaataatttttaaaaagcctgaggtatgatatagcataaaagattgagatgaaaatatatttccctgtaagctgaattactcatttaaaaattttaacttctatatgggacccgaattagacactgctgaatcctgtacagccttactcataaataaagtacttactgaatttccaccattcaaaaaaaaaaaaaaa

SEQ ID NO: 428 - protein, 323 aa, Homo sapiens; identical to SEQ ID NO: 426

SEQ ID NO: 429 - DNA, 2921 bp, Homo sapiens
ctaggagctggcggtccgagctgtggcttgaaagaccgacgcgatgaagcccagacctgcagggttcgtggataataaactcaagcagcgagtcatccagtaccttaccagtaacaaatgtggcaaatatgtggacattggagtcttagcgtctgatttacaaagagtgtacagtatagactatggtcgaagaaaaagaaatgcttttaggattcaggtagaaaaagtatttagcataattagtagtgagaaggaacttaagaatttaacagaattagaagatgaacatttggcaaaaagggcaagacaaggtgaagaggataatgagtatactgaaagctattctgatgatgattcaagtatggaagactacccagatccacagtcagcaaatcacatgaacagttccctgctgtctttatatcggaaaggaaatcctgattctgtttcaaatactcctgagatggagcaaagagaaaccacctcttcaacaccacggataagttccaaaacaggctccattcccttgaagacccctgccaaagattctgaaggaggatggtttattgacaaaaccccaagtgtaaagaaagacagttttttcttggacctgtcatgtgagaaaagtaatcctaagaagccaataactgagatacaggattcaaaagattcttctcttttggagagtgatatgaaacggaaaggcaagctaaagaataaaggaagcaaaaggaagaaagaagatcttcaggaagtagatggagaaattgaagctgtcctgcaaaagaaagctaaagccagggggttagaattccagatctccaacgtgaagtttgaagatgtgggaggcaatgatatgacattaaaagaggtctgcaagatgctcatacacatgcgtcacccggaggtgtaccaccacctgggcgtcgtgccccctcgtggagttctccttcatggaccaccaggctgtgggaagacattacttgcacatgcaattgctggggaacttgacctgccaattttgaaagtggctgctccagagattgtgtctggagtatccggagagtctgagcagaagctgagagaactatttgagcaagctgtgtcaaatgcaccatgtatcattttcattgatgaaattgatgctattacccccaaaagagaagtggcttcaaaagatatggaacgaagaattgtagcccaactcctaacctgcatggatgatctgaataatgtggctgctacagcccgggtcctagttattggagctactaatcgaccagactcgttagaccctgctttgagacgtgcgggaaggttcgaccgagaaatatgcctaggtatcccagatgaagcatccagggaaagaatacttcaaacattgtgcagaaaactgaggcttcctcaagcttttgatttctgtcacttagcacacctaactccaggctttgttggtgctgatctcatggcactgtgccgagaggcagcaatgtgtgcagtcaatagagtcttaatgaagctacaggaacagcagaagaaaaatcctgaaatggaagatttgccatctaaaggagtccaggaggaaaggctgggaactgagcccacttctgaaacacaggatgaattacaaaggctgctggggttgctaagagaccaagatcccctctcagaggagcagatgcaaggactgtgcattgaactgaatgatttcattgttgctctatcctcagtccaaccctctgccaaaagggaaggctttgtcactgtccctaatgtgacatgggcagatattggtgccctggaagacattagagaggagctcaccatggcaatattggcaccagtacgcaacccagaccagttcaaagctcttggattggtgactccagctggggtcctccttgctggtcctcctggctgtgggaagactctgctggcgaaggctgttgcaaatgagtccggactaaattttatatctgtcaagggccccgaattactaaacatgtatgttggtgagagtgaacgtgctgtgcgacaagtttttcaacgagccaagaactcagcaccctgtgtgatattctttgatgaagtggatgctttatgtcctcgaagatcagaccgagagacaggggcaagtgtccgagtggtgaatcagctacttacagagatggatggtctggaagcacgccagcaggtttttattatggcagccactaacaggccagatataattgaccctgcaatcctgcgcccgggccgcctggacaaaacactgtttgtgggtttaccgccccctgcagatcgccttgccatcttaaaaactatcacaaaaaatggtaccaaaccaccactggatgcagatgtaaatttggaagcaattgctggtgaccttcgctgtgattgctatacgggcgcagatctctctgctttggtacgagaagcttctatctgtgccctgagacaggaaatggcaagacagaagagtggaaatgaaaaaggtgaactcaaggttagtcataagcattttgaagaagctttcaagaaagtaagatcatctatatcaaaaaaggatcaaatcatgtatgaacgtttgcaggagtccctcagccggtgatgtctccagcagccggcttagaggagctagcccatcaagccggcagagaatcccccacacgctctgaaggacccactttcagctggacacaggcgcggcctcatgtaaacattttattttcaaatgaatgaggccaagctgaagctgaagctgaagattcttcccatctggccagccttgtgtgaaaatgccttcttcctctttaagaaaaaggacaatttttaaactgctgaaataaaatgactgttacatttttcaaataaaacttttactttgaactattttgactataaaaaaaaaaaaaaaa

SEQ ID NO: 430 - protein, 856 aa, Homo sapiens
MKPRPAGFVDNKLKQRVIQYLTSNKCGKYVDIGVLASDLQRVYSIDYGRRKRNAFRIQVEKVFSIISSEKELKNLTELEDEHLAKRARQGEEDNEYTESYSDDDSSMEDYPDPQSANHMNSSLLSLYRKGNPDSVSNTPEMEQRETTSSTPRISSKTGSIPLKTPAKDSEGGWFIDKTPSVKKDSFFLDLSCEKSNPKKPITEIQDSKDSSLLESDMKRKGKLKNKGSKRKKEDLQEVDGEIEAVLQKKAKARGLEFQISNVKFEDVGGNDMTLKEVCKMLIHMRHPEVYHHLGVVPPRGVLLHGPPGCGKTLLAHAIAGELDLPILKVAAPEIVSGVSGESEQKLRELFEQAVSNAPCIIFIDEIDAITPKREVASKDMERRIVAQLLTCMDDLNNVAATARVLVIGATNRPDSLDPALRRAGRFDREICLGIPDEASRERILQTLCRKLRLPQAFDFCHLAHLTPGFVGADLMALCREAAMCAVNRVLMKLQEQQKKNPEMEDLPSKGVQEERLGTEPTSETQDELQRLLGLLRDQDPLSEEQMQGLCIELNDFIVALSSVQPSAKREGFVTVPNVTWADIGALEDIREELTMAILAPVRNPDQFKALGLVTPAGVLLAGPPGCGKTLLAKAVANESGLNFISVKGPELLNMYVGESERAVRQVFQRAKNSAPCVIFFDEVDALCPRRSDRETGASVRVVNQLLTEMDGLEARQQVFIMAATNRPDIIDPAILRPGRLDKTLFVGLPPPADRLAILKTITKNGTKPPLDADVNLEAIAGDLRCDCYTGADLSALVREASICALRQEMARQKSGNEKGELKVSHKHFEEAFKKVRSSISKKDQIMYERLQESLSR

SEQ ID NO: 431 - DNA, 2847 bp, Homo sapiens
ctaggagctggcggtccgagctgtggcttgaaagaccgacgcgatgaagcccagacctgcagggttcgtggataataaactcaagcagcgagtcatccagtatagactatggtcgaagaaaaagaaatgcttttaggattcaggtagaaaaagtatttagcataattagtagtgagaaggaacttaagaatttaacagaattagaagatgaacatttggcaaaaagggcaagacaaggtgaagaggataatgagtatactgaaagctattctgatgatgattcaagtatggaagactacccagatccacagtcagcaaatcacatgaacagttccctgctgtctttatatcggaaaggaaatcctgattctgtttcaaatactcctgagatggagcaaagagaaaccacctcttcaacaccacggataagttccaaaacaggctccattcccttgaagacccctgccaaagattctgaaggaggatggtttattgacaaaaccccaagtgtaaagaaagacagttttttcttggacctgtcatgtgagaaaagtaatcctaagaagccaataactgagatacaggattcaaaagattcttctcttttggagagtgatatgaaacggaaaggcaagctaaagaataaaggaagcaaaaggaagaaagaagatcttcaggaagtagatggagaaattgaagctgtcctgcaaaagaaagctaaagccagggggttagaattccagatctccaacgtgaagtttgaagatgtgggaggcaatgatatgacattaaaagaggtctgcaagatgctcatacacatgcgtcacccggaggtgtaccaccacctgggcgtcgtgccccctcgtggagttctccttcatggaccaccaggctgtgggaagacattacttgcacatgcaattgctggggaacttgacctgccaattttgaaagtggctgctccagagattgtgtctggagtatccggagagtctgagcagaagctgagagaactatttgagcaagctgtgtcaaatgcaccatgtatcattttcattgatgaaattgatgctattacccccaaaagagaagtggcttcaaaagatatggaacgaagaattgtagcccaactcctaacctgcatggatgatctgaataatgtggctgctacagcccgggtcctagttattggagctactaatcgaccagactcgttagaccctgctttgagacgtgcgggaaggttcgaccgagaaatatgcctaggtatcccagatgaagcatccagggaaagaatacttcaaacattgtgcagaaaactgaggcttcctcaagcttttgatttctgtcacttagcacacctaactccaggctttgttggtgctgatctcatggcactgtgccgagaggcagcaatgtgtgcagtcaatagagtcttaatgaagctacaggaacagcagaagaaaaatcctgaaatggaagatttgccatctaaaggagtccaggaggaaaggctgggaactgagcccacttctgaaacacaggatgaattacaaaggctgctggggttgctaagagaccaagatcccctctcagaggagcagatgcaaggactgtgcattgaactgaatgatttcattgttgctctatcctcagtccaaccctctgccaaaagggaaggctttgtcactgtccctaatgtgacatgggcagatattggtgccctggaagacattagagaggagctcaccatggcaatattggcaccagtacgcaacccagaccagttcaaagctcttggattggtgactccagctggggtcctccttgctggtcctcctggctgtgggaagactctgctggcgaaggctgttgcaaatgagtccggactaaattttatatctgtcaagggccccgaattactaaacatgtatgttggtgagagtgaacgtgctgtgcgacaagtttttcaacgagccaagaactcagcaccctgtgtgatattctttgatgaagtggatgctttatgtcctcgaagatcagaccgagagacaggggcaagtgtccgagtggtgaatcagctacttacagagatggatggtctggaagcacgccagcaggtttttattatggcagccactaacaggccagatataattgaccctgcaatcctgcgcccgggccgcctggacaaaacactgtttgtgggtttaccgccccctgcagatcgccttgccatcttaaaaactatcacaaaaaatggtaccaaaccaccactggatgcagatgtaaatttggaagcaattgctggtgaccttcgctgtgattgctatacgggcgcagatctctctgctttggtacgagaagcttctatctgtgccctgagacaggaaatggcaagacagaagagtggaaatgaaaaaggtgaactcaaggttagtcataagcattttgaagaagctttcaagaaagtaagatcatctatatcaaaaaaggatcaaatcatgtatgaacgtttgcaggagtccctcagccggtgatgtctccagcagccggcttagaggagctagcccatcaagccggcagagaatcccccacacgctctgaaggacccactttcagctggacacaggcgcggcctcatgtaaacattttattttcaaatgaatgaggccaagctgaagctgaagctgaagattcttcccatctggccagccttgtgtgaaaatgccttcttcctctttaagaaaaaggacaatttttaaactgctgaaataaaatgactgttacatttttcaaataaaacttttactttgaactattttgactataaaaaaaaaaaaaaaa

SEQ ID NO: 432 - protein, 750 aa, Homo sapiens
MEDYPDPQSANHMNSSLLSLYRKGNPDSVSNTPEMEQRETTSSTPRISSKTGSIPLKTPAKDSEGGWFIDKTPSVKKDSFFLDLSCEKSNPKKPITEIQDSKDSSLLESDMKRKGKLKNKGSKRKKEDLQEVDGEIEAVLQKKAKARGLEFQISNVKFEDVGGNDMTLKEVCKMLIHMRHPEVYHHLGVVPPRGVLLHGPPGCGKTLLAHAIAGELDLPILKVAAPEIVSGVSGESEQKLRELFEQAVSNAPCIIFIDEIDAITPKREVASKDMERRIVAQLLTCMDDLNNVAATARVLVIGATNRPDSLDPALRRAGRFDREICLGIPDEASRERILQTLCRKLRLPQAFDFCHLAHLTPGFVGADLMALCREAAMCAVNRVLMKLQEQQKKNPEMEDLPSKGVQEERLGTEPTSETQDELQRLLGLLRDQDPLSEEQMQGLCIELNDFIVALSSVQPSAKREGFVTVPNVTWADIGALEDIREELTMAILAPVRNPDQFKALGLVTPAGVLLAGPPGCGKTLLAKAVANESGLNFISVKGPELLNMYVGESERAVRQVFQRAKNSAPCVIFFDEVDALCPRRSDRETGASVRVVNQLLTEMDGLEARQQVFIMAATNRPDIIDPAILRPGRLDKTLFVGLPPPADRLAILKTITKNGTKPPLDADVNLEAIAGDLRCDCYTGADLSALVREASICALRQEMARQKSGNEKGELKVSHKHFEEAFKKVRSSISKKDQIMYERLQESLSR

SEQ ID NO: 433 - DNA, 652 bp, Homo sapiens
ggacggaaggagcggcggcgacggaggaggaggatggaggcggtggtgttcgtcttctctctcctcgattgttgcgcgctcatcttcctctcggtctacttcataattacattgtctgatttagaatgtgattacattaatgctagatcatgttgctcaaaattaaacaagtgggtaattccagaattgattggccataccattgtcactgtattactgctcatgtcattgcactggttcatcttccttctcaacttacctgttgccacttggaatatatatcgatacattatggtgccgagtggtaacatgggagtgtttgatccaacagaaatacacaatcgagggcagctgaagtcacacatgaaagaagccatgatcaagcttggtttccacttgctctgcttcttcatgtatctttatagtatgatcttagctttgataaatgactgaagctggagaagccgtggttgaagtcagcctacactacagtgcacagttgaggagccagagacttcttaaatcatccttagaaccgtgaccatagcagtatatattttcctcttggaacaaaaaactatttttgctgtatttttaccatataaagtatttaaaaaacaggaaaaaaaaaaaaaaaaaaaaaaaaaaaaaa

SEQ ID NO: 434 - protein, 139 aa, Homo sapiens
MEAVVFVFSLLDCCALIFLSVYFIITLSDLECDYINARSCCSKLNKWVIPELIGHTIVTVLLLMSLHWFIFLLNLPVATWNIYRYIMVPSGNMGVFDPTEIHNRGQLKSHMKEAMIKLGFHLLCFFMYLYSMILALIND

SEQ ID NO: 435 - DNA, 6250 bp, Homo sapiens
cgcctgcttgtcggcccagaacggggagtcgtccccctcgtcgtcgtcgtccgcgggggacctggcccacgccaatgggctcctgccttccgccccctccgccgccagcaacaatagcaacagcctgaatgtcaataacggggttcccggcggggcggccgccgcatcctcagccaccgtcgcagctgcctccgccaccaccgccgcctcctcttccttggccaccccagaactgggcagcagcctcaagaagaagaagcggctctcccagtcagatgaggatgtcattaggctaataggacagcacttgaatggcttagggctcaaccagactgttgatctcctcatgcaagagtcaggatgtcgtttagaacatccttctgctaccaaattccgaaatcatgtcatggaaggagactgggataaggcagaaaatgacctgaatgaactaaagcctttagtgcattctcctcatgctattgtggtaagaggcgcacttgaaatctctcaaacgttgttgggaataattgtgaggatgaagtttttgctgctgcagcagaagtacctagaatacctggaggatggcaaggtcctggaggcacttcaagttctacgctgtgaattgacgccgctgaaatacaatacagagcgcattcatgttcttagtgggtatctgatgtgtagccatgcagaagacctacgtgcaaaagcagaatgggaaggcaaagggacagcttcccgatctaaactattggataaacttcagacctatttaccaccatcagtgatgcttcccccacggcgtttacagactctcctgcggcaggcggtggaactacaaagggatcggtgcctatatcacaataccaaacttgataataatctagattctgtgtctctgcttatagaccatgtttgtagtaggaggcagttcccatgttatacgcagcagatacttacggagcattgtaatgaagtgtggttctgtaaattctctaatgatggcactaaactagcaacaggatcaaaagatacaacagttatcatatggcaagttgatccggatacacacctgctaaaactgcttaaaacattagaaggacatgcttatggcgtttcttatattgcatggagtccagatgacaactatcttgttgcttgtggcccagatgactgctctgagctttggctttggaatgtacaaacaggagaactaaggacaaaaatgagccagtctcatgaagacagtttgacaagtgtggcttggaatccagatgggaagcgctttgtgactggaggtcagcgtgggcagttctatcagtgtgacttagatggtaatctccttgactcctgggaaggggtaagagtgcaatgcctttggtgcttgagtgatggaaagactgttctggcatcagatacacaccagcgaattcggggctataacttcgaggaccttacagataggaacatagtacaagaagatcatcctattatgtcttttactatttcaaaaaatggccgattagctttgttaaatgtagcaactcagggagttcatttatgggacttgcaagacagagttttagtaagaaagtatcaaggtgttacacaagggttttatacaattcattcatgttttggaggccataatgaagacttcatcgctagtggcagtgaagatcacaaggtttacatctggcacaaacgtagtgaactgccaattgcggagctgacagggcacacacgtacagtaaactgtgtgagctggaacccacagattccatccatgatggccagcgcctcagatgatggcactgttagaatatggggaccagcaccttttatagaccaccagaatattgaagaggaatgcagtagcatggatagttgatggtgaatttggagcagacgacttctgtttaacttaaaattagtcgtattttaatggcttgggatttggtgcaaacaaacatgattgatagctggacagacatgctcgtcatgaaaaaagaaccatttctgaagcccgattggggccaaacatttacaccttgcttcatagtaaccagttgagatgaagcacgtcgttagaacgttgttggacaccatgttgaattattcccccatcggttgtgaagaactgtgctacattcaggcttacccattgaactcagtatatatatttttttccttcctgtcttttgtctggcaggataccattcttgttgctcttctgtgtaatgaagtttaaatgcttgtttggaaaactttatttaacagtttagaaggcttgatagaaagagtgcattagtctgaagagtatacattggataggaaagaatttccttcttttgtttctccaaatctttccgccttatttagcttgagatctttgcagcttggttcatggattctagccttgcccgttgcgcagtatatactgatccagatgataaaccagtgaactatgtcaaaagcactctcaatattacatttgacaaaaagttttgtacttttcacatagcttgttgccccgtaaaagggttaacagcacaattttttaaaaataaattaagaagtatttataggattaaagtgacttcatttgtatacatttggaatctaaaccagcttaaaaacagtttcctcaatgacttagatacacagtataactgatgctcttctggaataccacatgagacatggtcagaaacagtgcttggaaggacattacacaagaaattcagagtaatgctttgaagatttccccccttttgttttattcctgaaggaacatcagtacccgatcttgaagaaattcaagattcaaaaagaattttaaatacaccaacatgagacatcagtagtcagttggttttcagtaaagcttgttccaagttgttctcaacttaggaagtaattttggtgtgatctagcaaaagagtaggaatcagcgatacaaccactttggaagtttatagtataattgaaattattagaagaattcagcaggttacagacatacttaaactgggattaaaacctcatagtcatttttcttaattgcccttaatattttgacatatagggatacataaatttaaagaatattttttctcagttttttcagatattgccatactgaacctcattctaaactggtgctgtggatagtctttccctctcccctcctgttttagtttaaggaaaggtttccttcatggaaaagcacttttaattttgagaatttcacatttaaaataagccaaaagcctgatgttcacattgtgcttttaaactccgtaacagctgaatacaacataacatagtctcccttgaaattccctccctttttcagtagaggataaatagggtgactccagctgttggaatgagaatggggatacccccaaaataagattctggtgaagaaaaagtcttgtactaagttcccctttaggtgtagccaagtctataatataattatgatcatgaatagactccagaatccacaaagagaagagggcttggatgtcaaaaattcttccattgtggggtaggtggtcggggatgggagaaagggaaaagtcagggaaggggagaagaaagaaaaacacatttggccttaaaatagcatgcattctcccagaagcccatagtaaagaaaatgacagatcgtggtcagcagactcttatcaaattggtatgtaaaagatttcttcaagctccattttgcagagaccaccacttagagaatcaaaaaattcctgttttgatacttctaagttaaaatatatgttacagtttatctggtacttcatttttcttaactaaaattactttttactttaagcttgaataaaaatcttcattggtaactgtatgtaattaagtggcaacttctctttacctcagtatagttaaaaaccattcatattttaagtgattcatgtataccctgaagccgttaatacaccccagtctctatggtaacatcactaaatgtgggcatagaaactccacagctgtttacaaatttggttacagtgtgctacggtgcatttgtaacactcagatttgtgcccattcaggggcaatttggcactcagattctactctacttcacctaaccacccctagatctgagttttcagagtgcttctgaagtacagtttaaaaacactttttaaaaagtggagtaaaagtgaggcacattttacaagaacataactcctattaaaacggagtaacaactatgcaaaggtttctatagcagctaggtgagtttgttttccgggtctgtcttaactggcagcttcctgtacatactggtacttatttgctgtaaacgtctgtttcatacatttgccatgcagtgactgtgctcgaaaggtgaaatcaatggtaaagaagcctaggattttatggtatgagaaactgatcgcaggattttctgatccatagctattaattgaaaacttctgatagtgctgtaggctctatagtaggcttaagagtgagtcttatactatgaagccagccacaagatactaacaaatgtataaattgaaaagtaccaatactttttgcacatagatcaaaatagagtggagaatttgggctccaaaaatcaggttagtaggctcatttccatgtgcttaaaaatgtttttgttgttatgcattgattaagggctagagcaaatataaaattaaatgtctttttcctccaaataattggttattaatggtaaaatgttggacttggggattactgagattagtatgtgggtagtaaagaattggagtgggagttagtggggagggatgacaaagcttcagctttggtttttgtatttttttagtcttcataacagctacatttctgttgctcttattggccagataaatgtgttatattaaaccaggtaagtattttaaacagagaacattttatttgcatatatccctacaaattggcccattttattgggtggggggataaaaaagggattccctaactttaaataatcagaatatcctgcaattgaaaggagaaaaaaatccaattttgtcagtattttcttagtctgaaaaaaacagcagtagtaatctggtgaatgttattattaggagtgttctgcctctacagtggcatattccatgacattaatagaaaacccttctttcccacccctccccatcttgacattttcttttttaggatgttggttcctgcaaacaagaactgaccctatcacctctgcctcacagtgggtaaatatatcatacatctcttgaaagggaaaatatccatgtcagtttctttcacagtagaagaatggctgcttttgaatggggaggaaagaagacatttttcttaatatcctttttgtcccatctctaaaatgtataaatattttgatttggttttactttaatttctcattcataatttcgcaactgtccttttgggttgccctccaacacattacttccatttcagaaaccatatctgatttaatataaactgctaacttaagaagaggtgaatttgcatttacacttagacactttctaaaaacagggtgaacttaattgaaatttttcagtgttgttaagctattgttatagtagctgccctatagttacaaaaataaaaactataaaaacccatcccctatctacttaatccagatagcctggatttaacaaaaccaatagtataaaaatgtgtgtgtgtgttctgtgtgtgtgtgagagagagagtacttgattcattaaaaagtcctggaaacagctgttctaggatcttgtcatttttactgaaagtctcgtgcacatgtgaagtgccctctgagtttaaggtttggttaatactggtatatttttataagattgaaattgtgtccccatctttaacttaaacattttcattatcagggtcaatgtgctagaactgaattgtaacatttttaggcacagatggaaaaaaatgttattggctccttgaaaatgtgtgtgtgtggcgaggggaatagatccacaaaagcatgtatgtacttacaaaccaagctgtagagatcaagaaaagaacttaagtgttgatctcaagatttctaaattgtcaagatttacatggcattgtggtggaactagttaacacttagagcttttggtatgtaataactatttgctatggactgattaaatgtttcaaaagattgtgttcttcaaaaaaaaaaaaaaaa

SEQ ID NO: 436 - protein, 514 aa, Homo sapiens
MQESGCRLEHPSATKFRNHVMEGDWDKAENDLNELKPLVHSPHAIVVRGALEISQTLLGIIVRMKFLLLQQKYLEYLEDGKVLEALQVLRCELTPLKYNTERIHVLSGYLMCSHAEDLRAKAEWEGKGTASRSKLLDKLQTYLPPSVMLPPRRLQTLLRQAVELQRDRCLYHNTKLDNNLDSVSLLIDHVCSRRQFPCYTQQILTEHCNEVWFCKFSNDGTKLATGSKDTTVIIWQVDPDTHLLKLLKTLEGHAYGVSYIAWSPDDNYLVACGPDDCSELWLWNVQTGELRTKMSQSHEDSLTSVAWNPDGKRFVTGGQRGQFYQCDLDGNLLDSWEGVRVQCLWCLSDGKTVLASDTHQRIRGYNFEDLTDRNIVQEDHPIMSFTISKNGRLALLNVATQGVHLWDLQDRVLVRKYQGVTQGFYTIHSCFGGHNEDFIASGSEDHKVYIWHKRSELPIAELTGHTRTVNCVSWNPQIPSMMASASDDGTVRIWGPAPFIDHQNIEEECSSMDS

SEQ ID NO: 437 - DNA, 3259 bp, Homo sapiens
ggccgtcgggtgtgagctgcgccgaccgctctgagggttcgtggcccaccgctccttcgcggtccctgccgccaccgtccacgctcagcgttgtagagaagatggtgggtcggaacagcgccatcgccgccggtgtatgcggggcccttttcattgggtactgcatctacttcgaccgcaaaagacgaagtgaccccaacttcaagaacaggcttcgagaacgaagaaagaaacagaagcttgccaaggagagagctgggctttccaagttacctgaccttaaagatgctgaagctgttcagaagttcttccttgaagaaatacagcttggtgaagagttactagctcaaggtgaatatgagaagggcgtagaccatctgacaaatgcaattgctgtgtgtggacagccacagcagttactgcaggtcttacagcaaactcttccaccaccagtgttccagatgcttctgactaagctcccaacaattagtcagagaattgtaagtgctcagagcttggctgaagatgatgtggaatgagaaacaaatgtcaacataataaaatctcagttaaaaatattttaaaaattcttggtagttgagcagctctgggggaataagggcaaatatgcttgttatgaactacactgaaatctaccaaagttaatgtttactttgtgtagatccatttgtctattttatttatttttcccagtgaaaagtgtattttgatagagaacttttcattctataaatacactatgagttactaaaatatcatggattttgtttattcctgaaacatagttacatagttaaactgtacatatgacatggcttatgttaaaaatacccagtgctcagttttgaaagataggcaaaaaaaaaaaaagtataggagaaactgaagaatgtacacttttttagagggcacattttgctgtaaatctggaaatttgatagacttgactgtgtttgtgaaaactgagcattaaaggttttgattgatcctttctttccatttaatctctgagacgtaaatatgtgaggtgtgctgctgtgctgggttaacagcttccttccctttctgtgtagcagtcttgaaatgttctgtttaaatcagtaggcttaatgtgttctgggtatttatctccttgtattttaaatatatgtagttgcaaatagcaccaggaattagatttctgtacacccctaatctagccttgtgagcttcgctagttaatgtgtgctcactttccctccatttgttacgtgagagaatgcgtctgctgatcactgaagtgtcccttttagcttctgattcattgggttctgttgggcatctttaaatccaccttaacctgaggaatgtatgtgggcaaccaggccctgcatttttttatattctgaattttgcatgcttgcctgacttagtatttctgaattgatgttttttttaatggtataactatcttgattttcactgaaattatatggttctgtcactactctgtaaattaatccgaaacttttaaggtaactgggatgatctgcttgtaaaaatgcttgttgccttttgctttatcttcagtgtacctccttaatcctgcttcaacttgattatcttgtgaaacgatgagagtaagttgcaaccttgtgactgaaaacttgaaaagagtggagcaggtgggacctcttattctcaaatagtgacatattctccgtagtcacagtttcagaactgagtaaggatccttggtacttggtggcatctgttgaactgaggagcatttctcattgtaaagattgcctttgttctgtctaaaagtctggagaaatcccaaagacttttcctatgtactaggcattttattttgattgacttacaaactcttcttaatcattatcaatctcggtttttttgtggtgcagtggaaggagaaataggtctagtttctgcctctgattagccgcacagccttgaacaaatcacatttcatctttgaacttacctctactgttagactaggcgactcacatttgaggacttttctcgggtatcttgagggtttgtgatcctgaacccttaaacagtgcttttttgttacacaggagggcttttttggggggatgaccagtacagacatgccagttagttttactagtgggatcccaaatccaaagcagtgtagtggtgattggtcagtgactaaccaggcagctaagaagtcttaggcagcagcccagacatgtatagaggggcagttagagggagaacaggggtgggaaagggagcaaggggcagatagctcagcaaggaaagaatgggctcagaaaaaggagggctggctggaggagtgaggggcagcttaagtttggggagggtagaaacgccgtttccttgggaactggagtgcagtatgagctgggtgtcacttggctctgaacatactggctttgctgtaatgcttgaaaaggcgttggtatcttcattttacagttcattaacccaagtacgttttcttatttaaatgacaactttggtgctttaaaatgaggtaccactttttaaagctagctgtgtcgagttaaagaaaaaatcagcagttttttctcccagaaatgtaattgccaaacacttttcatccccatcttaagttttacaaggtgatgtaatcagcttgttgtagtgatgctggccaaatggtgctcagcaggtgagaacaaaaaaaccccagatttcagtgaactaatacacagcttgagcgtttccatgtgctaatgttgcacacttactaaaaaactttggaaatggaaaataatgtattagtgcaacagttgatgtgcttctttgggcaaagatatagttttgttccacaatttgtacttaaaagcgaaagaacattgaaaacatagacttactggctgtagcaatgctggcctgttaactgataactagaacttaggttcacgtttatgtaaagtgtgtaaaacctagtagagcttgcatagtcggcactcagtaaatgtttggttccttttgccccttggtaagtttattttaccatcctcccacctgccattctgactttattaaatcaacatgtggaccagagtgttaatgagatgttattgcagaagagattgagaaaattggtatatcatgcagataacatacaaaatctttttgtaacgtaaaaaatgcagttttattattgcttgtgcctcaactgtttaagtgaatattaaagggcttggag

SEQ ID NO: 438 - protein, 145 aa, Homo sapiens
MVGRNSAIAAGVCGALFIGYCIYFDRKRRSDPNFKNRLRERRKKQKLAKERAGLSKLPDLKDAEAVQKFFLEEIQLGEELLAQGEYEKGVDHLTNAIAVCGQPQQLLQVLQQTLPPPVFQMLLTKLPTISQRIVSAQSLAEDDVE

SEQ ID NO: 439 - DNA, 6065 bp, Homo sapiens
agcgatgtttgcccgtcagtcgagtccggagtgaggagctcggtcgccgaagcggagggagactcttgagcttcatcttgccgccgccacggccaccgcctggacctttgcccggagggagctgcagagggtccatcgccgccgtcctctggagggcagcgcgattgggggcccggacctccagtccgggggggatttttcgtcgtccccctccccccaaccagggagcccgagcggccgccaaacaaaggtaccagtcgccgccgcgggaggaggaggagccggagcctctgcctcagcagccgctggacccgccgcccttcttccccatctctcccccgggcctgctggttttgggggggagaaggagagaggggactctggacgtgccagggtcagatctcgcctccgaggaaggtgcagctgaacctggtgttttagaggataccttggtcccagagtcatcatgaaggcccttgatgagcctccctatttgacagtgggcactgatgtgagtgctaaatacagaggagccttttgtgaagccaagatcaagacagcaaaaagacttgtcaaagtcaaggtgacatttagacatgattcttcaacagtggaagttcaggatgaccacataaagggcccactaaaggtaggagctattgtggaagtgaagaatcttgatggtgcatatcaggaagctgttatcaataaactaacagatgcgagttggtacactgtagtttttgatgacggagatgagaagacactgagacgatcttcactgtgcctgaaaggagagaggcattttgctgaaagtgaaacattagaccagctcccactcaccaaccctgagcattttggcactccagtcataggaaagaaaacaaatagaggaagaagatctaatcatataccagaggaagagtcttcatcatcctccagtgatgaagatgaggatgataggaaacagattgatgagctactaggcaaagttgtatgtgtagattacattagtttggataaaaagaaagcactgtggtttcctgcattggtggtttgtcctgattgtagtgatgagattgctgtaaaaaaggacaatattcttgttcgatctttcaaagatggaaaatttacttcagttccaagaaaagatgtccatgaaattactagtgacactgcaccaaagcctgatgctgttttaaagcaagcctttgaacaggcacttgaatttcacaaaagtagaactattcctgctaactggaagactgaattgaaagaagatagctctagcagtgaagcagaggaagaagaggaggaggaagatgatgaaaaagaaaaggaggataatagcagtgaagaagaagaagaaatagaaccatttccagaagaaagggagaactttcttcagcaattgtacaaatttatggaagatagaggtacacctattaacaaacgacctgtacttggatatcgaaatttgaatctctttaagttattcagacttgtacacaaacttggaggatttgataatattgaaagtggagctgtttggaaacaagtctaccaagatcttggaatccctgtcttaaattcagctgcaggatacaatgttaaatgtgcttataaaaaatacttatatggttttgaggagtactgtagatcagccaacattgaatttcagatggcattgccagagaaagttgttaacaagcaatgtaaggagtgtgaaaatgtaaaagaaataaaagttaaggaggaaaatgaaacagagatcaaagaaataaagatggaggaggagaggaatataataccaagagaagaaaagcctattgaggatgaaattgaaagaaaagaaaatattaagccctctctgggaagtaaaaagaatttattagaatctatacctacacattctgatcaggaaaaagaagttaacattaaaaaaccagaagacaatgaaaatctggatgacaaagatgatgacacaactagggtagatgaatccctcaacataaaggtagaagctgaggaagaaaaagcaaaatctggagatgaaacgaataaagaagaagatgaagatgatgaagaagcagaagaggaggaggaggaggaagaagaagaagaggatgaagatgatgatgacaacaatgaggaagaggagtttgagtgctatccaccaggcatgaaagtccaagtgcggtatggacgagggaaaaatcaaaaaatgtatgaagctagtattaaagattctgatgtcgaaggtggagaggtcctttacttggtgcattactgcggatggaatgtgagatacgatgaatggattaaagcagataaaatagtaagacctgctgataaaaatgtgccaaagataaaacatcggaagaaaataaagaataaattagacaaagaaaaagacaaagatgaaaaatactctccaaaaaactgtaaacttcggcgcttgtccaaaccaccatttcagacaaatccatctcctgaaatggtatccaaactggatctcactgatgccaaaaactctgatactgctcatattaagtccatagaaattacttcgatccttaatggacttcaagcttctgaaagttctgctgaagacagtgagcaggaagatgagagaggtgctcaagacatggataataatggcaaagaggaatctaagattgatcatttgaccaacaacagaaatgatcttatttcaaaggaggaacagaacagttcatctttgctagaagaaaacaaagttcatgcagatttggtaatatccaaaccagtgtcaaaatctccagaaagattaaggaaagatatagaagtattatccgaagatactgattatgaagaagatgaagtcacaaaaaagagaaaggatgtcaagaaggacacaacagataaatcttcaaaaccacaaataaaacgtggtaaaagaaggtattgcaatacagaagagtgtctaaaaactggatcacctggcaaaaaggaagagaaggccaagaacaaagaatcactttgcatggaaaacagtagcaacagctcttcagatgaagatgaagaagaaacaaaagcaaagatgacaccaactaagaaatacaatggtttggaggaaaaaagaaaatctctacggacaactggtttctattcaggattttcagaagtggcagaaaaaaggattaaacttttaaataactctgatgaaagacttcaaaacagcagggccaaagatcgaaaagatgtctggtcaagtattcagggacagtggcctaaaaaaacgctgaaagagcttttttcagactctgatactgaggctgcagcttccccaccgcatcctgccccagaggagggggtggcagaggagtcactgcagactgtggctgaagaggagagttgttcacccagtgtagaactagaaaaaccacctccagtcaatgtcgatagtaaacccattgaagaaaaaacagtagaggtcaatgacagaaaagcagaatttccaagtagtggcagtaattcagtgctaaatacccctcctactacacctgaatcgccttcatcagtcactgtaacagaaggcagccggcagcagtcttctgtaacagtatcagaaccactggctccaaaccaagaagaggttcgaagtatcaagagtgaaactgatagcacaattgaggtggatagtgttgctggggagctccaagacctccagtctgaagggaatagctcgccagcaggttttgatgccagtgtgagctcaagcagtagtaatcagccagaaccagaacatcctgaaaaagcctgtacaggtcagaaaagagtgaaagatgctcagggaggaggaagttcatcaaaaaagcagaaaagaagccataaagcaacagtggtaaacaacaaaaagaagggaaaaggcacaaatagtagtgatagtgaagaactttcagctggtgaaagtataactaagagtcagccagtcaaatcagtttccactggaatgaagtctcatagtaccaaatctcccgcaaggacgcagtctccaggaaaatgtggaaagaatggtgataaggatcctgatctcaaggaacccagtaatcgattacccaaagtttacaaatggagttttcagatgtcggacctggaaaatatgacaagtgccgaacgcatcacaattcttcaagaaaaacttcaagaaatcagaaaacattatctgtcattaaaatctgaagtagcttccattgatcggaggagaaagcgtttaaagaagaaagagagagaaagtgctgctacatcctcatcctcctcttcaccttcatccagttccataacagctgctgttatgttaactttagctgaaccgtcaatgtccagcgcatcacaaaatggaatgtcagttgagtgcaggtgacagcaggacttgctaaagcactttgcacttaatggctgttgagggccactttttttttatactgcacagtggcacaaaaaaatatcagacaagcactattttatatttaaaaattgtttcttgacaagctgacttggcacttaagtgcacttttttatgaagaaaaagtacaatgaactgcttttcctcaagcaataattgtttccaacttgtctgggaattgtgtgtctggtaactggaaggccttccactgtggcaaatggaggcttttcactgcctgtagagacaatacagtaagcatagttaaggggtgggtcagaacatgttaagataacttactgtatatgtattcccttgtattttgttaaagctggaacatttgatatttttccatttatttatgaaaaaatatgaacctattttcatttgtacaaggtaattgttttttaaagcaagtcaccttagggtggctttaattgtataagtcaagcacatgtaataaattcaaaacctgcagttaacaggatattagacatcaatcctggtaaccaaatattaaagattctctttaaaaaagactgaacatgtttacaggtttgaattaggctaaaaggtcttgcagtggcttttcatggcccttcaaattggaatggaactactgtactttgccatttttctataaatcagtatttttttttaattttgatatacattgtgtgaaaaaagaaaatggctaataaactgtattaaatcttaaacaatgtataaagattgtacttagccagttcaaagtgtatatttattcataatgaattataacagttatatttttgtgttttcttgtaaatgtttcttttcccttaaatacagataattcatttgtattgcttattttattatgagctacaacaaaaggacttcaggaacaagtaatgtattagtatggttcaagattgttgataggaactgtctcaaaaggatggtggttattttaaatataaatagctaatgggggtggtaggcctataaaattaaatgccttgtataaaatccaaaatgaatgcaaaattgttttcacttgtattgactttatgttgtatgattccaatctctgttctgtttggcacttgtatttaattcttcacctttgtaagacatttgtatattgtggatgtgttcattcaagctatttaatatctggcactgttaatacacagtactttattgtacagactgttttactgttttaattgtagttctgtgtactttttttggatggggctggcatgttttctttgtttcctggcaatacgacgtgggaatttcaatgcgttttgttgtagatgctaacgtgtcagaatcctttacattcaacttttctaagaaaagcattttcagtcttgtagtgtgtgcttacagtaactaattttgttgaaaatggtttcaagttattcaaatttgtacaggactgtaaagatttgttgacagcaaaatgttgaagaaaaaagcttatagaataaaagctataaagtatatattaggatctgcaaacaatgaagaattatgtaatatattgtacaaatgtaagcaaaggctctgaaataaaatgccatagtttgtgaatccttaaaaaaaaaaaaaaaaaaaaaaaaaaaaaaaa

SEQ ID NO: 440 - protein, 1312 aa, Homo sapiens
MKALDEPPYLTVGTDVSAKYRGAFCEAKIKTAKRLVKVKVTFRHDSSTVEVQDDHIKGPLKVGAIVEVKNLDGAYQEAVINKLTDASWYTVVFDDGDEKTLRRSSLCLKGERHFAESETLDQLPLTNPEHFGTPVIGKKTNRGRRSNHIPEEESSSSSSDEDEDDRKQIDELLGKVVCVDYISLDKKKALWFPALVVCPDCSDEIAVKKDNILVRSFKDGKFTSVPRKDVHEITSDTAPKPDAVLKQAFEQALEFHKSRTIPANWKTELKEDSSSSEAEEEEEEEDDEKEKEDNSSEEEEEIEPFPEERENFLQQLYKFMEDRGTPINKRPVLGYRNLNLFKLFRLVHKLGGFDNIESGAVWKQVYQDLGIPVLNSAAGYNVKCAYKKYLYGFEEYCRSANIEFQMALPEKVVNKQCKECENVKEIKVKEENETEIKEIKMEEERNIIPREEKPIEDEIERKENIKPSLGSKKNLLESIPTHSDQEKEVNIKKPEDNENLDDKDDDTTRVDESLNIKVEAEEEKAKSGDETNKEEDEDDEEAEEEEEEEEEEEDEDDDDNNEEEEFECYPPGMKVQVRYGRGKNQKMYEASIKDSDVEGGEVLYLVHYCGWNVRYDEWIKADKIVRPADKNVPKIKHRKKIKNKLDKEKDKDEKYSPKNCKLRRLSKPPFQTNPSPEMVSKLDLTDAKNSDTAHIKSIEITSILNGLQASESSAEDSEQEDERGAQDMDNNGKEESKIDHLTNNRNDLISKEEQNSSSLLEENKVHADLVISKPVSKSPERLRKDIEVLSEDTDYEEDEVTKKRKDVKKDTTDKSSKPQIKRGKRRYCNTEECLKTGSPGKKEEKAKNKESLCMENSSNSSSDEDEEETKAKMTPTKKYNGLEEKRKSLRTTGFYSGFSEVAEKRIKLLNNSDERLQNSRAKDRKDVWSSIQGQWPKKTLKELFSDSDTEAAASPPHPAPEEGVAEESLQTVAEEESCSPSVELEKPPPVNVDSKPIEEKTVEVNDRKAEFPSSGSNSVLNTPPTTPESPSSVTVTEGSRQQSSVTVSEPLAPNQEEVRSIKSETDSTIEVDSVAGELQDLQSEGNSSPAGFDASVSSSSSNQPEPEHPEKACTGQKRVKDAQGGGSSSKKQKRSHKATVVNNKKKGKGTNSSDSEELSAGESITKSQPVKSVSTGMKSHSTKSPARTQSPGKCGKNGDKDPDLKEPSNRLPKVYKWSFQMSDLENMTSAERITILQEKLQEIRKHYLSLKSEVASIDRRRKRLKKKERESAATSSSSSSPSSSSITAAVMLTLAEPSMSSASQNGMSVECR

SEQ ID NO: 441 - DNA, 5807 bp, Homo sapiens
agcgatgtttgcccgtcagtcgagtccggagtgaggagctcggtcgccgaagcggagggagactcttgagcttcatcttgccgccgccacggccaccgcctggacctttgcccggagggagctgcagagggtccatcgccgccgtcctctggagggcagcgcgattgggggcccggacctccagtccgggggggatttttcgtcgtccccctccccccaaccagggagcccgagcggccgccaaacaaaggtaccagtcgccgccgcgggaggaggaggagccggagcctctgcctcagcagccgctggacccgccgcccttcttccccatctctcccccgggcctgctggttttgggggggagaaggagagaggggactctggacgtgccagggtcagatctcgcctccgaggaaggtgcagctgaacctggtgttttagaggataccttggtcccagagtcatcatgaaggcccttgatgagcctccctatttgacagtgggcactgatgtgagtgctaaatacagaggagccttttgtgaagccaagatcaagacagcaaaaagacttgtcaaagtcaaggtgacatttagacatgattcttcaacagtggaagttcaggatgaccacataaagggcccactaaaggtaggagctattgtggaagtgaagaatcttgatggtgcatatcaggaagctgttatcaataaactaacagatgcgagttggtacactgtagtttttgatgacggagatgagaagacactgagacgatcttcactgtgcctgaaaggagagaggcattttgctgaaagtgaaacattagaccagctcccactcaccaaccctgagcattttggcactccagtcataggaaagaaaacaaatagaggaagaagatctaatcatataccagaggaagagtcttcatcatcctccagtgatgaagatgaggatgataggaaacagattgatgagctactaggcaaagttgtatgtgtagattacattagtttggataaaaagaaagcactgtggtttcctgcattggtggtttgtcctgattgtagtgatgagattgctgtaaaaaaggacaatattcttgttcgatctttcaaagatggaaaatttacttcagttccaagaaaagatgtccatgaaattactagtgacactgcaccaaagcctgatgctgttttaaagcaagcctttgaacaggcacttgaatttcacaaaagtagaactattcctgctaactggaagactgaattgaaagaagatagctctagcagtgaagcagaggaagaagaggaggaggaagatgatgaaaaagaaaaggaggataatagcagtgaagaagaagaagaaatagaaccatttccagaagaaagggagaactttcttcagcaattgtacaaatttatggaagatagaggtacacctattaacaaacgacctgtacttggatatcgaaatttgaatctctttaagttattcagacttgtacacaaacttggaggatttgataatattgaaagtggagctgtttggaaacaagtctaccaagatcttggaatccctgtcttaaattcagctgcaggatacaatgttaaatgtgcttataaaaaatacttatatggttttgaggagtactgtagatcagccaacattgaatttcagatggcattgccagagaaagttgttaacaagcaatgtaaggagtgtgaaaatgtaaaagaaataaaagttaaggaggaaaatgaaacagagatcaaagaaataaagatggaggaggagaggaatataataccaagagaagaaaagcctattgaggatgaaattgaaagaaaagaaaatattaagccctctctgggaagtaaaaagaatttattagaatctatacctacacattctgatcaggaaaaagaagttaacattaaaaaaccagaagacaatgaaaatctggatgacaaagatgatgacacaactagggtagatgaatccctcaacataaaggtagaagctgaggaagaaaaagcaaaatctggatacgatgaatggattaaagcagataaaatagtaagacctgctgataaaaatgtgccaaagataaaacatcggaagaaaataaagaataaattagacaaagaaaaagacaaagatgaaaaatactctccaaaaaactgtaaacttcggcgcttgtccaaaccaccatttcagacaaatccatctcctgaaatggtatccaaactggatctcactgatgccaaaaactctgatactgctcatattaagtccatagaaattacttcgatccttaatggacttcaagcttctgaaagttctgctgaagacagtgagcaggaagatgagagaggtgctcaagacatggataataatggcaaagaggaatctaagattgatcatttgaccaacaacagaaatgatcttatttcaaaggaggaacagaacagttcatctttgctagaagaaaacaaagttcatgcagatttggtaatatccaaaccagtgtcaaaatctccagaaagattaaggaaagatatagaagtattatccgaagatactgattatgaagaagatgaagtcacaaaaaagagaaaggatgtcaagaaggacacaacagataaatcttcaaaaccacaaataaaacgtggtaaaagaaggtattgcaatacagaagagtgtctaaaaactggatcacctggcaaaaaggaagagaaggccaagaacaaagaatcactttgcatggaaaacagtagcaacagctcttcagatgaagatgaagaagaaacaaaagcaaagatgacaccaactaagaaatacaatggtttggaggaaaaaagaaaatctctacggacaactggtttctattcaggattttcagaagtggcagaaaaaaggattaaacttttaaataactctgatgaaagacttcaaaacagcagggccaaagatcgaaaagatgtctggtcaagtattcagggacagtggcctaaaaaaacgctgaaagagcttttttcagactctgatactgaggctgcagcttccccaccgcatcctgccccagaggagggggtggcagaggagtcactgcagactgtggctgaagaggagagttgttcacccagtgtagaactagaaaaaccacctccagtcaatgtcgatagtaaacccattgaagaaaaaacagtagaggtcaatgacagaaaagcagaatttccaagtagtggcagtaattcagtgctaaatacccctcctactacacctgaatcgccttcatcagtcactgtaacagaaggcagccggcagcagtcttctgtaacagtatcagaaccactggctccaaaccaagaagaggttcgaagtatcaagagtgaaactgatagcacaattgaggtggatagtgttgctggggagctccaagacctccagtctgaagggaatagctcgccagcaggttttgatgccagtgtgagctcaagcagtagtaatcagccagaaccagaacatcctgaaaaagcctgtacaggtcagaaaagagtgaaagatgctcagggaggaggaagttcatcaaaaaagcagaaaagaagccataaagcaacagtggtaaacaacaaaaagaagggaaaaggcacaaatagtagtgatagtgaagaactttcagctggtgaaagtataactaagagtcagccagtcaaatcagtttccactggaatgaagtctcatagtaccaaatctcccgcaaggacgcagtctccaggaaaatgtggaaagaatggtgataaggatcctgatctcaaggaacccagtaatcgattacccaaagtttacaaatggagttttcagatgtcggacctggaaaatatgacaagtgccgaacgcatcacaattcttcaagaaaaacttcaagaaatcagaaaacattatctgtcattaaaatctgaagtagcttccattgatcggaggagaaagcgtttaaagaagaaagagagagaaagtgctgctacatcctcatcctcctcttcaccttcatccagttccataacagctgctgttatgttaactttagctgaaccgtcaatgtccagcgcatcacaaaatggaatgtcagttgagtgcaggtgacagcaggacttgctaaagcactttgcacttaatggctgttgagggccactttttttttatactgcacagtggcacaaaaaaatatcagacaagcactattttatatttaaaaattgtttcttgacaagctgacttggcacttaagtgcacttttttatgaagaaaaagtacaatgaactgcttttcctcaagcaataattgtttccaacttgtctgggaattgtgtgtctggtaactggaaggccttccactgtggcaaatggaggcttttcactgcctgtagagacaatacagtaagcatagttaaggggtgggtcagaacatgttaagataacttactgtatatgtattcccttgtattttgttaaagctggaacatttgatatttttccatttatttatgaaaaaatatgaacctattttcatttgtacaaggtaattgttttttaaagcaagtcaccttagggtggctttaattgtataagtcaagcacatgtaataaattcaaaacctgcagttaacaggatattagacatcaatcctggtaaccaaatattaaagattctctttaaaaaagactgaacatgtttacaggtttgaattaggctaaaaggtcttgcagtggcttttcatggcccttcaaattggaatggaactactgtactttgccatttttctataaatcagtatttttttttaattttgatatacattgtgtgaaaaaagaaaatggctaataaactgtattaaatcttaaacaatgtataaagattgtacttagccagttcaaagtgtatatttattcataatgaattataacagttatatttttgtgttttcttgtaaatgtttcttttcccttaaatacagataattcatttgtattgcttattttattatgagctacaacaaaaggacttcaggaacaagtaatgtattagtatggttcaagattgttgataggaactgtctcaaaaggatggtggttattttaaatataaatagctaatgggggtggtaggcctataaaattaaatgccttgtataaaatccaaaatgaatgcaaaattgttttcacttgtattgactttatgttgtatgattccaatctctgttctgtttggcacttgtatttaattcttcacctttgtaagacatttgtatattgtggatgtgttcattcaagctatttaatatctggcactgttaatacacagtactttattgtacagactgttttactgttttaattgtagttctgtgtactttttttggatggggctggcatgttttctttgtttcctggcaatacgacgtgggaatttcaatgcgttttgttgtagatgctaacgtgtcagaatcctttacattcaacttttctaagaaaagcattttcagtcttgtagtgtgtgcttacagtaactaattttgttgaaaatggtttcaagttattcaaatttgtacaggactgtaaagatttgttgacagcaaaatgttgaagaaaaaagcttatagaataaaagctataaagtatatattaggatctgcaaacaatgaagaattatgtaatatattgtacaaatgtaagcaaaggctctgaaataaaatgccatagtttgtgaatccttaaaaaaaaaaaaaaaaaaaaaaaaaaaaaaaa

SEQ ID NO: 442 - protein, 1226 aa, Homo sapiens
MKALDEPPYLTVGTDVSAKYRGAFCEAKIKTAKRLVKVKVTFRHDSSTVEVQDDHIKGPLKVGAIVEVKNLDGAYQEAVINKLTDASWYTVVFDDGDEKTLRRSSLCLKGERHFAESETLDQLPLTNPEHFGTPVIGKKTNRGRRSNHIPEEESSSSSSDEDEDDRKQIDELLGKVVCVDYISLDKKKALWFPALVVCPDCSDEIAVKKDNILVRSFKDGKFTSVPRKDVHEITSDTAPKPDAVLKQAFEQALEFHKSRTIPANWKTELKEDSSSSEAEEEEEEEDDEKEKEDNSSEEEEEIEPFPEERENFLQQLYKFMEDRGTPINKRPVLGYRNLNLFKLFRLVHKLGGFDNIESGAVWKQVYQDLGIPVLNSAAGYNVKCAYKKYLYGFEEYCRSANIEFQMALPEKVVNKQCKECENVKEIKVKEENETEIKEIKMEEERNIIPREEKPIEDEIERKENIKPSLGSKKNLLESIPTHSDQEKEVNIKKPEDNENLDDKDDDTTRVDESLNIKVEAEEEKAKSGYDEWIKADKIVRPADKNVPKIKHRKKIKNKLDKEKDKDEKYSPKNCKLRRLSKPPFQTNPSPEMVSKLDLTDAKNSDTAHIKSIEITSILNGLQASESSAEDSEQEDERGAQDMDNNGKEESKIDHLTNNRNDLISKEEQNSSSLLEENKVHADLVISKPVSKSPERLRKDIEVLSEDTDYEEDEVTKKRKDVKKDTTDKSSKPQIKRGKRRYCNTEECLKTGSPGKKEEKAKNKESLCMENSSNSSSDEDEEETKAKMTPTKKYNGLEEKRKSLRTTGFYSGFSEVAEKRIKLLNNSDERLQNSRAKDRKDVWSSIQGQWPKKTLKELFSDSDTEAAASPPHPAPEEGVAEESLQTVAEEESCSPSVELEKPPPVNVDSKPIEEKTVEVNDRKAEFPSSGSNSVLNTPPTTPESPSSVTVTEGSRQQSSVTVSEPLAPNQEEVRSIKSETDSTIEVDSVAGELQDLQSEGNSSPAGFDASVSSSSSNQPEPEHPEKACTGQKRVKDAQGGGSSSKKQKRSHKATVVNNKKKGKGTNSSDSEELSAGESITKSQPVKSVSTGMKSHSTKSPARTQSPGKCGKNGDKDPDLKEPSNRLPKVYKWSFQMSDLENMTSAERITILQEKLQEIRKHYLSLKSEVASIDRRRKRLKKKERESAATSSSSSSPSSSSITAAVMLTLAEPSMSSASQNGMSVECR

SEQ ID NO: 443 - DNA, 2757 bp, Homo sapiens
cgcgcaaatcctcgtccgcgagaactgcaaggcccgcaatgccctgcgcctgcgtggaccgattagctttgaagtttaaatccaatggagaagactcaagaaacagtccaaagaattcttctagaaccctataaatacttacttcagttaccaggtaaacaagtgagaaccaaactttcacaggcatttaatcattggctgaaagttccagaggacaagctacagattattattgaagtgacagaaatgttgcataatgccagtttactcatcgatgatattgaagacaactcaaaactccgacgtggctttccagtggcccacagcatctatggaatcccatctgtcatcaattctgccaattacgtgtatttccttggcttggagaaagtcttaacccttgatcacccagatgcagtgaagctttttacccgccagcttttggaactccatcagggacaaggcctagatatttactggagggataattacacttgtcccactgaagaagaatataaagctatggtgctgcagaaaacaggtggactgtttggattagcagtaggtctcatgcagttgttctctgattacaaagaagatttaaaaccgctacttaatacacttgggctctttttccaaattagggatgattatgctaatctacactccaaagaatatagtgaaaacaaaagtttttgtgaagatctgacagagggaaagttctcatttcctactattcatgctatttggtcaaggcctgaaagcacccaggtgcagaatatcttgcgccagagaacagaaaacatagatataaaaaaatactgtgtacattatcttgaggatgtaggttcttttgaatacactcgtaatacccttaaagagcttgaagctaaagcctataaacagattgatgcacgtggtgggaaccctgagctagtagccttagtaaaacacttaagtaagatgttcaaagaagaaaatgaataatgttaagccattcttgattggacctcatagcttattttagttaatcttttttttgtcttttagccttaccaccttttaaaaaatttgttattctccagaaacagtaaataggtgagtaggggtggtgcaagtgaattcgttttcatttagaagcccctctgtacagataatcaaaattcaaagttgaaagaatcaaaagcagccacagttatgtaggtctgatttgaatgtcataattgcagtgacaggacattgccaccaactctatcctactaccatcaatgttgtgtttattccgtcaataaaaaagacttgcttccaggaatttttatccatacactttctaactgtactatctgggcagttccaagccagtttctattagctagctggaccaaagaccacaaatctctttttttcctaaacgctgctgtaaggaatatctcacttttccccccggaaacaccctcactgaagtcttctatgaaaaggctgataatgggctgggcgcggtggctcacgcctgtaatcccagcactttgggaggccgaggcgggcagatcacgaggtcaggagatcgagaccatcctgacacggtgaaaccctgtctctactaaaaatacaaaaaattagctgggcgtggtggtgggcgcctgtagtcccagctactcgggaggctgaggcaggagaatggtgtgaacccaggaggcggagcttgcagtgagccgagatagtgcctctgcactccagcctgggtgacagagcgagactccgtctcaaaaaaaagggctgataatgataaacagtgagcactccggtcctttttcttaggttttccttttttccttcctctccaccccacaagttttgctttttaaccaaggtgtctctgcttgatgaaattcacatgctagtctaaatctttttttctcccttgtaacatttatgtgccccaaactggttagtatatgggtacagcattccctttccaattgggaagcggaaaaagagagtatgggatattttagaagggagcctttgaaccttattatatttccccatcattgatagtgacaatcttaaaagggttgttttcttaccttaagtacaaaagcatggaaaaatgcgcttttccttcccgcccacatcaccaccccgacttgaagacagtaggtgcttgaatggaaagtgagtaggcatctttaatcgccctgattaaaggaaagtgttagcctgagagggcctgactgaaaagtaaccaaaggcttaatatcaaacactaattagctttttagtgccttaaccctgacctggttaccagttttctgtagtttctacacccaagccactgaagtcatctgtggcccaagaggtaggacaaaaaaaaaaaaaaaaaaagctgatttcaatatttgatttgttgacatcccaaaatgaaagttttatgtttcccttagaaacatgttttgcttggttctatagtatgttacttaggatctatttaccatatatttgtatgagaaatcctcacccaagcattcaacctaaatctttgaaaagttgggtgctgtctttagtaacttttaaaatagtttaaatctcccattttaatagtgataaggaaacctgttaaaatcatggctattgatgttatagtatggaaagttgaactttatgaacccatacttttaaaaagcatttttaaaaatctaacactgactatagaaacaaattaaaatgtctacctttaagtataaaaaaaaaaaaaaa

SEQ ID NO: 444 - protein, 300 aa, Homo sapiens [sequence omitted]

SEQ ID NO: 445 - DNA, 2828 bp, Homo sapiens
gcaacgacgcctgcgcagtgtgaccgggatggcgcattttcttgcaccaactaatgcggtgtcgctggcggctgaggagggcggagagttctgtggtgaaatagtgggaaggattcatgtaggcatcgggaagagcctaagtccacattataaaataggaagttgatgcggggtacagttactcccggaccggcggcgtgaaagtcgtgatatcatcgttgaactgtaaacaagtgagaaccaaactttcacaggcatttaatcattggctgaaagttccagaggacaagctacagattattattgaagtgacagaaatgttgcataatgccagtttactcatcgatgatattgaagacaactcaaaactccgacgtggctttccagtggcccacagcatctatggaatcccatctgtcatcaattctgccaattacgtgtatttccttggcttggagaaagtcttaacccttgatcacccagatgcagtgaagctttttacccgccagcttttggaactccatcagggacaaggcctagatatttactggagggataattacacttgtcccactgaagaagaatataaagctatggtgctgcagaaaacaggtggactgtttggattagcagtaggtctcatgcagttgttctctgattacaaagaagatttaaaaccgctacttaatacacttgggctctttttccaaattagggatgattatgctaatctacactccaaagaatatagtgaaaacaaaagtttttgtgaagatctgacagagggaaagttctcatttcctactattcatgctatttggtcaaggcctgaaagcacccaggtgcagaatatcttgcgccagagaacagaaaacatagatataaaaaaatactgtgtacattatcttgaggatgtaggttcttttgaatacactcgtaatacccttaaagagcttgaagctaaagcctataaacagattgatgcacgtggtgggaaccctgagctagtagccttagtaaaacacttaagtaagatgttcaaagaagaaaatgaataatgttaagccattcttgattggacctcatagcttattttagttaatcttttttttgtcttttagccttaccaccttttaaaaaatttgttattctccagaaacagtaaataggtgagtaggggtggtgcaagtgaattcgttttcatttagaagcccctctgtacagataatcaaaattcaaagttgaaagaatcaaaagcagccacagttatgtaggtctgatttgaatgtcataattgcagtgacaggacattgccaccaactctatcctactaccatcaatgttgtgtttattccgtcaataaaaaagacttgcttccaggaatttttatccatacactttctaactgtactatctgggcagttccaagccagtttctattagctagctggaccaaagaccacaaatctctttttttcctaaacgctgctgtaaggaatatctcacttttccccccggaaacaccctcactgaagtcttctatgaaaaggctgataatgggctgggcgcggtggctcacgcctgtaatcccagcactttgggaggccgaggcgggcagatcacgaggtcaggagatcgagaccatcctgacacggtgaaaccctgtctctactaaaaatacaaaaaattagctgggcgtggtggtgggcgcctgtagtcccagctactcgggaggctgaggcaggagaatggtgtgaacccaggaggcggagcttgcagtgagccgagatagtgcctctgcactccagcctgggtgacagagcgagactccgtctcaaaaaaaagggctgataatgataaacagtgagcactccggtcctttttcttaggttttccttttttccttcctctccaccccacaagttttgctttttaaccaaggtgtctctgcttgatgaaattcacatgctagtctaaatctttttttctcccttgtaacatttatgtgccccaaactggttagtatatgggtacagcattccctttccaattgggaagcggaaaaagagagtatgggatattttagaagggagcctttgaaccttattatatttccccatcattgatagtgacaatcttaaaagggttgttttcttaccttaagtacaaaagcatggaaaaatgcgcttttccttcccgcccacatcaccaccccgacttgaagacagtaggtgcttgaatggaaagtgagtaggcatctttaatcgccctgattaaaggaaagtgttagcctgagagggcctgactgaaaagtaaccaaaggcttaatatcaaacactaattagctttttagtgccttaaccctgacctggttaccagttttctgtagtttctacacccaagccactgaagtcatctgtggcccaagaggtaggacaaaaaaaaaaaaaaaaaaagctgatttcaatatttgatttgttgacatcccaaaatgaaagttttatgtttcccttagaaacatgttttgcttggttctatagtatgttacttaggatctatttaccatatatttgtatgagaaatcctcacccaagcattcaacctaaatctttgaaaagttgggtgctgtctttagtaacttttaaaatagtttaaatctcccattttaatagtgataaggaaacctgttaaaatcatggctattgatgttatagtatggaaagttgaactttatgaacccatacttttaaaaagcatttttaaaaatctaacactgactatagaaacaaattaaaatgtctacctttaagtataaaaaaaaaaaaaaa

SEQ ID NO: 446 - protein, 246 aa, Homo sapiens
MLHNASLLIDDIEDNSKLRRGFPVAHSIYGIPSVINSANYVYFLGLEKVLTLDHPDAVKLFTRQLLELHQGQGLDIYWRDNYTCPTEEEYKAMVLQKTGGLFGLAVGLMQLFSDYKEDLKPLLNTLGLFFQIRDDYANLHSKEYSENKSFCEDLTEGKFSFPTIHAIWSRPESTQVQNILRQRTENIDIKKYCVHYLEDVGSFEYTRNTLKELEAKAYKQIDARGGNPELVALVKHLSKMFKEENE

SEQ ID NO: 447 - DNA, 2921 bp, Homo sapiens
gcaacgacgcctgcgcagtgtgaccgggatggcgcattttcttgcaccaactaatgcggtgtcgctggcggctgaggagggcggagagttctgtggtgaaatagtgggaaggattcatgtaggcatcgggaagagcctaagtccacattataaaataggaagttgatgcggggtacagttactcccggaccggcggcgtgaaagtcgtgatatcatcgttgaactattagctttgaagtttaaatccaatggagaagactcaagaaacagtccaaagaattcttctagaaccctataaatacttacttcagttaccaggtaaacaagtgagaaccaaactttcacaggcatttaatcattggctgaaagttccagaggacaagctacagattattattgaagtgacagaaatgttgcataatgccagtttactcatcgatgatattgaagacaactcaaaactccgacgtggctttccagtggcccacagcatctatggaatcccatctgtcatcaattctgccaattacgtgtatttccttggcttggagaaagtcttaacccttgatcacccagatgcagtgaagctttttacccgccagcttttggaactccatcagggacaaggcctagatatttactggagggataattacacttgtcccactgaagaagaatataaagctatggtgctgcagaaaacaggtggactgtttggattagcagtaggtctcatgcagttgttctctgattacaaagaagatttaaaaccgctacttaatacacttgggctctttttccaaattagggatgattatgctaatctacactccaaagaatatagtgaaaacaaaagtttttgtgaagatctgacagagggaaagttctcatttcctactattcatgctatttggtcaaggcctgaaagcacccaggtgcagaatatcttgcgccagagaacagaaaacatagatataaaaaaatactgtgtacattatcttgaggatgtaggttcttttgaatacactcgtaatacccttaaagagcttgaagctaaagcctataaacagattgatgcacgtggtgggaaccctgagctagtagccttagtaaaacacttaagtaagatgttcaaagaagaaaatgaataatgttaagccattcttgattggacctcatagcttattttagttaatcttttttttgtcttttagccttaccaccttttaaaaaatttgttattctccagaaacagtaaataggtgagtaggggtggtgcaagtgaattcgttttcatttagaagcccctctgtacagataatcaaaattcaaagttgaaagaatcaaaagcagccacagttatgtaggtctgatttgaatgtcataattgcagtgacaggacattgccaccaactctatcctactaccatcaatgttgtgtttattccgtcaataaaaaagacttgcttccaggaatttttatccatacactttctaactgtactatctgggcagttccaagccagtttctattagctagctggaccaaagaccacaaatctctttttttcctaaacgctgctgtaaggaatatctcacttttccccccggaaacaccctcactgaagtcttctatgaaaaggctgataatgggctgggcgcggtggctcacgcctgtaatcccagcactttgggaggccgaggcgggcagatcacgaggtcaggagatcgagaccatcctgacacggtgaaaccctgtctctactaaaaatacaaaaaattagctgggcgtggtggtgggcgcctgtagtcccagctactcgggaggctgaggcaggagaatggtgtgaacccaggaggcggagcttgcagtgagccgagatagtgcctctgcactccagcctgggtgacagagcgagactccgtctcaaaaaaaagggctgataatgataaacagtgagcactccggtcctttttcttaggttttccttttttccttcctctccaccccacaagttttgctttttaaccaaggtgtctctgcttgatgaaattcacatgctagtctaaatctttttttctcccttgtaacatttatgtgccccaaactggttagtatatgggtacagcattccctttccaattgggaagcggaaaaagagagtatgggatattttagaagggagcctttgaaccttattatatttccccatcattgatagtgacaatcttaaaagggttgttttcttaccttaagtacaaaagcatggaaaaatgcgcttttccttcccgcccacatcaccaccccgacttgaagacagtaggtgcttgaatggaaagtgagtaggcatctttaatcgccctgattaaaggaaagtgttagcctgagagggcctgactgaaaagtaaccaaaggcttaatatcaaacactaattagctttttagtgccttaaccctgacctggttaccagttttctgtagtttctacacccaagccactgaagtcatctgtggcccaagaggtaggacaaaaaaaaaaaaaaaaaaagctgatttcaatatttgatttgttgacatcccaaaatgaaagttttatgtttcccttagaaacatgttttgcttggttctatagtatgttacttaggatctatttaccatatatttgtatgagaaatcctcacccaagcattcaacctaaatctttgaaaagttgggtgctgtctttagtaacttttaaaatagtttaaatctcccattttaatagtgataaggaaacctgttaaaatcatggctattgatgttatagtatggaaagttgaactttatgaacccatacttttaaaaagcatttttaaaaatctaacactgactatagaaacaaattaaaatgtctacctttaagtataaaaaaaaaaaaaaa

SEQ ID NO: 448 - protein, 300 aa, Homo sapiens [sequence omitted]

SEQ ID NO: 449 - DNA, 1882 bp, Homo sapiens
gttggctggaggggctgctgctgggaacacctggagtctccgcgggcagatctcatattttggattctggatatattataatgagtgacactttgacagcggatgtcattggtcgaagagttgaagttaatggagaacatgcaacagtacgttttgctggtgttgtccctcccgtggcaggaccctggttaggagtagaatgggacaatcccgagagaggaaagcatgatgggagccacgaagggactgtgtattttaaatgcaggcacccgacaggaggatcctttattcgtccgaacaaggtaaattttggaacagactttcttactgcaattaagaaccgctatgtgttagaagatggaccagaggaagatagaaaagagcaaattgttacaattggaaataaacctgtggagactatcggttttgactctattatgaaacagcaaagtcagctgagcaagttgcaagaagtttctctgaggaactgtgcagtaagttgtgctggtgaaaaaggaggagttgctgaagcatgtcctaatatcagaaaggtagatttgtcaaaaaacctgttgtcatcatgggatgaagtgatacacattgctgatcagctcagacacctggaagtccttaatgtcagtgaaaataaactaaaatttccctccggttcagtattaactggaacgctttctgtactgaaggttttagtcctcaatcaaacaggaataacgtgggctgaggtgctgcggtgtgtcgcggggtgcccaggcctggaggaactctaccttgagtctaacaacattttcatttccgaaaggccaacagatgttctccagacagtcaagttattagatctttcctctaatcaattaattgatgaaaatcagctgtatctgatagcccacctgcccaggttagaacaattaatcctctctgacactggaatttcttctctacattttccggatgctggaattgggtgcaaaacgtccatgttcccatccttgaagtacctggtagtaaacgacaatcagatatcacaatggtcgtttttcaatgagctagagaagttaccaagtctacgggctttgtcctgcctaagaaaccccctgaccaaagaggacaaagaagcagagacggcgcgactactcattatcgccagcattggccagctgaagacgctgaacaaatgtgagattctccccgaggagaggcggagagctgagcttgactaccgaaaagcttttggaaatgagtggaaacaggctggtggacataaggatccggaaaaaaacagactcagcgaagaattcctcacagcccatcccagataccagttcctctgcctgaaatatggtgcacctgaagattgggaactcaaaacacagcaaccacttatgctgaaaaaccagctactaacactgaagataaaataccctcatcaacttgatcagaaagtcctggagaaacaactgccgggctccatgacaattcaaaaggtgaagggattgctgtcacgtcttctcaaagttcctgtgtcagaccttctgttgtcctatgaaagtcccaaaaagccgggcagagaaatcgagctggaaaatgacctaaagtcattacagttttattctgtggaaaatggagattgtctattagtgcgatggtgacaaccaactaataaaatttaaagaccacactgcttatcgtgtctggggttcaccggaaataaatgattcactggaacaattctactgtcaaaacaaagggggtttacaacttgtcctaagtataacaagggatgtatttttagttgggaagtgaccatttctaggcttatacataatagcaataataaaggctttgaacctacagaaaaaaaaaaaaa

SEQ ID NO: 450 - protein, 527 aa, Homo sapiens
MSDTLTADVIGRRVEVNGEHATVRFAGVVPPVAGPWLGVEWDNPERGKHDGSHEGTVYFKCRHPTGGSFIRPNKVNFGTDFLTAIKNRYVLEDGPEEDRKEQIVTIGNKPVETIGFDSIMKQQSQLSKLQEVSLRNCAVSCAGEKGGVAEACPNIRKVDLSKNLLSSWDEVIHIADQLRHLEVLNVSENKLKFPSGSVLTGTLSVLKVLVLNQTGITWAEVLRCVAGCPGLEELYLESNNIFISERPTDVLQTVKLLDLSSNQLIDENQLYLIAHLPRLEQLILSDTGISSLHFPDAGIGCKTSMFPSLKYLVVNDNQISQWSFFNELEKLPSLRALSCLRNPLTKEDKEAETARLLIIASIGQLKTLNKCEILPEERRRAELDYRKAFGNEWKQAGGHKDPEKNRLSEEFLTAHPRYQFLCLKYGAPEDWELKTQQPLMLKNQLLTLKIKYPHQLDQKVLEKQLPGSMTIQKVKGLLSRLLKVPVSDLLLSYESPKKPGREIELENDLKSLQFYSVENGDCLLVRW

SEQ ID NO: 451 - DNA, 2022 bp, Homo sapiens
aggcggagggggcggggcttcggccggctaagccgcggccacccgcggtctgagggaccggaggagcggggccgggagctgcgaggagccctccagacgtcgccgagcgcgagggcgggcgtgctcggagtggtcgctcgtcagccgccgcccctcagtctccgcacttgcaggtcccctccctctccgccgggacgcgggagagcccggctcgcggcgggggcggccaatgcgaaactggctggtgctgctgtgcccgtgtgtgctcggggccgcgctgcacctctggctgcggctgcgctccccgccgcccgcctgcgcctccggggccggccctgcagatcagttggccttatttcctcagtggaaatctactcactatgatgtggtagttggcgtgttgtcagctcgcaataaccatgaacttcgaaacgtgataagaagcacctggatgagacatttgctacagcatcccacattaagtcaacgtgtgcttgtgaagttcataataggtgctcatggctgtgaagtgcctgtggaagacagggaagatccttattcctgtaaactactcaacatcacaaatccagttttgaatcaggaaattgaagcgttcagtctgtccgaagacacttcatcggggctgcctgaggatcgagttgtcagcgtgagtttccgagttctctaccccatcgttattaccagtcttggagtgttctacgatgccaatgatgtgggtttccagaggaacatcactgtcaaactttatcaggcagaacaagaggaggccctcttcattgctcgcttcagtcctccaagctgtggtgtgcaggtgaacaagctgtggtacaagcccgtggaacaattcatcttaccagagagctttgaaggtacaatcgtgtgggagagccaagacctccacggccttgtgtcaagaaatctccacaaagtgacagtgaatgatggagggggagttctcagagtcattacagctggggagggtgcattgcctcatgaattcttggaaggtgtggagggagttgcaggtggttttatatatactattcaggaaggtgatgctctcttacacaaccttcattctcgccctcaaagacttattgatcatataaggaatctccatgaggaagatgccttactgaaggaggaaagcagcatctatgatgatattgtttttgtggatgttgtcgacacttatcgtaatgttcctgcaaaattattgaacttctatagatggactgtggaaacaacgagcttcaatttgttgctgaagacagatgatgactgttacatagacctcgaagctgtatttaataggattgtccaaaagaatctggatgggcctaatttttggtggggaaatttcagactgaattgggcagttgaccgaaccggaaagtggcaggagttggagtacccgagccccgcttaccctgcctttgcatgtgggtcaggatatgtgatctccaaggacatcgtcaagtggctggcaagcaactcggggaggttaaagacctatcagggtgaagatgtaagcatgggcatctggatggctgccataggacctaaaagataccaggacagtctgtggctgtgtgagaagacctgtgagacaggaatgctgtcttctcctcagtattctccgtgggaactgacggaactgtggaaactgaaggaacggtgcggtgatccttgtcgatgtcaagcaagataacagggacttgaattagcagagtctaaaatcagggcaggcaaacgataatctgagtgcaagtctgaggagtcccagggtttagcagtagactgtatggtctttcaagagagttccagactggcactttcacccagaaccaatgcggtgtttcttaatgtttgcacaaatttccttaaaaatcaacttgtactgtagcataagaaaagtttttatttatctattggaagattatcagaaaaataccaagttattttataaaagaaaaaatatttctaaaaaaaaaaaaaaaa

SEQ ID NO: 452 - protein, 500 aa, Homo sapiens
MRNWLVLLCPCVLGAALHLWLRLRSPPPACASGAGPADQLALFPQWKSTHYDVVVGVLSARNNHELRNVIRSTWMRHLLQHPTLSQRVLVKFIIGAHGCEVPVEDREDPYSCKLLNITNPVLNQEIEAFSLSEDTSSGLPEDRVVSVSFRVLYPIVITSLGVFYDANDVGFQRNITVKLYQAEQEEALFIARFSPPSCGVQVNKLWYKPVEQFILPESFEGTIVWESQDLHGLVSRNLHKVTVNDGGGVLRVITAGEGALPHEFLEGVEGVAGGFIYTIQEGDALLHNLHSRPQRLIDHIRNLHEEDALLKEESSIYDDIVFVDVVDTYRNVPAKLLNFYRWTVETTSFNLLLKTDDDCYIDLEAVFNRIVQKNLDGPNFWWGNFRLNWAVDRTGKWQELEYPSPAYPAFACGSGYVISKDIVKWLASNSGRLKTYQGEDVSMGIWMAAIGPKRYQDSLWLCEKTCETGMLSSPQYSPWELTELWKLKERCGDPCRCQAR

SEQ ID NO: 453 - DNA, 1734 bp, Homo sapiens
cggtgccacagggacgaggcctggagagcagtcgctcctagaaccggggcgcgaagggcacccccgcctccagcacgcgccctccgccctcccggcctcgctccccccggagtgggggcctcgccggcccctggtccccgtcactcagcaacgtcgggtcagccttcgccgggttagtggcgacgcggccgcgcgaattcgcacaggggcagtagaatgaaagagggcatgtctaataacagcaccactagcatctcccaagccaggaaagctgtggagcagctaaagatggaagcctgtatggacagggtcaaggtctcccaggcagctgcggacctcctggcctactgtgaagctcacgtgcgggaagatcctctcatcattccagtgcctgcatcagaaaacccctttcgcgagaagaagttcttttgtaccattctctaactccgtgtgtgatgaaaacgcctccttttctgaccttcaaagtcccctgtagagaccatgcatgctctaaaccttagggagtgagaccaacacccatccctgcccagccagagtggccggggcttgtcttatgtttccatctgttttcttcgtggcattcaatttcatttttttccttttcattttcatgttattttcattattggcaaagaaaatcaaaatgtttatagccaaataacaaatgtgccatgtaaaagtaagtctggacttaagagtttaaaatttttaaacatcagtttccaagtttatatcatattaatacatttcagtggataatttatttaaaaaaaaaaactatgcctaaatatcccttatttgcaatattcagtatcaaattagagcattttgaccaactgaaacatataacgttttcatctcctttcctggagaaagcagctgcagaggttctgtatttcctgcatttccatcatcctagtaaaaagacaacaacccacaggattggaatggttttcttttgttttttttttgttgttgttgttgttttgagatggagtctcgctctgtcacccaggctggagtgcaatggcgtgacctcagctcactgcgacctccacctcctgggttcaagcgattctcctgcctcagcctcctgagtagctgggatcataggcacgcgccaccacacccagctaattttttgtatttttagtaaagacggggtttcaccatgttggtcaggctggtctcaaactcctgacctcgtgatccacccgcctcggcctcccaaagcgctgggattacaggcgtgagccaccacacccggccgtggaatggttttcttagcatatcctcctggggccgtggcgcccaggctgtgggccgtggtggatgtcccttgtttcagtggtcctacaaaggtagatggtgggcggacaccgaagtcaacttgactgtaaaagtaccccataccgttgacgcgctgtggcagacctgtgggtgcggtctcccctctccaaatgccacctcttcctgctccctcctcttttggctcctactcagtagttccattgtgggctgcagtaatataaggacctgttctggacacagcactgggcccgctggggttttagtagggcagccccttccctgcaggagtgaggcatggtgacagcagtcccctatgtgcccccaagtcatctgagcattggtgtgcattaaggtactcaatcttccaacaataaataccataagtgcaaaaaaaaaaaaaaa

SEQ ID NO: 454 - protein, 75 aa, Homo sapiens
MKEGMSNNSTTSISQARKAVEQLKMEACMDRVKVSQAAADLLAYCEAHVREDPLIIPVPASENPFREKKFFCTIL

SEQ ID NO: 455 - DNA, 6644 bp, Homo sapiens
atgcattcgattcgcacggtggagattaaagtccccgagatagaggaaacgtttttcgcgcccaggttcagcgaggagccgcgcgggggcagagggggcggcggcggcgggcggggagccaggcccgagctgcgttctgcgcagccattggtgggcgccgcgctctgcactgagcatgttcgcgccccgccggcccctagccgcagccgcagccgcagcgacggcagccacgggagccgccgcgcattatgcaaagcggcggcagatgcgagcggggccagccgggcgcgcgtcggcctcccctcccagcggctccccccgccgccgcctgactctcccgggagactccctaggcccggacctggggccgaggagggccgggatggcctgagtgcccgcggcgcggcggcgcagcagcgggattgcaccatggggaaccaggatgggaagctgaagaggagcgcaggtgatgctttgcacgaaggcggcggtggcgccgaggatgcgctggggcccagggatgtggaagccacaaagaaggggagcgggggcaagaaggcgctaggcaagcacggcaaggggggagggggcggcggcggcggcggggagtcgggcaagaagaagagcaagtccgactccagagcctcggtgttttccaacctgcggatcaggaagaatctgtccaaggggaaaggcgccggcggctcccgcgaagatgtactggattcccaggccctgcagaccggggagctggacagcgctcactccctgctcaccaagactccagacctcagcctctcggcggacgaggccggcctgtcggataccgagtgtgcggacccttttgaggtgaccggtccagggggtcctgggcctgccgaggctagggtcgggggccggccgatcgccgaggatgtggaaactgcagcaggggcgcaggatggacaaaggaccagctcgggctcggacacggacatctatagcttccattcggctacggagcaagaggatttgctttcagacatccagcaggcgatccgcctgcagcagcagcagcagcagcagctccagctccagctccagcaacagcagcagcagcagcagctccagggcgccgaggagcctgcagcgccccccactgccgtctcccctcagcccggggccttcctgggcctggaccggttcctgctggggccgagcggcggggctggggaggccccgggcagtccggacaccgagcaggcgctgtccgcgctctccgacctgcccgagagcctggccgccgagccccgggagccccagcaaccgccgtcccccggcggcctcccggtctccgaggcgcccagtctcccggcagcgcaacccgcggccaaagactcgccctcctccacggctttcccatttcccgaggccgggccgggggaggaagcggccggagcccccgtgcgaggggctggggacacggatgaggagggtgaggaggatgcttttgaggatgcgccccggggctctccgggggaggagtgggccccggaggtgggagaggacgccccgcagaggctgggggaagagccggaggaggaggcgcaaggacctgacgcccccgcggccgcttccctgcccggcagccccgcgcctagccagcgctgtttcaagccctacccgctcatcaccccctgctacatcaagaccaccacccggcagctcagctcgcccaatcactccccgtctcagtcccctaatcagagccccaggatcaagaggcggccggaaccctccctgagccgagggtccagaactgccctggcctccgtagccgccccggccaagaagcaccgggccgacggcggccttgcggccggcctgagccgctcggctgactggacggaggagctaggcgcccgcacgccccgggtgggaggctccgcgcacctgctggagcgcggggtggcgagtgacagcggcggtggggtgtccccagcactggccgccaaggcgtctggggcccccgcggctgcggatggcttccagaacgtgttcacagggcgaacgctgttggagaagctgttcagccagcaggagaacgggcctccagaagaagcagagaagttttgctcccggatcattgccatgggtcttctccttccttttagtgattgcttcagggaaccgtgtaatcagaatgcccagacgaatgcagcttcgtttgatcaagatcaactttatacctgggctgcagttagtcaacccacacactcattggactattcagaagggcagtttcctaggcgagttccatccatggggccaccatccaaacctcccgatgaggaacacaggctcgaggatgctgaaacagaatctcaatctgctgtttcagaaactccccaaaaacgctcagatgctgtccagaaggaagttgttgacatgaagtctgagggacaggccactgtaattcagcagctggaacagactattgaggatctgagaaccaaaatagctgaactagagaggcagtatcctgccctggacacagaggtggccagtggtcatcaagggcttgagaatggagtgacagcctcaggcgatgtctgtctcgaagctctcaggttagaagaaaaggaagtacggcatcataggattttagaggcgaaatcgatacagacttcccccacggaagagggcggggtgctgacactgcctcctgtggatgggctgccagggcgtcctccatgcccccctggggctgaaagtggacctcagacaaagttctgttcagagatttctttgattgtgtctccaaggcgaatatcagtccagctcgacagccatcagcccacacagagcatctcacagcctccaccacctccatcccttctgtggtctgctgggcaaggacagcctgggtcacagccgccccattctatttctaccgagtttcaaaccagccacgaacactctgtttcctctgcctttaaaaacagctgtaacatcccatctccaccacctctgccttgcacagagtcctccagctccatgcctggcctgggcatggtgcctcccccacctccccctctccctggcatgacagtgcctactctgcccagtacagccattccccaacctcctcctctgcagggtacagaaatgctgccaccccctccccctcctcttcccggagcgggcatacctcctccgccgcctctacccggagcaggcatactccctctgccccctctacccggagcgggaatacctcctccgccccctctacccggagcggcaataccccctccgccccctcttcccggggcaggcataccccttcctccccctcttcccggagcaggaatacctcctccaccccctctacccggagcgggcataccccctcctcccccacttcccggagcgggcataccccctccgcccccacttcccggagcgggcataccccctcctccccctcttcccggagcgggcatacctcctccaccccctctacccggagcgggcataccccctccgcccccacttcccggagcgggcataccccctccgcccccacttcccggagcgggcataccccctcctccccctcttcccggagcgggcatacctcctccaccccctctacccggagcgggcataccccctccgcccccacttcccggagcgggcatacccccacctccccctctacccggagcgggcataccccctccgccccctctacccggagtgggcatacctcctccgccccctctacccggagcgggcataccccctcctccccctctacccggagcgggcataccccctcctccccctcttcccggagcgggcatacctcctccaccccctctacccagagtgggcataccccctccgcccccacttcccggagcgggcatacccccacctccccctctacccggagcgggcataccccctccgccccctctacctggagtgggaatacctcctccgccccctctacctggagtgggaatacctcctccgccccctctacctggtgctgggattcccccacctcctcccttgccaggtatggggattccacctgctccagctcccccactccctccacctgggacaggaatcccaccgccccctctgcttcctgtatcaggccctccactcctcccacaagttgggagtagcactttaccaaccccacaggtgtgtggatttcttcctcctccattgccaagtggcttgtttggattagggatgaatcaggacaaagggagtaggaagcagcccatagagccttgtcgaccaatgaagcctctttactggaccaggattcaactacatagtaaaagagactccagtacttcacttatttgggaaaaaattgaagagccatccatagattgtcatgaatttgaggaattattttctaaaactgctgtaaaggagagaaagaaacctatctctgatactatctcaaagacgaaggctaaacaagttgtcaagttattaagcaacaaaagatcacaagcagttggaatactaatgtctagccttcatttagatatgaaagacatacaacatgctgttgtgaacttggataattctgtggttgacctggagacccttcaagctctctatgagaatagagcacagtcagacgaactcgaaaaaatagaaaagcatggccgatcttccaaagacaaggaaaatgccaagtctctggacaaacctgaacagttcctttatgaactgtcactaatccccaacttttcagagcgagtcttttgcatcctgttccagtccacattttcagaaagcatttgctcaattcgtcgcaaactggaattactacagaaattgtgtgagacattaaaaaatggcccaggggttatgcaggttctaggtttggttcttgcctttggcaactacatgaatggaggaaataagactcgaggacaggcagatggctttggattagacattcttccaaaactgaaagatgtcaagagcagtgacaatagcagaagccttttgtcatatattgtttcgtattatctccgaaattttgatgaggatgctggaaaagaacagtgcctctttccactgccagaaccccaggacctttttcaggcctcacagatgaagtttgaagattttcaaaaagatctcagaaaactgaagaaagacttgaaagcctgtgaagttgaagcagggaaagtataccaggtctcctcaaaagagcatatgcagcctttcaaggaaaacatggaacaatttattattcaagccaaaattgaccaagaggcagaggaaaattcactgacagagactcataaatgctttttggagaccacggcatatttcttcatgaaaccaaaacttggagagaaggaggtgtccccaaatgctttcttcagtatctggcatgaattcagctctgactttaaagacttctggaagaaagagaacaaacttcttctacaagagagagtaaaagaagccgaagaggtgtgtagacagaagaaaggaaaatcactttataaaataaaaccaagacatgactctggaattaaagcaaagataagcatgaaaacttgaacaatgaaaagcagaatgaaaatgagtcattgcaacgactttcacaaaattcagctgacctgagagtgggagggaaactaccgtcattctgctcatgtttcttcttgacctcttgcataatctttttgttttctagacagttcactaattgttgaattttactgtatattcatataaaaatgcaaacgtactagaccagtggagaatttgacaccttttctttttgtaaaagtttatggtattataccgatagaccaaaacagcatgtgtaagaggcagtatctgcactaattctcaacatgctaaacattaactacaattcactgttgtgagaatattcctcgtcacagcaaaaacactttcctttctactgacaaccagtcctccacatcacagcatttagacatatgggtaaaatgttatttctagtgaattgtttgtatcagtttcatgtctaagtataaattttctattttaaaatttaagaaccgtttataatcagtgctttcccaactcttgggttgctctccataactatgtatttgtgaaagaaaatggtcattttttttactgaagtcatataatgacttgggtcagctcgtaatgcattgtgatggttttgtatgagctgggtgtttttttccattacttttaatgatcttcgttgcaagttatagttgtggataaaggggagaatttattgctcttgcaaaccaattatggaaagcaacttaagaaaaccaatgttctaaatcataattgtttgtatttatgtaaagtatggtctcttactttttagtttgtagtttaagtgcaaagaaacagtagtggttttttttctattgttttgtagtcttcctgtccccttcagtccctccagtgtgtatattaccattctccaatgaaataatagggcatttaacaaagatcgctatgtgcaatactgtatttagtgtttctatttcaatttttctaggatgttaatttatatgaaaataaaatgaataataaaagaataaagatacttgcaaaagaaaaaaaaaaaa

SEQ ID NO: 456 - protein, 1865 aa, Homo sapiens
MHSIRTVEIKVPEIEETFFAPRFSEEPRGGRGGGGGGRGARPELRSAQPLVGAALCTEHVRAPPAPSRSRSRSDGSHGSRRALCKAAADASGASRARVGLPSQRLPPPPPDSPGRLPRPGPGAEEGRDGLSARGAAAQQRDCTMGNQDGKLKRSAGDALHEGGGGAEDALGPRDVEATKKGSGGKKALGKHGKGGGGGGGGGESGKKKSKSDSRASVFSNLRIRKNLSKGKGAGGSREDVLDSQALQTGELDSAHSLLTKTPDLSLSADEAGLSDTECADPFEVTGPGGPGPAEARVGGRPIAEDVETAAGAQDGQRTSSGSDTDIYSFHSATEQEDLLSDIQQAIRLQQQQQQQLQLQLQQQQQQQQLQGAEEPAAPPTAVSPQPGAFLGLDRFLLGPSGGAGEAPGSPDTEQALSALSDLPESLAAEPREPQQPPSPGGLPVSEAPSLPAAQPAAKDSPSSTAFPFPEAGPGEEAAGAPVRGAGDTDEEGEEDAFEDAPRGSPGEEWAPEVGEDAPQRLGEEPEEEAQGPDAPAAASLPGSPAPSQRCFKPYPLITPCYIKTTTRQLSSPNHSPSQSPNQSPRIKRRPEPSLSRGSRTALASVAAPAKKHRADGGLAAGLSRSADWTEELGARTPRVGGSAHLLERGVASDSGGGVSPALAAKASGAPAAADGFQNVFTGRTLLEKLFSQQENGPPEEAEKFCSRIIAMGLLLPFSDCFREPCNQNAQTNAASFDQDQLYTWAAVSQPTHSLDYSEGQFPRRVPSMGPPSKPPDEEHRLEDAETESQSAVSETPQKRSDAVQKEVVDMKSEGQATVIQQLEQTIEDLRTKIAELERQYPALDTEVASGHQGLENGVTASGDVCLEALRLEEKEVRHHRILEAKSIQTSPTEEGGVLTLPPVDGLPGRPPCPPGAESGPQTKFCSEISLIVSPRRISVQLDSHQPTQSISQPPPPPSLLWSAGQGQPGSQPPHSISTEFQTSHEHSVSSAFKNSCNIPSPPPLPCTESSSSMPGLGMVPPPPPPLPGMTVPTLPSTAIPQPPPLQGTEMLPPPPPPLPGAGIPPPPPLPGAGILPLPPLPGAGIPPPPPLPGAAIPPPPPLPGAGIPLPPPLPGAGIPPPPPLPGAGIPPPPPLPGAGIPPPPPLPGAGIPPPPPLPGAGIPPPPPLPGAGIPPPPPLPGAGIPPPPPLPGAGIPPPPPLPGAGIPPPPPLPGAGIPPPPPLPGAGIPPPPPLPGAGIPPPPPLPGVGIPPPPPLPGAGIPPPPPLPGAGIPPPPPLPGAGIPPPPPLPRVGIPPPPPLPGAGIPPPPPLPGAGIPPPPPLPGVGIPPPPPLPGVGIPPPPPLPGAGIPPPPPLPGMGIPPAPAPPLPPPGTGIPPPPLLPVSGPPLLPQVGSSTLPTPQVCGFLPPPLPSGLFGLGMNQDKGSRKQPIEPCRPMKPLYWTRIQLHSKRDSSTSLIWEKIEEPSIDCHEFEELFSKTAVKERKKPISDTISKTKAKQVVKLLSNKRSQAVGILMSSLHLDMKDIQHAVVNLDNSVVDLETLQALYENRAQSDELEKIEKHGRSSKDKENAKSLDKPEQFLYELSLIPNFSERVFCILFQSTFSESICSIRRKLELLQKLCETLKNGPGVMQVLGLVLAFGNYMNGGNKTRGQADGFGLDILPKLKDVKSSDNSRSLLSYIVSYYLRNFDEDAGKEQCLFPLPEPQDLFQASQMKFEDFQKDLRKLKKDLKACEVEAGKVYQVSSKEHMQPFKENMEQFIIQAKIDQEAEENSLTETHKCFLETTAYFFMKPKLGEKEVSPNAFFSIWHEFSSDFKDFWKKENKLLLQERVKEAEEVCRQKKGKSLYKIKPRHDSGIKAKISMKT

SEQ ID NO: 457 - DNA, 4199 bp, Homo sapiens
aggattcagagctaagtctccgggctcctttcacatctgcaggagcagccagcctgggaccgcgcggcgcggggcgcgctctcgcctctcctgcaccctcagccggcgcgcttctcttatgggcgtctgctgcagtctggctgcggtcgaactgaaagcggcggcgggagaccaaacttagaccccgctgtggactagagaactcagagaaggcagagggagagggagagagagagagagaagggacccgaggaggaggcttccatcacgtcattgcaggatgttctggaagctttccctgtccttgttcctggtggcggtgctggtgaaggtggcggaagcccggaagaaccggccggcgggcgccatcccctcgccttacaaggacggcagcagcaacaactcggagagatggcagcaccagatcaaggaggtgctggcctccagccaggaggccctggtggtcaccgagcgcaagtacctcaagagtgactggtgcaagacgcagccgctgcggcagacggtgagcgaggagggctgccggagccgcaccatcctcaaccgcttctgctacggccagtgcaactccttctacatcccgcggcacgtgaagaaggaggaggagtccttccagtcctgcgccttctgcaagccccagcgcgtcacctccgtcctcgtggagctcgagtgccccggcctggacccacccttccgactcaagaaaatccagaaggtgaagcagtgccggtgcatgtccgtgaacctgagcgactcggacaagcagtgagcgccgggccggacgcagctcagccccgcgcgcgcccggccgctgggtggcgccgccgccgcctctgtccctgccctccgagcccactgtcacgctgcctggtgttccccctcagcagcaagcacttctcttagggctgacggtgtccttgtcacagacgtggatcgcaagtggagcttttgctgatgtgttcctgaccgaccccgggtcccacctgtgccccctaaaccaggcggtggatcaggcccgaaggaaaatgctggaaaaccaccaccgccacccagcagtcagagaggacctttcgaggtgatgcactgtaaatccggcattgatgtttccaccatgtggaaaagcaaggatttccctggccccgccctgcactccagctcgcccctttcccgcgcgaagtgaaggatgcgtcacttttctgagcggcccctcagacctctcctgctggtccctggacctctggctgggagcgctcattcttgtgactggcaggctgccctcggtcgctgctgtgatgaggatatgtgcaacctccataaatatgtcggtggacggggcgtctcctaataaacctgataccaagaagacaacttgagccacttggatcccgaagtgggcttcccgggaaacctcgagcagagcaggctacacaatcccccatcctcaagtccccaccgcctcttcttcctcactgtccccgccccctatttgtggactaaagatgaactctggtgtgcatgctattattgctgcaattagaatattatcacacacaaaggtctctatattaacgctggttttataagtgaccgtatattgtaaagagctgttaaaaagtattatagacctattcatgtattatttcacatgttttgactctggcttgcagcaccattcggagtaaggatgacagcaggcccagaaggtgtcttactcagaaaaaaaaatgcctggtcagcaattcactgtcatgcacctatttttagattgggcagggagatgggaggagtcgtgatttttactttgaatactatttcactgacgttactaagcattgcagcacaatgtagaaattggcttgggatggataggtatagggaagggcattcgttgggaaattgatgaccggaaactagaaagcccctataatgtggaatatgcatatgtggggtgaaaccgtatactactttcactgccatgacactaggcaaaaaatatttcctgttaaaagaaagagaaaaagagagggatattgaaaaatataaggagttgagtcgctttgtggtatagaagggagtaaggaataaaagatatagaatagtaatctagttgaactgttctgcacaaaacatgcttccttttcaaagaatagacttcaaaagggacgaacaaacattaggtcaccttttgtgtttataatgaattgttgacgtttccatgctgtggtctcttgatatacggaagtagacgtaacttattttccagcgaaattatatacttcttctgggctcctttgctcagttgccccaggaaggcttccctgtgagtaatgcttatggaatctgacaaatgtgaatgagctgccattggtgggaatcagtaaactttgaaaacctttcactgatgattccctggtaagtgctcctgtgaggggccacttccctagtatgtgagagagaccctctgcaagccgctgtggggacttagcttcctgatactaggtagtgatggtggatctagagacattcacttgaagagcaaggattggggtggggtgggttggtgaatctatctcaggccactgcactgcaaggtgcatttctgtcatttctgcaacaccatgagacctgagcaagaatgtgctgtggcagagggggtcttggtttcataaatgggtatatacagcctgaactcaggaggcagaaatcaaaagaaatccttgagggctggaacctgaggatagagcgaaaatggagagaagggtgttcaaggtcaggagtgatttttgcatttggtggaaaacctcaagtcagactcagtggcagaacatgcagcagaaaagctgtgaaggaaggaaatttacgtgattgtaatggaggctaggggtggattgggaggtgagtggaggagagtctctgaccagctgcagagccaacccctatcattttattaacatggaacccacacagataggggagggattaagctaagaacttacagaatgcaaacacgagcacactctcttcgaacccaattgtgggtgtagcaatgaaagcaatatgatatgctgcagtgtgaagctccttctggggttatcgtatgtacaaagtttaccttataatggctcaaattgtatttaatttttttgttttgtttataaatgaagaaaagctataagtataatgtaattattttataggtatactattaaattatagaacaaataaagataatctaggattatatgtgatcccggtgtgacgtgccataaaagtggaatttttgacttgttgcagtgagctgtgaagcagcactatgcgttcagagagtttttgttcaaccatggtgagttcaacctctagcttatgtcacatgatctcctttggggtctggaatcttctaagagaaatagaatcaggcatccaaggagcagaagtgatggaggtggccctcaatcctggtctttggaagcttccaagcctcttccacatcccctgccagctgaagacagagtattctcactgtgctggctgaaggagaaacactaaacaaggaaaccttgagaaactgcagcaatggaagtccactgttagtctctccgttagcaccagggacacacttgttctgagttttgttcattttcacatttactcctcatgagttccaacatttcttaatttaaatatttcttagtttatagcatctccatttttctattaattgacttaatctgccatttaagaaaactccgtaatcaataaaaaataaaatccacaatcaaactgcacatggttgatccactgtgtaggcttcaaaggaattaaactcaacttcctaggaaataattcatcttagtttattaaatgggacagaatatttcactgctaacgtattctaactcacttgtttttgaaattggccagatgatttttaagttataaagtcaatgaaaatgacttttgctattgtgtgaacaacttagaatgtatatattcccagaaggcttatttaatgattgacctatcaccactgattattaatgtctgcatgaatgataacaataagaccaagtcatcaataatgcaatgaaaattttttaagtgaaagcaagtttattaagaaagtaaaggaataaagaatgcctacttcataggcagagcagcctaaaaaaaaaaaaaaaaaa

SEQ ID NO: 458 - protein, 168 aa, Homo sapiens
MFWKLSLSLFLVAVLVKVAEARKNRPAGAIPSPYKDGSSNNSERWQHQIKEVLASSQEALVVTERKYLKSDWCKTQPLRQTVSEEGCRSRTILNRFCYGQCNSFYIPRHVKKEEESFQSCAFCKPQRVTSVLVELECPGLDPPFRLKKIQKVKQCRCMSVNLSDSDKQ

SEQ ID NO: 459 - DNA, 1913 bp, Homo sapiens
ccggaggacgcgctgctgcgagaccagccgcggcgtctttggcagtggtgggcgtgcttgcgggtccaggagggcccctctcccgcgaccgccgaccacgatgagagcgtgaagaccctctcgaaaggaagggctctgctctacacactggtgtctcctgcggaagggcagctgggcacgccttccagaccgagcaaaagttgaaaaatcagtaacccaagatgactaaccaaatcaatatgctgggcaggatgagacatcagtgtctgcctcagacagaagagcacacacaaaacatgacctctcactccaagcccagttacagcagaaagttttcatggagaaatggaatcacacttcaaatgatttcattttgttgggtctgcttcccccaaatcaaactggaatatttctcttgtgccttatcatcctcatattctttctggcctcggtgggtaactcggccatgattcacctcatccacgtggatcctcgtctccacacaccgatgtactttcttctcagccagctctcccttatggacctgatgtacatctccaccaccgtccccaagatggcgtacaacttcctgtccggccagaaaggcatctccttcctgggatgtggtgtgcaaagcttcttcttcctgaccatggcgtgttctgaaggcttactcctgacctccatggcctacgaccgttatttggccatctgccactctctctattatcctatccgcatgagtaaaatgatgtgtgtgaagatgattggaggctcttggacactggggtccatcaactccttggcacacacagtctttgcccttcatattccctactgcaggtctagggctattgaccatttcttctgcgatgtcccagccatgttgcttcttgcctgtacagatacttgggtctatgaatatatggtttttgtaagtacaagcctctttctccttttccctttcattggcatcacttcttcctgtggccgagtcctatttgctgtctatcatatgcactcaaaggaggggagaaaaaaggccttcaccaccatttcaacacatttaactgtagtgatcttttactatgcaccttttgtctacacctatcttcggcccaggaatctccgctcaccagctgaagacaagatcctggcagtcttctacaccatccttacccccatgctcaatcccattatctacagcctgaggaataaggaagtcctgggggctatgaggagagtgtttgggatattctctttcctgaaagaataatcatggccatccccactccctttgtatttcctctttccaagttgattccaacacgctagagcagggttgtccaatagaaatacaacataatttaaaattttctaataggtacatttaagcagtcaaataaatttaaataatatatttaattcaaaacaatgttataattaatattaatattaacaatattgatgttaattacatagcatactatttcaataaattatatgcaatatattatagtacatgtttgtacatatattactattaacgtgataatgtttattcttgtatattgacatagaatttcttcatgtaataacacaaatttgttaatgttgccttttactctgtttgcattctaagtcttcaaagtcttgtgtttgttttatagagtgcagtgcagcttggacaaaacacatttcaagtgcccagtagtcagtgtctatagtgttggacagcacattcttagagcatccccaatcaatagtttcagaagttatatatgcatgtgtatgtgcatgtatggtgtatacaaacatatttttgttatatacaatattgctgatgaactgaaaattaacaagtaaaatgcacatgctaaggtaaaaaaaaaaaaaaaaaaaaaaaaaaaaaa

SEQ ID NO: 460 - protein, 312 aa, Homo sapiens
MEKWNHTSNDFILLGLLPPNQTGIFLLCLIILIFFLASVGNSAMIHLIHVDPRLHTPMYFLLSQLSLMDLMYISTTVPKMAYNFLSGQKGISFLGCGVQSFFFLTMACSEGLLLTSMAYDRYLAICHSLYYPIRMSKMMCVKMIGGSWTLGSINSLAHTVFALHIPYCRSRAIDHFFCDVPAMLLLACTDTWVYEYMVFVSTSLFLLFPFIGITSSCGRVLFAVYHMHSKEGRKKAFTTISTHLTVVIFYYAPFVYTYLRPRNLRSPAEDKILAVFYTILTPMLNPIIYSLRNKEVLGAMRRVFGIFSFLKE

SEQ ID NO: 461 - DNA, 1008 bp, Homo sapiens
atgaacatttcagatgtcatctcctttgatattttggtttcagccatgaaaacaggaaatcaaagttttgggacagattttctacttgttggtcttttccaatatggctggataaactctcttctctttgtcgtcattgccaccctctttacagttgctctgacaggaaatatcatgctgatccacctcattcgactgaacaccagactccacactccaatgtactttctgctcagtcagctctccatcgttgacctcatgtacatctccaccacagtgcccaagatggcagtcagcttcctctcacagagtaagaccattagatttttgggctgtgagattcaaacgtatgtgttcttggcccttggtggaactgaagcccttctccttggttttatgtcttatgatcgctatgtagctatctgtcaccctttacattatcctatgcttatgagcaagaagatctgctgcctcatggttgcatgtgcatgggccagtggttctatcaatgctttcatacatacattgtatgtgtttcagcttccattctgtaggtctcggctcattaaccactttttctgtgaagttccagctctactatcattggtgtgtcaggacacctcccagtatgagtatacagtcctcctgagtggacttattatcttgctactaccattcctagccattctggcttcctatgctcgtgtgcttattgtggtattccagatgagctcaggaaaaggacaggcaaaagctgtttccacttgttcctcccacctgattgtggcaagcctgttctatgcaaccactctctttacctacacaaggccacactccttgcgttccccttcacgggataaggcggtggcagtattttacaccattgtcacacctctactgaacccatttatctacagcctgagaaataaggaagtgacgggggcagtgaggagactgttgggatattggatatgctgtagaaaatatgacttcagatctctgtattga

SEQ ID NO: 462 - protein, 335 aa, Homo sapiens
MNISDVISFDILVSAMKTGNQSFGTDFLLVGLFQYGWINSLLFVVIATLFTVALTGNIMLIHLIRLNTRLHTPMYFLLSQLSIVDLMYISTTVPKMAVSFLSQSKTIRFLGCEIQTYVFLALGGTEALLLGFMSYDRYVAICHPLHYPMLMSKKICCLMVACAWASGSINAFIHTLYVFQLPFCRSRLINHFFCEVPALLSLVCQDTSQYEYTVLLSGLIILLLPFLAILASYARVLIVVFQMSSGKGQAKAVSTCSSHLIVASLFYATTLFTYTRPHSLRSPSRDKAVAVFYTIVTPLLNPFIYSLRNKEVTGAVRRLLGYWICCRKYDFRSLY

SEQ ID NO: 463 - DNA, 925 bp, Homo sapiens
atggaaaattacaatcaaacatcaactgctttcatcttgttgggattgtcgccaccaccaaaaattggccatttcatcttcattctcattaatttcgttttcctaatggctctaattggaaacctatccatgattcttctcatcttcttggacatccatctccacacacccatgtatttcctacttagtcagctctccctcattgacctaaattatatttccaccattgttcctaagatggtttatgatttttctgtatggaaacaagtctatctccttcactgggtgtgggattcagagtttcttcttcctgactttagcaggtgcagaagcgctgctcctgacatcaatggcctatgatcgttatgtggctatttgctttcctctccactatcccatccgtatgagaaaaagagtgtgtgcactgatgataacaggatcttggatgataggctccatcaactcttgtgctcacacggtatatgcactccgtatcccatattgcaagtccagagccatcaatcattttttctgtgatgttccagctatgttgaccctagcctgcacggatacctgggtctatgagtgcacggtgtttttgagcaccaccatttttcttgtgtttcccttcatttgtattgcatgttcctatggccggattctccttgctgtctaccacatgcactctgcagaagggaggaagaaggcctattcgacctgcagcacccacctcactgtagtgactttctactatgcaccctttgcttatacctatctacgcccaagatccctgcgatctccgacagaggacaaggttctggctgtcttctacaccatcctcactccaatgctcaaccccatcatctacagcctgagaaacaaggaggtgatgggggccctgacacgagtgattcagaaaatcttt

SEQ ID NO: 464 - DNA, 1134 bp, Homo sapiens
tgggagtcttgtaatgcagccactgtggataaaagtgaattactgttcttaatttacccttttgtctcccttcaggatggattgtaggaattccccatggaaaattacaatcaaacatcaactgatttcatcttattggggctgttcccacaatcaagaattggccttttcgtattcaccctcatttttctcattttcctaatggctctaattggaaatctatccatgattcttctcatctttttggacatccatctccacacacctatgtatttcctacttagtcagctctccctcattgacctaaattacatctccaccattgttccaaagatggtttatgattttctgtatggaaacaagtctatctccttcactggatgtgggattcagagtttcttcttcttgactttagcagttgcagaagggctgctcctgacatcaatggcctatgatcgttatgtggccatttgctttcctctccactatcccatccgtataagcaaaagagtgtgtgtgatgatgataacaggatcttggatgataagctctatcaactcttgtgctcacacagtatatgcactctgtatcccatattgcaagtccagagccatcaatcattttttctgtgatgttccagctatgttgacgctagcctgcacagacacttgggtctatgagagcacagtgtttttgagcagcaccatctttcttgtgcttcctttcactggtattgcatgttcctatggccgggttctccttgctgtctaccgcatgcactctgcagaagggaggaagaaggcctattcaacctgtagcacccacctcactgtagtgtccttctactatgcaccctttgcttatacctatgtacgtccaagatccctgcgatctccaacagaggacaagattctggctgttttctacaccatcctcaccccaatgctcaaccccatcatctacagcctgagaaacaaggaggtgatgggggccctgacacaagtgattcagaaaatcttctcagtgaaaatgtagacatacgttctgtgttagagtcaaagcgctaggttcatatcaacttagtagtgtacagcagtgaagaaaaacattattacatgcccagtgtgtcaaaca

SEQ ID NO: 465 - protein, 312 aa, Homo sapiens
MENYNQTSTDFILLGLFPQSRIGLFVFTLIFLIFLMALIGNLSMILLIFLDIHLHTPMYFLLSQLSLIDLNYISTIVPKMVYDFLYGNKSISFTGCGIQSFFFLTLAVAEGLLLTSMAYDRYVAICFPLHYPIRISKRVCVMMITGSWMISSINSCAHTVYALCIPYCKSRAINHFFCDVPAMLTLACTDTWVYESTVFLSSTIFLVLPFTGIACSYGRVLLAVYRMHSAEGRKKAYSTCSTHLTVVSFYYAPFAYTYVRPRSLRSPTEDKILAVFYTILTPMLNPIIYSLRNKEVMGALTQVIQKIFSVKM

SEQ ID NO: 466 - DNA, 939 bp, Homo sapiens
atggaaaattacaatcaaacatcaactgatttcatcttattaggattcttcccaccatcaagaattggccttttcctcttcatcctcattgttttcattttcctaatggctctaattggaaacctatccatgattcttctcatcttcttggacacccatctccacacacccatgtatttcctacttagtcagctctccctcattgacctaaattacatctccaccattgttcctaagatggcatctgattttctgtctggtaacaagtctatctccttcactgggtgtgggattcagagtttcttcttctcggcattaggaggtgcagaagcactacttttggcatctatggcctatgatcgttacattgctatttgctttcctcttcactatcccatccgcatgagcaaaagaatgtgtgtgctgatgataacagggtcttggatcataggctcgatcaatgcttgtgctcacactgtatatgtactccatattccttattgccaatccagggccatcaatcatttcttctgtgatgtcccagcaatggtgactctggcctgcatggacacctgggtctatgagggcacagtgtttttgagcaccaccatctttctcgtgtttcccttcattgctatttcatgttcctatggccgggttctccttgctgtctaccacatgaaatctgcagaagggaggaagaaagcctacctgacctgcagcacccacctcactgtagtaactttctactatgcaccttttgtctacacttatctacgtccaagatccctgcgatctccaacagaggacaaggttctggctgtcttctacaccaccctcactccaatgctcaaccccatcatctatagcctgaggaacaaggaggtgatgggggccctgacacgagtgagtcagagaatctgctctgggaaaatgtag

SEQ ID NO: 467 - protein, 312 aa, Homo sapiens
MENYNQTSTDFILLGFFPPSRIGLFLFILIVFIFLMALIGNLSMILLIFLDTHLHTPMYFLLSQLSLIDLNYISTIVPKMASDFLSGNKSISFTGCGIQSFFFSALGGAEALLLASMAYDRYIAICFPLHYPIRMSKRMCVLMITGSWIIGSINACAHTVYVLHIPYCQSRAINHFFCDVPAMVTLACMDTWVYEGTVFLSTTIFLVFPFIAISCSYGRVLLAVYHMKSAEGRKKAYLTCSTHLTVVTFYYAPFVYTYLRPRSLRSPTEDKVLAVFYTTLTPMLNPIIYSLRNKEVMGALTRVSQRICSGKM

SEQ ID NO: 468 - DNA, 645 bp, Homo sapiens
atggacgtcaggctcatctgcaccaccgtacccaagatggccttcaactacttgtctggcagcaagtccatttctatggctggctgtgccacacaaattttcttctgtgtatcactgcttggctctgaatgctttctgttggctgttatgtcttatgactgctacattgccatttgccaccctctaagatacaccaatctcatgagacccaaaatttgtagacttatgactgccttctcctggatcctgggctctacagatggaatcatttatgctgtagccacattttccttctcctactgtgggtctcgggaaatagcccacttcttctgtgagttaccttccctactaatcctctcatgcaatgacacgtcaatatttgaaaaggttattttcatttgctctatagtaatgcttgttttccctgttgcaatcatcattgcttcctatgctggagttattctggctgtcattcacatgggatctggagagggtcgtcgcaaagctttcacgacctgttcctctcacctcatggtggtgggaatgttctatggagcaggtttgttcatgtacatacagcccacatctgatcgctccccaacgcaggacaagctggtgtctgtattctacaccatcctcactccc

SEQ ID NO: 469 - DNA, 939 bp, Homo sapiens
atggcatgggagaatcagaccttcaactctgacttcatcctcctgggaatcttcaatcacagccccacccacaccttcctcttctttctggtcctggccatcttttcagtggccttcatgggaaactctgtcatggttctcctcatctacctggacacccagctccacacccccatgtacttcctcctcagtcaactgttcctcatggacctcatgctcatctgctctaccgtacccaagatggccttcaactacttgtctggcagcaagtccatttctatggctggttgtgccacacaaattttcttctatgtatcactgcttggctccgaatgctttctgttggctgttatgtcttatgaccgctatattgccatttgccaccctctaagatacaccaatctcatgagacccaaaatttgtggacttatgactgccttctcctggatcctgggctctatggatgcaatcattgatgctgtagcgacattttccttctcctactgtgggtctcgggaaatagcccacttcttctgtgacttcccttccctactaatcctctcatgcaatgacacatcaatatttgaaaaggttcttttcatctgctgtatagtaatgattgtttttcctgttgcaatcatcatcgcttcctatgctcgagttattctggctgtcattcacatgggatctggagagggtcgtcgcaaagcttttactacctgttcctctcacctcatggtggtgggaatgtactatggagcaggtttgttcatgtacatacggcccacatctgatcgctcccctatgcaggacaagctggtgtctgtattctacaccatcctcactcccatgctgaatcccctcatctacagcctccgcaacaaggaggtgaccagagcactcaggaaagtgttaggaaagggcaagtgtggagagtga

SEQ ID NO: 470 - protein, 312 aa, Homo sapiens
MAWENQTFNSDFILLGIFNHSPTHTFLFFLVLAIFSVAFMGNSVMVLLIYLDTQLHTPMYFLLSQLFLMDLMLICSTVPKMAFNYLSGSKSISMAGCATQIFFYVSLLGSECFLLAVMSYDRYIAICHPLRYTNLMRPKICGLMTAFSWILGSMDAIIDAVATFSFSYCGSREIAHFFCDFPSLLILSCNDTSIFEKVLFICCIVMIVFPVAIIIASYARVILAVIHMGSGEGRRKAFTTCSSHLMVVGMYYGAGLFMYIRPTSDRSPMQDKLVSVFYTILTPMLNPLIYSLRNKEVTRALRKVLGKGKCGE

SEQ ID NO: 471 - DNA, 1044 bp, Homo sapiens
atggcatgggagaatcagaccttcaactccgacttcatcctccttggaatcttcaatcacagcccaccacacacgttcctcttctttctggtcctgggcatctttttagtggccttcatgggaaactctgtcatggttctcctcatctacctggacacccagctccacacccccatgtacttcctcctcagccaactgtccctcatggacctcatgctcatctgcaccaccgtacccaagatggccttcaactacctgtctggcagcaagtccatttctatggctggttgtgtcacacaaattttcttctatatatcactgtctggctctgaatgttttcttttggctgttatggcttatgaccgctatattgctatttgccaccctctaagatataccaatctcatgaatcctaaaatttgtggacttatggctaccttctcctggatcctgggctctacagatggaatcattgatgctgtagccacattttccttctccttttgtgggtctcgggaaatagcccacttcttctgtgaattcccttccctactaatcctctcatgcaatgacacatcaatatttgaagaggttattttcatctgctgtatagtaatgcttgttttccctgttgcaatcatcattgcttcctatgctcgagttattctggctgtcattcacatgggatctggagagggtcgttgcaaagctttcacgacctgttcctctcacctcatggtggtgggaatgtactatggagcagctttgttcatgtacatacggcccacatctgatcactccccaacgcaggacaagatggtgtctgtattctacaccatcctcactcccatgctgaatcccctcatctacagcctccgcaacaaggaggtgactagagcattcatgaagatcttaggaaagggcaagtctgagagtgagttacctcataaactttatgttttgctgtttgctaaattcttctttctaatatccatctttttctatgatgtcaaaatactagcattgattatgtacattgcctaa

SEQ ID NO: 472 - protein, 347 aa, Homo sapiens
MAWENQTFNSDFILLGIFNHSPPHTFLFFLVLGIFLVAFMGNSVMVLLIYLDTQLHTPMYFLLSQLSLMDLMLICTTVPKMAFNYLSGSKSISMAGCVTQIFFYISLSGSECFLLAVMAYDRYIAICHPLRYTNLMNPKICGLMATFSWILGSTDGIIDAVATFSFSFCGSREIAHFFCEFPSLLILSCNDTSIFEEVIFICCIVMLVFPVAIIIASYARVILAVIHMGSGEGRCKAFTTCSSHLMVVGMYYGAALFMYIRPTSDHSPTQDKMVSVFYTILTPMLNPLIYSLRNKEVTRAFMKILGKGKSESELPHKLYVLLFAKFFFLISIFFYDVKILALIMYIA

SEQ ID NO: 473 - DNA, 939 bp, Homo sapiens
atggcaagggagaattcgaccttcaactccgacttcatcctcctgggaatcttcaatcacagccccacccacaccttcctcttctttctggtcctggccatcttttcagtggccttcatgggaaactctgtcatggttctcctcatctacctggacacccagctccacacccccatgtacctcctcctcagccaactgtccctcatggacctcatgctcatctgcaccaccgtacccaagatggccttcaactacctgtctggcagcaagtccatttctatggctggttgtgccacacaaattttcttctatacatcactgcttggctctgagtgctttcttttggctgttatggcttatgaccgctacactgccatttgccaccctctaagatacaccaatctcatgagccctaaaatttgtggacttatgactgccttttcctggatcctgggctctacggatggaattattgatgttgtagcaacattttccttctcctactgtgggtctcgggaaatagcccacttcttctgtgacttcccctccctactaatcctctcatgcagtgacacatcaatatttgaaaagattcttttcatctgctgtatagtaatgattgttttccctgttgcaatcatcattgcttcctatgctcgagttatcctggctgtcattcacatgggatctggagagggtcgtcgcaaagcttttactacttgttcctctcacctcttggtggtgggaatgtactatggagcagctttgttcatgtacatacggcccacatctgatcgctccccaacacaggacaagatggtgtctgtattctacaccatcctcactcccatgttgaatcccctcatctacagcctccgcaacaaggaggtgaccagagcattcatgaagatcttaggaaagggcaagtctggagagtga

SEQ ID NO: 474 - protein, 312 aa, Homo sapiens
MARENSTFNSDFILLGIFNHSPTHTFLFFLVLAIFSVAFMGNSVMVLLIYLDTQLHTPMYLLLSQLSLMDLMLICTTVPKMAFNYLSGSKSISMAGCATQIFFYTSLLGSECFLLAVMAYDRYTAICHPLRYTNLMSPKICGLMTAFSWILGSTDGIIDVVATFSFSYCGSREIAHFFCDFPSLLILSCSDTSIFEKILFICCIVMIVFPVAIIIASYARVILAVIHMGSGEGRRKAFTTCSSHLLVVGMYYGAALFMYIRPTSDRSPTQDKMVSVFYTILTPMLNPLIYSLRNKEVTRAFMKILGKGKSGE

SEQ ID NO: 475 - DNA, 936 bp, Homo sapiens
atggtgtgggaaaaccagaccttcaactccatcttcatcctgctgggaatcttcaatcacagtcccacccacaccttccttttttctctggtcctgggcatcttctcactggcattgatggaaaatatttccatggttctcctcatctacatagagaaacagctccacacccccatgtacttcctcctcagtcaactgtcccttatggacctcatgctcatctgcaccactctacccaagatgatcttcagctacttgtctgggaagaaatctatctctctggcaggttgtggaactcagatattcttctatgtgtccctgcttggagctgaatgtttcttgttggctgtcatggcttatgaccgctatgtggctatatgtcaccctcttcagtacaccatcctcatgaatccgaaactctgtgtcttcatgactgttgcttcctggaccttggggtctcttgatgggatcatagtgcttgcagctgtcctgtcattttcttactgcagctctctggaaattcatcactttttctgtgatgttgctgcccttttacctctatcctgcacagaaacatctgcatttgaaagactacttgtcatttgttgtgtggtaatgctaatctttccagtttcagttatcatactttcctattcccatgtccttcgagccgtcatccacatgggctctggggaaagtcgtcgcaaggccttcactacctgctcctcccacctgtctgtggtcggactctactacggtgctgctatgttcatgtacatgagaccagcttctaaacatacgccagaccaggacaagatggtgtcggccttctacactattctcacccctatgctgaaccctctcatttatagcctccgcaacaaagaagtgttcagggcactacagaaggtactgaagaaaagaaagttaatatga

SEQ ID NO: 476 - protein, 311 aa, Homo sapiens
MVWENQTFNSIFILLGIFNHSPTHTFLFSLVLGIFSLALMENISMVLLIYIEKQLHTPMYFLLSQLSLMDLMLICTTLPKMIFSYLSGKKSISLAGCGTQIFFYVSLLGAECFLLAVMAYDRYVAICHPLQYTILMNPKLCVFMTVASWTLGSLDGIIVLAAVLSFSYCSSLEIHHFFCDVAALLPLSCTETSAFERLLVICCVVMLIFPVSVIILSYSHVLRAVIHMGSGESRRKAFTTCSSHLSVVGLYYGAAMFMYMRPASKHTPDQDKMVSAFYTILTPMLNPLIYSLRNKEVFRALQKVLKKRKLI

SEQ ID NO: 477 - DNA, 963 bp, Homo sapiens
atggagatgagaaatactaccccagattttattctcctaggactctttaaccacaccagagcccaccaagtcctcttcatgatggttctgagtatcgttttgacctccctgtttggcaattccctcatgattctcctgattcactgggaccaccggctccacacgcccatgtacttcctcctgagccaactttccctcatggacatgatgctggtttccaccactgtgcccaaaatggcggctgactacttgaccggaagtaaggccatctcccgcgctggctgtggtgtgcagatcttcttcctccccacactgggtggtggagagtgcttcctcttagcagccatggcctatgaccgctatgcggctgtctgccacccactccgatatcccactctcatgagctggcagctgtgcctgaggatgaccatgtcgtgttggctcctgggtgcagctgacgggctcctgcaggctgttgttaccctgagcttcccatattgtggtgcacacgagatcgatcacttcttctgcgagacccccgtgctggtgcgtttggcttgtgctgacacttcagtcttcgaaaacgccatgtacatctgctgtgtgttaatgctcctggtccccttttccctcatcctgtcctcctatggtctcatcctcgctgctgttctgcacatgcgctctacagaagcccgcaagaaggcctttgccacctgctcttcacatgtggctgtggtgggactcttttatggagctgccatttttacctatatgagacccaaatcccataggtccactaaccatgacaaggttgtgtcagccttctatactatgttcacccctttactaaaccccctcatctacagtgtgaagaacagtgaggtgaagggagccctgaaacggtggctggggacgtgtgtaaacataaaacaccagcaaaatgaggcccacaggtcaagatga

SEQ ID NO: 478 - protein, 320 aa, Homo sapiens
MEMRNTTPDFILLGLFNHTRAHQVLFMMVLSIVLTSLFGNSLMILLIHWDHRLHTPMYFLLSQLSLMDMMLVSTTVPKMAADYLTGSKAISRAGCGVQIFFLPTLGGGECFLLAAMAYDRYAAVCHPLRYPTLMSWQLCLRMTMSCWLLGAADGLLQAVVTLSFPYCGAHEIDHFFCETPVLVRLACADTSVFENAMYICCVLMLLVPFSLILSSYGLILAAVLHMRSTEARKKAFATCSSHVAVVGLFYGAAIFTYMRPKSHRSTNHDKVVSAFYTMFTPLLNPLIYSVKNSEVKGALKRWLGTCVNIKHQQNEAHRSR

SEQ ID NO: 479 - DNA, 963 bp, Homo sapiens
atggagatgagaaatactaccccagattttattctcctaggactctttaaccacaccagagcccaccaagtcctcttcatgatgcttctggccaccgttttgacctccctgtttagcaatgccctcatgattctcctgattcactgggaccaccggctccacaggcccatgtacttcctcctgagccaactttccctcatggacatgatgctggtttccaccactgtgcccaaaatggcggctgactacttgaccggaaataaggccatctcccgcgctggctgtggtgtgcagatcttcttcctccccacactgggtggtggagagtgcttcctcttagcagccatggcctatgaccgctatgcggctgtctgccacccactccgatatcccactctcatgagctggcagctgtgcctgaggatgaccatgtcgtcctggctcctgggtgcagctgacggcctcctgcaggctgttgctaccctgagcttcccatattgcggtgcacacgagatcgatcacttcttctgcgaggcccccgtgttggtgcgtttggcttgtgctgacacttcagtcttcgaaaacgccatgtacatctgctgtgtgttaatgctcctggtccccttttccctcatcctgtcctcctatggtctcatcctcgctgctgttctgctcatgcgctctacagaagcccgcaagaaggcctttgccacctgctcttcacatgtggctgtggtgggactcttttatggagctggcatttttacctatatgagacccaaatcccacaggtccactaaccacgataaggttgtgtcagccttctatactatgttcacccctttactaaatcccctcatctacagtgtgaggaacagtgaggtcaaggaagccctgaaacggtggctggggacgtgtgtaaacctaaaacaccagcaaaatgaggcccacaggtcaagatga

SEQ ID NO: 480 - protein, 320 aa, Homo sapiens
MEMRNTTPDFILLGLFNHTRAHQVLFMMLLATVLTSLFSNALMILLIHWDHRLHRPMYFLLSQLSLMDMMLVSTTVPKMAADYLTGNKAISRAGCGVQIFFLPTLGGGECFLLAAMAYDRYAAVCHPLRYPTLMSWQLCLRMTMSSWLLGAADGLLQAVATLSFPYCGAHEIDHFFCEAPVLVRLACADTSVFENAMYICCVLMLLVPFSLILSSYGLILAAVLLMRSTEARKKAFATCSSHVAVVGLFYGAGIFTYMRPKSHRSTNHDKVVSAFYTMFTPLLNPLIYSVRNSEVKEALKRWLGTCVNLKHQQNEAHRSR

SEQ ID NO: 481 - DNA, 939 bp, Homo sapiens
atggcatgggagaatcagaccttcaactctgacttcctcctcctgggaatcttcaatcatagccccacccacaccttcctcttctttctggtcctggccatcttttcagtggccttcatgggaaactccatcatggttctcctcatctacctggatacccagctccacacccccatgtacttcctcctcagccaactgtccctcatggacctcatgctcatctgcaccactgtacccaagatggccttcaactacttgtctggcagcaagtccatttctatggctggctgtgccacacaaattttcttctatatatcattgcttggctccgaatgctttctgttggctgttatgtcttatgaccgctacactgccatttgccaccctctaagatacaccaatctcatgagacccaaaatttgtggacttatgactgccttctcctggatcctgggctctacagatggaatcattgatgctgtagcgacattttccttctcctactgtgggtctcgggaaatagcccacttctgctgtgacttcccttccctactaatcctctcatgcaatgacacatcaatatttgaagaggttattttcatctgctgtatagtaatgcttgttttccctgttgcaatcatcatcacttcctatgctcgagttattctggctgtcattcacatgggatctggagagggacgtcgcaaagcttttactacttgttcctctcacctcatggtggtgggaatgtactatggagcaggtttgttcatgtgcattcagcccacatctcatcattctcctatgcaggacaagatggtgtctgtattctacaccatcgtcactcccatgctgaatcctctcatttatagcctccgcaacaaggaagtgaccagagcattaatgaaaatcttaggaaagggcaagtctggagattga

SEQ ID NO: 482 - protein, 312 aa, Homo sapiens
MAWENQTFNSDFLLLGIFNHSPTHTFLFFLVLAIFSVAFMGNSIMVLLIYLDTQLHTPMYFLLSQLSLMDLMLICTTVPKMAFNYLSGSKSISMAGCATQIFFYISLLGSECFLLAVMSYDRYTAICHPLRYTNLMRPKICGLMTAFSWILGSTDGIIDAVATFSFSYCGSREIAHFCCDFPSLLILSCNDTSIFEEVIFICCIVMLVFPVAIIITSYARVILAVIHMGSGEGRRKAFTTCSSHLMVVGMYYGAGLFMCIQPTSHHSPMQDKMVSVFYTIVTPMLNPLIYSLRNKEVTRALMKILGKGKSGD

SEQ ID NO: 483 - DNA, 1609 bp, Homo sapiens
acatctcgcggcgaggaggagaggccggaagggcgccccagccccaaggctcctgccccgcctgggcctccggctttcgtttccccgcaacgcttcgctttcgtttcccgctggcgcctggctccctccgggtttcgtttcccgccggcgcctggctcccgccaggtttcgtttccgaggcggggccgagggcggcgtcgctgaggcgcccatggccttcgcccgccggctcctgcgcgggccactgtcggggccgctgctcgggcggcgcggggtctgcgctggggccatggctccgccgcgccgcttcgtcctggagcttcccgactgcaccctggctcacttcgccctaggcgccgacgcccccggcgacgcagacgcccccgacccccgcctggcggcgctgctggggcccccggagcgcagctactcgctgtgcgtgcccgtgaccccggacgccggctgcggggcccgggtccgggcggcgcggctgcaccagcgcctgctgcaccagctgcgccgcggccccttccagcggtgccagctgctcaggctgctctgctactgcccgggcggccaggccggcggcgcacagcaaggcttcctgctgcgcgaccccctggatgaccctgacacccggcaagcgctgctcgagctgctgggcgcctgccaggaggcaccacgcccgcacttgggcgagttcgaggccgacccgcgcggccagctgtggcagcgcctctgggaggtgcaagacggcaggcggctgcaggtgggctgcgcacaggtcgtgcccgtcccggagcccccgctgcacccggtggtgccagacttgcccagttccgtggtcttcccggaccgggaagccgcccgggccgttttggaggagtgtacctcctttattcctgaagcccgggcagtgcttgacctggtcgaccagtgcccaaaacagatccagaaaggaaagttccaggttgttgccatcgaaggactggatgccacgggtaaaaccacggtgacccagtcagtggcagattcacttaaggctgtcccccagcccatcaccctgtgtaccagtggccagaggacctgctcaaacctgaccttatcctgctgctcactgtgagtcctgaggagaggttgcagaggctgcagggccggggcatggagaagaccagggaagaagcagaacttgaggccaacagtgtgtttcgtcaaaaggtagaaatgtcctaccagcggatggagaatcctggctgccatgtggttgatgccagcccctccagagaaaaggtcctgcagacggtcccagctgggaggaaccttataccatccttctctccacctgctcggcagtgaagtttgtgggactggaatcttggattcatcacactcgagtcaaggcctggaatgacccctgacatcccagaagaacatctcagatatcagtgtgaaaagtctggggatttcaaactgaaaatccaaaagataagtaaatgagtgggaactctctgttcagttcaatcccacccttccttaccagatactaaagtcatttctacctttcctcttgagatttgctgttagatattagaacttctctttgtcacat

SEQ ID NO: 484 - protein, 303 aa, Homo sapiens
MAFARRLLRGPLSGPLLGRRGVCAGAMAPPRRFVLELPDCTLAHFALGADAPGDADAPDPRLAALLGPPERSYSLCVPVTPDAGCGARVRAARLHQRLLHQLRRGPFQRCQLLRLLCYCPGGQAGGAQQGFLLRDPLDDPDTRQALLELLGACQEAPRPHLGEFEADPRGQLWQRLWEVQDGRRLQVGCAQVVPVPEPPLHPVVPDLPSSVVFPDREAARAVLEECTSFIPEARAVLDLVDQCPKQIQKGKFQVVAIEGLDATGKTTVTQSVADSLKAVPQPITLCTSGQRTCSNLTLSCCSL

SEQ ID NO: 485 - DNA, 3512 bp, Homo sapiens
aactcagctgagtgttagtcaaagaaggtgtgtcctgctccccaatgacaggttgctcagagactgctgatttccatccctatataaagagagtccctggcatacagagactgctctgctccaggcatctgccacaatgtgggtgcttacacctgctgcttttgctgggaagctcttgagtgtgttcaggcaacctctgagctctctgtggaggagcctggtcccgctgttctgctggctgagggcaaccttctggctgctagctaccaagaggagaaagcagcagctggtcctgagagggccagatgagaccaaagaggaggaagaggaccctcctctgcccaccaccccaaccagcgtcaactatcacttcactcgccagtgcaactacaaatgcggcttctgtttccacacagccaaaacatcctttgtgctgccccttgaggaagcaaagagaggattgcttttgcttaaggaagctggtatggagaagatcaacttttcaggtggagagccatttcttcaagaccggggagaatacctgggcaagttggtgaggttctgcaaagtagagttgcggctgcccagcgtgagcatcgtgagcaatggaagcctgatccgggagaggtggttccagaattatggtgagtatttggacattctcgctatctcctgtgacagctttgacgaggaagtcaatgtccttattggccgtggccaaggaaagaagaaccatgtggaaaaccttcaaaagctgaggaggtggtgtagggattatagagtcgctttcaagataaattctgtcattaatcgtttcaacgtggaagaggacatgacggaacagatcaaagcactaaaccctgtccgctggaaagtgttccagtgcctcttaattgagggtgagaattgtggagaagatgctctaagagaagcagaaagatttgttattggtgatgaagaatttgaaagattcttggagcgccacaaagaagtgtcctgcttggtgcctgaatctaaccagaagatgaaagactcctaccttattctggatgaatatatgcgctttctgaactgtagaaagggacggaaggacccttccaagtccatcctggatgttggtgtagaagaagctataaaattcagtggatttgatgaaaagatgtttctgaagcgaggaggaaaatacatatggagtaaggctgatctgaagctggattggtagagcggaaagtggaacgagacttcaacacaccagtgggaaaactcctagagtaactgccattgtctgcaatactatcccgttggtatttcccagtggctgaaaacctgattttctgctgcacgtggcatctgattacctgtggtcactgaacacacgaataacttggatagcaaatcctgagacaatggaaaaccattaactttacttcattggcttataaccttgttgttattgaaacagcacttctgtttttgagtttgttttagctaaaaagaaggaatacacacaggaataatgaccccaaaaatgcttagataaggcccctatacacaggacctgacatttagctcaatgatgcgtttgtaagaaataagctctagtgatatctgtgggggcaaaatttaatttggatttgattttttaaaacaatgtttactgcgatttctatatttccattttgaaactatttcttgttccaggtttgttcatttgacagagtcagtattttttgccaaatatccagataaccagttttcacatctgagacattacaaagtatctgcctcaattatttctgctggttataatgcttttttttttttgcctttatgccattgcagtcttgtactttttactgtgatgtacagaaatagtcaacagatgtttccaagaacatatgatatgataatcctaccaattttcaagaagtctctagaaagagataacacatggaaagacggtgtggtgcagcccagcccacggtggctgttccatgaatgctggctacctatgtgtgtggtacctgttgtgtccctttctcttcaaagatcctgagcaaaacaaagatacgctttccatttgatgatggagttgacatggaggcagtgcttgcattgctttgttcgcctatcatctggccacatgaggctgtcaagcaaaagaataggagtgtagttgagtagctggttggccctacatctctgagaagtgacggcacactgggttggcataagatatcctaaaatcacgctggaaccttgggcaaggaagaatgtgagcaagagtagagagagtgcctggatttcatgtcagtgaagccaagtcaccatatcatatttttgaatgaactctgagtcagttgaaatagggtaccatctaggtcagtttaagaagagtcagctcagagaaagcaagcataagggaaaatgtcacgtaaactagatcagggaacaaaatcctctccttgtggaaatatcccatgcagtttgttgatacaacttagtatcttattgcctaaaaaaaaatttcttatcattgtttcaaaaaagcaaaatcatggaaaatttttgttgtccaggcaaataaaaggtcattttaatttagctgcaatttcagtgttcctcactaggtggcatttaaatgtcgcctgatgtcattaagcaccatccaaaaagtctgcttcataatctattttcaagacttggtgattctgaaagttttggtttttgtgactttgtttctcaggaaaaaaaatattcctacttaaattttaagtctataattcaatttaaatatgtgtgtgtctcatccaggataggataggttgtcttctattttccattttacctatttactttttttgtaagaaaagagaaaaatgaattctaaagatgttccccatgggttttgattgtgtctaagctatgatgaccttcatataatcagcataaacataaaacaaattttttacttaacatgagtgcactttactaatcctcatggcacagtggctcacgcctgtaatcccagcacttgggaggacaatgtgggtggatcacgaggtcaggagttcgagaacagcctggccaacatggtgaaaccccgtctccactaaaaatacaaaaattagccaggcatggtggcgtacacttgtaattccagctactcaagaggctgaggcaggaggattgcttgaaccctgaaggcagaggttacagagccaagatagcgccactgcactccagcctggatgacagagcaagactccgtctcaaaaaaaaaaaaaaaaaaaagcaagagagttcaactaagaaaggtcacatatgtgaaagcccaaggacactgtttgatatacagcaggtattcaatcagtgttatttgaaaccaaatctgaatttgaagtttgaatcttctgagttggaatgaatttttttctagctgagggaaactgtatttttctttccccaaagaggaatgtaatgtaaagtgaaataaaactataagctatgtt

SEQ ID NO: 486 - protein, 361 aa, Homo sapiens
MWVLTPAAFAGKLLSVFRQPLSSLWRSLVPLFCWLRATFWLLATKRRKQQLVLRGPDETKEEEEDPPLPTTPTSVNYHFTRQCNYKCGFCFHTAKTSFVLPLEEAKRGLLLLKEAGMEKINFSGGEPFLQDRGEYLGKLVRFCKVELRLPSVSIVSNGSLIRERWFQNYGEYLDILAISCDSFDEEVNVLIGRGQGKKNHVENLQKLRRWCRDYRVAFKINSVINRFNVEEDMTEQIKALNPVRWKVFQCLLIEGENCGEDALREAERFVIGDEEFERFLERHKEVSCLVPESNQKMKDSYLILDEYMRFLNCRKGRKDPSKSILDVGVEEAIKFSGFDEKMFLKRGGKYIWSKADLKLDW

SEQ ID NO: 487 - DNA, 5755 bp, Homo sapiens
gagcctcccgcgtgcccggcctctgtgcgcgctcgcgccccgcccgcgcagccgcttctccccgcgcgggctctcggcaggcgggaggcggcagggctggcattgcagtgcgggccgtgcgggctgcgcgggcgcggggaggcgcgggcggcaaactgcgggcacccggcaccccgcagccagtaccgggcggaggcgtcagagccgcgcaccgcggacgagcaggcccaggcatccagtaccctgctgactctgacatgcccccagcctcccccagctctgcagggagccctggtgccagagaccttctcccatttctccctatgggtgcctgacctgagggcagagacatctgagtgtgtataagcacagcaggacaccaggacctggcctgaagacatttcctctcctcccctctggatttctcagagactgttctgcgatgaccacaacaaggtaccggcccacctgggacctggccctcgacccgctggtgtcttgcaagctctgtcttggggagtacccagtggagcagatgacaaccatagcccagtgccaatgcatcttctgtactctgtgcctgaaacagtatgttgagctcttgatcaaagaaggattagaaaccgcaattagctgcccagatgctgcctgccctaaacagggccacctacaggagaacgagattgagtgcatggttgcagctgaaattatgcaaagatataaaaagctacaatttgaaagagaggtgctgtttgatccctgtcggacttggtgcccggcgtccacctgccaagctgtgtgtcagctccaggacgtggggctgcagaccccccagccagtgcagtgcaaagcctgccgtatggaattctgctccacctgcaaagccagctggcaccctggccagggctgcccggagaccatgccgatcaccttcctccccggggagaccagtgctgctttcaaaatggaagaagatgacgcgcccatcaagcgctgccccaagtgcaaagtctacatcgagcgagacgaaggctgcgcgcagatgatgtgcaagaactgcaagcacgccttctgctggtactgcctggagtctctggacgatgatttccttctgatacactacgataagggaccctgccggaacaagctgggccactcccgggcatctgtgatctggcatcggacacaggttgtgggcatttttgcaggatttgggctgctgctcttggtggcctcacctttcctactcctggccactccctttgtactttgctgcaagtgcaagtgcagtaaaggtgacgacgacccgttacccacctagaggaagcgcgatgctggaacacatccctgcctccgggaagtgtggctctcccccaaccctccccaccgtccccccttcactaaacatctttcttgccttatgtgccccattgagcttcacagtgtcaggctggacgccgtgatttcagggacctatgtcacaatgttcgctgaggccccaggtgtggtggggaggggaggcaggtgtgggtagcgcacatccccacagatcaatctctgcagatgacagggaggtgctgtgagaagtgcaccaggcagctttctctctgtggtagactaggcatgtctggggatggcctaagagactttctgctccttggcttctagatggcaccatgttgtcagagaagtcttttaaggactgccactctcttcagacagaatctgattattccagcttgagagaagcactctgtttatgacaactgtttttattactaatggcatttagtaaaatcctttttagaaggtattttttttccaactgagtagtgaaaatcaacaaggtgcatataaaccatcctatgcctttcttgaaatgtgcattttaagaagttatagttaaacgacttttcaggagatttagaaagccttatgcactctttgtgtttttcttgaaacttgctgtagtaactttttgaacgctgtaagctgtgtactgttataagtgtgcttcctatattgttgcatttccttgataatattgacgtgtttaaaggaacatctcatctccattagatttgccttttgttgttttctctctttggtgattcagctcagctcatgggcctcatcccttctctcccaggtagcagaaaacgctttttattgtattcaatcccactgctttgctcggcaatggttctcctccgaattgctgccgtctggcctctggcctcagtcttcagatagacagtaagaagaaagcagcctcattgatccgcagatgtaggggcctcttggcagaggctggaggactctgggggctagggaagagcctgccagattttcacatttttaaaatgttctagtcattttgagaaatcatatatcttacacagttccaagtcctgttgctaaccgttttgctcttgttggggaaaagaacctcccatttcacttcgttttaacgtggggattttaccacttgatcttttacagggctgtctgtgaccatttccatggcagcaggatgcagggattaataaggacacatacacattattccaccaattgactttgaaaagtggagaaagtgtattctttaaagagaatttacttctaaaagccacaggtgcttttacaaagcaaactgcattgaatttaaaacttctaaaaataacaggcaaatattgtagctatattacagtgggattttaaaaatcttgttaaacattctataaagaagtaaaacaaaatccttttatctcagttatttgcccatcacaagcacatttttaaaatgttgctttgtgtgtgtttgacttctgcatttgagtatcagtctcaggtcctagtttactttccctggttggaaatttatttcttatttcctaacattgaattcgttagaaaaaacagcgtcacctcactcttcacctgtcatgttgattttccttatgaacccgaagccatttagaaaatccctgtgtgtcaaaattacattcaaaaagctctccttgtaattgcaagtttagtaactcagtaagaacatgcctgcgactccctttctggatggaacctgggctgtggctctctgtcgtttgtggtgctgtgatggtgtctactgttagaatagcttttctggaggtgggtggcaactccacgcgggagtcattggctgggcttgagccctcagcctgtgatatgtggatgcagctgtccagccactgccctttaacatgcccagcacacatgggaggcctgtggccctgtgtccagtggcccacaggacacgcctccaccatatgctcatccttcctgcctgaaattgctgctgcccatcgcatgagcccacacagtagcacccccgtccttaggatgagagtcagagcctttggaaaggctgcatccccagggctagagctcagatgaccttatttctagagggacaggctgttctgttggaagagtctctggcccagtcatgcacatctgtagccccagccatccttgtgccttcacctctgatgtgtttcacaagcacgtagttcaacccagatagggaccacagagattctggggccagccaggggcagtcaaattggcacctactggctctgactttttgtatgaagcatgcctcagtttcctcattttgatctagatataaaattaaaattgtccatttcctatataaataccagcaagatcactctgagatacataaactcgcatttccttctgttttagtaaggagtgccagacttatctttgatgggaatacagtatgaaccctgcttgatgtaaaatggaaatagcacacaggcagatggccctgggtttggactttgatcttgccatcattccccagtaaaacctggggagttctgcgttgagtggacggacttattcctgtgaagcggcataatttgtctccattgaaaaatggcattcactcttacagatggtgttcactgcaagccccagaagcatatggcatgtgttcactaagaggcctttaatcctggggagtaaggggcgaaggcccttagacaaccatggctgctgtactgccgcccagggtgggtggccagtgaggactggccttagcccagtggacctgtggcttctctgaggcccttgagtaactgaccacatttggaggttttgctggaaatgcctgacctctcagtctggctctgctgtgtagtccatagcccagccagatgagcttgcagcctcataggaggtcagcaccttgcaaagatgcagtcaccatagatgtccacgtagcagagactgacttaggatctgagataaagcatcggattgcaggaataactgtccaaattagttcttcctcctcaactcataggagtagctgtggacagaggaaccaacatctgccacctctggcattttctttctttttttttctttttgagacggagtttcgcttttgtcccccaagctggagtacaatgacaggatctcggctcactgcaagctctgcctcccgggttcaagcgattctcctgcctcagcctcccaagtagctgggattacaggcacccaccacctcacccagctaatttttgtattttcagtagagacggggtttcaccatgttggccaggctactctcaaactcctgacctcaggtgatctgcccacctcggcttcccaaagtgctggaattacaggcctgagccaccccacccggcctattttcttaaaggggaacaaatgatcttgacaacatattattccataaaaccagtttagggcacaggccagttcctgattagaacacaggacctgtgggagggactatcagagatgcaaaaattacttcaagatgagtttattgttttcatttgtattgcaaaagttagaagtcattttacaaattaaaaaaacatttttttcttggtagtctttaaaaattaggggattgaaaggatccaggatgggctttgtgtgtgtgtctcagattctcatttattagtgagcacacctgtgtatatatataaatcacaaggagatcatcaagggaaaacattttgcatgtgtaaagcttcatgaagttctctttaaaaaataccaaagcttgtttatttctgataattaacctaagcccttatgaaaataaacaaaatgaagggattatgacaggtattaccaaaaacaccaaaaggaacaaaggggcctgcgttaaaacctaattgctaatgcttcacaactaggagagcatgccgtcttgatgtttaaaaaacccagggtctccacccttcctttgatttgtgcaattctgtcttccacagttccggagccttcagtgaggggtagctacatgccccatgcctgccctttctttccttctttgctcactttactatgggtgtattttaatcttgtataaaaatatgcatgaatgagtcatgcacatgtatacgttatgtatttgacaagtggtggtgaaacaaaatcaaaacagatttgatttgtgtttttgaaatgtcagtacattttgtgccactaacactgtgatgtataaaagagctgtttgaatgccttttaatgttgtgttttgtactctggaatcatatggaaaaagtttgatttgtaatttcaatacatattttaaatgtattgtgtcttacgtagtttgtccccccctttagcagggattcctttttaaagctattttggctggaatacaggtgacttttgtaaaaaaaaaaaaaaaaaa

SEQ ID NO: 488 - protein, 292 aa, Homo sapiens
MTTTRYRPTWDLALDPLVSCKLCLGEYPVEQMTTIAQCQCIFCTLCLKQYVELLIKEGLETAISCPDAACPKQGHLQENEIECMVAAEIMQRYKKLQFEREVLFDPCRTWCPASTCQAVCQLQDVGLQTPQPVQCKACRMEFCSTCKASWHPGQGCPETMPITFLPGETSAAFKMEEDDAPIKRCPKCKVYIERDEGCAQMMCKNCKHAFCWYCLESLDDDFLLIHYDKGPCRNKLGHSRASVIWHRTQVVGIFAGFGLLLLVASPFLLLATPFVLCCKCKCSKGDDDPLPT

SEQ ID NO: 489 - DNA, 5063 bp, Homo sapiens
atggggctgcggccaggcattttcctcctggagctgctgctgcttctggggcaagggacccctcagatccatacctctcctagaaagagtacattggaagggcagctatggccagagaccctgaagaattctccattcccatgcaacccaaataaattaggagtgaatatgccttctaaatcagttcactctctgaagccttctgatattaaatttgtggcagccattggcaatctggaaattcctccagacccagggacgggcgatctggagaagcaagactggactgaaaggccacagcaggtgtgcatgggagtgatgacagtcctttcagacatcatcagatatttcagtccttctgttccaatgcctgtgtgccacactggaaagagagtcataccccacgatggtgctgaagacttgtggattcaggctcaagaactggtgagaaacatgaaagagaacctgcaacttgactttcaatttgactggaagctcatcaatgtgttcttcagtaatgcaagccagtgttacctgtgcccctctgctcaacagaatgggcttgcggcgggcggcgtggatgagctgatgggggtgctggactacctgcagcaggaggtccccagagcatttgtaaacctggtggacctctctgaggttgcagaggtctctcgtcagtatcacggcacttggctcagccctgcaccagagccctgtaattgctcagaggagaccacccggctggccaaggtggtgatgcagtggtcttatcaggaagcctggaacagcctcctggcctccagcaggtacagtgagcaggagtccttcaccgtggttttccagcctttcttctatgagaccaccccatctctacactcggaggacccccgactccaggattctaccacgctggcctggcatctctggaataggatgatggagccagcaggagagaaagatgagccattgagtgtaaaacacgggaggccaatgaagtgtccctctcaggagagcccctatctgttcagctacagaaacagcaactacctgaccagactgcagaaaccccaagacaagcttgaggtaagagaaggagcggaaatcagatgtcctgacaaagacccctccgatacggttcccacctcagttcataggctgaagccggctgacatcaacgtaattggagccctgggtgactctctcacggcaggcaatggggccgggtccacacctgggaacgtcttggacgtcttgactcagtaccgaggcctgtcctggagcgtcggcggagatgagaacatcggcaccgttaccaccctggcgaacatcctccgggaattcaacccttccctgaagggcttctctgttggcactgggaaagaaaccagtcctaatgccttcttaaaccaggctgtggcaggaggccgagctgaggatctacctgtccaggccaggaggctggtggacctgatgaagaatgacacgaggatacactttcaggaagactggaagataataaccctgtttataggcggcaatgacctctgtgatttctgcaatgatctggtccactattctccccagaacttcacagacaacattggaaaggccctggacatcctccatgctgaggttcctcgggcatttgtgaacctggtgacggtgcttgagatcgtcaacctgagggagctgtaccaggagaaaaaagtctactgcccaaggatgatcctcaggtctctgtgtccctgtgtcctgaagtttgatgataactcaacagaacttgctaccctcatcgaattcaacaagaagtttcaggagaagacccaccaactgattgagagtgggcgatatgacacaagggaagattttactgtggttgtgcagccgttctttgaaaacgtggacatgccaaagacctcggaaggattgcctgacaactctttcttcgctcctgactgtttccacttcagcagcaagtctcactcccgagcagccagtgctctctggaacaatatgctggagcctgttggccagaagacgactcgtcataagtttgaaaacaagatcaatatcacatgtccgaaccaggtccagccgtttctgaggacctacaagaacagcatgcagggtcatgggacctggctgccatgcagggacagagccccttctgccttgcaccctacctcagtgcatgccctgagacctgcagacatccaagttgtggctgctctgggggattctctgaccgctggcaatggaattggctccaaaccagacgacctccccgatgtcaccacacagtatcggggactgtcatacagtgcaggaggggacggctccctggagaatgtgaccaccttacctaatatccttcgggagtttaacagaaacctcacaggctacgccgtgggcacgggtgatgccaatgacacgaatgcattcctcaatcaagctgttcccggagcaaaggctgaggatcttatgagccaagtccaaactctgatgcagaagatgaaagatgatcatagagtaaatttccatgaagactggaaggtcatcacagtgctgatcggaggcagcgatttatgtgactactgcacagattcgaatctgtattctgcagccaactttgttgaccatctccgcaatgccttggacgtcctgcatagagaggtgcccagagtcctggtcaacctcgtggacttcctgaaccccactatcatgcggcaggtgttcctgggaaacccagacaagtgcccagtgcagcaggccagcgttttgtgtaactgcgttctgaccctgcgggagaactcccaagagctagccaggctggaggccttcagccgagcctaccggagcagcatgcgcgagctggtggggtcaggccgctatgacacgcaggaggacttctctgtggtgctgcagcccttcttccagaacatccagctccctgtcctggcggatgggctcccagatacgtccttctttgccccagactgcatccacccaaatcagaaattccactcccagctggccagagccctttggaccaatatgcttgaaccacttggaagcaaaacagagaccctggacctgagagcagagatgcccatcacctgtcccactcagaatgagcccttcctgagaacccctcggaatagtaactacacgtaccccatcaagccagccattgagaactggggcagtgacttcctgtgtacagagtggaaggcttccaatagtgttccaacctctgtccaccagctccgaccagcagacatcaaagtggtggccgccctgggtgactctctgactacagcagtgggagctcgaccaaacaactccagtgacctacccacatcttggaggggactctcttggagcattggaggggatgggaacttggagactcacaccacactgcccaacattctgaagaagttcaacccttacctccttggcttctctaccagcacctgggaggggacagcaggactaaatgtggcagcggaaggggccagagctagggacatgccagcccaggcctgggacctggtagagcgaatgaaaaacagccccgacatcaacctggagaaagactggaagctggtcacactcttcattggggtcaacgacttgtgtcattactgtgagaatccggaggcccacttggccacggaatatgttcagcacatccaacaggccctggacatcctctctgaggagctcccaagggctttcgtcaacgtggtggaggtcatggagctggctagcctgtaccagggccaaggcgggaaatgtgccatgctggcagctcagaacaactgcacttgcctcagacactcgcaaagctccctggagaagcaagaactgaagaaagtgaactggaacctccagcatggcatctccagtttctcctactggcaccaatacacacagcgtgaggactttgcggttgtggtgcagcctttcttccaaaacacactcaccccactgaacgagagaggggacactgacctcaccttcttctccgaggactgttttcacttctcagaccgcgggcatgccgagatggccatcgcactctggaacaacatgctggaaccagtgggccgcaagactacctccaacaacttcacccacagccgagccaaactcaagtgcccctctcctgagagcccttacctctacaccctgcggaacagccgattgctcccagaccaggctgaagaagcccccgaggtgctctactgggctgtcccagtggcagcgggagtcggccttgtggtgggcatcatcgggacagtggtctggaggtgcaggagaggtggccggagggaagatcctccaatgagcctgcgcactgtggccctctaggcccgggggtgggtcctcaccctaaactccctatagccactctcttcaccgccctctgccccagccactcccggccaccaggacatgcttcaatgcctggtgccataggaagcccaggggacagtcacaacttcttggggcctgggcttcttccaggcctatgctcctggaatggatacatttaaataaagtccaaagctattttattcctgggtttgcctgcgtgaagcactcaccttccatctcttgtgcagcccaggtgtgggagctgccactttttgtggcctgcctccagcagggctgcccaagccacgaccaaccagagcccaaactgcctgccaccacgagcatatcctcaagtcaccaaacccactatttcaaaggcagaaaaaatgctggtcaccaggtggtggctggaattttggagctggctggttgccattcagtccaatccaacacatacctattaagcaactgttttgtatccaggacaatgcgaagcactgaggtgcctcctaggctgtgcatgtcgcagcctggcagagaggtcaaactccttcaataaccaagaagccacgtgatgatgtgtaactactagggcatcagtaggtaaatgtgtctgattgttttaaagaatagaaagggttcttcggggaaagtttcttgggggagagcaaccttcacat

SEQ ID NO: 490 - protein, 1458 aa, Homo sapiens
MGLRPGIFLLELLLLLGQGTPQIHTSPRKSTLEGQLWPETLKNSPFPCNPNKLGVNMPSKSVHSLKPSDIKFVAAIGNLEIPPDPGTGDLEKQDWTERPQQVCMGVMTVLSDIIRYFSPSVPMPVCHTGKRVIPHDGAEDLWIQAQELVRNMKENLQLDFQFDWKLINVFFSNASQCYLCPSAQQNGLAAGGVDELMGVLDYLQQEVPRAFVNLVDLSEVAEVSRQYHGTWLSPAPEPCNCSEETTRLAKVVMQWSYQEAWNSLLASSRYSEQESFTVVFQPFFYETTPSLHSEDPRLQDSTTLAWHLWNRMMEPAGEKDEPLSVKHGRPMKCPSQESPYLFSYRNSNYLTRLQKPQDKLEVREGAEIRCPDKDPSDTVPTSVHRLKPADINVIGALGDSLTAGNGAGSTPGNVLDVLTQYRGLSWSVGGDENIGTVTTLANILREFNPSLKGFSVGTGKETSPNAFLNQAVAGGRAEDLPVQARRLVDLMKNDTRIHFQEDWKIITLFIGGNDLCDFCNDLVHYSPQNFTDNIGKALDILHAEVPRAFVNLVTVLEIVNLRELYQEKKVYCPRMILRSLCPCVLKFDDNSTELATLIEFNKKFQEKTHQLIESGRYDTREDFTVVVQPFFENVDMPKTSEGLPDNSFFAPDCFHFSSKSHSRAASALWNNMLEPVGQKTTRHKFENKINITCPNQVQPFLRTYKNSMQGHGTWLPCRDRAPSALHPTSVHALRPADIQVVAALGDSLTAGNGIGSKPDDLPDVTTQYRGLSYSAGGDGSLENVTTLPNILREFNRNLTGYAVGTGDANDTNAFLNQAVPGAKAEDLMSQVQTLMQKMKDDHRVNFHEDWKVITVLIGGSDLCDYCTDSNLYSAANFVDHLRNALDVLHREVPRVLVNLVDFLNPTIMRQVFLGNPDKCPVQQASVLCNCVLTLRENSQELARLEAFSRAYRSSMRELVGSGRYDTQEDFSVVLQPFFQNIQLPVLADGLPDTSFFAPDCIHPNQKFHSQLARALWTNMLEPLGSKTETLDLRAEMPITCPTQNEPFLRTPRNSNYTYPIKPAIENWGSDFLCTEWKASNSVPTSVHQLRPADIKVVAALGDSLTTAVGARPNNSSDLPTSWRGLSWSIGGDGNLETHTTLPNILKKFNPYLLGFSTSTWEGTAGLNVAAEGARARDMPAQAWDLVERMKNSPDINLEKDWKLVTLFIGVNDLCHYCENPEAHLATEYVQHIQQALDILSEELPRAFVNVVEVMELASLYQGQGGKCAMLAAQNNCTCLRHSQSSLEKQELKKVNWNLQHGISSFSYWHQYTQREDFAVVVQPFFQNTLTPLNERGDTDLTFFSEDCFHFSDRGHAEMAIALWNNMLEPVGRKTTSNNFTHSRAKLKCPSPESPYLYTLRNSRLLPDQAEEAPEVLYWAVPVAAGVGLVVGIIGTVVWRCRRGGRREDPPMSLRTVAL

SEQ ID NO: 491 - DNA, 4991 bp, Homo sapiens
ggcggcgcgcaagggacgtgcggagtgagtggcgctgcgggtggggccgtcggcggcgctggtgagctttgcggagctgggcggtgccgaggaggaggaggtggcggcctgggtctgacgcggccctgttcgagggggcctctcttgtttatttatttattttccgtgggtgcctccgagtgtgcgcgcgctctcgctacccggcggggagggggtggggggagggcccgggaaaagggggagttggagccggggtcgaaacgccgcgtgacttgtaggtgagagaacgccgagccgtcgccgcagcctccgccgccgagaagcccttgttcccgctgctgggaaggagagtctgtgccgacaagatggcggacggggagctgaacgtggacagcctcatcacccggctgctggaggtacgaggatgtcgtccaggaaagattgtgcagatgactgaagcagaagttcgaggcttatgtatcaagtctcgggagatctttctcagccagcctattcttttggaattggaagcaccgctgaaaatttgtggagatattcatggacaatatacagatttactgagattatttgaatatggaggtttcccaccagaagccaactatcttttcttaggagattatgtggacagaggaaagcagtctttggaaaccatttgtttgctattggcttataaaatcaaatatccagagaacttctttctcttaagaggaaaccatgagtgtgctagcatcaatcgcatttatggattctatgatgaatgcaaacgaagatttaatattaaattgtggaagaccttcactgattgttttaactgtctgcctatagcagccattgtggatgagaagatcttctgttgtcatggaggattgtcaccagacctgcaatctatggagcagattcggagaattatgagacctactgatgtccctgatacaggtttgctctgtgatttgctatggtctgatccagataaggatgtgcaaggctggggagaaaatgatcgtggtgtttcctttacttttggagctgatgtagtcagtaaatttctgaatcgtcatgatttagatttgatttgtcgagctcatcaggtggtggaagatggatatgaattttttgctaaacgacagttggtaaccttattttcagccccaaattactgtggcgagtttgataatgctggtggaatgatgagtgtggatgaaactttgatgtgttcatttcagatattgaaaccatctgaaaagaaagctaaataccagtatggtggactgaattctggacgtcctgtcactccacctcgaacagctaatccgccgaagaaaaggtgaagaaaggaattctgtaaagaaaccatcagatttgttaaggacatacttcataatatataagtgtgcactgtaaaaccatccagccatttgacaccctttatgatgtcacacctttaacttaaggagacgggtaaaggatcttaaatttttttctaatagaaagatgtgctacactgtattgtaataagtatactctgttatagtcaacaaagttaaatccaaattcaaaattatccattaaagttacatcttcatgtatcacaatttttaaagttgaaaagcatcccagttaaactagatgtgatagttaaaccagatgaaagcatgatgatccatctgtgtaatgtggttttagtgttgcttggttgtttaattattttgagcttgttttgtttttgtttgttttcactagaataatggcaaatacttctaatttttttccctaaacatttttaaaagtgaaatatgggaagagctttacagacattcaccaactattattttcccttgtttatctacttagatatctgtttaatcttactaagaaaactttcgcctcattacattaaaaaggaattttagagattgattgttttaaaaaaaaatacgcacattgtccaatccagtgattttaatcatacagtttgactgggcaaactttacagctgatagtgaatattttgctttatacaggaattgacactgatttggatttgtgcactctaatttttaacttattgatgctctattgtgcagtagcatttcatttaagataaggctcatatagtattacccaactagttggtaatgtgattatgtggtaccttggctttaggttttcattcgcacggaacaccttttggcatgcttaacttcctggtaacaccttcacctgcattggttttctttttcttttttctttctttttttttttttttttttttttgagttgttgtttgtttttagatccacagtacatgagaatccttttttgacaagccttggaaagctgacactgtctctttttcctccctctatacgaaggatgtatttaaatgaatgctggtcagtgggacattttgtcaactatgggtattgggtgcttaactgtctaatattgccatgtgaatgttgtatacgattgtaaggcttatgtcactaaagatttttattctgattttttcataatcaaaggtcatatgatactgtatagacaagctttgtagtgaagtatagtagcaataatttctgtacctgatcaagtttattgcagcctttcttttcctatttcttttttttaagggttagtattaacaaatggcaatgagtagaaaagttaacatgaagattttagaaggagagaacttacaggacacagatttgtgattctttgactgtgacactattggatgtgattctaaaagcttttattgagcattgtcaaatttgtaagcttcatagggatggacatcatatctataatgcccttctatatgtgctaccatagatgtgacatttttgaccttaatatcgtctttgaaaatgttaaattgagaaacctgttaacttacattttatgaattggcacattgtattacttactgcaagagatatttcattttcagcacagtgcaaaagttctttaaaatgcatatgtctttttttctaattccgttttgttttaaagcacattttaaatgtagttttctcatttagtaaaagttgtctaattgatatgaagcctgactgattttttttttccttacagtgagacatttaagcacacattttattcacatagatactatgtccttgacatattgaaatgattcttttctgaaagtattcatgatctgcatatgatgtattaggttaggtcacaaaggttttatctgaggtgatttaaataacttcctgattggagtgtgtaagctgagcgatttctaataaaattttagttgtacacttttagtagtcatagtgaagcaggtctagaaaataagcctttggcagggaaaaagggcaatgttgattaatctcagtattaaaccacattaatctgtatcccattgtctggcttttgtaaattcatccaggtcaagactaagtatgttggttaataggaatccttttttttttttttaaagactaaatgtgaaaaaataatcactacttaagctaattaatattggtcattaaatttaaaggatggaaatttatcatgtttaaaaattattcaagcactcttaaaaccacttaaacagcctccagtcataaaaatgtgttctttacaaatatttgcttggcaacacgacttgaaataaataaaactttgtttcttaggagaaaatgattctgtaattccagtgtcactaatttatattgttctttcctctgatttttttcaggttagtgatttttttgtatacaatttaatccaaatgttatgacattcagaaatcatgaaacacagtagatatctgttataatgtggtgtatcacatggattataaagcaaagttatggtcgatttctattcttgaaagaatcaactacagtgaatcctttgcatttgaagccttaacatgcattgctttaattttgcccagggacaaattttaataatcagcaagactggtttgtgcaaagcgttgagtcatcaggtatttagagcctagccagctacccagtatccatgctgccatatcccttcattgtaaaaagtacctaaacattcgtgaaatgattttttttagctgaaaaatgctggcaagaagaattttaaagcttaaaataggtggtaaatttgaagtatgagtgtgttcacgagaaacataggcttttcaaaaaaatttttattcaaggcaaagcaaggaacatcttgagatatgtctcaagaatataaagatgtattattttaagccaaggagctgaaatatatctcagtttataaattcaggtatattctttttgtctccatggcaaccataacttttgaaccaaaaaaaattgtttttacatctttatgctgaaaatgtgtttagattaggaatatggtcgggctgaatttgctgttgctccctaaccaaatccacctcttgttttccttgtgagtccatggctaaatcaaagctgcccctgagaagagacttaatccaagcctgattgtactagtggcatcacttagaagtaggctttccctcttcctagtagatctcaatgttttataattccttaaaacagctgaaaattgggacaacatactttacgcaatgaacagtagttaaataggaaataaactagttccatataagtatacacctagagttttaattacctttataatgtttcttaaaagtgaaacttagatacaattgtgattggatacttagatactaagtgaaacttagtgtaacaattttgatctgttaaattggattttacatgtacatttgaatgccagaatttctaaataaatcccctggttaggaaattttaaaagtcaaagcttgttttcttcaaccactaccttctacattggttgacttagaccgtaagctttttaagtttctcattgtaatttaccttctcatgcagattgctgatgttttattaaaccttatttttacaaaaatgaaaaaa

SEQ ID NO: 492 - protein, 327 aa, Homo sapiens
MADGELNVDSLITRLLEVRGCRPGKIVQMTEAEVRGLCIKSREIFLSQPILLELEAPLKICGDIHGQYTDLLRLFEYGGFPPEANYLFLGDYVDRGKQSLETICLLLAYKIKYPENFFLLRGNHECASINRIYGFYDECKRRFNIKLWKTFTDCFNCLPIAAIVDEKIFCCHGGLSPDLQSMEQIRRIMRPTDVPDTGLLCDLLWSDPDKDVQGWGENDRGVSFTFGADVVSKFLNRHDLDLICRAHQVVEDGYEFFAKRQLVTLFSAPNYCGEFDNAGGMMSVDETLMCSFQILKPSEKKAKYQYGGLNSGRPVTPPRTANPPKKR

SEQ ID NO: 493 - DNA, 4786 bp, Homo sapiens
gctgcgtgacgcggcggcgcgcaagggacgtgcggagtgagtggcgctgcgggtggggccgtcggcggcgctggtgagagaacgccgagccgtcgccgcagcctccgccgccgagaagcccttgttcccgctgctgggaaggagagtctgtgccgacaagatggcggacggggagctgaacgtggacagcctcatcacccggctgctggaggtacgaggatgtcgtccaggaaagattgtgcagatgactgaagcagaagttcgaggcttatgtatcaagtctcgggagatctttctcagccagcctattcttttggaattggaagcaccgctgaaaatttgtggagatattcatggacaatatacagatttactgagattatttgaatatggaggtttcccaccagaagccaactatcttttcttaggagattatgtggacagaggaaagcagtctttggaaaccatttgtttgctattggcttataaaatcaaatatccagagaacttctttctcttaagaggaaaccatgagtgtgctagcatcaatcgcatttatggattctatgatgaatgcaaacgaagatttaatattaaattgtggaagaccttcactgattgttttaactgtctgcctatagcagccattgtggatgagaagatcttctgttgtcatggaggattgtcaccagacctgcaatctatggagcagattcggagaattatgagacctactgatgtccctgatacaggtttgctctgtgatttgctatggtctgatccagataaggatgtgcaaggctggggagaaaatgatcgtggtgtttcctttacttttggagctgatgtagtcagtaaatttctgaatcgtcatgatttagatttgatttgtcgagctcatcaggtggtggaagatggatatgaattttttgctaaacgacagttggtaaccttattttcagccccaaattactgtggcgagtttgataatgctggtggaatgatgagtgtggatgaaactttgatgtgttcatttcagatattgaaaccatctgaaaagaaagctaaataccagtatggtggactgaattctggacgtcctgtcactccacctcgaacagctaatccgccgaagaaaaggtgaagaaaggaattctgtaaagaaaccatcagatttgttaaggacatacttcataatatataagtgtgcactgtaaaaccatccagccatttgacaccctttatgatgtcacacctttaacttaaggagacgggtaaaggatcttaaatttttttctaatagaaagatgtgctacactgtattgtaataagtatactctgttatagtcaacaaagttaaatccaaattcaaaattatccattaaagttacatcttcatgtatcacaatttttaaagttgaaaagcatcccagttaaactagatgtgatagttaaaccagatgaaagcatgatgatccatctgtgtaatgtggttttagtgttgcttggttgtttaattattttgagcttgttttgtttttgtttgttttcactagaataatggcaaatacttctaatttttttccctaaacatttttaaaagtgaaatatgggaagagctttacagacattcaccaactattattttcccttgtttatctacttagatatctgtttaatcttactaagaaaactttcgcctcattacattaaaaaggaattttagagattgattgttttaaaaaaaaatacgcacattgtccaatccagtgattttaatcatacagtttgactgggcaaactttacagctgatagtgaatattttgctttatacaggaattgacactgatttggatttgtgcactctaatttttaacttattgatgctctattgtgcagtagcatttcatttaagataaggctcatatagtattacccaactagttggtaatgtgattatgtggtaccttggctttaggttttcattcgcacggaacaccttttggcatgcttaacttcctggtaacaccttcacctgcattggttttctttttcttttttctttctttttttttttttttttttttttgagttgttgtttgtttttagatccacagtacatgagaatccttttttgacaagccttggaaagctgacactgtctctttttcctccctctatacgaaggatgtatttaaatgaatgctggtcagtgggacattttgtcaactatgggtattgggtgcttaactgtctaatattgccatgtgaatgttgtatacgattgtaaggcttatgtcactaaagatttttattctgattttttcataatcaaaggtcatatgatactgtatagacaagctttgtagtgaagtatagtagcaataatttctgtacctgatcaagtttattgcagcctttcttttcctatttcttttttttaagggttagtattaacaaatggcaatgagtagaaaagttaacatgaagattttagaaggagagaacttacaggacacagatttgtgattctttgactgtgacactattggatgtgattctaaaagcttttattgagcattgtcaaatttgtaagcttcatagggatggacatcatatctataatgcccttctatatgtgctaccatagatgtgacatttttgaccttaatatcgtctttgaaaatgttaaattgagaaacctgttaacttacattttatgaattggcacattgtattacttactgcaagagatatttcattttcagcacagtgcaaaagttctttaaaatgcatatgtctttttttctaattccgttttgttttaaagcacattttaaatgtagttttctcatttagtaaaagttgtctaattgatatgaagcctgactgattttttttttccttacagtgagacatttaagcacacattttattcacatagatactatgtccttgacatattgaaatgattcttttctgaaagtattcatgatctgcatatgatgtattaggttaggtcacaaaggttttatctgaggtgatttaaataacttcctgattggagtgtgtaagctgagcgatttctaataaaattttagttgtacacttttagtagtcatagtgaagcaggtctagaaaataagcctttggcagggaaaaagggcaatgttgattaatctcagtattaaaccacattaatctgtatcccattgtctggcttttgtaaattcatccaggtcaagactaagtatgttggttaataggaatccttttttttttttttaaagactaaatgtgaaaaaataatcactacttaagctaattaatattggtcattaaatttaaaggatggaaatttatcatgtttaaaaattattcaagcactcttaaaaccacttaaacagcctccagtcataaaaatgtgttctttacaaatatttgcttggcaacacgacttgaaataaataaaactttgtttcttaggagaaaatgattctgtaattccagtgtcactaatttatattgttctttcctctgatttttttcaggttagtgatttttttgtatacaatttaatccaaatgttatgacattcagaaatcatgaaacacagtagatatctgttataatgtggtgtatcacatggattataaagcaaagttatggtcgatttctattcttgaaagaatcaactacagtgaatcctttgcatttgaagccttaacatgcattgctttaattttgcccagggacaaattttaataatcagcaagactggtttgtgcaaagcgttgagtcatcaggtatttagagcctagccagctacccagtatccatgctgccatatcccttcattgtaaaaagtacctaaacattcgtgaaatgattttttttagctgaaaaatgctggcaagaagaattttaaagcttaaaataggtggtaaatttgaagtatgagtgtgttcacgagaaacataggcttttcaaaaaaatttttattcaaggcaaagcaaggaacatcttgagatatgtctcaagaatataaagatgtattattttaagccaaggagctgaaatatatctcagtttataaattcaggtatattctttttgtctccatggcaaccataacttttgaaccaaaaaaaattgtttttacatctttatgctgaaaatgtgtttagattaggaatatggtcgggctgaatttgctgttgctccctaaccaaatccacctcttgttttccttgtgagtccatggctaaatcaaagctgcccctgagaagagacttaatccaagcctgattgtactagtggcatcacttagaagtaggctttccctcttcctagtagatctcaatgttttataattccttaaaacagctgaaaattgggacaacatactttacgcaatgaacagtagttaaataggaaataaactagttccatataagtatacacctagagttttaattacctttataatgtttcttaaaagtgaaacttagatacaattgtgattggatacttagatactaagtgaaacttagtgtaacaattttgatctgttaaattggattttacatgtacatttgaatgccagaatttctaaataaatcccctggttaggaaattttaaaagtcaaagcttgttttcttcaaccactaccttctacattggttgacttagaccgtaagctttttaagtttctcattgtaatttaccttctcatgcagattgctgatgttttattaaaccttatttttacaaaaatgaaaaaa

SEQ ID NO: 494 - protein, 327 aa, Homo sapiens; identical to SEQ ID NO: 492

SEQ ID NO: 495 - DNA, 4288 bp, Homo sapiens
gctgcgtgacgcggcggcgcgcaagggacgtgcggagtgagtggcgctgcgggtggggccgtcggcggcgctggtgagctttgcggagctgggcggtgccgaggaggaggaggtggcggcctgggtctgacgcggccctgttcgagggggcctctcttgtttatttatttattttccgtgggtgcctccgagtgtgcgcgcgctctcgctacccggcggggagggggtggggggagggcccgggaaaagggggagttggagccggggtcgaaacgccgcgtgacttgtaggtgagagaacgccgagccgtcgccgcagcctccgccgccgagaagcccttgttcccgctgctgggaaggagagtctgtgccgacaagatggcggacggggagctgaacgtggacagcctcatcacccggctgctggagcagccattgtggatgagaagatcttctgttgtcatggaggattgtcaccagacctgcaatctatggagcagattcggagaattatgagacctactgatgtccctgatacagatattgaaaccatctgaaaagaaagctaaataccagtatggtggactgaattctggacgtcctgtcactccacctcgaacagctaatccgccgaagaaaaggtgaagaaaggaattctgtaaagaaaccatcagatttgttaaggacatacttcataatatataagtgtgcactgtaaaaccatccagccatttgacaccctttatgatgtcacacctttaacttaaggagacgggtaaaggatcttaaatttttttctaatagaaagatgtgctacactgtattgtaataagtatactctgttatagtcaacaaagttaaatccaaattcaaaattatccattaaagttacatcttcatgtatcacaatttttaaagttgaaaagcatcccagttaaactagatgtgatagttaaaccagatgaaagcatgatgatccatctgtgtaatgtggttttagtgttgcttggttgtttaattattttgagcttgttttgtttttgtttgttttcactagaataatggcaaatacttctaatttttttccctaaacatttttaaaagtgaaatatgggaagagctttacagacattcaccaactattattttcccttgtttatctacttagatatctgtttaatcttactaagaaaactttcgcctcattacattaaaaaggaattttagagattgattgttttaaaaaaaaatacgcacattgtccaatccagtgattttaatcatacagtttgactgggcaaactttacagctgatagtgaatattttgctttatacaggaattgacactgatttggatttgtgcactctaatttttaacttattgatgctctattgtgcagtagcatttcatttaagataaggctcatatagtattacccaactagttggtaatgtgattatgtggtaccttggctttaggttttcattcgcacggaacaccttttggcatgcttaacttcctggtaacaccttcacctgcattggttttctttttcttttttctttctttttttttttttttttttttttgagttgttgtttgtttttagatccacagtacatgagaatccttttttgacaagccttggaaagctgacactgtctctttttcctccctctatacgaaggatgtatttaaatgaatgctggtcagtgggacattttgtcaactatgggtattgggtgcttaactgtctaatattgccatgtgaatgttgtatacgattgtaaggcttatgtcactaaagatttttattctgattttttcataatcaaaggtcatatgatactgtatagacaagctttgtagtgaagtatagtagcaataatttctgtacctgatcaagtttattgcagcctttcttttcctatttcttttttttaagggttagtattaacaaatggcaatgagtagaaaagttaacatgaagattttagaaggagagaacttacaggacacagatttgtgattctttgactgtgacactattggatgtgattctaaaagcttttattgagcattgtcaaatttgtaagcttcatagggatggacatcatatctataatgcccttctatatgtgctaccatagatgtgacatttttgaccttaatatcgtctttgaaaatgttaaattgagaaacctgttaacttacattttatgaattggcacattgtattacttactgcaagagatatttcattttcagcacagtgcaaaagttctttaaaatgcatatgtctttttttctaattccgttttgttttaaagcacattttaaatgtagttttctcatttagtaaaagttgtctaattgatatgaagcctgactgattttttttttccttacagtgagacatttaagcacacattttattcacatagatactatgtccttgacatattgaaatgattcttttctgaaagtattcatgatctgcatatgatgtattaggttaggtcacaaaggttttatctgaggtgatttaaataacttcctgattggagtgtgtaagctgagcgatttctaataaaattttagttgtacacttttagtagtcatagtgaagcaggtctagaaaataagcctttggcagggaaaaagggcaatgttgattaatctcagtattaaaccacattaatctgtatcccattgtctggcttttgtaaattcatccaggtcaagactaagtatgttggttaataggaatccttttttttttttttaaagactaaatgtgaaaaaataatcactacttaagctaattaatattggtcattaaatttaaaggatggaaatttatcatgtttaaaaattattcaagcactcttaaaaccacttaaacagcctccagtcataaaaatgtgttctttacaaatatttgcttggcaacacgacttgaaataaataaaactttgtttcttaggagaaaatgattctgtaattccagtgtcactaatttatattgttctttcctctgatttttttcaggttagtgatttttttgtatacaatttaatccaaatgttatgacattcagaaatcatgaaacacagtagatatctgttataatgtggtgtatcacatggattataaagcaaagttatggtcgatttctattcttgaaagaatcaactacagtgaatcctttgcatttgaagccttaacatgcattgctttaattttgcccagggacaaattttaataatcagcaagactggtttgtgcaaagcgttgagtcatcaggtatttagagcctagccagctacccagtatccatgctgccatatcccttcattgtaaaaagtacctaaacattcgtgaaatgattttttttagctgaaaaatgctggcaagaagaattttaaagcttaaaataggtggtaaatttgaagtatgagtgtgttcacgagaaacataggcttttcaaaaaaatttttattcaaggcaaagcaaggaacatcttgagatatgtctcaagaatataaagatgtattattttaagccaaggagctgaaatatatctcagtttataaattcaggtatattctttttgtctccatggcaaccataacttttgaaccaaaaaaaattgtttttacatctttatgctgaaaatgtgtttagattaggaatatggtcgggctgaatttgctgttgctccctaaccaaatccacctcttgttttccttgtgagtccatggctaaatcaaagctgcccctgagaagagacttaatccaagcctgattgtactagtggcatcacttagaagtaggctttccctcttcctagtagatctcaatgttttataattccttaaaacagctgaaaattgggacaacatactttacgcaatgaacagtagttaaataggaaataaactagttccatataagtatacacctagagttttaattacctttataatgtttcttaaaagtgaaacttagatacaattgtgattggatacttagatactaagtgaaacttagtgtaacaattttgatctgttaaattggattttacatgtacatttgaatgccagaatttctaaataaatcccctggttaggaaattttaaaagtcaaagcttgttttcttcaaccactaccttctacattggttgacttagaccgtaagctttttaagtttctcattgtaatttaccttctcatgcagattgctgatgttttattaaaccttatttttacaaaaatgaaaaaaaa

SEQ ID NO: 496 - protein, 45 aa, Homo sapiens
MADGELNVDSLITRLLEQPLWMRRSSVVMEDCHQTCNLWSRFGEL

SEQ ID NO: 497 - DNA, 5298 bp, Homo sapiens
atacagagcagcgagcactgaaggcttccctctttccttaaacctgtcgggttgtgggctctctcttttcccctcttgctcctttcttttctttttttctgtttttttaaaccttccaaggcaagttcatggatactaagctgatgtgtttgttgttctttttctccctgcctccgctcctagtgagtaaccacactggccgcatcaaggtggtctttactccgagcatctgtaaagtgacctgcaccaagggcagctgtcagaacagctgtgagaaggggaacaccaccactctcattagtgagaatggtcatgctgccgacaccctgacggccacgaacttccgagtggtaatttgccatcttccatgtatgaatggtggccagtgcagttcaagggacaaatgtcagtgccctccaaatttcacaggaaaactttgtcagatcccagtccatggtgccagcgtgcctaaactttatcagcattcccagcagccaggcaaggcgttggggacgcatgtcatccattcaacacataccttgcctctgaccgtgactagccagcaaggagtcaaagtgaaatttcctcctaacatagtcaatatccatgtgaaacatcctcctgaagcttccgtccagatacatcaggtttcaagaattgatggcccaacaggccagaagacaaaagaagctcaaccaggccaatcccaagtctcgtaccaagggcttcctgtccagaagacccagaccatacattccacatactcccaccagcaggtcattcctcacgtctaccccgtggctgctaagacacagcttggccggtgcttccaggaaaccattgggtcacagtgtggcaaagcgctccctggcctttcaaagcaagaggactgctgtggaactgtgggtacctcctggggctttaacaaatgccagaaatgccccaagaaaccatcttatcatggatacaaccaaatgatggaatgcctaccgggttataagcgggttaacaacaccttttgccaagatattaatgaatgtcagctacaaggtgtatgccctaatggtgagtgtttgaataccatgggcagctatcgatgtacctgcaaaataggatttgggccggatcctaccttttcaagttgtgttcctgatccccctgtgatctcggaagagaaagggccctgttaccgacttgtcagttctggaagacagtgtatgcaccctctgtctgttcacctcaccaagcagctctgctgttgtagtgtgggcaaggcctggggcccacactgtgagaaatgtccccttccaggcacagctgcttttaaggaaatctgtcctggtggaatgggttatacggtttctggcgttcatagacgcaggccaatccatcaccatgtaggtaaaggacctgtatttgtcaagccaaagaacactcaacctgttgctaaaagtactcatcctccacctctcccagccaaggaagagccagtggaggccctgaccttctcccgggaacacgggccaggagtggcggagccagaagtggcaactgcaccccctgaaaaggaaataccttcattggatcaagagaaaaccaaacttgagcctggtcaaccccagctgtctccaggcatttccactattcatctgcatccacagtttccaggtatagtgattgaaaaaacatcacctcctgtgcctgttgaagtagctcctgaagcttctacgtctagtgccagccaagtgattgctcctactcaagtgacagaaatcaatgaatgtactgtgaaccctgatatctgtggagcaggacactgcattaacctaccagtgagatatacctgtatatgctacgagggctacaggttcagtgaacaacagaggaaatgtgtggatattgatgagtgtactcaggtccaacacctctgctcccagggccgctgtgaaaacaccgagggaagtttcttgtgcatttgcccagcaggatttatggccagtgaggagggtactaactgcatagatgttgacgaatgcctgaggccggacgtctgtggggaggggcactgtgtcaatactgtgggggccttccggtgtgaatactgtgacagcgggtaccgcatgactcagagaggccgttgtgaggatattgatgaatgtttgaatccaagcacttgtccagatgagcagtgtgtgaattctcctggatcttaccagtgcgttccctgcacagaaggattccgaggctggaatggacagtgccttgatgtggacgagtgcctggaaccaaacgtctgcgcaaatggtgattgttccaaccttgaaggctcctacatgtgttcatgccacaaaggctatacccggactccggaccacaagcactgtagagatattgatgaatgtcagcaagggaatctatgtgtaaacgggcagtgcaaaaataccgagggctccttcaggtgcacctgtggacaggggtaccagctgtcggcagctaaagaccagtgtgaagacattgatgaatgccagcaccgtcatctctgtgctcatgggcagtgcaggaacactgagggctcttttcaatgtgtgtgtgaccagggttacagagcatctgggcttggagaccactgtgaagatatcaatgaatgcttggaggacaagagtgtttgccagagaggagactgcattaatactgcagggtcctatgattgtacttgtccggatggatttcagctagatgacaataaaacatgtcaagatattaatgaatgtgaacatccagggctctgtggtccgcaaggggagtgcctaaacacagagggttctttccattgtgtctgccagcagggtttctcaatctctgcagatggccgtacgtgtgaagatattgatgaatgtgtaaacaacactgtttgtgacagtcacgggttttgtgacaatacagctggctccttccgctgcctctgttatcagggctttcaagccccacaggatgggcaagggtgtgtggatgtgaatgaatgtgaactgctcagtggggtgtgtggtgaagccttctgtgaaaacgtggaagggtccttcctgtgcgtgtgtgctgatgaaaaccaagagtacagccccatgactgggcagtgccgctcccggacctccacagatttagatgtagatgtagatcaacccaaagaagaaaagaaagaatgctactataatctcaatgacgccagtctctgtgataatgtgttggcccccaatgtcacgaaacaagaatgctgctgtacatcaggcgcgggatggggagataactgcgaaatcttcccctgcccggtcttgggaactgctgagttcactgaaatgtgtcccaaagggaaaggttttgtgcctgctggagaatcatcttctgaagctggtggtgagaactataaagatgcagatgaatgcctactttttggacaagaaatctgcaaaaatggtttctgtttgaacactcggcctgggtatgaatgctactgtaagcaagggacgtactatgatcctgtgaaactgcagtgctttgatatggatgaatgtcaagaccccagtagttgtattgatggccagtgtgttaatacagagggctcttacaactgcttctgtactcaccccatggtcctggatgcgtcagaaaaaagatgtatacgaccggctgagtcaaacgaacaaatagaagaaactgatgtctaccaagatttgtgctgggaacatctgagtgatgaatacgtgtgtagccggcctcttgtgggcaagcagacaacgtacactgagtgctgctgtctgtatggagaggcctggggcatgcagtgtgccctctgccccctgaaggattcagatgactatgctcagctgtgtaacatccccgtgacgggacgccggcagccatatggacgggacgccttggttgacttcagtgaacagtatactccagaagccgatccctacttcatccaagaccgttttctaaatagctttgaggagttacaggctgaggaatgcggcatcctcaatggatgtgaaaatggtcgctgtgtgagggtccaggaaggttacacctgcgattgctttgatgggtatcacttggatacggccaagatgacctgtgtcgatgtaaatgaatgcgatgagttgaacaaccggatgtctctctgcaagaatgccaagtgcattaacaccgatggttcctacaagtgtttgtgtctgccaggctacgtgccttctgacaagccaaactactgcactccgttgaataccgccttgaatttagagaaagacagtgacctggagtgaaacagaatctacataacctaagcccatatactctgcactgtgtaaaggaaaagggagaaatgtattatacttgagacattgcacctaccccggaaggctggaaatacagaaacagcatggagttgcaagtcctctgaagacaatgagaggatttaggatgagcccgataggtgtggcagaccaaatggacatttctctaaaaaaccagtatatatagtctgttcatatgtaaaattcaatggaagagaggtggaacagtgctgttattttaaacagaaggttgtattattatgttgttttgtttttttactattgcttgattaaatttggcatttaaatagtggtggaaatattttatataattttcattttttggttgtgcagttccttggctactgtttttcttttacttcagttttttaaaaatctcaaatgaaaaagtcttcgatacaatattgttaagctgtattataagtattgttacacagggttatgcaattcccggcctggagcatttttgaaattcaaattgtctgtcctgtggagcaggcagtgattttgttccaaaactttgtatacacatttggagaaaagtactttatattttcagtgttttgtctgattttaatgtccgttcttagccaagctgctagcaggtgttaattggatccctttccttcactgaaatggaagagtttataagcttacgttagtattgtaatatgtaaagtaagcccaacaaaaatttttaaaaatttgatgatccccaatatatctaccattgtatgttaaataaatcaccatttttgtagaaaaaattctacctgagagtaattgtcaatgagtacatgtgtataagttgtatcccactctccccacttttatcttttccagtggtcttctgttaatgtagtgtcttttacaagttaatcattaaatttgttagatcttgttatgggctaaaaaaaaaaaaaaaaaa

SEQ ID NO: 498 - protein, 1396 aa, Homo sapiens
MDTKLMCLLFFFSLPPLLVSNHTGRIKVVFTPSICKVTCTKGSCQNSCEKGNTTTLISENGHAADTLTATNFRVVICHLPCMNGGQCSSRDKCQCPPNFTGKLCQIPVHGASVPKLYQHSQQPGKALGTHVIHSTHTLPLTVTSQQGVKVKFPPNIVNIHVKHPPEASVQIHQVSRIDGPTGQKTKEAQPGQSQVSYQGLPVQKTQTIHSTYSHQQVIPHVYPVAAKTQLGRCFQETIGSQCGKALPGLSKQEDCCGTVGTSWGFNKCQKCPKKPSYHGYNQMMECLPGYKRVNNTFCQDINECQLQGVCPNGECLNTMGSYRCTCKIGFGPDPTFSSCVPDPPVISEEKGPCYRLVSSGRQCMHPLSVHLTKQLCCCSVGKAWGPHCEKCPLPGTAAFKEICPGGMGYTVSGVHRRRPIHHHVGKGPVFVKPKNTQPVAKSTHPPPLPAKEEPVEALTFSREHGPGVAEPEVATAPPEKEIPSLDQEKTKLEPGQPQLSPGISTIHLHPQFPGIVIEKTSPPVPVEVAPEASTSSASQVIAPTQVTEINECTVNPDICGAGHCINLPVRYTCICYEGYRFSEQQRKCVDIDECTQVQHLCSQGRCENTEGSFLCICPAGFMASEEGTNCIDVDECLRPDVCGEGHCVNTVGAFRCEYCDSGYRMTQRGRCEDIDECLNPSTCPDEQCVNSPGSYQCVPCTEGFRGWNGQCLDVDECLEPNVCANGDCSNLEGSYMCSCHKGYTRTPDHKHCRDIDECQQGNLCVNGQCKNTEGSFRCTCGQGYQLSAAKDQCEDIDECQHRHLCAHGQCRNTEGSFQCVCDQGYRASGLGDHCEDINECLEDKSVCQRGDCINTAGSYDCTCPDGFQLDDNKTCQDINECEHPGLCGPQGECLNTEGSFHCVCQQGFSISADGRTCEDIDECVNNTVCDSHGFCDNTAGSFRCLCYQGFQAPQDGQGCVDVNECELLSGVCGEAFCENVEGSFLCVCADENQEYSPMTGQCRSRTSTDLDVDVDQPKEEKKECYYNLNDASLCDNVLAPNVTKQECCCTSGAGWGDNCEIFPCPVLGTAEFTEMCPKGKGFVPAGESSSEAGGENYKDADECLLFGQEICKNGFCLNTRPGYECYCKQGTYYDPVKLQCFDMDECQDPSSCIDGQCVNTEGSYNCFCTHPMVLDASEKRCIRPAESNEQIEETDVYQDLCWEHLSDEYVCSRPLVGKQTTYTECCCLYGEAWGMQCALCPLKDSDDYAQLCNIPVTGRRQPYGRDALVDFSEQYTPEADPYFIQDRFLNSFEELQAEECGILNGCENGRCVRVQEGYTCDCFDGYHLDTAKMTCVDVNECDELNNRMSLCKNAKCINTDGSYKCLCLPGYVPSDKPNYCTPLNTALNLEKDSDLE

SEQ ID NO: 499 - DNA, 6148 bp, Homo sapiens
atggcgggggcctggctcaggtgggggctcctgctctgggcagggctcctcgcgtcctcggcgcacggccggctgcggaggatcacctacgtggtgcacccgggccccggcctggcagccggcgccttgcccctgagcgggcccccgcgttcgcggacattcaacgtcgcgctcaacgccaggtacagccgcagctcggcggctgccggcgcccccagccgtgcctcccccggggtcccctcggagaggacccggcgcacgagcaagccgggcggcgcggccctgcaggggctcagaccgccgccgccgccgccgccggagcctgcgcgtcccgcggtccccggcgggcagctccaccccaatcccggcggccacccggcagccgccccgttcaccaaacaaggcaggcaagttgtgcgctccaaggtgccgcaggagacccagagcggcggaggctctaggctgcaggttcaccagaagcagcagctgcagggggtcaatgtctgtggagggcggtgctgtcatggctggagtaaggcccctggctcccagaggtgcaccaaacctagctgtgttccgccatgtcagaatggagggatgtgtctccggccacaactctgtgtgtgtaaaccagggaccaagggcaaagcctgtgaaacaatagctgcccaggacacctcgtcaccagtctttggagggcagagtcctggggctgcttcctcgtggggccctcctgagcaagcagcaaagcatacttcatctaagaaggcagacactctaccaagagtcagccctgtggcccagatgaccttaaccctcaagccgaagccttcagtgggactcccccagcagatacattctcaagtgactcctctttcttcccagagtgtggtgattcaccatggccagacccaggaatacgtgctcaagcccaagtactttccagcccagaaggggatttcaggagagcagtccactgaaggttctttccctttaagatatgtgcaggatcaagttgcggcaccttttcagctgagtaaccacactggccgcatcaaggtggtctttactccgagcatctgtaaagtgacctgcaccaagggcagctgtcagaacagctgtgagaaggggaacaccaccactctcattagtgagaatggtcatgctgccgacaccctgacggccacgaacttccgagtggtaatttgccatcttccatgtatgaatggtggccagtgcagttcaagggacaaatgtcagtgccctccaaatttcacaggaaaactttgtcagatcccagtccatggtgccagcgtgcctaaactttatcagcattcccagcagccaggcaaggcgttggggacgcatgtcatccattcaacacataccttgcctctgaccgtgactagccagcaaggagtcaaagtgaaatttcctcctaacatagtcaatatccatgtgaaacatcctcctgaagcttccgtccagatacatcaggtttcaagaattgatggcccaacaggccagaagacaaaagaagctcaaccaggccaatcccaagtctcgtaccaagggcttcctgtccagaagacccagaccatacattccacatactcccaccagcaggtcattcctcacgtctaccccgtggctgctaagacacagcttggccggtgcttccaggaaaccattgggtcacagtgtggcaaagcgctccctggcctttcaaagcaagaggactgctgtggaactgtgggtacctcctggggctttaacaaatgccagaaatgccccaagaaaccatcttatcatggatacaaccaaatgatggaatgcctaccgggttataagcgggttaacaacaccttttgccaagatattaatgaatgtcagctacaaggtgtatgccctaatggtgagtgtttgaataccatgggcagctatcgatgtacctgcaaaataggatttgggccggatcctaccttttcaagttgtgttcctgatccccctgtgatctcggaagagaaagggccctgttaccgacttgtcagttctggaagacagtgtatgcaccctctgtctgttcacctcaccaagcagctctgctgttgtagtgtgggcaaggcctggggcccacactgtgagaaatgtccccttccaggcacagctgcttttaaggaaatctgtcctggtggaatgggttatacggtttctggcgttcatagacgcaggccaatccatcaccatgtaggtaaaggacctgtatttgtcaagccaaagaacactcaacctgttgctaaaagtactcatcctccacctctcccagccaaggaagagccagtggaggccctgaccttctcccgggaacacgggccaggagtggcggagccagaagtggcaactgcaccccctgaaaaggaaataccttcattggatcaagagaaaaccaaacttgagcctggtcaaccccagctgtctccaggcatttccactattcatctgcatccacagtttccaggtatagtgattgaaaaaacatcacctcctgtgcctgttgaagtagctcctgaagcttctacgtctagtgccagccaagtgattgctcctactcaagtgacagaaatcaatgaatgtactgtgaaccctgatatctgtggagcaggacactgcattaacctaccagtgagatatacctgtatatgctacgagggctacaggttcagtgaacaacagaggaaatgtgtggatattgatgagtgtactcaggtccaacacctctgctcccagggccgctgtgaaaacaccgagggaagtttcttgtgcatttgcccagcaggatttatggccagtgaggagggtactaactgcatagatgttgacgaatgcctgaggccggacgtctgtggggaggggcactgtgtcaatactgtgggggccttccggtgtgaatactgtgacagcgggtaccgcatgactcagagaggccgttgtgaggatattgatgaatgtttgaatccaagcacttgtccagatgagcagtgtgtgaattctcctggatcttaccagtgcgttccctgcacagaaggattccgaggctggaatggacagtgccttgatgtggacgagtgcctggaaccaaacgtctgcgcaaatggtgattgttccaaccttgaaggctcctacatgtgttcatgccacaaaggctatacccggactccggaccacaagcactgtagagatattgatgaatgtcagcaagggaatctatgtgtaaacgggcagtgcaaaaataccgagggctccttcaggtgcacctgtggacaggggtaccagctgtcggcagctaaagaccagtgtgaagacattgatgaatgccagcaccgtcatctctgtgctcatgggcagtgcaggaacactgagggctcttttcaatgtgtgtgtgaccagggttacagagcatctgggcttggagaccactgtgaagatatcaatgaatgcttggaggacaagagtgtttgccagagaggagactgcattaatactgcagggtcctatgattgtacttgtccggatggatttcagctagatgacaataaaacatgtcaagatattaatgaatgtgaacatccagggctctgtggtccgcaaggggagtgcctaaacacagagggttctttccattgtgtctgccagcagggtttctcaatctctgcagatggccgtacgtgtgaagatattgatgaatgtgtaaacaacactgtttgtgacagtcacgggttttgtgacaatacagctggctccttccgctgcctctgttatcagggctttcaagccccacaggatgggcaagggtgtgtggatgtgaatgaatgtgaactgctcagtggggtgtgtggtgaagccttctgtgaaaacgtggaagggtccttcctgtgcgtgtgtgctgatgaaaaccaagagtacagccccatgactgggcagtgccgctcccggacctccacagatttagatgtagatgtagatcaacccaaagaagaaaagaaagaatgctactataatctcaatgacgccagtctctgtgataatgtgttggcccccaatgtcacgaaacaagaatgctgctgtacatcaggcgcgggatggggagataactgcgaaatcttcccctgcccggtcttgggaactgctgagttcactgaaatgtgtcccaaagggaaaggttttgtgcctgctggagaatcatcttctgaagctggtggtgagaactataaagatgcagatgaatgcctactttttggacaagaaatctgcaaaaatggtttctgtttgaacactcggcctgggtatgaatgctactgtaagcaagggacgtactatgatcctgtgaaactgcagtgctttgatatggatgaatgtcaagaccccagtagttgtattgatggccagtgtgttaatacagagggctcttacaactgcttctgtactcaccccatggtcctggatgcgtcagaaaaaagatgtatacgaccggctgagtcaaacgaacaaatagaagaaactgatgtctaccaagatttgtgctgggaacatctgagtgatgaatacgtgtgtagccggcctcttgtgggcaagcagacaacgtacactgagtgctgctgtctgtatggagaggcctggggcatgcagtgtgccctctgccccctgaaggattcagatgactatgctcagctgtgtaacatccccgtgacgggacgccggcagccatatggacgggacgccttggttgacttcagtgaacagtatactccagaagccgatccctacttcatccaagaccgttttctaaatagctttgaggagttacaggctgaggaatgcggcatcctcaatggatgtgaaaatggtcgctgtgtgagggtccaggaaggttacacctgcgattgctttgatgggtatcacttggatacggccaagatgacctgtgtcgatgtaaatgaatgcgatgagttgaacaaccggatgtctctctgcaagaatgccaagtgcattaacaccgatggttcctacaagtgtttgtgtctgccaggctacgtgccttctgacaagccaaactactgcactccgttgaataccgccttgaatttagagaaagacagtgacctggagtgaaacagaatctacataacctaagcccatatactctgcactgtgtaaaggaaaagggagaaatgtattatacttgagacattgcacctaccccggaaggctggaaatacagaaacagcatggagttgcaagtcctctgaagacaatgagaggatttaggatgagcccgataggtgtggcagaccaaatggacatttctctaaaaaaccagtatatatagtctgttcatatgtaaaattcaatggaagagaggtggaacagtgctgttattttaaacagaaggttgtattattatgttgttttgtttttttactattgcttgattaaatttggcatttaaatagtggtggaaatattttatataattttcattttttggttgtgcagttccttggctactgtttttcttttacttcagttttttaaaaatctcaaatgaaaaagtcttcgatacaatattgttaagctgtattataagtattgttacacagggttatgcaattcccggcctggagcatttttgaaattcaaattgtctgtcctgtggagcaggcagtgattttgttccaaaactttgtatacacatttggagaaaagtactttatattttcagtgttttgtctgattttaatgtccgttcttagccaagctgctagcaggtgttaattggatccctttccttcactgaaatggaagagtttataagcttacgttagtattgtaatatgtaaagtaagcccaacaaaaatttttaaaaatttgatgatccccaatatatctaccattgtatgttaaataaatcaccatttttgtagaaaaaattctacctgagagtaattgtcaatgagtacatgtgtataagttgtatcccactctccccacttttatcttttccagtggtcttctgttaatgtagtgtcttttacaagttaatcattaaatttgttagatcttgttatgggctaaaaaaaaaaaaaaaaaa

SEQ ID NO: 500 - protein, 1722 aa, Homo sapiens
MAGAWLRWGLLLWAGLLASSAHGRLRRITYVVHPGPGLAAGALPLSGPPRSRTFNVALNARYSRSSAAAGAPSRASPGVPSERTRRTSKPGGAALQGLRPPPPPPPEPARPAVPGGQLHPNPGGHPAAAPFTKQGRQVVRSKVPQETQSGGGSRLQVHQKQQLQGVNVCGGRCCHGWSKAPGSQRCTKPSCVPPCQNGGMCLRPQLCVCKPGTKGKACETIAAQDTSSPVFGGQSPGAASSWGPPEQAAKHTSSKKADTLPRVSPVAQMTLTLKPKPSVGLPQQIHSQVTPLSSQSVVIHHGQTQEYVLKPKYFPAQKGISGEQSTEGSFPLRYVQDQVAAPFQLSNHTGRIKVVFTPSICKVTCTKGSCQNSCEKGNTTTLISENGHAADTLTATNFRVVICHLPCMNGGQCSSRDKCQCPPNFTGKLCQIPVHGASVPKLYQHSQQPGKALGTHVIHSTHTLPLTVTSQQGVKVKFPPNIVNIHVKHPPEASVQIHQVSRIDGPTGQKTKEAQPGQSQVSYQGLPVQKTQTIHSTYSHQQVIPHVYPVAAKTQLGRCFQETIGSQCGKALPGLSKQEDCCGTVGTSWGFNKCQKCPKKPSYHGYNQMMECLPGYKRVNNTFCQDINECQLQGVCPNGECLNTMGSYRCTCKIGFGPDPTFSSCVPDPPVISEEKGPCYRLVSSGRQCMHPLSVHLTKQLCCCSVGKAWGPHCEKCPLPGTAAFKEICPGGMGYTVSGVHRRRPIHHHVGKGPVFVKPKNTQPVAKSTHPPPLPAKEEPVEALTFSREHGPGVAEPEVATAPPEKEIPSLDQEKTKLEPGQPQLSPGISTIHLHPQFPGIVIEKTSPPVPVEVAPEASTSSASQVIAPTQVTEINECTVNPDICGAGHCINLPVRYTCICYEGYRFSEQQRKCVDIDECTQVQHLCSQGRCENTEGSFLCICPAGFMASEEGTNCIDVDECLRPDVCGEGHCVNTVGAFRCEYCDSGYRMTQRGRCEDIDECLNPSTCPDEQCVNSPGSYQCVPCTEGFRGWNGQCLDVDECLEPNVCANGDCSNLEGSYMCSCHKGYTRTPDHKHCRDIDECQQGNLCVNGQCKNTEGSFRCTCGQGYQLSAAKDQCEDIDECQHRHLCAHGQCRNTEGSFQCVCDQGYRASGLGDHCEDINECLEDKSVCQRGDCINTAGSYDCTCPDGFQLDDNKTCQDINECEHPGLCGPQGECLNTEGSFHCVCQQGFSISADGRTCEDIDECVNNTVCDSHGFCDNTAGSFRCLCYQGFQAPQDGQGCVDVNECELLSGVCGEAFCENVEGSFLCVCADENQEYSPMTGQCRSRTSTDLDVDVDQPKEEKKECYYNLNDASLCDNVLAPNVTKQECCCTSGAGWGDNCEIFPCPVLGTAEFTEMCPKGKGFVPAGESSSEAGGENYKDADECLLFGQEICKNGFCLNTRPGYECYCKQGTYYDPVKLQCFDMDECQDPSSCIDGQCVNTEGSYNCFCTHPMVLDASEKRCIRPAESNEQIEETDVYQDLCWEHLSDEYVCSRPLVGKQTTYTECCCLYGEAWGMQCALCPLKDSDDYAQLCNIPVTGRRQPYGRDALVDFSEQYTPEADPYFIQDRFLNSFEELQAEECGILNGCENGRCVRVQEGYTCDCFDGYHLDTAKMTCVDVNECDELNNRMSLCKNAKCINTDGSYKCLCLPGYVPSDKPNYCTPLNTALNLEKDSDLE

SEQ ID NO: 501 - DNA, 659 bp, Homo sapiens
tatcagcaagtctccttttgcgggtggcggcgaacgcggagagcacgccatgaaggcctcgggcacactacgagagtacaaagtagtgggtcgctgcctgcccacccccaaatgccacacaccacccctctaccgcatgcgaatctttgcgcctaatcatgtcgtcgccaagtcccgcttctggtacttcgtatctcagttaaagaagatgaagaagtcttcaggggagattgtctactgtgggcaggtgtttgagaagttccccttgcgggtgaagaacttcgggatctggctgcgctatgactcccggagcggcacccacaacatgtaccgggaataccgggacctgaccaccgcaggcgctgtcacccggtgctaccgagacatgagcgcccggcacggcggccgggcccactccattcagatcatgaaggtggaggagatcgcggccagcaagtgccgccggccggctgtcaagcagttccacgactccaagatcaagttcccgctgccccaccgggtcctgcgccgtcagcacaagccacgcttcaccaccaagaggcccaacaccttcttctaggtgcagggccctcgcccgggtgtgccccaaataaactcaggaacgccccagaaaaaaaaatttatcagcaagaaaataa

SEQ ID NO: 502 - protein, 176 aa, Homo sapiens [sequence omitted]

SEQ ID NO: 503 - DNA, 557 bp, Homo sapiens
tttgcgggtggcggcgaacgcggagagcacgccatgaaggcctcgggcacactacgagagtacaaagtagtgggtcgctgcctgcccacccccaaatgccacacaccacccctctaccgcatgcgaatctttgcgcctaatcatgtcgtcgccaagtcccgcttctggtacttcgtatctcagttaaagaagatgaagaaaacttcgggatctggctgcgctatgactcccggagcggcacccacaacatgtaccgggaataccgggacctgaccaccgcaggcgctgtcacccggtgctaccgagacatgagcgcccggcacggcggccgggcccactccattcagatcatgaaggtggaggagatcgcggccagcaagtgccgccggccggctgtcaagcagttccacgactccaagatcaagttcccgctgccccaccgggtcctgcgccgtcagcacaagccacgcttcaccaccaagaggcccaacaccttcttctaggtgcagggccctcgcccgggtgtgccccaaataaactcaggaacgccccagaaa

SEQ ID NO: 504 - protein, 84 aa, Homo sapiens
MYREYRDLTTAGAVTRCYRDMSARHGGRAHSIQIMKVEEIAASKCRRPAVKQFHDSKIKFPLPHRVLRRQHKPRFTTKRPNTFF

SEQ ID NO: 505 - DNA, 588 bp, Homo sapiens
tttgcgggtggcggcgaacgcggagagcacgccatgaaggcctcgggcacactacgagagtacaaagtagtgggtcgctgcctgcccacccccaaatgccacacaccacccctctaccgcatgcgaatctttgcgcctaatcatgtcgtcgccaagtcccgcttctggtacttcgtatctcagttaaagaagatgaagaagtcttcaggggagattgtctactgtgggcagaacttcgggatctggctgcgctatgactcccggagcggcacccacaacatgtaccgggaataccgggacctgaccaccgcaggcgctgtcacccggtgctaccgagacatgagcgcccggcacggcggccgggcccactccattcagatcatgaaggtggaggagatcgcggccagcaagtgccgccggccggctgtcaagcagttccacgactccaagatcaagttcccgctgccccaccgggtcctgcgccgtcagcacaagccacgcttcaccaccaagaggcccaacaccttcttctaggtgcagggccctcgcccgggtgtgccccaaataaactcaggaacgccccagaaa

SEQ ID NO: 506 - protein, 166 aa, Homo sapiens
MKASGTLREYKVVGRCLPTPKCHTPPLYRMRIFAPNHVVAKSRFWYFVSQLKKMKKSSGEIVYCGQNFGIWLRYDSRSGTHNMYREYRDLTTAGAVTRCYRDMSARHGGRAHSIQIMKVEEIAASKCRRPAVKQFHDSKIKFPLPHRVLRRQHKPRFTTKRPNTFF

SEQ ID NO: 507 - DNA, 1998 bp, Homo sapiens
cctgacctcgtgatccgcccgcctgtgcctcccaaagtgttgggattacaggcgtgagccactgtgcccagcctccagcatgatttttttaggccgttcttttgtttgaaagaattcaactaaggatccactctgcctgcctgaccggtttcttcctttcttctctctcatcgggtcccgagttcccatgactgcagcttccagaagagcagagctttggtatcctactcacagcgccaaaactgcaggggccaagatgcaaatcttccgcacaaaagacagctttgcagggctgcttctgtttgcaggccctctgaacagccatctcaaaacatgtcaaagaagtatatcttggggaaagatacaaaattcttgtgtgcagcctcttttggactccagctcttgttctctcgctgaatcccaccgccaccccttcaagtcatcggctgtgattcacctgtgggtttctgaaggctagaagcttccacaatgagccaggaaacaagttctgattggctgggaacagacctctgctccaagattcagggctggcagtattccttctgttctggtggctcgatcttcattgctttcctctggacttgtaagttattccaacaaaccccagctgctctgcagtgaaatgttccaaataattaatatttctgcaggaattaccttgtaaaagatatgtgcttttaagtatttggttattgtgcaaatgtttttgactaccttttgtggccaattttctccttcagcgggctcatgtataattttagataaaagtacaaggaaattatgattccataatcataagtctactttcagcaatacacgtatcttcagagaatctcagcctccctgcagcatcctcctggtgcacagaaaaactgctgaattctggcaagatactcaaaggattctgacgggtgaccatctcaggccggagatatgcccaaccaactggaaaagcagagacagccatggacagatctgctgacgctaaagtttatagacagctgaggtgcaacccatataatcacccagatgttattaggccatgatcattctgtagtaagctacctcccttctgtgtttcctctcacctgacagcctattgtgggcactttcaaggccccactgtgtccaaatcacaccaccaccaaagctcacagaagcacgctggtagatttctcctctttggtggtttcccatgaccagccaagggaaatacccaacaatcattctcagtgtgcacagatttaccttcagcttttttggttatattgtcattattattttctttgtccagtgggagagttaaggggcctgctatggactgaactctgtccccctcaaattcatatgttgaagccccaaccttcaacatgactatatttgaaaacagtccctttatggaggtaaagttaaatgagatcataagagtggggcccttgttcgatagaactggtgtccttacaagaagaggaagaggctgagtgcagtggctcaagcctataatcccagcactttgggaagctgaggcaggaggtacgcttgggcccaggagttcaagaccagcttgggcaacataacaagaccctatctctacagaaaaaaattaaaaattaaccaggtgtgatggcatgtgcttgtggtaccagctactcaggaggctgagatgggtggatggcttgagcctgggaggtcaaggttgcagtgagctgtgatagcactgcactccagcctgggtaacagagcaagaccctgtccctccccacaccaccccaactccccccaaaaaggaagagataccagagtgcactctctcgatctctctctctctcttccacgtgaggacacagaagaaaaaaaaaaaagcccatctgcaaggcaggaagacggccttcaacagcaacgaaatcagtcagcaccttggtttggactgcttggtctccagaacgagggaaaataaattaaaataaatgtctgtag

SEQ ID NO: 508 - protein, 96 aa, Homo sapiens
MTAASRRAELWYPTHSAKTAGAKMQIFRTKDSFAGLLLFAGPLNSHLKTCQRSISWGKIQNSCVQPLLDSSSCSLAESHRHPFKSSAVIHLWVSEG

SEQ ID NO: 509 - DNA, 3817 bp, Homo sapiens
cagggacttaccaatttgggattcttccaggagctgaaaactgattgcaaatatgaaacagatttcactacaggacttgaaccctacattaaaaaacaacaagctccccaaaataattgaaaaagatcttcaccaaagagtagctgcaatgtgaatggcaggatatgaagcaagtaagagatggtgaaaagattatcttaagcttggaattaagtgatgaaagggaccttcgaaattatcaactctaaatacttctttacaggaaaattgaaagcagttaagaacctgccccctaccgtggagttcttggtgccgtgagttggagttcttggtgcctgggtgcgtccccaaggccactggtcttcagatctttcttacttgagaagaacgcctccgcctcctggctctcccaccagtggtattgccaccaccacacaccagcataaagcacagattgctgcccagctccttggagaggggccagtgcatttgtcaggaattgaaaagttttggagccagttcgaggactttctcctgcacaaagtgttggctggaagcatgattatctcacacagagcgttggaattacttcatgatgatttcaaagaaaattttcttctctaaacactcttatcccaagggcatcctaaagttcctctggaatgcattgggtgggagagaaagttctatgtcaactcttctggcagagggaaaagctgaccgaggaagtcaaaatgaaagaaagaagcagacaggactgaggctccctgagatgcagaaactgaggcacagagcaaggatgtgccacagcagaagcaagttgtgttggcagtaggaaacaagataaagagaagaactcaaagaattgagagaaggctttgaacatgatgatggagaaataacactcttgggagaaatgaagatactttctcctccctggtttacctgagtttccagcacccagtgataagaaaggatggcattagtgatgtgtacacctgcagtgatagcttcacctttctaaagcagatgccgtggtagacattttgccagccctcctttcactatacacacagcttggtgtacgctggcagacttttgacctaatttcttaaccctcaaatattccaagacagaacaaagcacacaacaaaaccagaatgaggccgggcaaagtggctcatgcccgtaatcccagcactttgggaggctaaggggtgggcagatcacttgaggtcaggagtttgagaccagcctaggcaacatggtgaaacccagtctctactgaaaatacaaaaatcagccgggtgtggtggcaaatgcctgtaatcccagctactggggaggctgagacacaagaatcacttgaacccaggagggggagtttgcagtgagccgagattgtgccactgcatgccagtctgaacaacagagcaagactctgtcacaaaaacaaacaaaaaactgaatgaatggaagcagataagtgcagagagaaacactgatttaccttcagaaagataaaaaagtagtatattgatatacttgtatattgctatctactagtatagcttcagttggtgtatgagtatagaactattgggttgttctttatgtgattactccttcccagttttagtaaagtattccaatttgagggaaattctttcatttgtcaataaaataaaaagaggtaagttttaaaatctgtatagttcttccttcatgctagttgcctctctttttgatatttcttctataaaaatcttttcttacattcagttttcattgtatagatcatgaaggaaccatagtgattatcaaagatcagccgataagttcaaggcagagttccacctttccccatgaagcccttccagacttgtttacatgtaacacccttgaaggcaagactcatgtctatgctatctttgctgctatttggcacgtattaggtgtaagggcaattagaccatatcaattaatgatcagtaagaatggataaagtagatgtttttgtgagcctctcaaagaagatgtatagaatattttggaaatgggcccaatttgtttctaaaggaaaatttactttcaaattaaaaaaaaaaaatcactcaaatgagattttgggggatttcatatgattaactctttacattatcttgtggtaattatacagaaatctgtatttatgtaaacacagtaaatgcatcataacactagaataagtatacaaatactgcatgtcaaattaggttataatcactttcaagggacgtgatttcctagctaaacagattcgtttacattttgcaaaataaaaaataagtgaaaataactatataaaatcaggcttacagctggacagatcttcttggcaatggtccagacactgagtagggaaaagcccctccagctgaggaacgttcaggacgctcaggacgactttgcaggcgcggccgggagagaggccatttttggggttgccttgactgtgcaccctgttcctggctacctatggggagataagctgcattcacatatcagatgagactctttttgtgagaggtctggggtgggatgtgggaagtggagtgaaaacctgcttagtaggggaggaaaaaaacaagcaatccaacacttcacctttaggtaataaacataatagaaaaagtcaggaattctctaactaaaaagcagacagtggaagctagcatcggactcactgaattttagaatcagggtctgtgtaccatggattatctggccctgcccttgtcactggatgagaagattctggctatagggcaagaagcagtgcttggaccgagatccagaatgttaccctcaaatctgaagcttatttatgagataaataaagctcatattttcaagagagataattattttaaaacttctcatttcaatgtgtaccttaaaaaaataaatacattttgggccaggtgcgatggttcatgcctgtaatcccagcactttgggaggccgaggtgggcagatcatgaggtcagtttgagaccagcctggccaacatagtgaaactccgtctctactaaaaataaaaataaaaaaattagctgggcatagtggcacgtacctgtagtcccagctacttaggaggctgaagcaggagaatcgcttgaacccatgaggcagaggttgtggtgagcccaaattgcgccactgcactccagcctgggcaacagagcaagactccatctcaaaaaaccaatcaaccaaccaaccaacaaaaaacatttcacatctccctgacgtagccaacattttctccaacattctcttattttgatggcagaagggcataactgtaaatctcagtttttatatggtattgtataatatagtggcatcctttgcggccagttgattgtgaagagcagtttgcctttacttagcttccatgaacattagctttaaatgctcattgacattaatgagagccagtttgctaaatctgtgtctccttcatgttcatttgctacttagttttgttgattccaagaagtcactaatttttttaaatcatagattctgatttcgaggtagcttcatttttctagtgttgagtaaaatgtgtgtgtgtgtgtgctttagtttaattaatactaatttttattcaaaatatatttgttgagcacttactctctgctgtggctgggcatacattactttctttccacagtccgttggttgaattgtcctgagcaggggttgacaaatgatggcctgtgagccaaatctaccccactgcctgtttttgtaaataaagctttatcag

SEQ ID NO: 510 - protein, 79 aa, Homo sapiens
MISKKIFFSKHSYPKGILKFLWNALGGRESSMSTLLAEGKADRGSQNERKKQTGLRLPEMQKLRHRARMCHSRSKLCWQ

SEQ ID NO: 511 - DNA, 2170 bp, Homo sapiens
tctctgaaatgagatgagtggaaaatgccttaaacaggtggatgtggaacaggtcggggactttaaggacttcagtggaggaggggtgggttggggaagggaaacaaatgaagatgtcttagaagtcactgcaatttatatggaatctgttcaacgccgacactgaaccatatgagaagacgtttgaaactattgctttgctgaaaacatctgactgccaggctaggatgtgacacttaagggacttaccaatttgggattcttccaggagctgaaaactgattgcaaatatgaaacagatttcactacaggacttgaaccctacattaaaaaacaacaagctccccaaaataattgaaaaagatcttcaccaaagagtagctgcaatgtgaatggcaggatatgaagcaagtaagagagctatcactgccaaaggctactgactaatggtgaaaagattatcttaagcttggaattaagtgatgaaagggaccttcgaaattatcaactctaaatacttctttacaggaaaattgaaagcagttaagaacctgccccctaccgtggagttcttggtgccgtgagttggagttcttggtgcctgggtgcgtccccaaggccactggtcttcagatctttcttacttgagaagaacgcctccgcctcctggctctcccaccagtggtattgccaccaccacacaccagcataaagcacagattgctgcccagctccttggagaggggccagtgcatttgtcaggaattgaaaagttttggagccagttcgaggactttctcctgcacaaagtgttggctggaagcatgattatctcacacagagcgttggaattacttcatgatgatttcaaagaaaattttcttctctaaacactcttatcccaagggcatcctaaagttcctctggaatgcattgggtgggagagaaagttctatgtcaactcttctggcagagggaaaagctgaccgaggaagtcaaaatgaaagaaagaagcagacaggactgaggctccctgagatgcagaaactgaggcacagagcaaggggctaggattcttgactttcttctgcagaacactgaaacatgcctcctctttcctggccccaccaagcagagtttaggcttcaagaagactgaatgcatctgtacagagcacaatcccttctccaagaaggaaaccatggggcttatcaagaaaggcgtacactgaagagactggaaagtgaagatgcactatttgtcaagatgtgccacagcagaagcaagttgtgttggcagtaggaaacaagataaagagaagaactcaaagaattgagagaaggctttgaacatgatgatggagaaataacactcttgggagaaatgaagatactttctcctccctggtttacctgagtttccagcacccagtgataagaaaggatggcattagtgatgtgtacacctgcagtgatagcttcacctttctaaagcagatgccgtggtagacattttgccagccctcctttcactatacacacagcttggtgtacgctggcagacttttgacctaatttcttaaccctcaaatattccaagacagaacaaagcacacaacaaaaccagaatgaggccgggcaaagtggctcatgcccgtaatcccagcactttgggaggctaaggggtgggcagatcacttgaggtcaggagtttgagaccagcctaggcaacatggtgaaacccagtctctactgaaaatacaaaaatcagccgggtgtggtggcaaatgcctgtaatcccagctactggggaggctgagacacaagaatcacttgaacccaggagggggagtttgcagtgagccgagattgtgccactgcatgccagtctgaacaacagagcaagactctgtcacaaaaacaaacaaaaaactgaatgaatggaagcagataagtgcagagagaaacactgatttaccttcagaaagataaaaaagtagtatattgatatacttgtatattgctatctactagtatagcttcagttggtgtatgagtatagaactattgggttgttctttatgtgattactccttcccagttttagtaaagtattccaatttgagggaaattctttcatttgtcaataaaataaaaagaggtaagtttta

SEQ ID NO: 512 - protein, 69 aa, Homo sapiens
MISKKIFFSKHSYPKGILKFLWNALGGRESSMSTLLAEGKADRGSQNERKKQTGLRLPEMQKLRHRARG

SEQ ID NO: 513 - DNA, 3958 bp, Homo sapiens
ttttttttttttttttgcttaaaaaaaagccatgacggctctcccacaattcatcttccctgcgccatctttgtattatttctaatttattttggatgtcaaaaggcactgatgaagatattttctctggagtctccttctttctaacccggctctcccgatgtgaaccgagccgtcgtccgcccgccgccgccgccgccgccgccgccgcccgccccgcagcccaccatgtctcgccgcaagcaaggcaaaccccagcacttaagcaaacgggaattctcgcccgagcctcttgaagccattcttacagatgatgaaccagaccacggcccgttgggagctccagaaggggatcatgacctcctcacctgtgggcagtgccagatgaacttcccattgggggacattcttatttttatcgagcacaaacggaaacaatgcaatggcagcctctgcttagaaaaagctgtggataagccaccttccccttcaccaatcgagatgaaaaaagcatccaatcccgtggaggttggcatccaggtcacgccagaggatgacgattgtttatcaacgtcatctagaggaatttgccccaaacaggaacacatagcagataaacttctgcactggaggggcctctcctcccctcgttctgcacatggagctctaatccccacgcctgggatgagtgcagaatatgccccgcagggtatttgtaaagatgagcccagcagctacacatgtacaacttgcaaacagccattcaccagtgcatggtttctcttgcaacacgcacagaacactcatggattaagaatctacttagaaagcgaacacggaagtcccctgaccccgcgggttggtatcccttcaggactaggtgcagaatgtccttcccagccacctctccatgggattcatattgcagacaataacccctttaacctgctaagaataccaggatcagtatcgagagaggcttccggcctggcagaagggcgctttccacccactccccccctgtttagtccaccaccgagacatcacttggacccccaccgcatagagcgcctgggggcggaagagatggccctggccacccatcacccgagtgcctttgacagggtgctgcggttgaatccaatggctatggagcctcccgccatggatttctctaggagacttagagagctggcagggaacacgtctagcccaccgctgtccccaggccggcccagccctatgcaaaggttactgcaaccattccagccaggtagcaagccgcccttcctggcgacgccccccctccctcctctgcaatccgcccctcctccctcccagcccccggtcaagtccaagtcatgcgagttctgcggcaagacgttcaaatttcagagcaacctggtggtgcaccggcgcagccacacgggcgagaagccctacaagtgcaacctgtgcgaccacgcgtgcacccaggccagcaagctgaagcgccacatgaagacgcacatgcacaaatcgtcccccatgacggtcaagtccgacgacggtctctccaccgccagctccccggaacccggcaccagcgacttggtgggcagcgccagcagcgcgctcaagtccgtggtggccaagttcaagagcgagaacgaccccaacctgatcccggagaacggggacgaggaggaagaggaggacgacgaggaagaggaagaagaggaggaagaggaggaggaggagctgacggagagcgagagggtggactacggcttcgggctgagcctggaggcggcgcgccaccacgagaacagctcgcggggcgcggtcgtgggcgtgggcgacgagagccgcgccctgcccgacgtcatgcagggcatggtgctcagctccatgcagcacttcagcgaggccttccaccaggtcctgggcgagaagcataagcgcggccacctggccgaggccgagggccacagggacacttgcgacgaagactcggtggccggcgagtcggaccgcatagacgatggcactgttaatggccgcggctgctccccgggcgagtcggcctcggggggcctgtccaaaaagctgctgctgggcagccccagctcgctgagccccttctctaagcgcatcaagctcgagaaggagttcgacctgcccccggccgcgatgcccaacacggagaacgtgtactcgcagtggctcgccggctacgcggcctccaggcagctcaaagatcccttccttagcttcggagactccagacaatcgccttttgcctcctcgtcggagcactcctcggagaacgggagcttgcgcttctccacaccgcccggggagctggacggagggatctcggggcgcagcggcacgggaagtggagggagcacgccccatattagtggtccgggcccgggcaggcccagctcaaaagagggcagacgcagcgacacttgttcttcacacacccccattcggcgtagtacccagagagctcaagatgtgtggcagttttcggatggaagctcgagagcccttaagttctgagaaaatttgaagcccccaggggtggggtggacgcgtgccgcccagtcgacgtcagcgtggtctgtcatcctgctagtttgtgatgttttctgacagtagcctccaagaagccgttgtgcgaagacagagtcctgcagagtccttccagcctaggcctgcagcgccattttatttatattttttaataaaaagtaaaaacaaaaaaacagacccacattggaacagtgaatcagtcccatagagagggcccgtggaccatcgctgtcatgagtgatgccctggcccttctgaaaccagccaacctaattacctgtattgtggaaatgcgcatgagtccccaaccccttgtttctatacattctatgttgtcttttaaaaagtgtgcttaacattgacacaataaatgttggagctttaggtggtgtttgcttgttctttaatttttaatgcttataagacaatgaggctgcttatgattttgtacttctgtacctgtttcctacagacacccatcgggtgggtaggaggaacagatttgagaaatgggcaggagatgtaggaggggaactaggttaccgcttatcagatggcataaattttcaaggagaatcaaaatgcaaaacttgggaataaatcatagcaatatcataattaatgtagtagtaatattgctgtttattaatgctgaagtgtggttttcctaactgtctgacttataatttgcataccattaaataatgcataatatggcacgccgaatcctgtttttcaaatatatgcttttggtggctaccatgcaggatttgaatttgtcttttaatttagcttaggaaagaacatcactgggcgagcggtaaatcctaaagaaggtgataaatgtcagtagtttcttattaaatattctaattttaggttcccaaaccttcaggaaatatatcttaatgcagacaaacaaacataaaacttctttagtacttacatcaggaaatttggggcagattttagaggggggaaattataggaggaaagaagttcacatcagaacagacaatcacagcaatgctctattccttagaaattagtgccacaaataagttacatctacaaacaggtggtaaaaattctttctggcccagttaatttgcacagaacttttctcagtttggtattttttactgcttggagatccagaagagaattagaaacaacatagcaaattaaaataggtttgtcaataatagagctcagacacctgtgtgctgtagattcacatacaggccgtgaacctaagtggggaaaatcctacctatccaccttctggctagattacctagcttagtgaaaagatagccaaataattggcatgtgaattatttcctgcttattcataataaataatgactgtcta

SEQ ID NO: 514 - protein, 773 aa, Homo sapiens
MSRRKQGKPQHLSKREFSPEPLEAILTDDEPDHGPLGAPEGDHDLLTCGQCQMNFPLGDILIFIEHKRKQCNGSLCLEKAVDKPPSPSPIEMKKASNPVEVGIQVTPEDDDCLSTSSRGICPKQEHIADKLLHWRGLSSPRSAHGALIPTPGMSAEYAPQGICKDEPSSYTCTTCKQPFTSAWFLLQHAQNTHGLRIYLESEHGSPLTPRVGIPSGLGAECPSQPPLHGIHIADNNPFNLLRIPGSVSREASGLAEGRFPPTPPLFSPPPRHHLDPHRIERLGAEEMALATHHPSAFDRVLRLNPMAMEPPAMDFSRRLRELAGNTSSPPLSPGRPSPMQRLLQPFQPGSKPPFLATPPLPPLQSAPPPSQPPVKSKSCEFCGKTFKFQSNLVVHRRSHTGEKPYKCNLCDHACTQASKLKRHMKTHMHKSSPMTVKSDDGLSTASSPEPGTSDLVGSASSALKSVVAKFKSENDPNLIPENGDEEEEEDDEEEEEEEEEEEEELTESERVDYGFGLSLEAARHHENSSRGAVVGVGDESRALPDVMQGMVLSSMQHFSEAFHQVLGEKHKRGHLAEAEGHRDTCDEDSVAGESDRIDDGTVNGRGCSPGESASGGLSKKLLLGSPSSLSPFSKRIKLEKEFDLPPAAMPNTENVYSQWLAGYAASRQLKDPFLSFGDSRQSPFASSSEHSSENGSLRFSTPPGELDGGISGRSGTGSGGSTPHISGPGPGRPSSKEGRRSDTCSSHTPIRRSTQRAQDVWQFSDGSSRALKF

SEQ ID NO: 515 - DNA, 5963 bp, Homo sapiens
ttttttttttttttttgcttaaaaaaaagccatgacggctctcccacaattcatcttccctgcgccatctttgtattatttctaatttattttggatgtcaaaaggcactgatgaagatattttctctggagtctccttctttctaacccggctctcccgatgtgaaccgagccgtcgtccgcccgccgccgccgccgccgccgccgccgcccgccccgcagcccaccatgtctcgccgcaagcaaggcaaaccccagcacttaagcaaacgggaattctcgcccgagcctcttgaagccattcttacagatgatgaaccagaccacggcccgttgggagctccagaaggggatcatgacctcctcacctgtgggcagtgccagatgaacttcccattgggggacattcttatttttatcgagcacaaacggaaacaatgcaatggcagcctctgcttagaaaaagctgtggataagccaccttccccttcaccaatcgagatgaaaaaagcatccaatcccgtggaggttggcatccaggtcacgccagaggatgacgattgtttatcaacgtcatctagaggaatttgccccaaacaggaacacatagcagataaacttctgcactggaggggcctctcctcccctcgttctgcacatggagctctaatccccacgcctgggatgagtgcagaatatgccccgcagggtatttgtaaagatgagcccagcagctacacatgtacaacttgcaaacagccattcaccagtgcatggtttctcttgcaacacgcacagaacactcatggattaagaatctacttagaaagcgaacacggaagtcccctgaccccgcgggttggtatcccttcaggactaggtgcagaatgtccttcccagccacctctccatgggattcatattgcagacaataacccctttaacctgctaagaataccaggatcagtatcgagagaggcttccggcctggcagaagggcgctttccacccactccccccctgtttagtccaccaccgagacatcacttggacccccaccgcatagagcgcctgggggcggaagagatggccctggccacccatcacccgagtgcctttgacagggtgctgcggttgaatccaatggctatggagcctcccgccatggatttctctaggagacttagagagctggcagggaacacgtctagcccaccgctgtccccaggccggcccagccctatgcaaaggttactgcaaccattccagccaggtagcaagccgcccttcctggcgacgccccccctccctcctctgcaatccgcccctcctccctcccagcccccggtcaagtccaagtcatgcgagttctgcggcaagacgttcaaatttcagagcaacctggtggtgcaccggcgcagccacacgggcgagaagccctacaagtgcaacctgtgcgaccacgcgtgcacccaggccagcaagctgaagcgccacatgaagacgcacatgcacaaatcgtcccccatgacggtcaagtccgacgacggtctctccaccgccagctccccggaacccggcaccagcgacttggtgggcagcgccagcagcgcgctcaagtccgtggtggccaagttcaagagcgagaacgaccccaacctgatcccggagaacggggacgaggaggaagaggaggacgacgaggaagaggaagaagaggaggaagaggaggaggaggagctgacggagagcgagagggtggactacggcttcgggctgagcctggaggcggcgcgccaccacgagaacagctcgcggggcgcggtcgtgggcgtgggcgacgagagccgcgccctgcccgacgtcatgcagggcatggtgctcagctccatgcagcacttcagcgaggccttccaccaggtcctgggcgagaagcataagcgcggccacctggccgaggccgagggccacagggacacttgcgacgaagactcggtggccggcgagtcggaccgcatagacgatggcactgttaatggccgcggctgctccccgggcgagtcggcctcggggggcctgtccaaaaagctgctgctgggcagccccagctcgctgagccccttctctaagcgcatcaagctcgagaaggagttcgacctgcccccggccgcgatgcccaacacggagaacgtgtactcgcagtggctcgccggctacgcggcctccaggcagctcaaagatcccttccttagcttcggagactccagacaatcgccttttgcctcctcgtcggagcactcctcggagaacgggagcttgcgcttctccacaccgcccggggagctggacggagggatctcggggcgcagcggcacgggaagtggagggagcacgccccatattagtggtccgggcccgggcaggcccagctcaaaagagggcagacgcagcgacacttgtgagtactgtgggaaagtcttcaagaactgtagcaatctcactgtccacaggagaagccacacgggcgaaaggccttataaatgcgagctgtgcaactatgcctgtgcccagagtagcaagctcaccaggcacatgaaaacgcatggccaggtggggaaggacgtttacaaatgtgaaatttgtaagatgccttttagcgtgtacagtaccctggagaaacacatgaaaaaatggcacagtgatcgagtgttgaataatgatataaaaactgaatagaggtatattaatacccctccctcactcccacctgacaccccctttttcaccactccccttccccatcgccctccagccccactccctgtaggatttttttctagtcccatgtgatttaaacaaacaaacaaacaaacagaagtaacgaagctaagaatatgagagtgcttgtcaccagcacacctgttttttttctttttctttttcttttttctttttccttttttttttttttcctttatgttctcaccgtttgaatgcatgatctgtatggggcaatactattgcattttacgcaaactttgagcctttctcttgtgcaataatttacatgttgtgtatgtttttttttaaacttagacagcatgtatggtatgttatggctattttaaattgtccctaattcgttgctgagcaaacatgttgctgtttccagttccgttctgagagaaaaagagagagagagagaaaaagaccatgctgcatacattctgtaatacatatcatgtacagttttattttataacgtgaggaggaaaaacagtctttggattaaccctctatagacagaatagatagcactgaaaaaaaatctctatgagctaaatgtctgtctctaaagggttaaatgtatcaattggaaaggaagaaaaaaggccttgaattgacaaattaacagaaaaacagaacaagtttattctatcatttggttttaaaatatgagtgccttggatctattaaaaccacatcgatggttctttctacttgttataaacttgtagcttaattcagcattgggtgaggtaataaaccttaggaactagcatataattctatattgtatttctcacaacaatggctacctaaaaagatgacccattatgtcctagttaatcatcatttttcctttagtttaattttataaacaaaactgattataccagtataaaagctactttgctcctggtgagagcttaaaagaaatgggctgttttgcccaaagttttattttttttaaacaatgattaaattgaatgtgtaatgtgcaaaagccctggaacgcaattaaatacactagtaaggagttcattttatgaagatatttgctttaataatgtctttttaaaaatactggcaccaaaagaaatagatccagatctacttggttgtcaagtggacaatcaaatgataaactttaagaccttgtataccatattgaaaggaagaggctgacaataaggtttgacagaggggaacagaagaaaataatatgatttattagcacaacgtggtactatttgccatttaaaactagaacaggtatataagctaatattgatacaatgatgattaactatgaattcttaagacttgcatttaaatgtgacattcttaaaaaaagaagagaaagaattttaagagtagcagtatatatgtctgtgctccctaaaagttgtacttcatttcttttccatacactgtgtgctatttgtgttaacatggaagaggattcattgtttttatttttatttttttaattttttcttttttattaagctagcatctgccccagttggtgttcaaatagcacttgactctgcctgtgatatctgtatcttttctctaatcagagatacagaggttgagtataaaataaacctgctcagataggacaattaagtgcactgtacaattttcccagtttacaggtctatacttaagggaaaagttgcaagaatgctgaaaaaaaattgaacacaatctcattgaggagcattttttaaaaactaaaaaaaaaaaaactttgccagccatttacttgactattgagcttacttacttggacgcaacattgcaagcgctgtgaatggaaacagaatacacttaacatagaaatgaatgattgctttcgcttctacagtgcaaggatttttttgtacaaaacttttttaaatataaatgttaagaaaaattttttttaaaaaacacttcattatgtttaggggggaactgcattttagggttccattgtcttggtggtgttacaagacttgttatccatttaaaaatggtagtggaaattctatgccttggatacacaccgctcttcaggttgtaaaaaaaaaaaacatacattggggaaaggtttaagattatatagtacttaaatataggaaaatgcacactcatgttgattcctatgctaaaatacatttatggtcttttttctgtatttctagaatggtatttgaattaaatgttcatctagtgttaggcactatagtatttatattgaagcttgtatttttaactgttgcttgttctcttaaaaggtatcaatgtaccttttttggtagtggaaaaaaaaaagacaggctgccacagtatatttttttaatttggcaggataatatagtgcaaattatttgtatgcttcaaaaaaaaaaaaaagagagaaacaaaaaagtgtgacattacagatgagaagccatataatggcggtttgggggagcctgctagaatgtcacatggatggctgtcataggggttgtacatatccttttttgttcctttttcctgctgccatactgtatgcagtactgcaagctaataacgttggtttgttatgtagtgtgctttttgtccctttccttctatcaccctacattccagcatcttaccttcatatgcagtaaaagaaagaaagaaaaaaaaaggaaaaaaaaaaaaaaaccaatgttttgcagtttttttcattgccaaaaactaaatggtgctttatatttagattggaaagaatttcatatgcaaagcatattaaagagaaagcccgctttagtcaatacttttttgtaaatggcaatgcagaatattttgttattggccttttctattcctgtaatgaaagctgtttgtcgtaacttgaaattttatcttttactatgggagtcactatttattattgcttatgtgccctgttcaaaacagaggcacttaatttgatcttttatttttctttgtttttatttttttttttatttagatgaccaaaggtcattacaacctggctttttattgtatttgtttctggtctttgttaagttctattggaaaaaccactgtctgtgtttttttggcagttgtctgcattaacctgttcatacacccattttgtccctttattgaaaaaataaaaaaaattaaaagtacaaaaaaaaaaaaaaaaa

SEQ ID NO: 516 - protein, 835 aa, Homo sapiens
MSRRKQGKPQHLSKREFSPEPLEAILTDDEPDHGPLGAPEGDHDLLTCGQCQMNFPLGDILIFIEHKRKQCNGSLCLEKAVDKPPSPSPIEMKKASNPVEVGIQVTPEDDDCLSTSSRGICPKQEHIADKLLHWRGLSSPRSAHGALIPTPGMSAEYAPQGICKDEPSSYTCTTCKQPFTSAWFLLQHAQNTHGLRIYLESEHGSPLTPRVGIPSGLGAECPSQPPLHGIHIADNNPFNLLRIPGSVSREASGLAEGRFPPTPPLFSPPPRHHLDPHRIERLGAEEMALATHHPSAFDRVLRLNPMAMEPPAMDFSRRLRELAGNTSSPPLSPGRPSPMQRLLQPFQPGSKPPFLATPPLPPLQSAPPPSQPPVKSKSCEFCGKTFKFQSNLVVHRRSHTGEKPYKCNLCDHACTQASKLKRHMKTHMHKSSPMTVKSDDGLSTASSPEPGTSDLVGSASSALKSVVAKFKSENDPNLIPENGDEEEEEDDEEEEEEEEEEEEELTESERVDYGFGLSLEAARHHENSSRGAVVGVGDESRALPDVMQGMVLSSMQHFSEAFHQVLGEKHKRGHLAEAEGHRDTCDEDSVAGESDRIDDGTVNGRGCSPGESASGGLSKKLLLGSPSSLSPFSKRIKLEKEFDLPPAAMPNTENVYSQWLAGYAASRQLKDPFLSFGDSRQSPFASSSEHSSENGSLRFSTPPGELDGGISGRSGTGSGGSTPHISGPGPGRPSSKEGRRSDTCEYCGKVFKNCSNLTVHRRSHTGERPYKCELCNYACAQSSKLTRHMKTHGQVGKDVYKCEICKMPFSVYSTLEKHMKKWHSDRVLNNDIKTE

SEQ ID NO: 517 - DNA, 3976 bp, Homo sapiens
ttttttttttttttttgcttaaaaaaaagccatgacggctctcccacaattcatcttccctgcgccatctttgtattatttctaatttattttggatgtcaaaaggcactgatgaagatattttctctggagtctccttctttctaacccggctctcccgatgtgaaccgagccgtcgtccgcccgccgccgccgccgccgccgccgccgcccgccccgcagcccaccatgtctcgccgcaagcaaggcaaaccccagcacttaagcaaacgggaattctcgcccgagcctcttgaagccattcttacagatgatgaaccagaccacggcccgttgggagctccagaaggggatcatgacctcctcacctgtgggcagtgccagatgaacttcccattgggggacattcttatttttatcgagcacaaacggaaacaatgcaatggcagcctctgcttagaaaaagctgtggataagccaccttccccttcaccaatcgagatgaaaaaagcatccaatcccgtggaggttggcatccaggtcacgccagaggatgacgattgtttatcaacgtcatctagaggaatttgccccaaacaggaacacatagcagataaacttctgcactggaggggcctctcctcccctcgttctgcacatggagctctaatccccacgcctgggatgagtgcagaatatgccccgcagggtatttgtaaagatgagcccagcagctacacatgtacaacttgcaaacagccattcaccagtgcatggtttctcttgcaacacgcacagaacactcatggattaagaatctacttagaaagcgaacacggaagtcccctgaccccgcgggttggtatcccttcaggactaggtgcagaatgtccttcccagccacctctccatgggattcatattgcagacaataacccctttaacctgctaagaataccaggatcagtatcgagagaggcttccggcctggcagaagggcgctttccacccactccccccctgtttagtccaccaccgagacatcacttggacccccaccgcatagagcgcctgggggcggaagagatggccctggccacccatcacccgagtgcctttgacagggtgctgcggttgaatccaatggctatggagcctcccgccatggatttctctaggagacttagagagctggcagggaacacgtctagcccaccgctgtccccaggccggcccagccctatgcaaaggttactgcaaccattccagccaggtagcaagccgcccttcctggcgacgccccccctccctcctctgcaatccgcccctcctccctcccagcccccggtcaagtccaagtcatgcgagttctgcggcaagacgttcaaatttcagagcaacctggtggtgcaccggcgcagccacacgggcgagaagccctacaagtgcaacctgtgcgaccacgcgtgcacccaggccagcaagctgaagcgccacatgaagacgcacatgcacaaatcgtcccccatgacggtcaagtccgacgacggtctctccaccgccagctccccggaacccggcaccagcgacttggtgggcagcgccagcagcgcgctcaagtccgtggtggccaagttcaagagcgagaacgaccccaacctgatcccggagaacggggacgaggaggaagaggaggacgacgaggaagaggaagaagaggaggaagaggaggaggaggagctgacggagagcgagagggtggactacggcttcgggctgagcctggaggcggcgcgccaccacgagaacagctcgcggggcgcggtcgtgggcgtgggcgacgagagccgcgccctgcccgacgtcatgcagggcatggtgctcagctccatgcagcacttcagcgaggccttccaccaggtcctgggcgagaagcataagcgcggccacctggccgaggccgagggccacagggacacttgcgacgaagactcggtggccggcgagtcggaccgcatagacgatggcactgttaatggccgcggctgctccccgggcgagtcggcctcggggggcctgtccaaaaagctgctgctgggcagccccagctcgctgagccccttctctaagcgcatcaagctcgagaaggagttcgacctgcccccggccgcgatgcccaacacggagaacgtgtactcgcagtggctcgccggctacgcggcctccaggcagctcaaagatcccttccttagcttcggagactccagacaatcgccttttgcctcctcgtcggagcactcctcggagaacgggagcttgcgcttctccacaccgcccggggagctggacggagggatctcggggcgcagcggcacgggaagtggagggagcacgccccatattagtggtccgggcccgggcaggcccagctcaaaagagggcagacgcagcgacactttctccaacctctttctaggttcttcacacacccccattcggcgtagtacccagagagctcaagatgtgtggcagttttcggatggaagctcgagagcccttaagttctgagaaaatttgaagcccccaggggtggggtggacgcgtgccgcccagtcgacgtcagcgtggtctgtcatcctgctagtttgtgatgttttctgacagtagcctccaagaagccgttgtgcgaagacagagtcctgcagagtccttccagcctaggcctgcagcgccattttatttatattttttaataaaaagtaaaaacaaaaaaacagacccacattggaacagtgaatcagtcccatagagagggcccgtggaccatcgctgtcatgagtgatgccctggcccttctgaaaccagccaacctaattacctgtattgtggaaatgcgcatgagtccccaaccccttgtttctatacattctatgttgtcttttaaaaagtgtgcttaacattgacacaataaatgttggagctttaggtggtgtttgcttgttctttaatttttaatgcttataagacaatgaggctgcttatgattttgtacttctgtacctgtttcctacagacacccatcgggtgggtaggaggaacagatttgagaaatgggcaggagatgtaggaggggaactaggttaccgcttatcagatggcataaattttcaaggagaatcaaaatgcaaaacttgggaataaatcatagcaatatcataattaatgtagtagtaatattgctgtttattaatgctgaagtgtggttttcctaactgtctgacttataatttgcataccattaaataatgcataatatggcacgccgaatcctgtttttcaaatatatgcttttggtggctaccatgcaggatttgaatttgtcttttaatttagcttaggaaagaacatcactgggcgagcggtaaatcctaaagaaggtgataaatgtcagtagtttcttattaaatattctaattttaggttcccaaaccttcaggaaatatatcttaatgcagacaaacaaacataaaacttctttagtacttacatcaggaaatttggggcagattttagaggggggaaattataggaggaaagaagttcacatcagaacagacaatcacagcaatgctctattccttagaaattagtgccacaaataagttacatctacaaacaggtggtaaaaattctttctggcccagttaatttgcacagaacttttctcagtttggtattttttactgcttggagatccagaagagaattagaaacaacatagcaaattaaaataggtttgtcaataatagagctcagacacctgtgtgctgtagattcacatacaggccgtgaacctaagtggggaaaatcctacctatccaccttctggctagattacctagcttagtgaaaagatagccaaataattggcatgtgaattatttcctgcttattcataataaataatgactgtcta

SEQ ID NO: 518 - protein, 779 aa, Homo sapiens
MSRRKQGKPQHLSKREFSPEPLEAILTDDEPDHGPLGAPEGDHDLLTCGQCQMNFPLGDILIFIEHKRKQCNGSLCLEKAVDKPPSPSPIEMKKASNPVEVGIQVTPEDDDCLSTSSRGICPKQEHIADKLLHWRGLSSPRSAHGALIPTPGMSAEYAPQGICKDEPSSYTCTTCKQPFTSAWFLLQHAQNTHGLRIYLESEHGSPLTPRVGIPSGLGAECPSQPPLHGIHIADNNPFNLLRIPGSVSREASGLAEGRFPPTPPLFSPPPRHHLDPHRIERLGAEEMALATHHPSAFDRVLRLNPMAMEPPAMDFSRRLRELAGNTSSPPLSPGRPSPMQRLLQPFQPGSKPPFLATPPLPPLQSAPPPSQPPVKSKSCEFCGKTFKFQSNLVVHRRSHTGEKPYKCNLCDHACTQASKLKRHMKTHMHKSSPMTVKSDDGLSTASSPEPGTSDLVGSASSALKSVVAKFKSENDPNLIPENGDEEEEEDDEEEEEEEEEEEEELTESERVDYGFGLSLEAARHHENSSRGAVVGVGDESRALPDVMQGMVLSSMQHFSEAFHQVLGEKHKRGHLAEAEGHRDTCDEDSVAGESDRIDDGTVNGRGCSPGESASGGLSKKLLLGSPSSLSPFSKRIKLEKEFDLPPAAMPNTENVYSQWLAGYAASRQLKDPFLSFGDSRQSPFASSSEHSSENGSLRFSTPPGELDGGISGRSGTGSGGSTPHISGPGPGRPSSKEGRRSDTFSNLFLGSSHTPIRRSTQRAQDVWQFSDGSSRALKF

SEQ ID NO: 519 - DNA, 2358 bp, Homo sapiens
ttttttttttttttttgcttaaaaaaaagccatgacggctctcccacaattcatcttccctgcgccatctttgtattatttctaatttattttggatgtcaaaaggcactgatgaagatattttctctggagtctccttctttctaacccggctctcccgatgtgaaccgagccgtcgtccgcccgccgccgccgccgccgccgccgccgcccgccccgcagcccaccatgtctcgccgcaagcaaggcaaaccccagcacttaagcaaacgggaattctcgcccgagcctcttgaagccattcttacagatgatgaaccagaccacggcccgttgggagctccagaaggggatcatgacctcctcacctgtgggcagtgccagatgaacttcccattgggggacattcttatttttatcgagcacaaacggaaacaatgcaatggcagcctctgcttagaaaaagctgtggataagccaccttccccttcaccaatcgagatgaaaaaagcatccaatcccgtggaggttggcatccaggtcacgccagaggatgacgattgtttatcaacgtcatctagaggaatttgccccaaacaggaacacatagcagataaacttctgcactggaggggcctctcctcccctcgttctgcacatggagctctaatccccacgcctgggatgagtgcagaatatgccccgcagggtatttgtaaagatgagcccagcagctacacatgtacaacttgcaaacagccattcaccagtgcatggtttctcttgcaacacgcacagaacactcatggattaagaatctacttagaaagcgaacacggaagtcccctgaccccgcgggttcttcacacacccccattcggcgtagtacccagagagctcaagatgtgtggcagttttcggatggaagctcgagagcccttaagttctgagaaaatttgaagcccccaggggtggggtggacgcgtgccgcccagtcgacgtcagcgtggtctgtcatcctgctagtttgtgatgttttctgacagtagcctccaagaagccgttgtgcgaagacagagtcctgcagagtccttccagcctaggcctgcagcgccattttatttatattttttaataaaaagtaaaaacaaaaaaacagacccacattggaacagtgaatcagtcccatagagagggcccgtggaccatcgctgtcatgagtgatgccctggcccttctgaaaccagccaacctaattacctgtattgtggaaatgcgcatgagtccccaaccccttgtttctatacattctatgttgtcttttaaaaagtgtgcttaacattgacacaataaatgttggagctttaggtggtgtttgcttgttctttaatttttaatgcttataagacaatgaggctgcttatgattttgtacttctgtacctgtttcctacagacacccatcgggtgggtaggaggaacagatttgagaaatgggcaggagatgtaggaggggaactaggttaccgcttatcagatggcataaattttcaaggagaatcaaaatgcaaaacttgggaataaatcatagcaatatcataattaatgtagtagtaatattgctgtttattaatgctgaagtgtggttttcctaactgtctgacttataatttgcataccattaaataatgcataatatggcacgccgaatcctgtttttcaaatatatgcttttggtggctaccatgcaggatttgaatttgtcttttaatttagcttaggaaagaacatcactgggcgagcggtaaatcctaaagaaggtgataaatgtcagtagtttcttattaaatattctaattttaggttcccaaaccttcaggaaatatatcttaatgcagacaaacaaacataaaacttctttagtacttacatcaggaaatttggggcagattttagaggggggaaattataggaggaaagaagttcacatcagaacagacaatcacagcaatgctctattccttagaaattagtgccacaaataagttacatctacaaacaggtggtaaaaattctttctggcccagttaatttgcacagaacttttctcagtttggtattttttactgcttggagatccagaagagaattagaaacaacatagcaaattaaaataggtttgtcaataatagagctcagacacctgtgtgctgtagattcacatacaggccgtgaacctaagtggggaaaatcctacctatccaccttctggctagattacctagcttagtgaaaagatagccaaataattggcatgtgaattatttcctgcttattcataataaataatgactgtcta

SEQ ID NO: 520 - protein, 243 aa, Homo sapiens
MSRRKQGKPQHLSKREFSPEPLEAILTDDEPDHGPLGAPEGDHDLLTCGQCQMNFPLGDILIFIEHKRKQCNGSLCLEKAVDKPPSPSPIEMKKASNPVEVGIQVTPEDDDCLSTSSRGICPKQEHIADKLLHWRGLSSPRSAHGALIPTPGMSAEYAPQGICKDEPSSYTCTTCKQPFTSAWFLLQHAQNTHGLRIYLESEHGSPLTPRVLHTPPFGVVPRELKMCGSFRMEAREPLSSEKI

SEQ ID NO: 521 - DNA, 3853 bp, Homo sapiens
gagcggcttcgcttccagccccgagtgaggcggagacccaggcgggcgggcagagcaggcggcaccgcacctcggccagaggcggctgcagcagctgctgcccttgtccctgccgccgcctctccagtcccttctgtgattaccactccagctgctgggaacgggcgagaaagaggaggaggcgagaaactcccaccgacccacagagggagcatgacttcggcaacttcacctatcattctgaaatgggaccccaaaagtttggaaatccggacgctaacagtggaaaggctgttggagccacttgttacacaggtgactacacttgtcaacacaagcaacaaaggcccatctggtaaaaagaaagggaggtcaaagaaagcccatgtactagctgcctctgtagagcaagccactcagaatttcctggaaaagggtgaacagatcgctaaggagagtcaagatctcaaagaagagttggtggctgctgtagaggatgtgcgcaaacaaggtgagacgatgcggatcgcctcctccgagtttgcagatgacccttgctcgtcggtaaagcgcggcaccatggtacgggcggcaagggctttgctctccgcggtgacacgcttactcatcctggcggacatggcagatgtcatgagacttttatcccatctgaaaattgtggaagaggccctggaagctgtcaaaaatgctacaaatgagcaagaccttgcaaaccgttttaaagagtttgggaaagagatggtgaaacttaactatgtagcagcaagaagacaacaggagctgaaggatcctcactgtcgggatgagatggcagccgcccgaggggctctgaagaagaatgccacaatgctgtacacggcctctcaagcatttctccgccacccagatgtcgccgctacgagagccaaccgagattatgtgttcaaacaagtccaggaggccatcgccggcatctccaatgctgctcaagctacctcgcccactgacgaagccaagggccacacgggcatcggcgagctggctgcggctcttaatgagtttgacaataagattatcctggaccccatgacgttcagcgaggccaggttccggccgtccctggaggagaggctggagagcatcatcagcggcgcagcgctgatggccgactcctcctgcacgcgagacgaccggcgcgagaggatcgtggcggagtgcaacgccgtgcggcaggcgctccaggacctgctcagcgagtacatgaataatactggaaggaaagaaaaaggagatcctctcaacattgcgattgataagatgactaagaaaacaagagatctaaggagacagcttcggaaagcagtgatggatcacatatctgactctttcctggaaaccaatgttcctttgctagttctcattgaggctgcaaagagcggaaatgaaaaggaagtgaaagaatatgcccaagttttccgtgagcatgccaacaaactggtagaggttgccaatttggcctgttccatctccaacaatgaagaaggggtgaaattagttcggatggcagccacccagattgacagcctgtgtccccaggtcatcaatgccgctctgacactggctgcccggccacagagcaaagttgctcaggataacatggacgtcttcaaagaccagtgggagaagcaggtccgagtgttgacagaggccgtggatgacatcacctcagtggatgacttcctctctgtctcagaaaatcacatcttggaggatgtgaacaagtgtgtgatagccctccaagagggcgatgtggacactctggaccggactgcaggggccatcaggggccgggcagctcgagtcatacacatcatcaatgctgagatggagaactatgaagctggggtttatactgagaaggtgttggaagctacaaaattgctttctgaaacagtgatgccacgcttcgctgaacaagtagaggttgccattgaagccctgagtgccaacgttcctcaaccgtttgaggagaatgagttcatcgatgcctctcgcctggtgtatgatggcgttcgggacatcagaaaggctgtgctgatgatcaggaccccagaagaactagaggatgattctgactttgagcaggaagattatgatgtgcgtagcaggacaagtgttcagactgaggatgaccagctcattgcagggcagagcgcacgggccatcatggcgcaactaccgcaggaggagaaggcaaaaatagctgagcaggtggagatattccatcaagagaaaagcaagctggatgcagaagtggccaaatgggacgacagcggcaatgatatcattgtactggccaagcagatgtgtatgatcatgatggaaatgacagacttcacaagaggcaaaggcccattgaaaaatacatctgatgtcattaatgctgccaagaaaattgccgaagcaggttctcgaatggacaaattagctcgtgctgtggctgatcagtgtcctgattcagcatgtaagcaggatttattagcctaccttcaacgaattgccttgtattgccatcagcttaatatctgcagcaaggtgaaggcagaagtgcagaatctgggaggagagctcattgtgtcagggctggacagtgccacatcgcttatccaggcagctaaaaacctgatgaatgctgttgtcctcacggtgaaagcatcctatgtggcctcaaccaaataccagaaggtctatgggacagcagctgtcaactcacctgttgtgtcttggaagatgaaggctccagagaagaagccccttgtgaagagagaaaagcctgaagaattccagacacgagttcgacgaggttctcagaagaaacacatttcgcctgtacaggctttaagtgaattcaaagcaatggattccttctaggacgataggttttaacaagaaagctttttctttcttttctttctttctttttctttttaattccatttttgtatgcatacctgccagctcgtatgcctctggcatggggaaattaagggaacagtgtctgtttgcatgtaagatgagatgagatcaatactactgatccatctgtagcctgggaaggagacaggacattcctgtactaaggtggcacagagctgtcctttgcaacattctcataaaattgggcacagagttcgcattggcgcaatatttatgggagtgggagggatggggaaaataaacttaactctacaaaagcaaactctaatgcatgcaagaatcattaggttggcaggtatatgcataagtgaaaaatctggaagtgtaatggtagaacataaaacttgtattgcttctgtttcagtgcaaaaatgtactagccaatacgcttaagtgtgtggcccatgaattgaacaatttaaccttgaagtctatatccgtgatattatgtcgatttttaactgaggggaaattaactagtccagcctaaaatgcttcttttaatctgcattctgtttcctcttctagttgtgccattactagtgatcatgtttttttcccccctttaatgaaaacaataaacatctatttgagacaattaaaatccttctgggggcactggaagcacaatacggtgaccaatcttgctttcatttttttttctttttaatttgaaccatgattttgctagaaatagaaggcccagtggtggaatattagagggaaggaaactgacaacgtgtgaaagttagaggcaaatacataggtgtagcttggagtgctggtatctaatataccattgtattcactaactaactcaaaataaacacatttaatcttgaaaaaaaaaaaaaaa

SEQ ID NO: 522 - protein, 905 aa, Homo sapiens
MTSATSPIILKWDPKSLEIRTLTVERLLEPLVTQVTTLVNTSNKGPSGKKKGRSKKAHVLAASVEQATQNFLEKGEQIAKESQDLKEELVAAVEDVRKQGETMRIASSEFADDPCSSVKRGTMVRAARALLSAVTRLLILADMADVMRLLSHLKIVEEALEAVKNATNEQDLANRFKEFGKEMVKLNYVAARRQQELKDPHCRDEMAAARGALKKNATMLYTASQAFLRHPDVAATRANRDYVFKQVQEAIAGISNAAQATSPTDEAKGHTGIGELAAALNEFDNKIILDPMTFSEARFRPSLEERLESIISGAALMADSSCTRDDRRERIVAECNAVRQALQDLLSEYMNNTGRKEKGDPLNIAIDKMTKKTRDLRRQLRKAVMDHISDSFLETNVPLLVLIEAAKSGNEKEVKEYAQVFREHANKLVEVANLACSISNNEEGVKLVRMAATQIDSLCPQVINAALTLAARPQSKVAQDNMDVFKDQWEKQVRVLTEAVDDITSVDDFLSVSENHILEDVNKCVIALQEGDVDTLDRTAGAIRGRAARVIHIINAEMENYEAGVYTEKVLEATKLLSETVMPRFAEQVEVAIEALSANVPQPFEENEFIDASRLVYDGVRDIRKAVLMIRTPEELEDDSDFEQEDYDVRSRTSVQTEDDQLIAGQSARAIMAQLPQEEKAKIAEQVEIFHQEKSKLDAEVAKWDDSGNDIIVLAKQMCMIMMEMTDFTRGKGPLKNTSDVINAAKKIAEAGSRMDKLARAVADQCPDSACKQDLLAYLQRIALYCHQLNICSKVKAEVQNLGGELIVSGLDSATSLIQAAKNLMNAVVLTVKASYVASTKYQKVYGTAAVNSPVVSWKMKAPEKKPLVKREKPEEFQTRVRRGSQKKHISPVQALSEFKAMDSF

SEQ ID NO: 523 - DNA, 4718 bp, Homo sapiens
gaggggggcgggtccgggaggctgtgcgtgtcttgtgagagctcttgaaccaagtcagcgctggagtcggctaggcggctggaaacggcggctgccgccggtgactcagggaggcgggaggcgggggaggagctcttcctgcaggcgtggaaaccatggtgctcacgctcggagaaagttggccggtattggtggggaggaggtttctcagtctgtccgcagccgacggcagcgatggcagccacgacagctgggacgtggagcgcgtcgccgagtggccctggctctccgggaccattcgagctgtttcccacaccgacgttaccaagaaggatctgaaggtgtgtgtggaatttgatggggaatcttggaggaaaagaagatggatagaagtctacagccttctaaggagagcatttttagtagaacataatttggttttagctgaacgaaagtcacctgaaatttctgaacgaattgtacagtggcctgcaataacgtacaaacctctgttggacaaagctggtttgggatccataacttctgttcgctttctgggagatcaacaaagagtatttctttctaaagaccttttgaagcctatacaggatgtaaacagtcttcgactttctcttacggataatcagattgtcagtaaagaatttcaagctttgattgtgaagcatttagatgaaagccatcttttaaaaggtgacaaaaacttagttggttcagaagtaaaaatttatagcttggacccatctactcagtggttttcagcaaccgttataaatggaaacccagcatcaaaaactcttcaagtcaactgtgaggagattccagcactgaaaattgttgatccgtcactgattcatgttgaagttgtacacgataaccttgtgacatgtggtaattctgcaagaattggagctgtaaaacgcaagtcttctgagaataatggaaccctggtttccaaacaagcaaaatcttgctctgaggcctctcccagtatgtgtcctgtgcagtctgtacctacaacagtttttaaggagatactgcttggctgtactgcggcaactccacctagtaaggacccaagacagcaaagtactccccaggctgccaactctccacctaaccttggagcaaaaattcctcaaggatgtcataaacaaagtttaccagaggaaatttcttcctgtctaaatacaaagtctgaagctctgagaacaaaaccagatgtctgcaaagcagggttgctctcaaagtcctctcagattggaactggagacttgaaaattctgactgagccaaaaggcagctgtactcagcctaagacaaacactgatcaggaaaacagattggagtctgttccacaagcattgactggccttcctaaggagtgcttacctacaaaggcttcttctaaggcagaattggaaattgccaatcctcctgaactgcagaagcacctagaacatgcaccttccccatcggatgtttcaaatgcaccagaagtgaaagcaggtgtcaatagtgatagccctaataactgttcaggaaaaaaggtagaaccttcagctttagcttgccgatcacagaatttaaaggaatcttcagtaaaagtagataatgaaagctgttgttcaagaagcaacaataaaatccagaatgccccatccaggaagtcggttttgacagacccagctaaactcaaaaagctgcaacagagtggcgaggccttcgtacaggatgattcttgtgtgaacatcgtggcacagttgcctaaatgccgagagtgtcgcttggacagtctccgcaaggataaggagcaacagaaggactcacctgtgttttgccgcttctttcacttcaggaggttacaattcaacaaacatggtgtgttgcgggtagaaggcttcttaacaccaaacaagtatgacaatgaagcaattggcttgtggttacctttaaccaaaaacgttgtggggattgatttggacacagcaaagtacatcttggccaacattggagaccacttctgtcaaatggtgatttctgaaaaggaagctatgtcaactattgagccacacagacaggttgcttggaagcgagctgtcaaaggtgttcgagaaatgtgtgatgtgtgcgacaccaccatcttcaacctgcactgggtgtgtcctcggtgtgggtttggagtatgtgtggactgctaccggatgaagagaaagaattgccaacagggtgctgcttacaagactttctcttggctaaaatgtgtgaagagtcagatacatgaaccagagaacttaatgcccacacagatcattcctggaaaagcactctatgatgttggagacattgttcattctgtaagagcgaaatggggaataaaggcaaactgcccttgttcaaacaggcaattcaaactcttttcaaagccagcctcaaaggaagacctaaaacagacttctttagctggagaaaaaccgactcttggtgcagtgctccagcagaatccctcagtgttggagccagcagctgtgggtggggaagcagcctccaagccagccggcagcatgaagcctgcctgtccagccagcacatctcctctaaactggctggccgacctaaccagcgggaatgtcaacaaggaaaacaaggaaaaacaaccaacaatgccaattttaaagaatgaaatcaaatgccttccacccctcccacctttaagcaaatccagcacagtcctccatacgtttaacagcacaattttgacacccgtaagcaacaacaattctggtttcctccggaatctcttgaattcttctacaggaaagacagaaaatggactcaagaatacaccaaaaatccttgatgacatctttgcctctttggtgcaaaataagacgacttctgatttatctaagaggcctcaaggactaaccatcaagcccagcattctgggctttgacactcctcactattggctttgtgataatcgcttgctgtgcttgcaagaccccaacaataagagcaactggaatgtgtttagggagtgctggaaacaagggcagccagtgatggtgtctggagtgcatcataaattgaactctgaactttggaaacctgaatccttcaggaaagagtttggtgagcaggaagtagacctagttaattgtaggaccaatgaaatcatcacaggagccacagtaggagacttctgggatggatttgaagatgttccaaatcgtttgaaaaatgaaaaagaaccaatggtgttgaaacttaaggactggccaccaggagaagattttagagatatgatgccttccaggtttgatgatctgatggccaacattccactgcccgagtacacaaggcgagatggcaaactgaatttggcctctaggctgccaaactactttgttcggccagatctgggccccaagatgtataatgcttatggattaatcactcctgaagatcggaaatatggaacaacaaatcttcacttagatgtatctgatgcagctaatgtcatggtctatgtgggaattcccaaaggacagtgtgagcaagaagaagaagtccttaagaccatccaagatggagattctgacgaactcacaataaagcgatttattgaaggaaaagagaagccaggagcactgtggcacatatatgctgcaaaggacacggagaagataagggaatttcttaaaaaggtatcagaagagcaaggtcaagaaaacccagcagaccacgatcctattcatgatcaaagctggtatttagaccgatcattaagaaaacgtcttcatcaagagtatggagttcaaggctgggctattgtacagtttcttggggatgtggtgtttatcccggcaggagctccacatcaggttcataacttatatagctgcatcaaagtggctgaagattttgtttctccagagcatgttaaacactgcttctggcttactcaggaattccgatatctgtcacagactcataccaatcacgaagataaattacaggtgaagaatgttatctaccatgcagtgaaagatgcagttgctatgctgaaagccagtgaatccagttttggcaaaccttaatctccctgcacattggaaatgaattacaggcagctgttcaaactcttcaggcaggattcctgtggactttgagattcatgttacctcatcttcttttttaaactgtacccaacttgtgagggtactctgtctaatgtatatttctagtgtttacagacagtaaatgtgtatatgtagtaactatttacagaacatgcatccttaaactgtgacttctcacctagtgcagaacttttaccaggctgtaaaagcaaaacctcgtatcagctctggaacaatacctgcagttattcttcagctgtttggacaacttagattgggtttataactattaggaatcactgcacagtttatttgggttgtgttttgtgtctgagtcccctccctcatcccttagggtccagaagagcaatggaggaagtgacagctaatgttgcagttcttattgtatggcataggactggcattatatagcagaaatcaactactgtacaatttcttggggttaaccatctttagttaaatggaattttaatttaaatgacgctttgctaattttaagtgttaagcattttgcattaaaatattcatataata

SEQ ID NO: 524 - protein, 1321 aa, Homo sapiens
MVLTLGESWPVLVGRRFLSLSAADGSDGSHDSWDVERVAEWPWLSGTIRAVSHTDVTKKDLKVCVEFDGESWRKRRWIEVYSLLRRAFLVEHNLVLAERKSPEISERIVQWPAITYKPLLDKAGLGSITSVRFLGDQQRVFLSKDLLKPIQDVNSLRLSLTDNQIVSKEFQALIVKHLDESHLLKGDKNLVGSEVKIYSLDPSTQWFSATVINGNPASKTLQVNCEEIPALKIVDPSLIHVEVVHDNLVTCGNSARIGAVKRKSSENNGTLVSKQAKSCSEASPSMCPVQSVPTTVFKEILLGCTAATPPSKDPRQQSTPQAANSPPNLGAKIPQGCHKQSLPEEISSCLNTKSEALRTKPDVCKAGLLSKSSQIGTGDLKILTEPKGSCTQPKTNTDQENRLESVPQALTGLPKECLPTKASSKAELEIANPPELQKHLEHAPSPSDVSNAPEVKAGVNSDSPNNCSGKKVEPSALACRSQNLKESSVKVDNESCCSRSNNKIQNAPSRKSVLTDPAKLKKLQQSGEAFVQDDSCVNIVAQLPKCRECRLDSLRKDKEQQKDSPVFCRFFHFRRLQFNKHGVLRVEGFLTPNKYDNEAIGLWLPLTKNVVGIDLDTAKYILANIGDHFCQMVISEKEAMSTIEPHRQVAWKRAVKGVREMCDVCDTTIFNLHWVCPRCGFGVCVDCYRMKRKNCQQGAAYKTFSWLKCVKSQIHEPENLMPTQIIPGKALYDVGDIVHSVRAKWGIKANCPCSNRQFKLFSKPASKEDLKQTSLAGEKPTLGAVLQQNPSVLEPAAVGGEAASKPAGSMKPACPASTSPLNWLADLTSGNVNKENKEKQPTMPILKNEIKCLPPLPPLSKSSTVLHTFNSTILTPVSNNNSGFLRNLLNSSTGKTENGLKNTPKILDDIFASLVQNKTTSDLSKRPQGLTIKPSILGFDTPHYWLCDNRLLCLQDPNNKSNWNVFRECWKQGQPVMVSGVHHKLNSELWKPESFRKEFGEQEVDLVNCRTNEIITGATVGDFWDGFEDVPNRLKNEKEPMVLKLKDWPPGEDFRDMMPSRFDDLMANIPLPEYTRRDGKLNLASRLPNYFVRPDLGPKMYNAYGLITPEDRKYGTTNLHLDVSDAANVMVYVGIPKGQCEQEEEVLKTIQDGDSDELTIKRFIEGKEKPGALWHIYAAKDTEKIREFLKKVSEEQGQENPADHDPIHDQSWYLDRSLRKRLHQEYGVQGWAIVQFLGDVVFIPAGAPHQVHNLYSCIKVAEDFVSPEHVKHCFWLTQEFRYLSQTHTNHEDKLQVKNVIYHAVKDAVAMLKASESSFGKP

SEQ ID NO: 525 - DNA, 3113 bp, Homo sapiens
tgccgccgctccctactctgggggttgggactacctccttttccgcgggccccgcccaggcggctgcccgtgacctgcctgggcgcggggaactgaaagccggaaggggcaagacgggttcagttcgtcatggggctgtttggaaagacccaggagaagccgcccaaagaactgatatccaaagagaagaagaaaaagtgaaacgatctgtgaaagatgctgccaagaagggccagaaggatgtctgcatagttctggccaaggagatgatcaggtcaaggaaggctgtgagcaagctgtatgcatccaaagcacacatgaactcagtgctcatggggatgaagaaccagctcgcggtcttgcgagtggctggttccctgcagaagagcacagaagtgatgaaggccatgcaaagtcttgtgaagattccagagattcaggccaccatgagggagttgtccaaagaaatgatgaaggctgggatcatagaggagatgttagaggacacttttgaaagcatggacgatcaggaagaaatggaggaagaagcagaaatggaaattgacagaattctctttgaaattacagcaggggccttgggcaaagcacccagtaaagtgactgatgcccttccagagccagaacctccaggagcgatggctgcctcagaggatgaggaggaggaggaagaggctctggaggccatgcagtcccggctggccacactccgcagctaggggctgcctaccccgctgggtgtgcacacactcctctcaagagctgccattttatgtgtctcttgcactacacctctgttgtgaggactaccattttggagaaggttctgtttgtctcttttcattctctgcccaggttttgggatcgcaaagggattgttcttataaaagtggcataaataaatgcatcatttttaggagtatagacagatatatcttattgtggggaggggaaagaaatccatctgctcatgaagcacttctgaaaatataggtgattgcctgaatgtcgaagactctacttttgtctataaaacactatataaatgaattttaataaatttttgctttagcacttggccccattgtagattgccctgtgcagtaaactttcaaggtgtcggctgccccagattgcttcatttgctgggtgtggaaagagttgctatggccaggcatatgggatttggaagctcagcagaagtgacttctgctctgtggttgctgctccccggctttcacagacatggtatggcagccattcttttatctatttaaccaagaggatgctggggaattgtgctgcttgtcctgttggctggtggctgcattatgtcctggggtgtgcatgtgggtctatttagagcttctgtcccttccttcccattgcaagttgcacccagatgagacagctgtagtactaggtctctttcacctctcattgcctgtccctgcttcgagctggttgtcttgtgcgtgggacatgggccttcctatctgtgttttctcaaagtcaggagctgaccaggagcacactaaggtgtggtcatgcatcataaccaacattcactcatctgggacattcttaagatacatttataaatcatttcagcagtagtactttgtatgtgttgagagtttacagagctctttgacatacgcgatcttagtctttacaaataaggaaaacagctcagtttgggaagtatcagagatgggattcaaacccagatcctctggtccaagttgtatgtgcactgaactaatcaggcaggaaaaaagcccagccactgtctcacagattgttttttgtatattgtagcaaaatcctgaaacaatggggtccttccagtctcatcatacaaaatggcaatcttggctgggtgcggtggttcatgcctataatcccagtgctttacaaggctgaggcaggaggctctcttgagaataggagttcaagaccagcctgggcaacatagcaagatcctgtctctccaaaaaaaaaaaaaaaaaaaaaaaaaaatttcatttttgagtccagaggaccctcctattactcttgatttcatcttcagagtgtagttaaaaaattattttaaataattatttttttaaatcagttgtaggttcacagcaaaagtggacaaaaagaaatttctcatatatcccctgccctcacacatgcatagcctcccaccactatcagtatcccacaccagagtggtacatttgttacaatcaataaacctccattgacacatcattatcacccaaagtccatagtttacatgaagattcactctggtgttgtacattgtatgggcttagacaaatgtatgatgatatctacaattatagaatcatacagaatagtttcactgccctaaaacttctctatgcttcacctgttcatccctttcttccctaatcccctggcaaccactttaaaaaaaaaattaggttcagggggtacatgtgcaggtaaactcgtgacaagggggtttgttatacagattatttagtgacccaggtactaagcctagtacccaatagttacttttctggtcctgtcccttttcccaccctccaccctcaggtaggccccagtatgttattcctttgtgtccatgttatttcactcccacttgtgagaacatggaatatttggtttcctgttcctatgttagtttgttaaggataatggcctccagccccatccatgttcctgcaaaggacatgatctttctttggcaaccactttttactgtcgccatagttcttccttttctagaatgtcatattggaatcatatagtatgtagccttttcagactggcttctttcacttaataatatgcaattaaggttcctccatgtcatttcatggcttaatagtgcatttatttttagcactgaataatactccattgtctagatgaatagtttatccattcacctattgaaagacttcttggtggtttccaagttttggcaattatgaataaagctgttgtaaacatctttgtgcaggtttttctatgggcatgtttttaattcatttgaataaataccaagagcttcagtgctggatcataaa

SEQ ID NO: 526 - protein, 156 aa, Homo sapiens
MIRSRKAVSKLYASKAHMNSVLMGMKNQLAVLRVAGSLQKSTEVMKAMQSLVKIPEIQATMRELSKEMMKAGIIEEMLEDTFESMDDQEEMEEEAEMEIDRILFEITAGALGKAPSKVTDALPEPEPPGAMAASEDEEEEEEALEAMQSRLATLRS

SEQ ID NO: 527 - DNA, 3174 bp, Homo sapiens
tgccgccgctccctactctgggggttgggactacctccttttccgcgggccccgcccaggcggctgcccgtgacctgcctgggcgcggggaactgaaagccggaaggggcaagacgggttcagttcgtcatggggctgtttggaaagacccaggagaagccgcccaaagaactggtcaatgagtggtcattgaagataagaaaggaaatgagagttgttgacaggcaaataagggatatccaaagagaagaagaaaaagtgaaacgatctgtgaaagatgctgccaagaagggccagaaggatgtctgcatagttctggccaaggagatgatcaggtcaaggaaggctgtgagcaagctgtatgcatccaaagcacacatgaactcagtgctcatggggatgaagaaccagctcgcggtcttgcgagtggctggttccctgcagaagagcacagaagtgatgaaggccatgcaaagtcttgtgaagattccagagattcaggccaccatgagggagttgtccaaagaaatgatgaaggctgggatcatagaggagatgttagaggacacttttgaaagcatggacgatcaggaagaaatggaggaagaagcagaaatggaaattgacagaattctctttgaaattacagcaggggccttgggcaaagcacccagtaaagtgactgatgcccttccagagccagaacctccaggagcgatggctgcctcagaggatgaggaggaggaggaagaggctctggaggccatgcagtcccggctggccacactccgcagctaggggctgcctaccccgctgggtgtgcacacactcctctcaagagctgccattttatgtgtctcttgcactacacctctgttgtgaggactaccattttggagaaggttctgtttgtctcttttcattctctgcccaggttttgggatcgcaaagggattgttcttataaaagtggcataaataaatgcatcatttttaggagtatagacagatatatcttattgtggggaggggaaagaaatccatctgctcatgaagcacttctgaaaatataggtgattgcctgaatgtcgaagactctacttttgtctataaaacactatataaatgaattttaataaatttttgctttagcacttggccccattgtagattgccctgtgcagtaaactttcaaggtgtcggctgccccagattgcttcatttgctgggtgtggaaagagttgctatggccaggcatatgggatttggaagctcagcagaagtgacttctgctctgtggttgctgctccccggctttcacagacatggtatggcagccattcttttatctatttaaccaagaggatgctggggaattgtgctgcttgtcctgttggctggtggctgcattatgtcctggggtgtgcatgtgggtctatttagagcttctgtcccttccttcccattgcaagttgcacccagatgagacagctgtagtactaggtctctttcacctctcattgcctgtccctgcttcgagctggttgtcttgtgcgtgggacatgggccttcctatctgtgttttctcaaagtcaggagctgaccaggagcacactaaggtgtggtcatgcatcataaccaacattcactcatctgggacattcttaagatacatttataaatcatttcagcagtagtactttgtatgtgttgagagtttacagagctctttgacatacgcgatcttagtctttacaaataaggaaaacagctcagtttgggaagtatcagagatgggattcaaacccagatcctctggtccaagttgtatgtgcactgaactaatcaggcaggaaaaaagcccagccactgtctcacagattgttttttgtatattgtagcaaaatcctgaaacaatggggtccttccagtctcatcatacaaaatggcaatcttggctgggtgcggtggttcatgcctataatcccagtgctttacaaggctgaggcaggaggctctcttgagaataggagttcaagaccagcctgggcaacatagcaagatcctgtctctccaaaaaaaaaaaaaaaaaaaaaaaaaaatttcatttttgagtccagaggaccctcctattactcttgatttcatcttcagagtgtagttaaaaaattattttaaataattatttttttaaatcagttgtaggttcacagcaaaagtggacaaaaagaaatttctcatatatcccctgccctcacacatgcatagcctcccaccactatcagtatcccacaccagagtggtacatttgttacaatcaataaacctccattgacacatcattatcacccaaagtccatagtttacatgaagattcactctggtgttgtacattgtatgggcttagacaaatgtatgatgatatctacaattatagaatcatacagaatagtttcactgccctaaaacttctctatgcttcacctgttcatccctttcttccctaatcccctggcaaccactttaaaaaaaaaattaggttcagggggtacatgtgcaggtaaactcgtgacaagggggtttgttatacagattatttagtgacccaggtactaagcctagtacccaatagttacttttctggtcctgtcccttttcccaccctccaccctcaggtaggccccagtatgttattcctttgtgtccatgttatttcactcccacttgtgagaacatggaatatttggtttcctgttcctatgttagtttgttaaggataatggcctccagccccatccatgttcctgcaaaggacatgatctttctttggcaaccactttttactgtcgccatagttcttccttttctagaatgtcatattggaatcatatagtatgtagccttttcagactggcttctttcacttaataatatgcaattaaggttcctccatgtcatttcatggcttaatagtgcatttatttttagcactgaataatactccattgtctagatgaatagtttatccattcacctattgaaagacttcttggtggtttccaagttttggcaattatgaataaagctgttgtaaacatctttgtgcaggtttttctatgggcatgtttttaattcatttgaataaataccaagagcttcagtgctggatcataaa

SEQ ID NO: 528 - protein, 222 aa, Homo sapiens
MGLFGKTQEKPPKELVNEWSLKIRKEMRVVDRQIRDIQREEEKVKRSVKDAAKKGQKDVCIVLAKEMIRSRKAVSKLYASKAHMNSVLMGMKNQLAVLRVAGSLQKSTEVMKAMQSLVKIPEIQATMRELSKEMMKAGIIEEMLEDTFESMDDQEEMEEEAEMEIDRILFEITAGALGKAPSKVTDALPEPEPPGAMAASEDEEEEEEALEAMQSRLATLRS

SEQ ID NO: 529 - DNA, 3493 bp, Homo sapiens
ggctccggccgcggccgccgctgatacacggttgtggagggtacggccgcggtctccggaggtggcgggggtgttggggacgggtgctgcgaccggcactgcccatccgagcgggacgggcgctgagtggccgggaggcagccgggtagccgcctggaggagcagtctcggggcctattattggttttttccctccgagaccgattccatctgcagagaccgcgacgccccatcctgggccgggccgcagtgcccgcccgcctgagaggcgccgcccgccagccggcccgagcgaacctggagccgccgccgtgcccgccgctcttctcgcggagcctgggcggtcggcggggcctggggcctgggcttcgggcgcggcgttgcggcggccgctcctccccgcgcagaacacgctgggccccgggcctggcccggccgagcgccgcgccctcctgacccgcggccgcgggagtccggcccccacggcccctcgggccccggcctgccgcccggatccccgcctcctgggcggatctgagttattttttggtctccccctcccccttgagatcgcggcaccggagggccgaccccgccacctgggtcagtgcccgccccgggggaagcgtccctcgttttgttcttccccgcgagctctccccgcgcccctctcctttctgtgcttaatggatgggggttttgagtttttcccctttatttttgtcggctcttgactgggaggcccggcgcgaggctctgcgtctctgcgtccctcgtcgccgcctcgcgcccgcgcggatcccgtcacctgcttccccgccggggatggccggccagtgacggcgccgggtggcccgcgcgtggacacggggccctcgcccaagctgccaccgagccgcggcccccgccctcgacccttctctctcccgtattccgagctctctggaaagagaggaaactccagggaagatgtggctgaagctttttttcttgctcctctatttcctggtcctgttcgtcctggccaggttttttgaggccattgtgtggtatgaaactggcatctttgccacccagctggtggatccggtggcgctgagcttcaagaagctgaagaccattttggagtgccgggggttgggctactcagggttgcccgagaagaaggatgtccgggagctggtggaaaagtcaggtgacttgatggagggtgagctctattctgctctcaaggaagaagaagcatccgaatcggtttctagtaccaatttcagtggtgaaatgcacttctatgagcttgtggaagacacaaaagatggcatctggctggttcaggtcatagcaaatgacagaagtcccttggtgggcaaaattcactgggagaaaatggttaaaaaggtgtcaagatttggaatacgtacaggcacatttaactgttccagtgatcccagatattgcaggagaagaggctgggtccgatccacactcattatgtctgttccacaaacaagtacttcaaaagggaaagtcatgcttaaagaatacagtggacgcaagattgaagtagagcacatttttaaatggataactgctcatgcagcttctcggatcaaaaccatttataatgctgaacacttgaaagaagaatggaataaaagtgatcagtattggttaaaaatatacctatttgcaaaccttgaccagcccccagctttcttctctgcactaagtataaagtttactggaagagttgagtttatttttgttaatgtagaaaattgggacaacaagagttatatgacagatattggcatatataatatgccatcatacatacttagaactcctgaaggaatttacaggtatggaaaccacacaggcgaatttatatcccttcaggccatggattcatttttgcgctcattacaacccgaggtaaatgatctgtttgttttgagcttggttctagttaatcttatggcttggatggacttatttattacacaaggagctaccataaagcgatttgtggttctcataagcactttagggacatataattctctattaattatttcctggctacctgtgttgggctttttacagctaccttacttagatagcttttatgaatatagcttaaaattgttgagatattccaatacaaccacactggcttcatgggtaagggcagactggatgttttactcttcacacccagccctgtttctcagtacataccttggtcatggtttactaattgattactttgagaagaagagaaggcgcaacaacaacaatgatgaagtcaatgccaataacttagaatggttatcaagtctgtgggactggtacaccagctacctcttccacccgattgcttcttttcagaactttcctgtagaatctgattgggacgaagaccctgacttattcttggagcgcttagctttccctgacctttggcttcaccctctgataccaactgattatattaaaaacttaccaatgtggcgatttaaatgtcttggagtccagtctgaagaggaaatgtcggaggggtctcaagatactgaaaatgactcggaaagtgagaacacagacactttgagtagtgagaaggaagtatttgaagataagcaaagcgtacttcacaattctccaggaacagcaagtcactgtgatgctgaggcttgttcatgtgccaataaatattgtcagaccagcccatgtgaaaggaaggggaggtcatatggatcatataacactaatgaagatatggaacctgattggttaacttggcctgctgatatgctgcactgtactgaatgtgttgtttgcctagagaattttgaaaatggatgtttgctaatggggttgccttgtggtcatgtgtttcatcagaattgcattgtgatgtggttggctgggggccgacattgttgccctgtttgccggtggccttcttataaaaaaaagcagccatatgcacaacaccagcccttgtcaaatgatgtcccatcttaaccatgtgcaatttgtcctttataagctttgagtatcttacagcttgcctttttaatgttagtcacaatgtttttgtggtttgaagtttagtttaatgttagtgcagtgacgggaaatacacattatgctaatgttgatgacagaatttatttggttgccttgtgtgttaattgaatgcatacctaattgtaaaatttttttatttacaacattggaaattcagaagttaatgtttttttgtaagcacaaaagaagtattatagaaatttatcctagcaagactttacaagataggatcaaattctaatggaattgagccggtttcttatcctaaatgtttcctccctttttacaatctctgtccagcacctcttggttaaataatgtatgctgtgagacatgaaattaaaacagacctatgaaataaattattttaaaaccagaagattaaaaaaaaaaaaaaaaa

SEQ ID NO: 530 - protein, 685 aa, Homo sapiens
MWLKLFFLLLYFLVLFVLARFFEAIVWYETGIFATQLVDPVALSFKKLKTILECRGLGYSGLPEKKDVRELVEKSGDLMEGELYSALKEEEASESVSSTNFSGEMHFYELVEDTKDGIWLVQVIANDRSPLVGKIHWEKMVKKVSRFGIRTGTFNCSSDPRYCRRRGWVRSTLIMSVPQTSTSKGKVMLKEYSGRKIEVEHIFKWITAHAASRIKTIYNAEHLKEEWNKSDQYWLKIYLFANLDQPPAFFSALSIKFTGRVEFIFVNVENWDNKSYMTDIGIYNMPSYILRTPEGIYRYGNHTGEFISLQAMDSFLRSLQPEVNDLFVLSLVLVNLMAWMDLFITQGATIKRFVVLISTLGTYNSLLIISWLPVLGFLQLPYLDSFYEYSLKLLRYSNTTTLASWVRADWMFYSSHPALFLSTYLGHGLLIDYFEKKRRRNNNNDEVNANNLEWLSSLWDWYTSYLFHPIASFQNFPVESDWDEDPDLFLERLAFPDLWLHPLIPTDYIKNLPMWRFKCLGVQSEEEMSEGSQDTENDSESENTDTLSSEKEVFEDKQSVLHNSPGTASHCDAEACSCANKYCQTSPCERKGRSYGSYNTNEDMEPDWLTWPADMLHCTECVVCLENFENGCLLMGLPCGHVFHQNCIVMWLAGGRHCCPVCRWPSYKKKQPYAQHQPLSNDVPS

SEQ ID NO: 531 - DNA, 3239 bp, Homo sapiens
gcttggggaacgaggagcaggacgcggcctcggtggggcccgggccgaacggctgcggacacctgggcgccgaggagccgagcgccgccgtctccggcatggatcagtgcgtgacggtggagcgcgagctggagaaggtgctgcacaagttctcaggctacgggcagctgtgcgagcgcggcctggaggagctcatcgactacaccggcggcctcaagcacgagatcctgcagagccacggccaagatgctgaattatcagggacactttcacttgttttgacacagtgctgtaaaagaataaaggatactgttcaaaaattggcctccgaccacaaagacatccacagcagtgtttctcgggttggaaaagccattgataagaattttgattctgacattagcagtgtgggaatagatggctgctggcaggcagacagccaaaggcttctcaatgaagtgatggtggagcacttctttcgacaaggaatgctggatgtggctgaggagctctgtcaggaatctggtctttctgtagacccaagtcagaaggaaccatttgtggagttaaatagaatattagaggcattaaaggtcagagttctgagacctgctctggagtgggcagtgtcaaaccgggaaatgcttatagctcaaaacagctccttggaatttaagctacacagactgtattttattagcttgttaatgggtggaaccacaaatcagcgagaggcattacaatatgctaaaaattttcagccatttgccctaaatcatcaaaaagacattcaggttttgatgggaagccttgtgtacctgagacaagggattgagaactcaccatatgttcacctacttgatgcaaaccagtgggctgatatctgtgacatctttacacgggatgcttgtgccctcctggggctctccgtggagtcccctctcagtgtcagtttctcagcaggttgtgtggcgctgccagctttaattaacatcaaagccgtgattgaacagaggcagtgtactggagtttggaaccagaaagatgaattacctattgaagtggaccttggtaaaaagtgctggtatcactctatatttgcctgccccattcttcgtcagcaaacaacagataacaatccacccatgaaattggtctgtggtcatattatatcaagagatgccctgaataaaatgtttaatggtagcaaattaaaatgtccctactgtccaatggaacaaagtccaggagatgccaaacagatatttttctgaagagataactttagtttgcaatttgtaagtgaaactgaatcgtgggtgcatttcagaagagaacgttccatataatgcagctaaccaaggactcctgtgtttctataagctaatgctccagaaactttgccaacctgttagtgtacacacactgaggggagtgctcccggtgaatattatcatagggctttattatattcttggtcttcatttctgatcaagtaaatacaccagcagttgtcattcaatgcaggtttttgtacttaattatatggtgatttttttactttttaagagcagaaacggaaattgacctccccgccatgtgtttaatattcctcctgcttttacttttgtcattttcttgataatcgtaagccttgagagtgtttgtgaaaaagttttatttcctgttatgtatacataattaaatgaaaattcttcagaaaaagtttgataaattgaattgtggttatgaaactaatttgcatttttatttgcttaagaaagaaagctgtgatagattccagatatgctttttgatgttttcctctgctccagctccaagaagtcagcacacctgcattttagctctgcatgcagccccagcaggctgcgtgtttaagaatttcattgtttaactggctggtgtgagaagtcttccgttagcatagagtggaaggagtactattgtttggttgggtttttgtttgtttgttttttgtttttgcttttattgccaagaggtgcttgttttaaaagtatgtttaataaaatgaaattctaaagttagaagtgttcttaagttgatatttactctcttggtcttggtagccctattatatcattgcagacacagtgttgtgcatgtgtgtattgtatatgtgcaccagcatcaaacattgtgtatctggaaggaaagcagcatgttccagttctaaaatgcagttaccagacccatcactttaaatccttaaagttagaagctagcaaattttctgtagtgcagaacgtttattgctgtttttgtgtttgaatagtataatgtttgatgcctctcttctgcaaagcgtatcatctcattgactgtgaatctgtatattattctgatggatacagataatgatcttttctcttgtgaggtatcttcatttatgcactgtccaaaaatagccatgtgtaagagtctttctgtatgacgaactacatggaaaagacttctgtggacataattctgaccgaaacccatgaagttacttcagtataagaagaacgttacacggaaatcaccaaatattttgcaactttatttcttctgacatggagtgaacatcaataggaatactttcaaagaaaatgaaaacacagaagcaaagagaaatgtggcacttcacattttaaactacagatggacttggtttgagggagggggaatcacagatttggtgctaagttaattagaaactggcagcgttttacagtagtacaccagcctggatgttttttctaaaatgtttacctgggagagctggggtttgtttgtgaggagaaagagtactgtggaaaacctctgcttgagtaccatgtggccaggcctatgtggatggctactccgtgctgtgcggcttcaccagcggttgggattggcccagcttggagtgcttgtgtggtccaacctcagtctggccccatagtgacttttgccccatgattctgcttcactgttggaatcctctttgaagttccccctctctttgctaaagcagtgaaggaagagaacagagacaaactctttggactgtgaaagagaaggtagagaattccaggcaacagtctgaccaagggtgtaaaccagtttattatatatatatttttcctttgaattaaaacctatgagtgactacaaaaaggattagactgagccgaataaaaaaaaaaaaaaaaaaaaaaaaaaaaaaaaaaaaa

SEQ ID NO: 532 - protein, 391 aa, Homo sapiens
MDQCVTVERELEKVLHKFSGYGQLCERGLEELIDYTGGLKHEILQSHGQDAELSGTLSLVLTQCCKRIKDTVQKLASDHKDIHSSVSRVGKAIDKNFDSDISSVGIDGCWQADSQRLLNEVMVEHFFRQGMLDVAEELCQESGLSVDPSQKEPFVELNRILEALKVRVLRPALEWAVSNREMLIAQNSSLEFKLHRLYFISLLMGGTTNQREALQYAKNFQPFALNHQKDIQVLMGSLVYLRQGIENSPYVHLLDANQWADICDIFTRDACALLGLSVESPLSVSFSAGCVALPALINIKAVIEQRQCTGVWNQKDELPIEVDLGKKCWYHSIFACPILRQQTTDNNPPMKLVCGHIISRDALNKMFNGSKLKCPYCPMEQSPGDAKQIFF

SEQ ID NO: 533 - DNA, 4814 bp, Homo sapiens
agttggctcggcggcagcggagcggccggagctgcggtgcggaccggggccgcgcggcgtggcgcggggagcggcggcggcggcagagccagagcaacatggcgccggtgggcgggggcgggcgcccggtcggcggaccggcccgcgggcgcctcctcctggcggcgccggtgctgctggtgctgctgtgggcgctgggggcccggggccagggcagcccccagcagggcacgatcgtgggcatgaggctggcgagctgcaacaagtcgtgtgggacgaacccggatggcatcatcttcgtgtccgagggcagcaccgtgaacctgaggctgtacggctacagcctgggcaacatctccagcaacctgatctccttcaccgaggtggacgatgccgagaccctccacaagtccaccagctgcctcgagctcaccaaggacctggtcgtccagcagctggtcaacgtgagccgcgggaacacgtccggcgtgctggtggtgctcaccaagttcctccggaggagcgagagcatgaagctgtatgcactgtgcacccgggcccagcccgacgggccctggctgaagtggacggacaaggactcactgctcttcatggtggaggagcctgggaggttcctgcctctctggctgcacattctcctaattacggtgctgctggtgctgtcgggcatattttctggcctcaacctcgggcttatggccctggaccccatggagctgcgcatcgtgcagaactgtggcaccgagaaggagaggcgctatgcccgcaagattgagcccatccggcgcaagggcaactaccttctctgctcgttgctcctagggaacgtgctggtcaacacctccctcacaatccttctagacaacctcatcgggtccggcctcatggcggtggcctcctccaccattggcattgtcatctttggggagatcctacctcaggccctgtgctcccgacatgggctggctgtgggtgccaacaccatccttctcaccaaattctttatgctactcaccttccccctcagttttcccattagcaagctcctggacttttttctgggccaggagattcgcactgtttacaaccgggagaagctgatggagatgttgaaggtgacggagccctataatgacctcgtgaaagaggagctcaatatgatccagggtgccctggaactacggaccaaaactgtagaggatatcatgacccagctccaggactgcttcatgatccgcagcgatgccatcctggacttcaacaccatgtcggagataatggaaagcggctatactcgcatcccggtgttcgaagacgagcagtccaatattgtagatattctctacgtcaaagacttggcctttgtggaccccgatgactgcacccccctcaagactatcactcgcttctataaccacccggtgcactttgtcttccatgacaccaagttggatgccatgctggaggagttcaagaaggggaagtcccacctggccatcgtgcagaaggtaaacaacgagggtgagggtgaccccttctacgaggtcctgggcctggtcaccctggaggacgtgatcgaggagatcatcaagtcggagatcctggacgagtccgacatgtacactgacaaccgaagccggaagcgggtgtctgagaagaacaagcgtgacttctctgccttcaaggatgcggacaatgagctcaaagtgaaaatctccccgcagctcctcctggccgctcatcgcttcctagccacagaggtctctcagtttagcccctccctgatatcagagaagatcctgctgcggctactcaagtacccagatgtcattcaggaactcaagtttgacgagcacaataagtactacgcccgccattacctgtacacccgaaataagccggccgactacttcatcctcatcctgcaggggaaggtggaggtggaggcagggaaggagaacatgaagtttgagacgggcgccttctcctactatgggactatggccctgacctcggtcccctccgaccgttccccagcacaccccaccccactcagccgctcagcctccctcagttacccagaccgcacagacgtctcaactgcagcaaccttggcaggcagcagcaaccagtttggcagctctgtcctgggccagtacatctctgacttcagcgtccgggcactcgtggacttgcagtacatcaagatcactcggcagcagtaccagaacgggctgctggcttctcgcatggagaacagccctcagtttcccatagacgggtgcaccacccacatggagaacttggccgagaagtctgagctgcctgtggtggacgagaccacaactcttctcaacgagcgtaactccttgctgcacaaagcctcccacgagaatgccatctgacaggagggcccggggccccctgcccaccctgcgggggcctccccagtgggcccacatgaagagagggaacctgttagtccagaaaggatacggatagatagcctgtctgactgaacagccagatggcccccagcctatgggggatctggcctctgccagggacctctgagtagctctgaggtggcactgtccagccctggatagggggggcagtgggccagctaccgtaagcaaaggctgttttttactgagagaatttctaaagtaggctcatcacttttttttaaatatcattttgggaagggaagacagggttaaggaactttatttaaaaaaaaaatatttttttcctaaaaactataaaagaggaagggtttcttgtcccgggaagcaacggacataatctgttcccagccatggccttccagcttgtgtccctgattcagggagctctcccttcctcctcctcctcctcctccggaggtgggatcccagagcctgccagtggaggcttatctgttgggaggaagacagctcttcacagaagcaaagaacaaaatggcatggagatcagctgcctgagcacctgcgctgtagcttatctgacaacgctgaggccacgagctcctgggtagctgtgatcagggacatgataatctgagctatgcagaggagcacatctgttgtcaactgctgtacccagaaatctagaactctgccgacagcctctcctggtgagtcgggactcagctgaggacacatccccaccctgcctcccatctggccctttggacaactggccctttgtgacagggctgactcaagtgttaggcagggtctcaggcctttgattgctcacccctgctccccaggccctgccctcacttttaccaaaggttctccctcggcgggagggcatctgtgttggaggtgatttgtctgggttcttccttttggttccagaaggaactgtcagtcatcagcatctgcgttgttagcagtcagtaccacccccgccccacaatgacagtcaaggctgacttgttgactgaagcctttttcccagaccccttatttcgaatccccaagcttcagtccctcttgggggtggagacaagaggacatgtgggaagccacggaagcaggttctttatgtcctctcctctgtggctggcaaggctcacctggccttatccacccacttatggaacctcaggagaggagggctcctcctaaaggcatgcagcttgcagcccctctttctcacacgtgtgatcctagcgtgagaggtcatcctgcccttgctgaagttagtagtactgtactaagagctctgccctcatgtgaattcctgccctggcgcctcttccctggggctgaatcaggccctgctgcaaaactccaggcttcccagggttggggaggctgtgggaccaaggtccatgttggtccttccactgggtgcagcaggagctgggtcccgagagcctggcaggtgaaactctgcaggccttccgcctgattattatttattcactcctttcctcaccccaagtgccctgctctccaggtgcctagagtatcctaactcttaggaccagggattgtcttgcaccaagtatgcctacccctggccagtctgaggtctcctagccatagaactgactcctggaagcctggagagaaggtggtgacacccatgggttctcaactgtaaggaaaaaagacaccagacttttgttccctagtgggggaaagcccttagtcttgtacaggagcagcttgctcccaagtccttttggaagctggcagagctatattcctgacagccctgactgccaggtagagcaaaagacattggtgggggtatgtgaagcaaaaggggcaggtgcacacacctccacagtgacctctgtgcacacggttaccaccaactggctggccctcctcctcttccctggcccattgatcatcccttctcacagagggtcatcattatttccaaatattgtttgtctgatgacttcctcttcccagtgcaatttttcccttcctatttcaacctctggttcctgggatgagccataccctggaactggcccacccactgtgtcttccacgtaagggagacctttgcaaagggcatccaaatgggtaggcaggtgacagccgccgtatttattttgcataatattttaatttgtatatttttgtgatttattttggcgttatgagtttgactctcggggagttttgttgttatgactcttgtgtcttttgtcacaaaacaatgatatttgctaaacgatatatggaatttatttttgattggtaataaaaaatcaaatatgtataaatcctggtgaatctacaaaaaaaaaaaaaaaa

SEQ ID NO: 534 - protein, 775 aa, Homo sapiens
MAPVGGGGRPVGGPARGRLLLAAPVLLVLLWALGARGQGSPQQGTIVGMRLASCNKSCGTNPDGIIFVSEGSTVNLRLYGYSLGNISSNLISFTEVDDAETLHKSTSCLELTKDLVVQQLVNVSRGNTSGVLVVLTKFLRRSESMKLYALCTRAQPDGPWLKWTDKDSLLFMVEEPGRFLPLWLHILLITVLLVLSGIFSGLNLGLMALDPMELRIVQNCGTEKERRYARKIEPIRRKGNYLLCSLLLGNVLVNTSLTILLDNLIGSGLMAVASSTIGIVIFGEILPQALCSRHGLAVGANTILLTKFFMLLTFPLSFPISKLLDFFLGQEIRTVYNREKLMEMLKVTEPYNDLVKEELNMIQGALELRTKTVEDIMTQLQDCFMIRSDAILDFNTMSEIMESGYTRIPVFEDEQSNIVDILYVKDLAFVDPDDCTPLKTITRFYNHPVHFVFHDTKLDAMLEEFKKGKSHLAIVQKVNNEGEGDPFYEVLGLVTLEDVIEEIIKSEILDESDMYTDNRSRKRVSEKNKRDFSAFKDADNELKVKISPQLLLAAHRFLATEVSQFSPSLISEKILLRLLKYPDVIQELKFDEHNKYYARHYLYTRNKPADYFILILQGKVEVEAGKENMKFETGAFSYYGTMALTSVPSDRSPAHPTPLSRSASLSYPDRTDVSTAATLAGSSNQFGSSVLGQYISDFSVRALVDLQYIKITRQQYQNGLLASRMENSPQFPIDGCTTHMENLAEKSELPVVDETTTLLNERNSLLHKASHENAI

SEQ ID NO: 535 - DNA, 4916 bp, Homo sapiens
gaggccgagagggggcagcaggcgatggcggcggcggtagctgcggcgggtcggttaggctggttgttcgccgcgctctgcctgggcaacgccgcgggggaggccgcgccgggcccgcgagtgctgggcttctgcctggaggaggatggagcggcgggcgcgggttgggtacgcggaggggcggcgcgggacacgccggacgccaccttcctcctgcgcctcttcggcccgggcttcgccaacagctcttggtcctgggtggccccggagggggcgggctgccgggaggaggcggcctcccccgcgggcgagtggcgcgcgctgctgcgcttgcgcctgcgggccgaggccgtgcgcccgcactcggcgctgctggcggtgcgcgtggagccgggtggcggggcggctgaggaggcggcgccgccctgggctctgggcctgggggcggccgggctgctggcgctggcagcgctggcgcgaggcctgcagctgagcgcgctggcgctggcgcctgccgaggtgcaggtgctgcgcgagagcggctcggaggcggagcgtgcggcggcgcggcgtttggagcccgcgcggcgctgggccggctgcgccttgggcgcgctgctgctgctggccagcctggcgcaggcggcgctggcggtgctgctgtaccgcgcggccggccagcgtgcggtgcccgccgtgttgggcagcgcggggctcgtgttcctggtgggagaggtggtgccggccgccgtgagcgggcgctggacgctggcgctggcgccgcgagcgctcggcctcagccgcctggccgtcctgctcactctgcccgtcgcgctgcccgtggggcagctgctggagctggcggcgcggcccgggcggctgcgggagcgggtgctggagctggcgcgcggcggcggcgacccctacagcgatctcagcaagggcgtgctgcgctgccggaccgtggaggacgtgctcacgcccctcgaagactgcttcatgctggacgccagcaccgtgctggacttcggcgtcctggccagcatcatgcagagcggccacacgcgcatcccggtgtacgaggaggagcgctccaacatcgtggacatgctctacctcaaggacttggccttcgtggatcccgaagactgcacgccgctcagcaccatcactcgtttctacaaccatccgctccacttcgtcttcaacgacaccaagctggacgctgtcctggaggaattcaagcgagggaagtcccacctggccatcgtgcagaaggtgaacaacgagggtgaaggcgaccccttctacgaggtcctgggcctggtcaccctggaggacgtgatcgaggagatcatcaggtccgagatcctggacgagtctgaagactaccgagacaccgtggtgaagaggaagcctgcttctctgatggcccctctgaagcggaaggaggagttctccttgttcaaggtgtctgatgatgaatataaagtaacaatctcgcctcagctgctcttggccacccagcgcttcctgtcccgagaagtggatgtattcagcccgctgcgcatctctgagaaggtcctgctgcacctgttgaagcatcccagtgtcaaccaggaagtgaggtttgacgagagcaaccggctggccacacaccactacctgtaccagcgcagccagccggtggattacttcattctcatcctgcagggcagggttgaagtggagatcgggaaagagggtctgaagtttgagaatggggccttcacgtactatggagtgtcggccctaactgtgccatcctcggttcaccagtccccggtgtcctcgctccagcccatccgccatgacctgcagcccgacccaggtgacggcacgcattcatctgcgtattgtcccgactacaccgtgagggcgctctctgatctgcagctcatcaaggttacgcgactgcagtacctcaatgcactcctggctacccgagcccagaacctgccacagtcccctgagaacaccgacctgcaggttattccaggcagccagaccaggctccttggtgagaagaccaccacagcggcagggtccagccacagcaggcccggcgtcccggtggaaggcagccctgggcggaacccaggcgtttaacggctcactaggcagccccagatctggggaacagatgagcacgtggggagctggagtgagctgagcagaagttttgtgcccgcctgcccccatcccctccaggccacgttttagatggcccttgtagttgcgggtcctgggtgtcctcagaactagacatcaatgcctggatccttcagccggccctgccctcctttaggagacaggagtcaccagggcacagccctccaggcccgcctcaggaaggaatgaaaggaatgccatcatctctagttcccagggcccagccttccccttctcccccggggcagggacagtgcggcatattcagattcagacctctttgggctgagccaccttgtgagtgcagttactgcctttgtgtggccgtgacctctatttgtttgcttttaatttgccaacctatcgctgctggcagcactttttgagcaagccgagagcacccattttggctgggggttcagatcgatggccttgtccatgttgtcctttctggcttccctgatggtgtcatgtttcagcgcatgcgccccagcctttcccatgtgccaaaccagaagctccactgcccgtaggctgtccctgtagccctgctccctccctggaggctgctcttctgattctgagagctggcctagtggtgctgagggcccctttctgcttctctgcccacctgctgagttgccactcgcagtgttgtcagttcccgtgttctgagaagaggtcatgcctgggaggaagggatcgtcatgctgcatcgaatcctctctccgccgtgtggcccccaggagagtagctgcctgttgcacctgctccacacctccccacagcctccctgcaggtgctgtgtggccgtgatgtgcagagagcagtgagggagggttcatgaaccaggtggatcctctttaaaaaaaaaaaagtttttgttatatctctagaacatttcaagtcttttcctttttttctgttcctagctatggggttttagagaagtgggaacaggaaggcatttgtctttttcttctagtttactacattttccttccgtagttcttcagctgtgtggaaacgggcatcacaaggacataggatcatagattgggtagggagggaggaggatttctggaacttttctcaaaggaatttggacccttataaatgggactgaaggtcaaaacaacagtgatatccttgcttagaaattgtcctcaaggaataaactctgagagcaagcccgggttggaaacagatgctttaaaatcctctctccagaacagtggttttttgtttgtttatttgagatggagtctcactctgtcacccaggctggagtgcagtggtgagatcttggctcactgcaacctccacctcccaggttcaagccattctcctgtctcagccccctgagtagctgggattacaggtgcccaccaccacacccggctaatttttgtatttttagtagagatggggtttcaccatgttggccaggctgatcttgaactcctgacctcaggtgatctgcctgccttggcctcccaaagtgctgggattataggtgtgagctaagatcagggattcttaaccttggctgcacaccagaatcacctggcaaattaaaaatacgtggacctgccaccagagcttgtgatttaatcagagtcggcatcagagttttcaattttttatttatttattattattattattattattattattattgagacaagatcttgctctgtcgcccagactggagtgcagtggtgtgatcacggcttgctgcagcctcgacctccctggttcaggccatcctgccacctcagcctcctgagtagtagggactacaggtaggcaccaccacacccagctaatacttttaatttttttttgtagagatagggtctcattatgttgcctggggtagtctcgaactcctaggctcaagcgatcctcctgcctcggcctcccaaagtgttgagattataggcgtgagccaccgtgcccagattcacagaagtttcatacacctttcacccaggttcccctaatgttaacagcttacatataaccttggtacatttatcaaaactaaaggtgcaatcatactaatagctagagtttatttggattttaccatttttcccaatgtcccttttctgctgcagcagccaatccaggatgccatactgcacttagagctgttgctttcttttttcctaactttatattttgaaataatttcagatgataggaagttgtaaaggtaagggccccacgcacccttcatctagtttccctccatggttacatcttatatggttgtaatgcagtattccaacaaagactctgacactggtgcgatgtgggtggacagtccaaatcatttgtcacatgtacatctgtgtaactaccactgcaatcaggataaagaagtcccatccccacaaggatctccctccccaccttccctaactcctggtaaccactaatcgttcatctcttcttattttgtcatttcaagaatgttgtataaatgggagcatagtgtgtaagcattcgggattgtcttttttcactcggcgtcattctcgggagatcatccaggcattgcatgtgtcaacagtttgctcctttttattgctgagtggtattccgtggtgtatgcattggccccctgaaggacacctgggatgtttccagtttggggctattccaaataaagctgctacgactattcatgtaca

SEQ ID NO: 536 - protein, 707 aa, Homo sapiens
MAAAVAAAGRLGWLFAALCLGNAAGEAAPGPRVLGFCLEEDGAAGAGWVRGGAARDTPDATFLLRLFGPGFANSSWSWVAPEGAGCREEAASPAGEWRALLRLRLRAEAVRPHSALLAVRVEPGGGAAEEAAPPWALGLGAAGLLALAALARGLQLSALALAPAEVQVLRESGSEAERAAARRLEPARRWAGCALGALLLLASLAQAALAVLLYRAAGQRAVPAVLGSAGLVFLVGEVVPAAVSGRWTLALAPRALGLSRLAVLLTLPVALPVGQLLELAARPGRLRERVLELARGGGDPYSDLSKGVLRCRTVEDVLTPLEDCFMLDASTVLDFGVLASIMQSGHTRIPVYEEERSNIVDMLYLKDLAFVDPEDCTPLSTITRFYNHPLHFVFNDTKLDAVLEEFKRGKSHLAIVQKVNNEGEGDPFYEVLGLVTLEDVIEEIIRSEILDESEDYRDTVVKRKPASLMAPLKRKEEFSLFKVSDDEYKVTISPQLLLATQRFLSREVDVFSPLRISEKVLLHLLKHPSVNQEVRFDESNRLATHHYLYQRSQPVDYFILILQGRVEVEIGKEGLKFENGAFTYYGVSALTVPSSVHQSPVSSLQPIRHDLQPDPGDGTHSSAYCPDYTVRALSDLQLIKVTRLQYLNALLATRAQNLPQSPENTDLQVIPGSQTRLLGEKTTTAAGSSHSRPGVPVEGSPGRNPGV

SEQ ID NO: 537 - DNA, 4772 bp, Homo sapiens
gaggccgagagggggcagcaggcgatggcggcggcggtagctgcggcgggtcggttaggctggttgttcgccgcgctctgcctgggcaacgccgcgggggaggccgcgccgggcccgcgagtgctgggcttctgcctggaggaggatggagcggcgggcgcgggttgggtacgcggaggggcggcgcgggacacgccggacgccaccttcctcctgcgcctcttcggcccgggcttcgccaacagctcttggtcctgggtggccccggagggggcgggctgccgggaggaggcggcctcccccgcgggcgagtggcgcgcgctgctgcgcttgcgcctgcgggccgaggccgtgcgcccgcactcggcgctgctggcggtgcgcgtggagccgggtggcggggcggctgaggaggcggcgccgccctgggctctgggcctgggggcggccgggctgctggcgctggcagcgctggcgcgaggcctgcagctgagcgcgctggcgctggcgcctgccgaggtgcaggtgctgcgcgagagcggctcggaggcggagcgtgcggcggcgcggcgtttggagcccgcgcggcgctgggccggctgcgccttgggcgcgctgctgctgctggccagcctggcgcaggcggcgctggcggtgctgctgtaccgcgcggccggccagcgtgcggtgcccgccgtgttgggcagcgcggggctcgtgttcctggtgggagaggtggtgccggccgccgtgagcgggcgctggacgctggcgctggcgccgcgagcgctcggcctcagccgcctggccgtcctgctcactctgcccgtcgcgctgcccgtggggcagctgctggagctggcggcgcggcccgggcggctgcgggagcgggtgctggagctggcgcgcggcggcggcgacccctacagcgatctcagcaagggcgtgctgcgctgccggaccgtggaggacgtgctcacgcccctcgaagactgcttcatgctggacgccagcaccgtgctggacttcggcgtcctggccagcatcatgcagagcggccacacgcgcatcccggtgtacgaggaggagcgctccaacatcgtggacatgctctacctcaaggacttggccttcgtggatcccgaagactgcacgccgctcagcaccatcactcgtttctacaaccatccgctccacttcgtcttcaacgacaccaagctggacgctgtcctggaggaattcaagcgaggagacaccgtggtgaagaggaagcctgcttctctgatggcccctctgaagcggaaggaggagttctccttgttcaaggtgtctgatgatgaatataaagtaacaatctcgcctcagctgctcttggccacccagcgcttcctgtcccgagaagtggatgtattcagcccgctgcgcatctctgagaaggtcctgctgcacctgttgaagcatcccagtgtcaaccaggaagtgaggtttgacgagagcaaccggctggccacacaccactacctgtaccagcgcagccagccggtggattacttcattctcatcctgcagggcagggttgaagtggagatcgggaaagagggtctgaagtttgagaatggggccttcacgtactatggagtgtcggccctaactgtgccatcctcggttcaccagtccccggtgtcctcgctccagcccatccgccatgacctgcagcccgacccaggtgacggcacgcattcatctgcgtattgtcccgactacaccgtgagggcgctctctgatctgcagctcatcaaggttacgcgactgcagtacctcaatgcactcctggctacccgagcccagaacctgccacagtcccctgagaacaccgacctgcaggttattccaggcagccagaccaggctccttggtgagaagaccaccacagcggcagggtccagccacagcaggcccggcgtcccggtggaaggcagccctgggcggaacccaggcgtttaacggctcactaggcagccccagatctggggaacagatgagcacgtggggagctggagtgagctgagcagaagttttgtgcccgcctgcccccatcccctccaggccacgttttagatggcccttgtagttgcgggtcctgggtgtcctcagaactagacatcaatgcctggatccttcagccggccctgccctcctttaggagacaggagtcaccagggcacagccctccaggcccgcctcaggaaggaatgaaaggaatgccatcatctctagttcccagggcccagccttccccttctcccccggggcagggacagtgcggcatattcagattcagacctctttgggctgagccaccttgtgagtgcagttactgcctttgtgtggccgtgacctctatttgtttgcttttaatttgccaacctatcgctgctggcagcactttttgagcaagccgagagcacccattttggctgggggttcagatcgatggccttgtccatgttgtcctttctggcttccctgatggtgtcatgtttcagcgcatgcgccccagcctttcccatgtgccaaaccagaagctccactgcccgtaggctgtccctgtagccctgctccctccctggaggctgctcttctgattctgagagctggcctagtggtgctgagggcccctttctgcttctctgcccacctgctgagttgccactcgcagtgttgtcagttcccgtgttctgagaagaggtcatgcctgggaggaagggatcgtcatgctgcatcgaatcctctctccgccgtgtggcccccaggagagtagctgcctgttgcacctgctccacacctccccacagcctccctgcaggtgctgtgtggccgtgatgtgcagagagcagtgagggagggttcatgaaccaggtggatcctctttaaaaaaaaaaaagtttttgttatatctctagaacatttcaagtcttttcctttttttctgttcctagctatggggttttagagaagtgggaacaggaaggcatttgtctttttcttctagtttactacattttccttccgtagttcttcagctgtgtggaaacgggcatcacaaggacataggatcatagattgggtagggagggaggaggatttctggaacttttctcaaaggaatttggacccttataaatgggactgaaggtcaaaacaacagtgatatccttgcttagaaattgtcctcaaggaataaactctgagagcaagcccgggttggaaacagatgctttaaaatcctctctccagaacagtggttttttgtttgtttatttgagatggagtctcactctgtcacccaggctggagtgcagtggtgagatcttggctcactgcaacctccacctcccaggttcaagccattctcctgtctcagccccctgagtagctgggattacaggtgcccaccaccacacccggctaatttttgtatttttagtagagatggggtttcaccatgttggccaggctgatcttgaactcctgacctcaggtgatctgcctgccttggcctcccaaagtgctgggattataggtgtgagctaagatcagggattcttaaccttggctgcacaccagaatcacctggcaaattaaaaatacgtggacctgccaccagagcttgtgatttaatcagagtcggcatcagagttttcaattttttatttatttattattattattattattattattattattgagacaagatcttgctctgtcgcccagactggagtgcagtggtgtgatcacggcttgctgcagcctcgacctccctggttcaggccatcctgccacctcagcctcctgagtagtagggactacaggtaggcaccaccacacccagctaatacttttaatttttttttgtagagatagggtctcattatgttgcctggggtagtctcgaactcctaggctcaagcgatcctcctgcctcggcctcccaaagtgttgagattataggcgtgagccaccgtgcccagattcacagaagtttcatacacctttcacccaggttcccctaatgttaacagcttacatataaccttggtacatttatcaaaactaaaggtgcaatcatactaatagctagagtttatttggattttaccatttttcccaatgtcccttttctgctgcagcagccaatccaggatgccatactgcacttagagctgttgctttcttttttcctaactttatattttgaaataatttcagatgataggaagttgtaaaggtaagggccccacgcacccttcatctagtttccctccatggttacatcttatatggttgtaatgcagtattccaacaaagactctgacactggtgcgatgtgggtggacagtccaaatcatttgtcacatgtacatctgtgtaactaccactgcaatcaggataaagaagtcccatccccacaaggatctccctccccaccttccctaactcctggtaaccactaatcgttcatctcttcttattttgtcatttcaagaatgttgtataaatgggagcatagtgtgtaagcattcgggattgtcttttttcactcggcgtcattctcgggagatcatccaggcattgcatgtgtcaacagtttgctcctttttattgctgagtggtattccgtggtgtatgcattggccccctgaaggacacctgggatgtttccagtttggggctattccaaataaagctgctacgactattcatgtaca

SEQ ID NO: 538 - protein, 659 aa, Homo sapiens
MAAAVAAAGRLGWLFAALCLGNAAGEAAPGPRVLGFCLEEDGAAGAGWVRGGAARDTPDATFLLRLFGPGFANSSWSWVAPEGAGCREEAASPAGEWRALLRLRLRAEAVRPHSALLAVRVEPGGGAAEEAAPPWALGLGAAGLLALAALARGLQLSALALAPAEVQVLRESGSEAERAAARRLEPARRWAGCALGALLLLASLAQAALAVLLYRAAGQRAVPAVLGSAGLVFLVGEVVPAAVSGRWTLALAPRALGLSRLAVLLTLPVALPVGQLLELAARPGRLRERVLELARGGGDPYSDLSKGVLRCRTVEDVLTPLEDCFMLDASTVLDFGVLASIMQSGHTRIPVYEEERSNIVDMLYLKDLAFVDPEDCTPLSTITRFYNHPLHFVFNDTKLDAVLEEFKRGDTVVKRKPASLMAPLKRKEEFSLFKVSDDEYKVTISPQLLLATQRFLSREVDVFSPLRISEKVLLHLLKHPSVNQEVRFDESNRLATHHYLYQRSQPVDYFILILQGRVEVEIGKEGLKFENGAFTYYGVSALTVPSSVHQSPVSSLQPIRHDLQPDPGDGTHSSAYCPDYTVRALSDLQLIKVTRLQYLNALLATRAQNLPQSPENTDLQVIPGSQTRLLGEKTTTAAGSSHSRPGVPVEGSPGRNPGV

SEQ ID NO: 539 - DNA, 2591 bp, Homo sapiens
actggggggtgtgaggaacaggggggaccatggacttcatcagcattcagcagttggtaagtggagaaagagttgaagggaaagtgttgggatttggacatggagttcctgaccctggagcctggcctagtgactggaggaggggcccccaagaggctgtggcccgggagaagctgaaattggaagaagagaagaagaagaaacttgaaagatttaacagtaccagatttaatctggataacctggctgacttggaaaacttggttcaaagacggaaaaagcgactgagacacagagtcccccccaggaaacctgagcccctggttaagccgcagtcccaggcccaggtggagcctgtgggcctggagatgttcctgaaggcagctgctgagaaccaggagtacctgattgacaagtacttgacagacggaggggaccccaatgcccatgacaagctccaccgcaccgccttgcactgggcctgtctgaagggtcacagccagctggtgaacaagctgctggtggcaggtgccacagtggacgcgcgagacttgctggacaggacacctgtgttctgggcctgccgcggaggacatctggtcatcctcaaacagctgcttaaccagggagcccgggtcaatgcccgggacaagatcgggagcacccccctgcacgtggcagtgcgcacccggcaccccgactgcctggagcacctcatcgagtgtggcgcccacctgaacgcacaggataaggaaggggacacggctctgcacgaggccgtgcggcacggcagctacaaagccatgaagctactgctgctctatggggccgagctgggggtgcggaacgcggcctccgtgaccccggtgcagctggctcgagactggcagcgcggcatccgggaggccctgcaggcccacgtggcgcatccccgcacccggtgctgaccgcagcaccgccccccgccgcgcctttcgcactgccaccattccatcctgtgccccgcccccgcgtctgcacctctgtggttcctgccctcagccctggttcctccctctctggcctgtgccgcctcagcagccctggcagaactgaagagcggcaccgggcccagcaggcaaagagagaggcctccctggcttcgagtgtcaggggagccgcgttccctcccagggctggagcagaggaccacaaggcagcagaaagcgcgggtccagatgagggccaggaaggggaggagagtgagggccaagaacgagccttaagggagcagtcccaagctggagccacccagggctgggtctgggagtcctcagtgtccacttgtcccaggttagggggcttgccttgctctctccagggccagtctgtgtgtgtggggactcagcccgtggccggcagatgccatccaggatgtacaaggtgcagccaaggcaggccatgcaggggccgggcctgtctgcagctggtggatgcctgtgggcatggctttctctggggaccccattcctgtcagtagcaaccctggcagtgtccggagcggctctagacaactttggtcataggaactctggaggtgggttctggtcatctgaggtggctactcaacaggtttgaggccccacagcaacagaagtccaggacccactaggttgcctcagaagccctaagactgatgagctggagcgcgcatttgagagaagcctcgcacccactgtgtactggccccgctcaggccggcctggcacaccgttgcctgctggcggctctcatggggaagcgcctgggcactggggattgcttgtggcccactcaactcttggggcagtggcccgtaaccctagtttgcctgaggcccttatgtccccttatgttcctggtactggagcttgagctcttgcctggaacgctgcagctgcacccaccctgcttgatcccacctgggaggccaggacactgaggagctctgaacccagcccacagggaagcagaggaaggtgagcccccgccgccccccagcccttcccatcccttccctgctccctggtggtctaaggacccaagctccctagacttcctcttccaccgtctgtacgtttcaaattacactggtgtaggcctgtactgctggtggggctgggcccctaaacgccagaaagtgaatcttaagaagctctgccctaaactgagaaccacatgctgagggaagggctgaaaggtgaaggctcagcctccctcacatgggtcctgggttacattaggtaccgggctgattgataggcatttggccatggttccttttcgtctacctttgggggccttctcaggcccagaacaaggctgttgttactatgtggaaaagctgaccagtgctgcacactaggggcacacacctttccatgagcagctcctgccctgtggcgacagccagcgtgcacccagacgctggtgccatggcgaagcaggcgttcaagaccatggagaagacaactcctcatctagaaaatgaggacacctcagtgacaaacacacctttttataccaatcagtatcctctgttcattaaaactggctatccattaaaaaaaaaa

SEQ ID NO: 540 - protein, 305 aa, Homo sapiens
MDFISIQQLVSGERVEGKVLGFGHGVPDPGAWPSDWRRGPQEAVAREKLKLEEEKKKKLERFNSTRFNLDNLADLENLVQRRKKRLRHRVPPRKPEPLVKPQSQAQVEPVGLEMFLKAAAENQEYLIDKYLTDGGDPNAHDKLHRTALHWACLKGHSQLVNKLLVAGATVDARDLLDRTPVFWACRGGHLVILKQLLNQGARVNARDKIGSTPLHVAVRTRHPDCLEHLIECGAHLNAQDKEGDTALHEAVRHGSYKAMKLLLLYGAELGVRNAASVTPVQLARDWQRGIREALQAHVAHPRTRC

SEQ ID NO: 541 - DNA, 852 bp, Homo sapiens
ggatcgactgacgccggggccgggatggcgacgcctcggccctgcgcggacgggccctgctgctcgcatcccagcgcggtgctcggcgtacagcagacgctggaggagatggacttcgagaggggaatctggtcggcagccctgaatggagacctgggccgagtgaagcatttaatccagaaggccgaggacccaagtcagcccgactcggccggctacactgcgctgcactatgccagccgcaatgggcactacgctgtgtgccagttcctgctggaaagcggagctaagtgtgatgcccagacccacgggggtgccactgctctgcaccgagccagctactgcgggcacactgaaatcacgcggctcctgctatcacatgggtccaaccccagggtggtggatgacgacggcatgaccagtctgcataaggctgctgagaggggtcacggggacatctgctccctcctcctgcaacacagcccagccctgaaggccatccgggaccgaaaggcacggctagcatgtgacctgctgccttgcaacagtgacctgcgggacctgctatccagctgagccgccaccctatctccagctgcctttaaagggtacacagaccagttctccaagcccctgccttggtcagcatccatgctgctgggcagggaactgaggccagaccacccaggaagagccccagtctggtcactgtggaagcgagggagtagatttggtgtggctaaaagtgtttaagactggacagatgatcatattctaaattagttcatatgagacatctatttatttggaaaaaaataaagttatatccttaccccaaaaaaaaaaaaaaaa

SEQ ID NO: 542 - protein, 183 aa, Homo sapiens
MATPRPCADGPCCSHPSAVLGVQQTLEEMDFERGIWSAALNGDLGRVKHLIQKAEDPSQPDSAGYTALHYASRNGHYAVCQFLLESGAKCDAQTHGGATALHRASYCGHTEITRLLLSHGSNPRVVDDDGMTSLHKAAERGHGDICSLLLQHSPALKAIRDRKARLACDLLPCNSDLRDLLSS

SEQ ID NO: 543 - DNA, 3537 bp, Homo sapiens
gcgagcgcgggcaggcggcgacgcgggggcaggggtggacggcggtcagagccgaacgcgagggcggcgcccggggactggagctgcgcgcaataggacagctggcctgaagctcagagccggggcgtgcgccatggccccacactgggctgtctggctgctggcagcaaggctgtggggcctgggcattggggctgaggtgtggtggaaccttgtgccgcgtaagacagtgtcttctggggagctggccacggtagtacggcggttctcccagaccggcatccaggacttcctgacactgacgctgacggagcccactgggcttctgtacgtgggcgcccgagaggccctgtttgccttcagcatggaggccctggagctgcaaggagcgatctcctgggaggcccccgtggagaagaagactgagtgtatccagaaagggaagaacaaccagaccgagtgcttcaacttcatccgcttcctgcagccctacaatgcctcccacctgtacgtctgtggcacctacgccttccagcccaagtgcacctacgtcaacatgctcaccttcactttggagcatggagagtttgaagatgggaagggcaagtgtccctatgacccagctaagggccatgctggccttcttgtggatggtgagctgtactcggccacactcaacaacttcctgggcacggaacccattatcctgcgtaacatggggccccaccactccatgaagacagagtacctggccttttggctcaacgaacctcactttgtaggctctgcctatgtacctgagagtgtgggcagcttcacgggggacgacgacaaggtctacttcttcttcagggagcgggcagtggagtccgactgctatgccgagcaggtggtggctcgtgtggcccgtgtctgcaagggcgatatggggggcgcacggaccctgcagaggaagtggaccacgttcctgaaggcgcggctggcatgctctgccccgaactggcagctctacttcaaccagctgcaggcgatgcacaccctgcaggacacctcctggcacaacaccaccttctttggggtttttcaagcacagtggggtgacatgtacctgtcggccatctgtgagtaccagttggaagagatccagcgggtgtttgagggcccctataaggagtaccatgaggaagcccagaagtgggaccgctacactgaccctgtacccagccctcggcctggctcgtgcattaacaactggcatcggcgccacggctacaccagctccctggagctacccgacaacatcctcaacttcgtcaagaagcacccgctgatggaggagcaggtggggcctcggtggagccgccccctgctcgtgaagaagggcaccaacttcacccacctggtggccgaccgggttacaggacttgatggagccacctatacagtgctgttcattggcacaggagacggctggctgctcaaggctgtgagcctggggccctgggttcacctgattgaggagctgcagctgtttgaccaggagcccatgagaagcctggtgctatctcagagcaagaagctgctctttgccggctcccgctctcagctggtgcagctgcccgtggccgactgcatgaagtatcgctcctgtgcagactgtgtcctcgcccgggacccctattgcgcctggagcgtcaacaccagccgctgtgtggccgtgggtggccactctggatctctactgatccagcatgtgatgacctcggacacttcaggcatctgcaacctccgtggcagtaagaaagtcaggcccactcccaaaaacatcacggtggtggcgggcacagacctggtgctgccctgccacctctcctccaacttggcccatgcccgctggacctttgggggccgggacctgcctgcggaacagcccgggaccttcctctacgatgcccggctccaggccctggttgtgatggctgcccagccccgccatgccggggcctaccactgcttttcagaggagcagggggcgcggctggctgctgaaggctaccttgtggctgtcgtggcaggcccgtcggtgaccttggaggcccgggcccccctggaaaacctggggctggtgtggctggcggtggtggccctgggggctgtgtgcctggtgctgctgctgctggtgctgtcattgcgccggcggctgcgggaagagctggagaaaggggccaaggctactgagaggaccttggtgtaccccctggagctgcccaaggagcccaccagtccccccttccggccctgtcctgaaccagatgagaaactttgggatcctgtcggttactactattcagatggctcccttaagatagtacctgggcatgcccggtgccagcccggtggggggcccccttcgccacctccaggcatcccaggccagcctctgccttctccaactcggcttcacctggggggtgggcggaactcaaatgccaatggttacgtgcgcttacaactaggaggggaggaccggggagggctcgggcaccccctgcctgagctcgcggatgaactgagacgcaaactgcagcaacgccagccactgcccgactccaaccccgaggagtcatcagtatgaggggaacccccaccgcgtcggcgggaagcgtgggaggtgtagctcctacttttgcacaggcaccagctacctcagggacatggcacgggcacctgctctgtctgggacagatactgcccagcacccacccggccatgaggacctgctctgctcagcacgggcactgccacttggtgtggctcaccagggcaccagcctcgcagaaggcatcttcctcctctctgtgaatcacagacacgcgggaccccagccgccaaaacttttcaaggcagaagtttcaagatgtgtgtttgtctgtatttgcacatgtgtttgtgtgtgtgtgtatgtgtgtgtgcacgcgcgtgcgcgcttgtggcatagccttcctgtttctgtcaagtcttcccttggcctgggtcctcctggtgagtcattggagctatgaaggggaaggggtcgtatcactttgtctctcctacccccactgccccgagtgtcgggcagcgatgtacatatggaggtggggtggacagggtgctgtgccccttcagagggagtgcagggcttggggtgggcctagtcctgctcctagggctgtgaatgttttcagggtggggggagggagatggagcctcctgtgtgtttggggggaagggtgggtggggcctcccacttggccccggggttcagtggtattttatacttgccttcttcctgtacagggctgggaaaggctgtgtgaggggagagaagggagagggtgggcctgctgtggacaatggcatactctcttccagccctaggaggagggctcctaacagtgtaacttattgtgtccccgcgtatttatttgttgtaaatatttgagtatttttatattgacaaataaaatggagaaaatgaaaaaaaaaaaaaaaaaa

SEQ ID NO: 544 - protein, 833 aa, Homo sapiens
MAPHWAVWLLAARLWGLGIGAEVWWNLVPRKTVSSGELATVVRRFSQTGIQDFLTLTLTEPTGLLYVGAREALFAFSMEALELQGAISWEAPVEKKTECIQKGKNNQTECFNFIRFLQPYNASHLYVCGTYAFQPKCTYVNMLTFTLEHGEFEDGKGKCPYDPAKGHAGLLVDGELYSATLNNFLGTEPIILRNMGPHHSMKTEYLAFWLNEPHFVGSAYVPESVGSFTGDDDKVYFFFRERAVESDCYAEQVVARVARVCKGDMGGARTLQRKWTTFLKARLACSAPNWQLYFNQLQAMHTLQDTSWHNTTFFGVFQAQWGDMYLSAICEYQLEEIQRVFEGPYKEYHEEAQKWDRYTDPVPSPRPGSCINNWHRRHGYTSSLELPDNILNFVKKHPLMEEQVGPRWSRPLLVKKGTNFTHLVADRVTGLDGATYTVLFIGTGDGWLLKAVSLGPWVHLIEELQLFDQEPMRSLVLSQSKKLLFAGSRSQLVQLPVADCMKYRSCADCVLARDPYCAWSVNTSRCVAVGGHSGSLLIQHVMTSDTSGICNLRGSKKVRPTPKNITVVAGTDLVLPCHLSSNLAHARWTFGGRDLPAEQPGTFLYDARLQALVVMAAQPRHAGAYHCFSEEQGARLAAEGYLVAVVAGPSVTLEARAPLENLGLVWLAVVALGAVCLVLLLLVLSLRRRLREELEKGAKATERTLVYPLELPKEPTSPPFRPCPEPDEKLWDPVGYYYSDGSLKIVPGHARCQPGGGPPSPPPGIPGQPLPSPTRLHLGGGRNSNANGYVRLQLGGEDRGGLGHPLPELADELRRKLQQRQPLPDSNPEESSV

SEQ ID NO: 545 - DNA, 1020 bp, Homo sapiens
ctggggctggatctgggcacagcaatttgcagggcactgctgggcaggagtccctgatggccaagctgctgggctctgtatctcccacaagctgcagcggaggccccatggagcaggagcagaagcacacgttggagaactgaacttgaaggacaggacttacagcattgaggtcacacagctgtcctcgctcagccggctcctgggcctcatgaggccatcatctctcaggcaatacctggactctgtgcccttgccaccctgccaggagcaacagccaaaggctagtgccgagctagaccacaaggcctgctacctgtgccacagcttgctgatgctggccggggtagttgttagctgccaggacatcactccagaccagtggggcgagctgcagctgctgtgcatgcagttggaccgccacatcagcacgcagatccgggagagcccccaggccatgcaccgcaccatgctcaaggacctggctacccagacctacatccgttggcaggagctgctgacccactgccagccccaggcccagtatttcagcccctggaaagacatctaaagggacagggtcagggcagcccagggctcctggcttcagcaggaagtgaacaggctcagggaactggaggaagcgaagcatcaaggccagaggaggccacatgctgaccagcctgatgaggcaagagcctgcccctgccaccgccccgacccctctcctctctgcaagagcctgcctctgccaccgccccgaccccctctcctctcagcaagggatgggcctctctgcctcgcccacccctcagccctcctcccagccatctcctcttccctaaggcctctgtctccatagctctggtttccctgggcctcagtcctccccaccctccttcctctgtctccctgtcactaatgtgaggtttctttgtgcacattaaagtcttctttcagcaaaaaaaaaaaaaaaaaaaaaaaaaaaaaaaaaaaaaaaaaaaaaaaaaaaaaaaaaaa

SEQ ID NO: 546 - protein, 119 aa, Homo sapiens
MRPSSLRQYLDSVPLPPCQEQQPKASAELDHKACYLCHSLLMLAGVVVSCQDITPDQWGELQLLCMQLDRHISTQIRESPQAMHRTMLKDLATQTYIRWQELLTHCQPQAQYFSPWKDI

SEQ ID NO: 547 - DNA, 1286 bp, Homo sapiens
gcggcagtgacttcgccgctgctgtagttccccggctggatgcggtgactggtgccagtgctcaggcgcccgctgcccttgacctcccgccccgcgagccctaactcagcgcaggaggaccggctgccgccgccgccgccgccaggctctgatgctggtgtctggtagaagaagattactcacagctctgctgcaggctcagaagtggccctttcaaccctccagagacatgagactagtgcagttccgggcaccccacctggtggggcctcacttgggcctggagacagggaatggtggaggggttatcaacctcaatgcctttgaccccacactcccaaagacgatgacgcagttcctagagcagggagaggccaccctctcagtggcaagaagagccttggctgcccagttgccagtcctaccatggtcggaggtaaccttcctggctccagtcacatggccagataaggtggtgtgtgtgggcatgaattatgtggaccactgcaaagaacagaacgtgcccgtgcccaaggagcccatcatcttcagcaagtttgccagctccatcgtggggccctatgatgaggtggtcctcccaccacagagccaggaggtagattgggaagtggagctggccgtggtcattggaaagaaaggcaagcacatcaaggccacagatgccatggcccacgtggccggcttcactgtggctcatgacgtgagtgctcgtgactggctaacaagacgcaatgggaaacagtggctgctgggaaaaaccttcgacaccttctgccctctgggccctgccttggtgaccaaggacagtgtagcagatccacacaacttaaagatctgctgccgagtgaatggggaagtcgtccagagcagcaacaccaaccagatggtattcaagacagaggacctgatagcctgggtctcccagtttgttaccttttacccaggggatgtcatcctaactgggacccccccaggtgtcggtgtattcaggaaacctcctgtctttctcaagaagggggatgaagtccagtgtgagattgaagaactaggtgtcatcatcaacaaggtggtgtgatggctcctgcacaggcccgacataggatgagggcatctgctcccactcagcctagcccagggaaaggcccagtggcaggtgtgggcaggtgccagccctgcaagccgcctcttctcggtagaagggagaaggacagagctctcttcaataaatgcgtcgggtcaaagcaaaaaaaaaaaaaaaaaaaaaa

SEQ ID NO: 548 - protein, 314 aa, Homo sapiens
MLVSGRRRLLTALLQAQKWPFQPSRDMRLVQFRAPHLVGPHLGLETGNGGGVINLNAFDPTLPKTMTQFLEQGEATLSVARRALAAQLPVLPWSEVTFLAPVTWPDKVVCVGMNYVDHCKEQNVPVPKEPIIFSKFASSIVGPYDEVVLPPQSQEVDWEVELAVVIGKKGKHIKATDAMAHVAGFTVAHDVSARDWLTRRNGKQWLLGKTFDTFCPLGPALVTKDSVADPHNLKICCRVNGEVVQSSNTNQMVFKTEDLIAWVSQFVTFYPGDVILTGTPPGVGVFRKPPVFLKKGDEVQCEIEELGVIINKVV

SEQ ID NO: 549 - DNA, 2905 bp, Homo sapiens
ggctaaggtgcgcgtgctcgctggttctaacccttctgttgggcgtttctgctgagaggcgggaggcgctgagagtctgtgcggaggtccgtggacagactgctttgctcgttgttgctcttcggaggcggcgatccccgaaggcgagctgaaatacggctgcaggctacaatttgcagccgacgattatggaagacggcaagcgggagaggtggcccaccctcatggagcgcttgtgctcggatggcttcgcatttccccaataccccattaaaccgtatcatctgaagaggatccacagagctgtcttacatggtaatctagagaaactgaagtaccttctgctcacgtattatgacgccaataagagagacaggaaggaaaggaccgccctacatttggcctgtgccactggccaaccggaaatggtacatctcctggtgtccagaagatgtgagcttaacctctgcgaccgtgaagacaggacacctctgatcaaggctgtacaactgaggcaggaggcttgtgcaactcttctgctgcaaaatggcgccaatccaaatattacggatttctttggaaggactgctctgcactacgctgtgtataatgaagatacatccatgatagaaaaacttctttcacatggtacaaatattgaagaatgcagcaagtgtgaatatcagccactgttatttgctgtgagtcgaagaaaagtgaaaatggtggaatttttattaaagaaaaaagcaaatgtaaatgccattgattatcttggcagatcagccctcatacatgctgttactcttggagaaaaagatatagtcattcttcttctgcagcacaatattgatgtgctttctcgagatgcgtttcgaaagattgcaggagattatgccattgaggctaagaatagagtcatttttgatctaatttatgaatacgaaagaaagagatatgaagatcttcctataaatagcaatccagtgtcttctcagaaacaaccagccttgaaggctacaagtggcaaggaagattctatttcaaatatagccacagaaataaaggatggacaaaaatctgggacagtgtcttctcagaaacaaccggccttgaaggatacaagtgacaaggatgattctgtttcgaacacagccacagaaataaaagatgaacaaaaatctgggacagtgcttcctgctgttgaacagtgtttaaacaggagtctctacagacctgatgctgttgcacagcctgtgacagagaatgagttttctttggaatctgagattatttcaaaactatacatcccaaagagaaagattatttctccacgatctataaaagatgtgcttcctcctgttgaagaggctgttgacaggtgtctctacctactggaccgttttgcacagcctgtgacaaaggataagtttgctttggaatctgagaatatttcagaaccatactttacgaacagaaggactatttctcaacaatctgcagaaaatttagatgctgcatgtggcattgacaaaacagaaaatggaaacatgtttgaagaccaaaatgttgataaggaaggaaaagcactaccagcaactggacaaaaagcaaatgtgtctcctgagcaaccgcctttattcacgaatcttctgagcgacctcctttatccacgcttactctgaaagaggcagatcccagttcaaaagcagccatgagaaggaaggattcaccacctccaggaaaagtgtcttctcagaaacaaccagctgagaaggctacaagtgacgacaaagattctgtttcaaatatagccacagaaataaaggagggaccaatatctgggacagtgtcttctcagaaacaaccagctgagaaggctacaagtgacgagaaagattctgtttcaaatatagccacagaaataaagaagggacaacaatctgggacagtgtctcctcagaaacaatcggcctggaaggttatatttaaaaagaaagtttctcttttgaatattgccacaagaataatgggtggtgggaaatctggaacagtgtcttctcagaaacaaccagcctcaaaggctacaagtgacaagacagattctgctttgaatatagctacagaaataaaggatggactacagtgtgggacagtgtcttctcagaaacaaccagccttgaaggctacaactgacgaggaagactctgtttcgaatatagccacagaaataaaggatggagaaaaatctgggacagtgtcttctcagaaacaaccagccttgaaggctacaactgatgagaaagattctgtttcgaacatagccacagaaataaaggatggagaaaaatctgggacagtgtcttctcagaaaccaccagccttgacggctacaagtgacgaggaaggttctgttttgagtatagccagagaaaacaaggatggagaaaaatctaggacagtgtcttctcggaaaaaaccagccttgaaggctacaagtgatgagaaggattctttttcgaatataaccagaggaaaaaaggatggagaaatatctaggaaagtgtcttctcagaaaccaccaaccttgaagtgtcttctgagaaaccaccaggcttgaagtgtcttctcggaaaaaaccatccttggaggccacaagtgatgagaaggattctttttcgaatataaccagagaaaaaaaggatggagaaatatctaggaaagtgtcttctcagaaaccaccagccttgaagggtacaagtgacgaggaagattctgttttgggtatagccagagaaaacaaggatggagaaaaatctaggacagtgtcttctgagaaaccaccaggcttgaaggctacaagtgatgagaaagattctgttttgaatatagccagaggaaaaaa

SEQ ID NO: 550 - protein, 498 aa, Homo sapiens
MEDGKRERWPTLMERLCSDGFAFPQYPIKPYHLKRIHRAVLHGNLEKLKYLLLTYYDANKRDRKERTALHLACATGQPEMVHLLVSRRCELNLCDREDRTPLIKAVQLRQEACATLLLQNGANPNITDFFGRTALHYAVYNEDTSMIEKLLSHGTNIEECSKCEYQPLLFAVSRRKVKMVEFLLKKKANVNAIDYLGRSALIHAVTLGEKDIVILLLQHNIDVLSRDAFRKIAGDYAIEAKNRVIFDLIYEYERKRYEDLPINSNPVSSQKQPALKATSGKEDSISNIATEIKDGQKSGTVSSQKQPALKDTSDKDDSVSNTATEIKDEQKSGTVLPAVEQCLNRSLYRPDAVAQPVTENEFSLESEIISKLYIPKRKIISPRSIKDVLPPVEEAVDRCLYLLDRFAQPVTKDKFALESENISEPYFTNRRTISQQSAENLDAACGIDKTENGNMFEDQNVDKEGKALPATGQKANVSPEQPPLFTNLLSDLLYPRLL

SEQ ID NO: 551 - DNA, 2418 bp, Homo sapiens
gtgcagaaagcaccgtcttttactagaagaagacaataaaatgttggtcaatgaactgaatcattcgaaagaaaaagaatgccaatatgaaaaagagaaagcagaaagagaagtagctgtgagacagcttcaacaaaaacgagatgatgtcttaaacaaaggatcagcaacaaaagctctgctggatgcttcatcgcgtcactgcacctatttagaaaatgggatgcaggattcaaggaagaaattagaccagatgagaagtcaatttcaagaaatacaggatcaacttacagctactataagatgtactaaggagatggatggcgacacacaaaagcttgaagtagaacatgtgatgatgagaaaaattattaaaaaacaggatgaccaaattgagcggcttgagaaaatcctgcagcattcaagtttgatgctgcaggtgtttgagagctagatgaagatatggacatttctggaattaagagccccctctacattgagcacaagacagtgacgaatccacattcttcagccagaaagtcacctctgagagccaaatgtctgactatagaaaggagagtcaaagaatgataacgacatctcaggaaaattgtgaaaataatcagcagccggatgtggataaccctttcaaatttctcctggggcctccaaccacccccactggtgttctcctgctgacagtgatttcaattttttctgggctggagctccctgatggaggggcaggccaccatctttgctgtttttgcaacttagccacttcagccttcagtctttggagtgtccaaggagaccagggggtgatgtggaccctcagcatagcacagctgctctataaagatgaggccagactgcttttttgagcactttcccaatgccattcctcctcactgggcaaaacctccaaactggggtctccagccacctcctacaggtgtgtttgggccagcaacaagttcattcatacctccctagggcaaagcttccaaagggagcggtaggctgccatctttgctgtttcacaggcttcactgatgataactccaggtactggaaaatctgaggctactagagactggagcgggccctgggcatactgcagcagccctatggaaaagtggccagactgttacctgggttcccattcctatatcttctcactaggcaagtcttgcaggcctgggcctctacctaaccccccctaccagaactgttgagccagtagcaactcagccactccctggagagagcctccaggggcaactgaaagcctctctgccactgcttctgcagtggaactgtccttgctaccctcagactgatgaaggagctaacacccttatctacaccttcaacaagctttaattgaccaaagcccatctctcatgggttctacacactccccactgctcatgacagggaacccctggattggcccccacagcacgaattctccatcctgattgctgattgcagtaaacagttgctgtattctccaggggtggtggaactctgaggagacaaacaaaagacccttggctacaaccactactaatgtcccttcctcttctgcctcaaagttaggaaagaaatataaacactgagattgccccagagctgcagtgggcagcctaggagtgccaagccatgacctacagccagcactcaagggggagagaagcacattttcagatcattgagagggaacatggctgcaactgtaaggaaacataggggagccacatgaccaagcaagagtctaccaactgaccagtaagcccaagtgccacctactggatcacatcccaaagcttcagcatcaaaaataccctactaatatactcccctctgaaaccagaaatgagaagtcagcttcaaataaagaccctgcacaaagcctcagcctggtgaaaacatccgaaaataagtctacggactgtactcaatctacactgcaattaaaggaaaacccataggtggaaatgagaagaaaccaatgcaagaactccagtaactcaaatggcctctgtgtcatatgtccttctaacaaccacaccagttctccaacaagagttcttaacctggatgaactgtctggaattacataaatataattcagaatatggataggaaaaaaaatcatcaagactcaggagaatggcaaaacccaatccaaggaaaataagaataacagtaaagtgttacaggagctgaaggataaagtagctggtataataaaaaagaacctaaccgatctgaaagcgccgaagaacacaatacaagaattccacaatgcaatcacaagtattaacagcagaaaaaaaaacctgaggaacgaatctcagaacttgaagattggttctctaaaataagatggacaaaaaaaaaaaaaaaaaa

SEQ ID NO: 552 - protein, 137 aa, Homo sapiens [sequence omitted]

SEQ ID NO: 553 - DNA, 523 bp, Homo sapiens
cggaagttttgctgctagtcgcggacgcaatggcttcaaggttacttcgcggagctggaacgctggccgcgcaggccctgagggctcgcggccccagtggcgcggccgcgatgcgctccatggcatctggaggtggtgttcccactgatgaagagcaggcgactgggttggagagggagatcatgctggctgcaaagaagggactggacccatacaatgtactggccccaaagggagcttcaggcaccagggaagaccctaatttagtcccctccatctccaacaagagaatagtaggctgcatctgtgaagaggacaataccagcgtcgtctggttttggctgcacaaaggcgaggcccagcgatgcccccgctgtggagcccattacaagctggtgccccagcagctggcacactgagcacctgcactaaattactcaaaatgtgctgtaaagtttcttctttccagtaaagactagccattgcattggctccttctcccataaaaaaaaaaaaaaaaaaa

SEQ ID NO: 554 - protein, 129 aa, Homo sapiens
MASRLLRGAGTLAAQALRARGPSGAAAMRSMASGGGVPTDEEQATGLEREIMLAAKKGLDPYNVLAPKGASGTREDPNLVPSISNKRIVGCICEEDNTSVVWFWLHKGEAQRCPRCGAHYKLVPQQLAH

SEQ ID NO: 555 - DNA, 2054 bp, Homo sapiens
gcctgctgggcaggccggcgcggcccggccatggagtcctacgacatcatcgccaaccagcctgtggtcatcgacaacggttcgggggtgattaaagctggctttgcaggagaccagattcccaaatactgtttcccaaactatgtcgggcggccgaagcacatgcgggtgatggctggagccctggagggggacctcttcatcggaccaaaagcagaggagcaccgggggctgctgaccatccgctaccccatggagcacggcgtggtgcgagactggaacgacatggaacgcatctggcagtacgtctactccaaggatcagctgcagaccttctcggaggagcatcctgtgctcctcacggaggccccgctcaacccgagtaagaaccgggagaaggcggcagaggtgttctttgagaccttcaacgtgccggccctgttcatctccatgcaggctgtgctcagtctgtacgcaacaggacgcacgacaggagtggttctagactcaggggacggggtcactcatgctgtgcccatctatgagggctttgccatgcctcactccatcatgcgggtggacattgccggccgcgacgtctcccgctacctccgactcctgctgcgcaaggaaggggttgacttccatacctcggctgagtttgaggttgtccggacaatcaaagagcgagcgtgctacctgtccatcaacccacagaaggatgaggctctggagacggagaaggtgcagtacacgttgccagacggcagcacgcttgatgtggggcctgcacgattccgggcccccgagctgctgttccagccggaccttgtcggggatgagagtgaggggctccatgaggtggtggccttcgccatacacaagtccgacatggacctgcgccggacgctgttcgccaacatcgtgctctcaggtggctcaacgcttttcaaaggcttcggagaccgattactcagtgaagtgaagaagcttgccccaaaggatatcaaaatcaagatctcagccccgcaggaacggctgtactccacatggattggcggctccatcctggcctcgctggacacttttaagaagatgtgggtgtccaaaaaggagtatgaagaggatggctcccgtgctattcatcgcaaaactttctagtgcccaaggagggcggggcatgttgggagagggggagggaggggagacagagcctttaaccctttttggtcttggctcgtatactaggcttagggtcccctgcatgccctgaacccctgggtgggtggcacagcagtgcccccctgcagccttcccctctacacaggacatgcacacacaagtaacattgagctgcatggacaggagccttgagctggcgtgtgggaattgagcgccatgtcaggctgttgtgggtatccccctggcagggccagctaggcctgtggttcccctgctccgactctcagggctgcctccctgagctccagggccagaatgcctggatgcctgggtagccagtttggggagtgggctgcaaggggcagccagcagcgcccactggtgtgtcactgcatccattgccacctcctgttcgtgacctgacagggtgacacagcccctttcacactctgtcctcctatcttcctgggtagatgccctggtgtagggctgagtactgaatggtcttccatccccagcaagggggtgcagcccagggtcaggcccttcagagccagggctagaggatgcacggtggctagagccagctgcactatccttttcagagcacttcatccacttgctcctccctctaccctcggcaccctgggtgggaaagggttgatgctcatcatttattgaggggaagccacttaataaggagtcagacctaaaagggggtgggggacattttcttacctcacccaagaaagaggtcgtcacttttgctgtggccagggccccacctccctctctcagatatgtacaataatttaacacggttgcctgaaaaaaacttttgtaaatcattatagtaataattatggacaagg

SEQ ID NO: 556 - protein, 376 aa, Homo sapiens
MESYDIIANQPVVIDNGSGVIKAGFAGDQIPKYCFPNYVGRPKHMRVMAGALEGDLFIGPKAEEHRGLLTIRYPMEHGVVRDWNDMERIWQYVYSKDQLQTFSEEHPVLLTEAPLNPSKNREKAAEVFFETFNVPALFISMQAVLSLYATGRTTGVVLDSGDGVTHAVPIYEGFAMPHSIMRVDIAGRDVSRYLRLLLRKEGVDFHTSAEFEVVRTIKERACYLSINPQKDEALETEKVQYTLPDGSTLDVGPARFRAPELLFQPDLVGDESEGLHEVVAFAIHKSDMDLRRTLFANIVLSGGSTLFKGFGDRLLSEVKKLAPKDIKIKISAPQERLYSTWIGGSILASLDTFKKMWVSKKEYEEDGSRAIHRKTF

SEQ ID NO: 557 - DNA, 2450 bp, Homo sapiens
aataggttagtttcagacaagcctgcttgccggagctcagcagacaccaggccttccgggcaggcctggcccaccgtgggcctcagagctgctgctggggcattcagaaccggctctccattggcattgggaccagagaccccgcaagtggcctgtttgcctggacatccacctgtacgtccccaggtttcgggaggcccaggggcgatgccagaccccgcggcgcacctgcccttcttctacggcagcatctcgcgtgccgaggccgaggagcacctgaagctggcgggcatggcggacgggctcttcctgctgcgccagtgcctgcgctcgctgggcggctatgtgctgtcgctcgtgcacgatgtgcgcttccaccactttcccatcgagcgccagctcaacggcacctacgccattgccggcggcaaagcgcactgtggaccggcagagctctgcgagttctactcgcgcgaccccgacgggctgccctgcaacctgcgcaagccgtgcaaccggccgtcgggcctcgagccgcagccgggggtcttcgactgcctgcgagacgccatggtgcgtgactacgtgcgccagacgtggaagctggagggcgaggccctggagcaggccatcatcagccaggccccgcaggtggagaagctcattgctacgacggcccacgagcggatgccctggtaccacagcagcctgacgcgtgaggaggccgagcgcaaactttactctggggcgcagaccgacggcaagttcctgctgaggccgcggaaggagcagggcacatacgccctgtccctcatctatgggaagacggtgtaccactacctcatcagccaagacaaggcgggcaagtactgcattcccgagggcaccaagtttgacacgctctggcagctggtggagtatctgaagctgaaggcggacgggctcatctactgcctgaaggaggcctgccccaacagcagtgccagcaacgcctcaggggctgctgctcccacactcccagcccacccatccacgttgactcatcctcagagacgaatcgacaccctcaactcagatggatacacccctgagccagcacgcataacgtccccagacaaaccgcggccgatgcccatggacacgagcgtgtatgagagcccctacagcgacccagaggagctcaaggacaagaagctcttcctgaagcgcgataacctcctcatagctgacattgaacttggctgcggcaactttggctcagtgcgccagggcgtgtaccgcatgcgcaagaagcagatcgacgtggccatcaaggtgctgaagcagggcacggagaaggcagacacggaagagatgatgcgcgaggcgcagatcatgcaccagctggacaacccctacatcgtgcggctcattggcgtctgccaggccgaggccctcatgctggtcatggagatggctgggggcgggccgctgcacaagttcctggtcggcaagagggaggagatccctgtgagcaatgtggccgagctgctgcaccaggtgtccatggggatgaagtacctggaggagaagaactttgtgcaccgtgacctggcggcccgcaacgtcctgctggttaaccggcactacgccaagatcagcgactttggcctctccaaagcactgggtgccgacgacagctactacactgcccgctcagcagggaagtggccgctcaagtggtacgcacccgaatgcatcaacttccgcaagttctccagccgcagcgatgtctggagctatggggtcaccatgtgggaggccttgtcctacggccagaagccctacaagaagatgaaagggccggaggtcatggccttcatcgagcagggcaagcggatggagtgcccaccagagtgtccacccgaactgtacgcactcatgagtgactgctggatctacaagtgggaggatcgccccgacttcctgaccgtggagcagcgcatgcgagcctgttactacagcctggccagcaaggtggaagggcccccaggcagcacacagaaggctgaggctgcctgtgcctgagctcccgctgcccaggggagccctccacgccggctcttccccaccctcagccccaccccaggtcctgcagtctggctgagccctgcttggttgtctccacacacagctgggctgtggtagggggtgtctcaggccacaccggccttgcattgcctgcctggccccctgtcctctctggctggggagcagggaggtccgggagggtgcggctgtgcagcctgtcctgggctggtggctcccggagggccctgagctgagggcattgcttacacggatgccttcccctgggccctgacattggagcctgggcatcctcaggtggtcaggcgtagatcaccagaataaacccagcttccctcttgaaaaaaaaaaaaaaaaaaaaa

SEQ ID NO: 558 - protein, 619 aa, Homo sapiens
MPDPAAHLPFFYGSISRAEAEEHLKLAGMADGLFLLRQCLRSLGGYVLSLVHDVRFHHFPIERQLNGTYAIAGGKAHCGPAELCEFYSRDPDGLPCNLRKPCNRPSGLEPQPGVFDCLRDAMVRDYVRQTWKLEGEALEQAIISQAPQVEKLIATTAHERMPWYHSSLTREEAERKLYSGAQTDGKFLLRPRKEQGTYALSLIYGKTVYHYLISQDKAGKYCIPEGTKFDTLWQLVEYLKLKADGLIYCLKEACPNSSASNASGAAAPTLPAHPSTLTHPQRRIDTLNSDGYTPEPARITSPDKPRPMPMDTSVYESPYSDPEELKDKKLFLKRDNLLIADIELGCGNFGSVRQGVYRMRKKQIDVAIKVLKQGTEKADTEEMMREAQIMHQLDNPYIVRLIGVCQAEALMLVMEMAGGGPLHKFLVGKREEIPVSNVAELLHQVSMGMKYLEEKNFVHRDLAARNVLLVNRHYAKISDFGLSKALGADDSYYTARSAGKWPLKWYAPECINFRKFSSRSDVWSYGVTMWEALSYGQKPYKKMKGPEVMAFIEQGKRMECPPECPPELYALMSDCWIYKWEDRPDFLTVEQRMRACYYSLASKVEGPPGSTQKAEAACA

SEQ ID NO: 559 - DNA, 1468 bp, Homo sapiens
tgcatgctccagggacggcacccttgtctggggcaggtgcttgtgggggctgaggctgccttgctccccacacccctgcccctgacctgggagtgtaccgctgtgtgtgcccagcacgcataacgtccccagacaaaccgcggccgatgcccatggacacgagcgtgtatgagagcccctacagcgacccagaggagctcaaggacaagaagctcttcctgaagcgcgataacctcctcatagctgacattgaacttggctgcggcaactttggctcagtgcgccagggcgtgtaccgcatgcgcaagaagcagatcgacgtggccatcaaggtgctgaagcagggcacggagaaggcagacacggaagagatgatgcgcgaggcgcagatcatgcaccagctggacaacccctacatcgtgcggctcattggcgtctgccaggccgaggccctcatgctggtcatggagatggctgggggcgggccgctgcacaagttcctggtcggcaagagggaggagatccctgtgagcaatgtggccgagctgctgcaccaggtgtccatggggatgaagtacctggaggagaagaactttgtgcaccgtgacctggcggcccgcaacgtcctgctggttaaccggcactacgccaagatcagcgactttggcctctccaaagcactgggtgccgacgacagctactacactgcccgctcagcagggaagtggccgctcaagtggtacgcacccgaatgcatcaacttccgcaagttctccagccgcagcgatgtctggagctatggggtcaccatgtgggaggccttgtcctacggccagaagccctacaagaagatgaaagggccggaggtcatggccttcatcgagcagggcaagcggatggagtgcccaccagagtgtccacccgaactgtacgcactcatgagtgactgctggatctacaagtgggaggatcgccccgacttcctgaccgtggagcagcgcatgcgagcctgttactacagcctggccagcaaggtggaagggcccccaggcagcacacagaaggctgaggctgcctgtgcctgagctcccgctgcccaggggagccctccacgccggctcttccccaccctcagccccaccccaggtcctgcagtctggctgagccctgcttggttgtctccacacacagctgggctgtggtagggggtgtctcaggccacaccggccttgcattgcctgcctggccccctgtcctctctggctggggagcagggaggtccgggagggtgcggctgtgcagcctgtcctgggctggtggctcccggagggccctgagctgagggcattgcttacacggatgccttcccctgggccctgacattggagcctgggcatcctcaggtggtcaggcgtagatcaccagaataaacccagcttccctcttgaaaaaaaaaaaaaaaaaaaaa

SEQ ID NO: 560 - protein, 312 aa, Homo sapiens
MPMDTSVYESPYSDPEELKDKKLFLKRDNLLIADIELGCGNFGSVRQGVYRMRKKQIDVAIKVLKQGTEKADTEEMMREAQIMHQLDNPYIVRLIGVCQAEALMLVMEMAGGGPLHKFLVGKREEIPVSNVAELLHQVSMGMKYLEEKNFVHRDLAARNVLLVNRHYAKISDFGLSKALGADDSYYTARSAGKWPLKWYAPECINFRKFSSRSDVWSYGVTMWEALSYGQKPYKKMKGPEVMAFIEQGKRMECPPECPPELYALMSDCWIYKWEDRPDFLTVEQRMRACYYSLASKVEGPPGSTQKAEAACA

SEQ ID NO: 561 - DNA, 2132 bp, Homo sapiens
ggcggggctctcggggccgctgccgccgccgccgccgcgcattgtgcagcaggcgggcccccgcgcggcagggccctggacccgcgcggctcccggggatggtgagcaaggcgctgctgcgcctcgtgtctgccgtcaaccgcaggaggatgaagctgctgctgggcatcgccttgctggcctacgtcgcctctgtttggggcaacttcgttaatatgaggtctatccaggaaaatggtgaactaaaaattgaaagcaagattgaagagatggttgaaccactaagagagaaaatcagagatttagaaaaaagctttacccagaaatacccaccagtaaagtttttatcagaaaaggatcggaaaagaattttgataacaggaggcgcagggttcgtgggctcccatctaactgacaaactcatgatggacggccacgaggtgaccgtggtggacaatttcttcacgggcaggaagagaaacgtggagcactggatcggacatgagaacttcgagttgattaaccacgacgtggtggagcccctctacatcgaggttgaccagatataccatctggcatctccagcctcccctccaaactacatgtataatcctatcaagacattaaagaccaatacgattgggacattaaacatgttggggctggcaaaacgagtcggtgcccgtctgctcctggcctccacatcggaggtgtatggagatcctgaagtccaccctcaaagtgaggattactggggccacgtgaatccaataggacctcgggcctgctacgatgaaggcaaacgtgttgcagagaccatgtgctatgcctacatgaagcaggaaggcgtggaagtgcgagtggccagaatcttcaacacctttgggccacgcatgcacatgaacgatgggcgagtagtcagcaacttcatcctgcaggcgctccagggggagccactcacggtatacggatccgggtctcagacaagggcgttccagtacgtcagcgatctagtgaatggcctcgtggctctcatgaacagcaacgtcagcagcccggtcaacctggggaacccagaagaacacacaatcctagaatttgctcagttaattaaaaaccttgttggtagcggaagtgaaattcagtttctctccgaagcccaggatgacccacagaaaagaaaaccagacatcaaaaaagcaaagctgatgctggggtgggagcccgtggtcccgctggaggaaggtttaaacaaagcaattcactacttccgtaaagaactcgagtaccaggcaaataatcagtacatccccaaaccaaagcctgccagaataaagaaaggacggactcgccacagctgaactcctcacttttaggacacaagactaccattgtacacttgatgggatgtatttttggcttttttttgttgtcgtttaaagaaagactttaacaggtgtcatgaagaacaaactggaatttcattctgaagcttgctttaatgaaatggatgtgcctaaaagctcccctcaaaaaactgcagattttgccttgcactttttgaatctctctttttatgtaaaatagcgtagatgcatctctgcgtattttcaagtttttttatcttgctgtgagagcatatgttgtgactgtcgttgacagttttatttactggtttctttgtgaagctgaaaaggaacattaagcgggacaaaaaatgccgattttatttataaaagtgggtacttaataaatgagtcgttatactatgcataaagaaaaatcctagcagtattgtcaggtggtggtgcgccggcattgattttagggcagataaaagaattctgtgtgagagctttatgtttctcttttaattcagagtttttccaaggtctacttttgagttgcaaacttgactttgaaatattcctgttggtcatgatcaaggatatttgaaatcactactgtgttttgctgcgtatctggggcgggggcaggttggggggcacaaagttaacatattcttggttaaccatggttaaatatgctattttaataaaatattgaaactcaccagtcatggaaaaaaaaaaaaaaaaaaaaaaaaaaaaaaaaaaaaaaaaaaaaaaaaa

SEQ ID NO: 562 - protein, 420 aa, Homo sapiens
MVSKALLRLVSAVNRRRMKLLLGIALLAYVASVWGNFVNMRSIQENGELKIESKIEEMVEPLREKIRDLEKSFTQKYPPVKFLSEKDRKRILITGGAGFVGSHLTDKLMMDGHEVTVVDNFFTGRKRNVEHWIGHENFELINHDVVEPLYIEVDQIYHLASPASPPNYMYNPIKTLKTNTIGTLNMLGLAKRVGARLLLASTSEVYGDPEVHPQSEDYWGHVNPIGPRACYDEGKRVAETMCYAYMKQEGVEVRVARIFNTFGPRMHMNDGRVVSNFILQALQGEPLTVYGSGSQTRAFQYVSDLVNGLVALMNSNVSSPVNLGNPEEHTILEFAQLIKNLVGSGSEIQFLSEAQDDPQKRKPDIKKAKLMLGWEPVVPLEEGLNKAIHYFRKELEYQANNQYIPKPKPARIKKGRTRHS

SEQ ID NO: 563 - DNA, 945 bp, Homo sapiens
atggctttctctgctcgcgcgcagtgtggcggcagcaggtgcggctttgagatgcagaatgacactggtgagttcataggcctgtacatgccatggaaatggtccaatagcaactgcatcatcgatgccaaggaccacaaatccatccagatgaacggggccaaggttgacaaggtagcaggcaggtttaaccaccagtttaaaacctatgctatctgcagggccattcgcaggatggcctttgtcaagctgttctttgtccctatccgtggcttttccttgacctctgccctggcatgcacccaacagagccccttctctttgatcacttcttccgtggtaacagtgaacagaattctgctgggagccacagaatgtttactgaagatttatgggtcaccggagaaaacggggagcgataggaacctgcagacgcggacccacgcgtcccgacgtgggcagacctatgtactttatgatgctgctctggcaacgccctccctccacccaaaggcggccgagagcctgaccatgcacctggccgacggtgctgctccaccgagcgctgaactcgctgtctccctgaagcacgctccccgtctggctgaccttgcaggaccgtttgttcaaaccactcccaggaacttcctgcccaggccccgcactcttcacccgaacttccgtgactcctcagggcaccgtcgcttaggggtccgtttttgccaattcactgtgtctttactgcattctgctgggtgctgccagcatgtggaaggctgtgataggagcagcacttgcccccggggcggcctggtggtcctcccctgctgggcagagcagccccatgagatcagcagcaatgttcaatcccgaggagtcacagagttgcctatttctcagggcaacagcaggaaaggccctcctgaggcccatggtgccctgtga

SEQ ID NO: 564 - protein, 314 aa, Homo sapiens [sequence omitted]

SEQ ID NO: 565 - DNA, 261 bp, Homo sapiens
atggagggcatggacgtggaccgggacctggagctgatgcagaatttcaactacctgagcaccaccaacaaagacgtgctcatctccaagttccagaggctgctcggcttccagctcaaccctgccagttgcgccttcttcctggacaggaccaactggaacctacaagcagcaattggtgcctcttatgcctttgagagctcaaacatcagtgtgccctctgtgtcctttgttgaagatgtcaccctagaggaagggtag

SEQ ID NO: 566 - protein, 86 aa, Homo sapiens [sequence omitted]

SEQ ID NO: 567 - DNA, 1988 bp, Homo sapiens
gtaagtcaacaacatcctgggactgggacacactttctgggcactgctggccagtcccaaaatggaacataaggaagtggttcttctacttcttttatttctgaaatcaggtcaaggagagcctctggatgactatgtaaatgcccagggggcttcactgttcagtgtcactaagaagcagctgggggcaggaagcagagaagaatgtgcagcaaaatgtgaggaggacaaagaattcacctgcagggcattccaatatcacagtaaagagcaacaatgtgtgataatggctgaaaacaagaagtcctccataatcattaggatgagagatgtagttttatttgaaaagtaaatgtatctttcagagtgcaagactgggaatggaaagaactacagagggacgatgtccaaaacaaaaaatggcatcacctgtcaaaaatggagttccacttctccccgcagacctaggtaagactttccctttcatctttgtgttcatctactgtaaagttgtccctctgtgtctgtgagggattggttccaggacccctgtggctaccaaaatccatgcttctcaagtcccttatgtaaaatggtgcagtatttgcatataacctacataccttctcttgtgcaatccctaatataatgtaaatgctatgtaatcgttgttatgctgtattgtttttatttgtattatgttttattgtcatattgttattttctctcatctttttcaagtcttttccatccacagttggttgaatttgtggatgtggaacccatggatacagagggccaactgtatttaggataatttcatcacttttaattcaaaccagaatatgtgaataagcagacagaaagaatctttttgatgtcgatgttcaactatttttggcaccatagtagaacatcgttgctttctattttttcttgggtatggaggtttcttgaagacctagaacatagaagaatgcctagttaaaaaaaaaaatcaatgaaactacgagttttaggccaaatctgagaaaagaccaaagatgactatgtttgggactgaagtaaacatatcaagttagaactctcatcacatgtttgactcaaattgtggagcaaaatagtaaataaaatataaaaatgacaatgaagatacgtgaaattcaaatgtcgcaacttgcctattatttattttagtgcatttttttgtgcttttcccagtttggtgttaggtggcattaagttctcagtaatgacacttatcaaataggaacttagtgcctgttactcacctttatccattcccccaacactcaacaaattgcctttgctatatccctatgagatgagcagatcaaatattccccgtgagttaatgaaaactgattcaaccaaatggcgaagtcagagactatcgggggccatggagacactctgggccatttttatgaggtagtctaggctcatcttcatgagggaactgaggtcttggggggtgggggttaccccaaataggttcacagaagaaccagaaataaaacctgcctttctagactgtaagtcttgtgattgtcatctaaatggttgtctctatacagcaactcatctctagaactgaaaataagtttaaatccctcctccatccccaataattcaagctgcatttcagagaaaaccaggactttggaatcagacagatcaactttgaattcttgatctgcttcttcatagctatttacgcttaggcaagttttgttttgttttgttttacgttgccattcagtcttctcatctgtaaaatagggataataacaccttcctcaaatggttttttttattaggactaaaagagagaatgtgtggaaagatgttagtggaattcctggcacatagttcacatggacaaaatggtgttaactatgaaaatttttacagagaaaagggcaactgacaaaagcaggtgtttggaatgaattaagaccatggca

SEQ ID NO: 568 - protein, 96 aa, Homo sapiens
MEHKEVVLLLLLFLKSGQGEPLDDYVNAQGASLFSVTKKQLGAGSREECAAKCEEDKEFTCRAFQYHSKEQQCVIMAENKKSSIIIRMRDVVLFEK

SEQ ID NO: 569 - DNA, 1077 bp, Homo sapiens
atcctgggactgggacacactttctgggcactgctggccagtcccaaaatggaacataaggaagtggttcttctacttcttttatttctgaaatcaggtcaaggagagcctctggatgactatgtaaatgcccagggggcttcactgttcagtgtcactaagaagcagctgggggcaggaagcagagaagaatgtgcagcaaaatgtgaggaggacaaagaattcacctgcagggcattccaatatcacagtaaagagcaacaatgtgtgataatggctgaaaacaagaagtcctccataatcattaggatgagagatgtagttttatttgaaaagtaaaggtgaccatggtccttgggccctaacgtctggatgaagccttgtaaaacagaaatactgaggtgttttaatcctcagaaacatttagattgggacacaaatcttattttttactcttaaatttttcacattttgggggacatggtctatatttttctcagatttctgaaatgttgtcttttaaaaatgtgtaaaagttacagtcccttttctatagtttattttaaaatgtgggtcaatagtcccactgcttagaataaggggcacacaggatttcaatagaaattgcatgcctttttagatgtgcaaatgtttcattaagcgtatgaatatttgaagagatgtatgacactttgaaaactgtttcctctactgtgttggtggccaggtattaagaccgttaataataacaatttagctctccaaatattctgcatcacaggtgttaaagaggactggaaacaccttagttcttgtattcttgaggatgatttgccatattgtgtctagtatcacggcaaaactctaagtagcattttaaatagtatttatttgggttggaattatttatatgcattgactcatcttcctgggtttcattagctgtacgcattgtactttcttccttaccactatttatctcgaattcttgagattaaagtacagattaaatctaaactttatctggtgcagttattagttcttacaagtagcaagcaaatggtaaactgaatagga

SEQ ID NO: 570 - protein, 96 aa, Homo sapiens; identical to SEQ ID NO: 568

SEQ ID NO: 571 - DNA, 1430 bp, Homo sapiens
atcctgggactgggacacactttctgggcactgctggccagtcccaaaatggaacataaggaagtggttcttctacttcttttatttctgaaatcaggtcaaggagagcctctggatgactatgtaaatgcccagggggcttcactgttcagtgtcactaagaagcagctgggggcaggaagcagagaagaatgtgcagcaaaatgtgaggaggacaaagaattcacctgcagggcattccaatatcacagtaaagagcaacaatgtgtgataatggctgaaaacaagaagtcctccataatcattaggatgagagatgtagttttatttgaaaagtaaagtgagtacattttcttcctcctcctcctactgtcctccccatcctcccactcttcctctttctctattctatctttaatttatgagaccagaggaggaaggcgctatggtgttgtaaaattgaattctgagttaggacaggatttgattactaactaaccatgtcagcttgagtatattacttcacctcctagatttaatttttttgttgttcaaaaaatgaaaggattagatttacaaaatcacttctacctctatgaccctgaaaataagatttttaaaatattattttatatttaacaaggagatgggaagtctaagcattccttttggtcttggcttcttattctgcagggtgaccatggtccttgggccctaacgtctggatgaagccttgtaaaacagaaatactgaggtgttttaatcctcagaaacatttagattgggacacaaatcttattttttactcttaaatttttcacattttgggggacatggtctatatttttctcagatttctgaaatgttgtcttttaaaaatgtgtaaaagttacagtcccttttctatagtttattttaaaatgtgggtcaatagtcccactgcttagaataaggggcacacaggatttcaatagaaattgcatgcctttttagatgtgcaaatgtttcattaagcgtatgaatatttgaagagatgtatgacactttgaaaactgtttcctctactgtgttggtggccaggtattaagaccgttaataataacaatttagctctccaaatattctgcatcacaggtgttaaagaggactggaaacaccttagttcttgtattcttgaggatgatttgccatattgtgtctagtatcacggcaaaactctaagtagcattttaaatagtatttatttgggttggaattatttatatgcattgactcatcttcctgggtttcattagctgtacgcattgtactttcttccttaccactatttatctcgaattcttgagattaaagtacagattaaatctaaactttatctggtgcagttattagttcttacaagtagcaagcaaatggtaaactgaatagga

SEQ ID NO: 572 - protein, 96 aa, Homo sapiens; identical to SEQ ID NO: 568

SEQ ID NO: 573 - DNA, 1039 bp, Homo sapiens
gtcaacaacatcctgggactgggacacactttctgggcactgctggccagtcccaaaatggaacataaggaagtggttcttctacttcttttatttctgaaatcaggtcaaggagagcctctggatgactatgtaaatgcccagggggcttcactgttcagtgtcactaagaagcagctgggggcaggaagcagagaagaatgtgcagcaaaatgtgaggaggacaaagaattcacctgcagggcattccaatatcacagtaaagagcaacaatgtgtgataatggctgaaaacaagaagtcctccataatcattaggatgagagatgtagttttatttgaaaagtaaatgtatctttcagagtgcaagactgggaatggaaagaactacagagggacgatgtccaaaacaaaaaatggcatcacctgtcaaaaatggagttccacttctccccgcagacctagataaagaaatgggggctcagagcagtcaagaacatgccccaagttattcgtcagtgaggcggaaattgtggtgtccttgttttgtatcttagcaaaatcacaggtaatacgcaacagacctttaggattcatcccaagccaaaaatgggggaaaaaatccacaaattccaagagcctaatataaggtttgttcacatattgtcattacataccagagcacaccttcatttaaaacacatcaagactccgtgaaatgtcaattgctccaagtggaagacttacctgaaatgctatgagatagcacaatgcagccagctcagaaagagctcgccattgaacattattaccatgctgacccatcttcaagagcagagaaccagcatgcatgtagaaatgtcctttcatttctaagaaagtagctgacagttcatcatttccacccaaagaagatttcgcagactgaagagcactatcaaaactgtaatatgaaaatatcaaacagatgatacacacttactgcactgtgaataatcatggttcatttaattcaaaacaaaataaaaattttatttcaa

SEQ ID NO: 574 - protein, 96 aa, Homo sapiens; identical to SEQ ID NO: 568

SEQ ID NO: 575 - DNA, 934 bp, Homo sapiens
gtcaacaacatcctgggactgggacacactttctgggcactgctggccagtcccaaaatggaacataaggaagtggttcttctacttcttttatttctgaaatcaggtcaaggagagcctctggatgactatgtaaatgcccagggggcttcactgttcagtgtcactaagaagcagctgggggcaggaagcagagaagaatgtgcagcaaaatgtgaggaggacaaagaattcacctgcagggcattccaatatcacagtaaagagcaacaatgtgtgataatggctgaaaacaagaagtcctccataatcattaggatgagagatgtagttttatttgaaaagtaaatgtatctttcagagtgcaagactgggaatggaaagaactacagagggacgatgtccaaaacaaaaaatggcatcacctgtcaaaaatggagttccacttctccccgcagacctagataaagaaatgggggctcagagcagtcaagaacatgccccaagttattcgtcagtgaggcggaaattgtggtgtccttgtgtttgttcacatattgtcattacataccagagcacaccttcatttaaaacacatcaagactccgtgaaatgtcaattgctccaagtggaagacttacctgaaatgctatgagatagcacaatgcagccagctcagaaagagctcgccattgaacattattaccatgctgacccatcttcaagagcagagaaccagcatgcatgtagaaatgtcctttcatttctaagaaagtagctgacagttcatcatttccacccaaagaagatttcgcagactgaagagcactatcaaaactgtaatatgaaaatatcaaacagatgatacacacttactgcactgtgaataatcatggttcatttaattcaaaacaaaataaaaattttatttcaa

SEQ ID NO: 576 - protein, 96 aa, Homo sapiens; identical to SEQ ID NO: 568

SEQ ID NO: 577 - DNA, 1360 bp, Homo sapiens
gtcaacaacatcctgggactgggacacactttctgggcactgctggccagtcccaaaatggaacataaggaagtggttcttctacttcttttatttctgaaatcaggtcaaggagagcctctggatgactatgtaaatgcccagggggcttcactgttcagtgtcactaagaagcagctgggggcaggaagcagagaagaatgtgcagcaaaatgtgaggaggacaaagaattcacctgcagggcattccaatatcacagtaaagagcaacaatgtgtgataatggctgaaaacaagaagtcctccataatcattaggatgagagatgtagttttatttgaaaagtaaatgtatctttcagagtgcaagactgggaatggaaagaactacagagggacgatgtccaaaacaaaaaatggcatcacctgtcaaaaatggagttccacttctccccgcagacctagattctcacctgctacacacccctcagagggactggaggaatccagacaacgatgcgcaggggccctggtgttatactactgatccagaacagagatatgactactgcgacattcctgagtgtgaagggcaggagtggctctagaaaatgttttcatttctgctcttcacctgtaaaataatttgttgtaaagccccttcccacagggatattattaataattgcgtaacgtgttcacctctcggaaaggagcaaaactttgctcagatcccagaattaacctgatttttttttttttttctgagacagaattttgctctcattgcccaggctagagtgcaatggtgcgatctcggctcaccacaacctccgcctccgggttcaagcgattctcctacctcagcctcccaagtagctggaattacatgcatgtgccaccatgcctggctaattttacatttttagtagagacagggtttctccatgttggtcaggctggtcttgaactctcgacctcaggtgagccgcccgcctcagcctcccaaagtgctgggattacaggcgtgagccaccatgcccagcagacctgaattattattattattaaaatgttacatcaacatgtacaaatataaaactacatctaaactctaagtacaaacttcttatgcttaaaactcttacacagtgttaaccccaagacagatttgcaattaagtagttaaaataaaacaacaaagtcaataaaaatcaaataaacaatatacatttaatgtggtagactttgctgttttgctgaagctaagcaaggaaccagtttttaaatcagcaatccgttattttaatggactgagcaatttaatagtgcacctcaaaggtcaatgctaaaaactaaaa

SEQ ID NO: 578 - protein, 96 aa, Homo sapiens; identical to SEQ ID NO: 568

SEQ ID NO: 579 - DNA, 1752 bp, Homo sapiens
atgtaagtcaacaacatcctgggactgggacacactttctgggcactgctggccagtcccaaaatggaacataaggaagtggttcttctacttcttttatttctgaaatcaggtcaaggagagcctctggatgactatgtaaatgcccagggggcttcactgttcagtgtcactaagaagcagctgggggcaggaagcagagaagaatgtgcagcaaaatgtgaggaggacaaagaattcacctgcagggcattccaatatcacagtaaagagcaacaatgtgtgataatggctgaaaacaagaagtcctccataatcattaggatgagagatgtagttttatttgaaaagtaaaggctgcaatcaagatgttggcatggctggggtctcatctgaaggctggactggagaagaatctacttccaaacttatgtggtagttggaagaatttagttcctcaaggctgctaaactgatggcctgtgttccttgcctctgggatggtagcttgcttcaacaaagtgtgcaagcagagaagacagagagagtccgctagcaagatagaagccacaatctcttgtaatctatcatttttgctgtattctactggttaaaaataactcattaggttagcctactggctctcaaggggaagagattatacaaaggcatgaatttctggaggaggcaatgagggcaaagaactctgaaaagtctctcttccacaatctgaagaacttctagaaagtagaaggaagcgatattgcttagggatggacaacttggcactggttatgtgttccaagtgaggtaaccttgttcccaggaataaagagaaccagatgactataaacatttccctaaactgaaatgcactgttgtatgttcacctgcaatgaatggtgtaagctgaatataagatttttgacaaaataaaaattttgctgtgttctcagatctggcaggctcctgcccttgtgcaaacaatgttcctggcaactattcatctccttaggtaaataagaattggagaaaagctgtgcttagatagggtgcatttgctcttgccttggaaggctgttttctgataaggttctatatcctctgcaaatcaaatcaggcacttacagtgtgagtatgcattctcttcctgccagtctggagatgatcaaaaagcctataacaggcttggcctattttcctattgggttgctgggctttttttctttatttacttgtagagagttttagacctctgtgtatgtatggtgtacaagtgacaatattcagatctgtaaactgtaacccagtctgggagcaaagaagatatagaaaaatgacttttacttccggcttgagtagtaaaattgagattcaaattttgcatatagaagtactatatggctaacttatttggggagcaaagctgacttaccataagtctatctcaaatagaaatgaaacactcaatttgtgaaatatgctgagttttaatgcgtgtgggggcagggtgaattaacatttgtgatgcaaggagaagagcaatctatacttaccactgtctatttgacattgtttggggactactgctacactctaagtcattttaccttataacgcagagttgtaacacgctactctgagcagctcatgacatctgcttgaaatttaagttgggcccctagtatgtgtttattataaagattttgatgctgcttttcagagttgggtaacctactttaccccctaagct

SEQ ID NO: 580 - protein, 96 aa, Homo sapiens; identical to SEQ ID NO: 568

SEQ ID NO: 581 - DNA, 915 bp, Homo sapiens
atggcgaagattgagaaaaacgctcccacgatggaaaaaaagccagaactgtttaacatcatggaagtagatggagtccctacgttgatattatcaaaagaatggtgggaaaaagtatgtaatttccaagccaagcctgatgatcttattctggcaacttacccaaagtcaggtacaacatggatgcatgaaattttagacatgattctaaatgatggtgatgtggagaaatgcaaaagagcccagactctagatagacacgctttccttgaactgaaatttccccataaagaaaaaccagatttggagttcgttcttgaaatgtcctcaccacaactgataaaaacacatctcccttcacatctgattccaccatctatctggaaagaaaactgcaagattgtctatgtggccagaaatcccaaggattgcctggtgtcctactaccactttcacaggatggcttcctttatgcctgatcctcagaacttagaggaattttatgagaaattcatgtccggaaaagttgttggcgggtcctggtttgaccatgtgaaaggatggtgggctgcaaaagacatgcaccggatcctctacctcttctacgaggatattaaaaaagacccaaagcgggaaattgagaagatactgaagttcctggaaaaagacatatcagaggaaattctgaataaaatcatctatcacacctcctttgatgtaatgaagcaaaacccaatgaccaactataccactttgcccaccagcattatggaccactccatctccccttttatgaggaaagggatgcctggagactggaagaactattttactgtggcccaaaatgaagaatttgacaaggactaccagaagaagatggcaggaagcaccctaaccttccgcacagagatctga

SEQ ID NO: 582 - protein, 304 aa, Homo sapiens
MAKIEKNAPTMEKKPELFNIMEVDGVPTLILSKEWWEKVCNFQAKPDDLILATYPKSGTTWMHEILDMILNDGDVEKCKRAQTLDRHAFLELKFPHKEKPDLEFVLEMSSPQLIKTHLPSHLIPPSIWKENCKIVYVARNPKDCLVSYYHFHRMASFMPDPQNLEEFYEKFMSGKVVGGSWFDHVKGWWAAKDMHRILYLFYEDIKKDPKREIEKILKFLEKDISEEILNKIIYHTSFDVMKQNPMTNYTTLPTSIMDHSISPFMRKGMPGDWKNYFTVAQNEEFDKDYQKKMAGSTLTFRTEI

SEQ ID NO: 583 - DNA, 2799 bp, Homo sapiens
agcttcgaggccagtgggaggagggaggggccaggcagctgagggccaggaaagatgtgaaaaactctagctggtgaccgagaggaggagtagagtgtgcccttagttcatatgaactagagggagttggtatttgcacagcagtcagggtcacatgagtgatcatggtacagtgagaagttctccctcccagggccaggtcacagggtttgtttctgttcaatccggattcttccagtaaaagcttcaacttcccacactgaagctgagagcctcccaaagtgctggctacctgctgagcgcccccgtaactctgacacagtagtaatttgagcctctgcaattgccgtctgcttcctgtgaaagtcctttccgtgcccactgacccttgagtgggcctttgagctgctgactttcagctggaacttgaagggaccccaaccctgagacactatggccctgacctcagacctggggaaacagataaaactgaaagaggtggaggggaccctcctgcagcctgcaactgtggacaactggagccagatccagagcttcgaggccaaaccagatgatctcctcatctgcacctaccctaaagcagggacaacgtggattcaggaaattgtggatatgattgaacagaatggggacgtggagaagtgccagcgagccatcatccaacaccgccatcctttcattgagtgggctcggccaccccaaccttctggtgtggaaaaagccaaagcaatgccctctccacggatactaaagactcacctttccactcagctgctgccaccgtctttctgggaaaacaactgcaagttcctttatgtagctcgaaatgccaaagactgtatggtttcctactaccatttccaaaggatgaaccacatgcttcctgaccctggtacctgggaagagtattttgaaaccttcatcaatggaaaagtggtttggggttcctggtttgaccacgtgaaaggatggtgggagatgaaagacagacaccagattctcttcctcttctatgaggacataaagagggacccaaagcatgaaattcggaaggtgatgcagttcatgggaaagaaggtggatgaaacagtgctagataaaattgtccaggagacgtcatttgagaaaatgaaagaaaatcccatgacaaatcgttctacagtttccaaatctatcttggaccagtcaatttcctccttcatgagaaaaggaactgtgggggattggaaaaaccacttcactgttgcccagaatgagaggtttgatgaaatctatagaagaaagatggaaggaacctccataaacttctgcatggaactctgagcaagatgtaaataaaattaaaaggtggatggcaagagtgcaaatactatcttcaatccttcagtcccagccagaagaatctctgaaagcatattgtgaatgtatacaatgtagtacaaacaatctctgtgatgattaacagtatgtcaccacttcattttttaaaaaggatcacgtctaatgcccattttcccaactattctttccaaagtaagatataaggtagcttaataaactaagtaaaacgtatgacttgagtacaaaaggattgttttaatccccattattctggaaagtgcatcctagtctcccagtctataacatcataataccttgagtataagtccaaatattaggttatatctatattaaaaacaaaatttctgtcatctgtcctggccattcaggcaactccagcctgggctcaatcctggagttctgtctggtcactatcagaaggaacactttgagggaaaccctggtgcagccagccctgaggaaacatggcctgagtgccctcactggtgggtgggaataaaatggaagtgcacagaggagatgtcagaagaccaaaacttggtgaatagtcccagtgctaggtcatataggaaacagaaagcatgacagtggccttttgggaacccaagttacgtcctggtgaaagcagaaaggaggagacaggatggctgtcaacaacgtcagcatgggcatggctcccaggcatggaggtaattgggtcttggcttcaatgccacccttttgggaagccctaaaccaagtgaggtgttcttttcccttgcttcccatatttgtcccagttgcagccctgttgttatgtatttactcttcaatttcttatttatacctctcactcaattgttaattctttgggttcagtctcatgccatatttactcctagtacctaatgcagtgcctggcacacagcaagtgcccttgagaacttgtagagggagtaaaaaagtgcatggataaatgactgcagcaaatcacaaattttgaactttgacccttttcttttagtcccaaatagtggcattccatagctgagggtagtaggagcagttcaccctgggagcagacaataagaggaagaatgaagccaactaaaattctgaatgctttttgttggatttcgtagggtattttttttaaaatagggtcttgctatgttgcccaggctggtcttaactgactgctttttattattaccatgcactggcaattccaaacaatgtcagtgttaaaatgcttctccctgaaaaagagaaaaaaaaaaggaaaaaaagaaaagaaaagtgaaaagaaaaactcttattggcctaagttctaaataatagctaggttaccactgagttttaactatatgtatatgagcttcaaataagcacctttttattatgtaaataaataaaagttatctgtatccccaaaaa

SEQ ID NO: 584 - protein, 296 aa, Homo sapiens
MALTSDLGKQIKLKEVEGTLLQPATVDNWSQIQSFEAKPDDLLICTYPKAGTTWIQEIVDMIEQNGDVEKCQRAIIQHRHPFIEWARPPQPSGVEKAKAMPSPRILKTHLSTQLLPPSFWENNCKFLYVARNAKDCMVSYYHFQRMNHMLPDPGTWEEYFETFINGKVVWGSWFDHVKGWWEMKDRHQILFLFYEDIKRDPKHEIRKVMQFMGKKVDETVLDKIVQETSFEKMKENPMTNRSTVSKSILDQSISSFMRKGTVGDWKNHFTVAQNERFDEIYRRKMEGTSINFCMEL

SEQ ID NO: 585 - DNA, 2832 bp, Homo sapiens
agcttcgaggccagtgggaggagggaggggccaggcagctgagggccaggaaagatgtgaaaaactctagctggtgaccgagaggaggagtagagtgtgcccttagttcatatgaactagagggagttggtatttgcacagcagtcagggtcacatgagtgatcatggtacagtgagaagttctccctcccagggccaggtcacagggtttgtttctgttcaatccggattcttccagtaaaagcttcaacttcccacactgaagctgagagcctcccaaagtgctggctacctgctgagcgcccccgtaactctgacacagtagtaatttgagcctctgcaattgccgtctgcttcctgtgaaagtcctttccgtgcccactgacccttgagtgggcctttgagctgctgactttcagctggaacttgaagggaccccaaccctgagacactatggccctgacctcagacctggggaaacagataaaactgaaagaggtggaggggaccctcctgcagcctgcaactgtggacaactggagccagatccagagcttcgaggccaaaccagatgatctcctcatctgcacctaccctaaagcagggacaacgtggattcaggaaattgtggatatgattgaacagaatggggacgtggagaagtgccagcgagccatcatccaacaccgccatcctttcattgagtgggctcggccaccccaaccttctgagacaggatttcaccatgttgcccaggctggtctcaaactcctgagctcaagcaatccacctgcctcaacctcccaaagtgccaagattacagacctgctgccaccgtctttctgggaaaacaactgcaagttcctttatgtagctcgaaatgccaaagactgtatggtttcctactaccatttccaaaggatgaaccacatgcttcctgaccctggtacctgggaagagtattttgaaaccttcatcaatggaaaagtggtttggggttcctggtttgaccacgtgaaaggatggtgggagatgaaagacagacaccagattctcttcctcttctatgaggacataaagagggacccaaagcatgaaattcggaaggtgatgcagttcatgggaaagaaggtggatgaaacagtgctagataaaattgtccaggagacgtcatttgagaaaatgaaagaaaatcccatgacaaatcgttctacagtttccaaatctatcttggaccagtcaatttcctccttcatgagaaaaggaactgtgggggattggaaaaaccacttcactgttgcccagaatgagaggtttgatgaaatctatagaagaaagatggaaggaacctccataaacttctgcatggaactctgagcaagatgtaaataaaattaaaaggtggatggcaagagtgcaaatactatcttcaatccttcagtcccagccagaagaatctctgaaagcatattgtgaatgtatacaatgtagtacaaacaatctctgtgatgattaacagtatgtcaccacttcattttttaaaaaggatcacgtctaatgcccattttcccaactattctttccaaagtaagatataaggtagcttaataaactaagtaaaacgtatgacttgagtacaaaaggattgttttaatccccattattctggaaagtgcatcctagtctcccagtctataacatcataataccttgagtataagtccaaatattaggttatatctatattaaaaacaaaatttctgtcatctgtcctggccattcaggcaactccagcctgggctcaatcctggagttctgtctggtcactatcagaaggaacactttgagggaaaccctggtgcagccagccctgaggaaacatggcctgagtgccctcactggtgggtgggaataaaatggaagtgcacagaggagatgtcagaagaccaaaacttggtgaatagtcccagtgctaggtcatataggaaacagaaagcatgacagtggccttttgggaacccaagttacgtcctggtgaaagcagaaaggaggagacaggatggctgtcaacaacgtcagcatgggcatggctcccaggcatggaggtaattgggtcttggcttcaatgccacccttttgggaagccctaaaccaagtgaggtgttcttttcccttgcttcccatatttgtcccagttgcagccctgttgttatgtatttactcttcaatttcttatttatacctctcactcaattgttaattctttgggttcagtctcatgccatatttactcctagtacctaatgcagtgcctggcacacagcaagtgcccttgagaacttgtagagggagtaaaaaagtgcatggataaatgactgcagcaaatcacaaattttgaactttgacccttttcttttagtcccaaatagtggcattccatagctgagggtagtaggagcagttcaccctgggagcagacaataagaggaagaatgaagccaactaaaattctgaatgctttttgttggatttcgtagggtattttttttaaaatagggtcttgctatgttgcccaggctggtcttaactgactgctttttattattaccatgcactggcaattccaaacaatgtcagtgttaaaatgcttctccctgaaaaagagaaaaaaaaaaggaaaaaaagaaaagaaaagtgaaaagaaaaactcttattggcctaagttctaaataatagctaggttaccactgagttttaactatatgtatatgagcttcaaataagcacctttttattatgtaaataaataaaagttatctgtatccccaaaaa

SEQ ID NO: 586 - protein, 307 aa, Homo sapiens
MALTSDLGKQIKLKEVEGTLLQPATVDNWSQIQSFEAKPDDLLICTYPKAGTTWIQEIVDMIEQNGDVEKCQRAIIQHRHPFIEWARPPQPSETGFHHVAQAGLKLLSSSNPPASTSQSAKITDLLPPSFWENNCKFLYVARNAKDCMVSYYHFQRMNHMLPDPGTWEEYFETFINGKVVWGSWFDHVKGWWEMKDRHQILFLFYEDIKRDPKHEIRKVMQFMGKKVDETVLDKIVQETSFEKMKENPMTNRSTVSKSILDQSISSFMRKGTVGDWKNHFTVAQNERFDEIYRRKMEGTSINFCMEL

SEQ ID NO: 587 - DNA, 1664 bp, Homo sapiens
aattcataaacaagagctccagttccctggaacctgagtcgggagacctgcagctcactttctccctgtttgctggccagcagggtttgtggccgcctctgctgtgacgccacagcctggtgaggagggggctgcagttcctcaggaaactgccagtggacaaagtcataaacaagagttccagttccctggaacctgagtcgggaggcctgcaactcactttctccctgtttgctggcccagacaggcctgtgctagagggctggatagtgtggtagtgtggtggatagagtgctgcctctatccacaacgcagccatatgctgactgaagataactttgtgtctggaagagccctctgatttcttacactaatggccttacacgacatggaggattttacatttgatggaacaaagcgcttaagtgtcaactacgtgaagggaattcttcaaccgacagacacctgtgacatctgggataagatctggaacttccaagccaagcctgatgacctgcttatttctacctatcctaaagcaggaacaacatggactcaggagatagtggaattaatacaaaatgaaggtgatgtggagaaaagtaaacgggcaccgactcatcaacgatttcctttcctcgaaatgaaaatcccatccttaggatctggtttggaacaagctcatgcaatgccctcaccacggatcctgaaaacacatcttccctttcacttgctgccaccatccttgctagagaaaaactgtaagataatctatgtagcaagaaatcccaaggacaacatggtgtcctattaccatttccaaagaatgaataaagctcttcctgctccaggaacatgggaagagtattttgagacttttctggctgggaaagtgtgctggggctcctggcatgaacatgtgaaaggatggtgggaagccaaagacaaacaccgtattctctatctcttctatgaggacatgaagaagaacccaaagcatgaaattcagaagctggcagaatttattgggaagaaattagatgacaaagttctagataaaattgtccattacacttcgtttgatgtcatgaaacagaatccaatggcaaactattcatcgattcctgctgaaatcatggaccactccatttctccattcatgagaaaaggggcagtgggagactggaagaaacacttcaccgtggctcagaatgagagatttgatgaagattacaagaagaaaatgactgataccagactaactttccacttccagttctagtaaggaagaaaaactgaaaatgttttagtttattacccagtatatttgggtaataatgaaagtttaattctcataacaaatgatatcagattccagttatcagaatagtttactgtgtttgctcttattcactctactaaaaaattattttaaaaggctggaggcaaggtggtgacaggcagcagggtggcgacatggagagagggaagctcaataaatcactaggtacaatcctggtatcattgccaattatcatcatatttacattttctacaatcatgtgcttattaacatattggaaatgcttcagtcctcacatgataatacactaacattttcagattaagttttggttcaagttaattttttttttttttttttt

SEQ ID NO: 588 - protein, 302 aa, Homo sapiens
MALHDMEDFTFDGTKRLSVNYVKGILQPTDTCDIWDKIWNFQAKPDDLLISTYPKAGTTWTQEIVELIQNEGDVEKSKRAPTHQRFPFLEMKIPSLGSGLEQAHAMPSPRILKTHLPFHLLPPSLLEKNCKIIYVARNPKDNMVSYYHFQRMNKALPAPGTWEEYFETFLAGKVCWGSWHEHVKGWWEAKDKHRILYLFYEDMKKNPKHEIQKLAEFIGKKLDDKVLDKIVHYTSFDVMKQNPMANYSSIPAEIMDHSISPFMRKGAVGDWKKHFTVAQNERFDEDYKKKMTDTRLTFHFQF

SEQ ID NO: 589 - DNA, 6833 bp, Homo sapiens
ctttgacctgcagtagagcctacgtcagaggctggcgcaaacagaagtgcagcggtggcggcggctggttgcgggccggcggcgggctggcggagatggaggatcttgttcaagatggggtggcttcaccagctacccctgggaccgggaaatctaagaattggagaaagaaattgaagaactcagatcaaaacctgttactgaaggaactggtgatattattaaggcattaactgaacgtctggatgctcttcttctggaaaaagcagagactgagcaacagtgtctttctctgaaaaaggaaaatataaaaatgaagcaagaggttgaggattctgtaacaaagatgggagatgcacataaggagttggaacaatcacatataaactatgtgaaagaaattgaaaatttgaaaaatgagttgatggcagtacgttccaaatacagtgaagacaaagctaacttacaaaagcagctggaagaagcaatgaatacgcaattagaactttcagaacaacttaaatttcagaacaactctgaagataatgttaaaaaactacaagaagagattgagaaaattaggccaggctttgaggagcaaattttatatctgcaaaagcaattagacgctaccactgatgaaaagaaggaaacagttactcaactccaaaatatcattgaggctaattctcagcattaccaaaaaaatattaatagtttgcaggaagagcttttacagttgaaagctatacaccaagaagaggtgaaagagttgatgtgccagattgaagcatcagctaaggaacatgaagcagagataaataagttgaacgagctaaaagagaacttagtaaaacaatgtgaggcaagtgaaaagaacatccagaagaaatatgaatgtgagttagaaaatttaaggaaagccacctcaaatgcaaaccaagacaatcagatatgttctattctcttgcaagaaaatacatttgtagaacaagtagtaaatgaaaaagtcaaacacttagaagataccttaaaagaacttgaatctcaacacagtatcttaaaagatgaggtaacttatatgaataatcttaagttaaaacttgaaatggatgctcaacatataaaggatgagttttttcatgaacgggaagacttagagtttaaaattaatgaattattactagctaaagaagaacagggctgtgtaattgaaaaattaaaatctgagctagcaggtttaaataaacagttttgctatactgtagaacagcataacagagaagtacagagtcttaaggaacaacatcaaaaagaaatatcagaactaaatgagacatttttgtcagattcagaaaaagaaaaattaacattaatgtttgaaatacagggtcttaaggaacagtgtgaaaacctacagcaagaaaagcaagaagcaattttaaattatgagagtttacgagagattatggaaattttacaaacagaactgggggaatctgctggaaaaataagtcaagagttcgaatcaatgaagcaacagcaagcatctgatgttcatgaactgcagcagaagctcagaactgcttttactgaaaaagatgcccttctcgaaactgtgaatcgcctccagggagaaaatgaaaagttactatctcaacaagaattggtaccagaacttgaaaataccataaagaaccttcaagaaaagaatggagtatacttacttagtctcagtcaaagagataccatgttaaaagaattagaaggaaagataaattctcttactgaggaaaaagatgattttataaataaactgaaaaattcccatgaagaaatggataatttccataagaaatgtgaaagggaagaaagattgattcttgaacttgggaagaaagtagagcaaacaatccagtacaacagtgaactagaacaaaaggtaaatgaattaacaggaggactagaggagactttaaaagaaaaggatcaaaatgaccaaaaactagaaaaacttatggttcaaatgaaagttctctctgaagacaaagaagtattgtcagctgaagtgaagtctctttatgaggaaaacaataaactcagttcagaaaaaaaacagttgagtagggatttggaggtttttttgtctcaaaaagaagatgttatccttaaagaacatattactcaattagaaaagaaacttcagttaatggttgaagagcaagataatttaaataaactgcttgaaaatgagcaagttcagaagttatttgttaaaactcagttgtatggttttcttaaagaaatgggatcagaagtttcagaagacagtgaagagaaagatgttgttaatgtcctacaggcagtcggtgaatccttggcaaaaataaatgaggaaaaatgcaacctggcttttcagcgtgatgaaaaagtattagagttagaaaaagagattaagtgccttcaagaagagagtgtagttcagtgtgaagaacttaagtctttattgagagactatgagcaagagaaagttctcttaaggaaagagttagaagaaatacagtcagaaaaagaggccctgcagtctgatcttctagaaatgaagaatgctaatgaaaaaacaaggcttgaaaatcagaatcttttaattcaagttgaagaagtatctcaaacatgtagcaaaagtgaaatccataatgaaaaagaaaaatgttttataaaggaacatgaaaacctaaagccactactagaacaaaaagaattacgagataggagagcagagttgatactattaaaggattccttagcaaaatcaccttctgtaaaaaatgatcctctgtcttcagtaaaagagttggaagaaaaaatagaaaatctggaaaaagaatgcaaagaaaaggaggagaaaataaataagataaaattagttgccgtaaaggcaaagaaagaactagattccagcagaaaagagacccagactgtgaaggaagaacttgaatctcttcgatcagaaaaggaccagttatctgcttccatgagagatctcattcaaggagcagaaagctataagaatcttttattagaatatgaaaagcagtcagagcaactggatgtggaaaaagaacgtgctaataattttgagcatcgtattgaagaccttacaagacaattaagaaattcgactttgcagtgtgaaacaataaattctgataatgaagatctcctggctcgtattgagacattacagtctaatgccaaattattagaagtacagattttagaagtccagagagccaaagcaatggtagacaaagaattagaagctgaaaaacttcagaaagaacagaagataaaggaacatgccactactgtaaatgaacttgaagaacttcaggtacaacttcaaaaggaaaagaaacagcttcagaaaaccatgcaagaattagagctggttaaaaaggatgcccaacaaaccacattgatgaatatggaaatagctgattatgaacgtttgatgaaagaactaaatcaaaagttaactaataaaaacaacaagatagaagatttggagcaagaaataaaaattcaaaaacagaaacaagaaaccctacaagaagaaataacttcattacagtcttcagtacaacaatatgaagaaaaaaacaccaaaatcaagcaattgcttgtgaaaaccaaaaaggaactggcagattcaaagcaagcagaaactgatcacttaatacttcaagcatctttaaaaggtgagctggaggcaagccagcagcaagtagaagtctataaaatacagctggctgaaataacatcagagaagcacaaaatccacgagcacctgaaaacctctgcggaacagcaccagcgtacgctaagtgcataccagcagagagtgacagcactacaggaagagtgccgtgctgccaaggcagaacaagctactgtaacctctgaattcgagagctacaaagtccgagttcataatgttctaaaacaacagaaaaataaatctatgtctcaggctgaaactgagggcgctaaacaagaaagggaacatctggaaatgctgattgaccagctaaaaatcaaattacaagatagccaaaataacttacagattaatgtatctgaacttcaaacattgcagtctgaacatgatacactgctagaaaggcacaacaagatgctgcaggaaactgtgtccaaagaggcggaactccgggaaaaattgtgttcaatacagtcagagaacatgatgatgaaatctgaacatacacagactgtgagtcagctaacatcccagaacgaggtccttcgaaatagcttccgagatcaagtgcgacatttgcaggaagaacacagaaagacagtggagacattacagcagcagctctccaagatggaagcacagctcttccagcttaagaatgaaccgaccacaagaagcccagtttcctctcaacaatctttgaagaaccttcgagaaaggagaaacacagacctcccgcttctagacatgcacactgtaacccgggaagagggagaaggcatggagacaactgatacggagtctgtgtcttccgccagcacatacacacagtctttagagcagctgcttaactctcccgaaactaaacttgagcctccattatggcatgctgaatttaccaaagaagaattggttcagaagctcagttccaccacaaaaagtgcagatcacttaaacggcctgcttcgggaaacagaagcaaccaatgcaattcttatggagcaaattaagcttctcaaaagtgaaataagaagattggaaaggaatcaagagcgagagaagtctgcagctaacctggaatacttgaagaacgtcttgctgcagttcattttcttgaaaccaggtagtgaaagagagagacttcttcctgttataaatacgatgttgcagctcagccctgaagaaaagggaaaacttgctgcggttgctcaaggtgaggaagaaaatgcttcccgttcttctggatgggcatcctatcttcatagttggtctggacttcgataggttgatggaaggaatatttttattaaccaaatagaatctatttacaaaaatggttcacgtatattaccacaattcttttgtcaaaaagtgtgtatatatgtttgcatctacatatatttgtacatctatatgacagatgtattttaaaagtttcatcttgaagtaaaagtacaacagcttgaagtgttgatagcaggccacagccctctaactcatgtgatttcccatgcatgctgccagaataaaaccaccaggaatgaattcactccccacttctctggaacctcaggacccgcccatttctcggcagtactgtgaattttgaagttaaactaaattttggtaccataccaactggaatttaggctttaaaaataatgtttcaaggccaggtgtggtgattcatgcctgaaatcccactactttgggaggctgaggctggagaattgcttgaggctagtgagctgtgactcccactgcactccagctcggggaacagagcgagaccttgtctctaaaaataatagtaataaaataaaaataacgttttatgactatttattgcaaggtcagagttacagattgttataaattgttgagaaatttttgtgattagaatatgaaggaaaaagctttgttggtaaaagtgacatgttaaggggctatgaagtaaatatgctgcagttaattatgctaagttaaaatacagtttagttatttgctttaaaataaactcttctttttttctttaaagtatactatctcaaaactcattatgttgtcagagccctagagctggctagtgtaacactgactatgagtaggtgggcccacacttgagttgaggtgatttcatggtgtctttccaggctcttgatagggtgtcactgcatgcaagccatgaatctgttttgagaatcctctccattttcccaaataaaaacctatcacaacagtgactatatcactcagcattggatctaaatataaaagtggtgctttcagtgtttttggcagatagtgttccataagctttccatcagaagggattttagacaccttagaggtccgtgctacatcgtcacagttcctccgaataaccttaggtggtagtgttacttgcctttgacacctctgcatatgttttaatgactagatccaaactgtgttgttcttaaatcaaaaattggataatttgtaatatttatgtgttaatcacacagtatgctctctgaagttctcttaagccttcagtttatactcttaatttaattttctttctgagctggagaactggctttgcactttggttacacagaacattggtttccaattcagtttaactgaaatttgctgctgatatgttgagtttgttctttaaaaaatagctcatatatctcatctttcctcctgtcttagaagaacagacctaactagtgaatgtattaatgaaaatgcatctatttcagagctgacatgaagagtttagtttttttactttataaactgtgaatatgagtatgccagctgcatacgatgtaactaatcatatttaaatatatttcactttctctttgactttagaccttttgaagtctgtataaacttgttttgaaatatagtctctgcttacgaatgtcataacaaaataattttttgcatgataaaaaattactttgattacaaaaggcatattctttcatggtttctgcaatgagaggaagtgtaatgattattttaatatttctattaaatatgtttaactgta

SEQ ID NO: 590 - protein, 1583 aa, Homo sapiens
MKQEVEDSVTKMGDAHKELEQSHINYVKEIENLKNELMAVRSKYSEDKANLQKQLEEAMNTQLELSEQLKFQNNSEDNVKKLQEEIEKIRPGFEEQILYLQKQLDATTDEKKETVTQLQNIIEANSQHYQKNINSLQEELLQLKAIHQEEVKELMCQIEASAKEHEAEINKLNELKENLVKQCEASEKNIQKKYECELENLRKATSNANQDNQICSILLQENTFVEQVVNEKVKHLEDTLKELESQHSILKDEVTYMNNLKLKLEMDAQHIKDEFFHEREDLEFKINELLLAKEEQGCVIEKLKSELAGLNKQFCYTVEQHNREVQSLKEQHQKEISELNETFLSDSEKEKLTLMFEIQGLKEQCENLQQEKQEAILNYESLREIMEILQTELGESAGKISQEFESMKQQQASDVHELQQKLRTAFTEKDALLETVNRLQGENEKLLSQQELVPELENTIKNLQEKNGVYLLSLSQRDTMLKELEGKINSLTEEKDDFINKLKNSHEEMDNFHKKCEREERLILELGKKVEQTIQYNSELEQKVNELTGGLEETLKEKDQNDQKLEKLMVQMKVLSEDKEVLSAEVKSLYEENNKLSSEKKQLSRDLEVFLSQKEDVILKEHITQLEKKLQLMVEEQDNLNKLLENEQVQKLFVKTQLYGFLKEMGSEVSEDSEEKDVVNVLQAVGESLAKINEEKCNLAFQRDEKVLELEKEIKCLQEESVVQCEELKSLLRDYEQEKVLLRKELEEIQSEKEALQSDLLEMKNANEKTRLENQNLLIQVEEVSQTCSKSEIHNEKEKCFIKEHENLKPLLEQKELRDRRAELILLKDSLAKSPSVKNDPLSSVKELEEKIENLEKECKEKEEKINKIKLVAVKAKKELDSSRKETQTVKEELESLRSEKDQLSASMRDLIQGAESYKNLLLEYEKQSEQLDVEKERANNFEHRIEDLTRQLRNSTLQCETINSDNEDLLARIETLQSNAKLLEVQILEVQRAKAMVDKELEAEKLQKEQKIKEHATTVNELEELQVQLQKEKKQLQKTMQELELVKKDAQQTTLMNMEIADYERLMKELNQKLTNKNNKIEDLEQEIKIQKQKQETLQEEITSLQSSVQQYEEKNTKIKQLLVKTKKELADSKQAETDHLILQASLKGELEASQQQVEVYKIQLAEITSEKHKIHEHLKTSAEQHQRTLSAYQQRVTALQEECRAAKAEQATVTSEFESYKVRVHNVLKQQKNKSMSQAETEGAKQEREHLEMLIDQLKIKLQDSQNNLQINVSELQTLQSEHDTLLERHNKMLQETVSKEAELREKLCSIQSENMMMKSEHTQTVSQLTSQNEVLRNSFRDQVRHLQEEHRKTVETLQQQLSKMEAQLFQLKNEPTTRSPVSSQQSLKNLRERRNTDLPLLDMHTVTREEGEGMETTDTESVSSASTYTQSLEQLLNSPETKLEPPLWHAEFTKEELVQKLSSTTKSADHLNGLLRETEATNAILMEQIKLLKSEIRRLERNQEREKSAANLEYLKNVLLQFIFLKPGSERERLLPVINTMLQLSPEEKGKLAAVAQGEEENASRSSGWASYLHSWSGLR

SEQ ID NO: 591 - DNA, 6918 bp, Homo sapiens
ctttgacctgcagtagagcctacgtcagaggctggcgcaaacagaagtgcagcggtggcggcggctggttgcgggccggcggcgggctggcggagatggaggatcttgttcaagatggggtggcttcaccagctacccctgggaccgggaaatctaagctggaaacattgcccaaagaagacctcatcaagtttgccaagaaacagatgatgctaatacagaaagctaaatcaaggtgtacagaattggagaaagaaattgaagaactcagatcaaaacctgttactgaaggaactggtgatattattaaggcattaactgaacgtctggatgctcttcttctggaaaaagcagagactgagcaacagtgtctttctctgaaaaaggaaaatataaaaatgaagcaagaggttgaggattctgtaacaaagatgggagatgcacataaggagttggaacaatcacatataaactatgtgaaagaaattgaaaatttgaaaaatgagttgatggcagtacgttccaaatacagtgaagacaaagctaacttacaaaagcagctggaagaagcaatgaatacgcaattagaactttcagaacaacttaaatttcagaacaactctgaagataatgttaaaaaactacaagaagagattgagaaaattaggccaggctttgaggagcaaattttatatctgcaaaagcaattagacgctaccactgatgaaaagaaggaaacagttactcaactccaaaatatcattgaggctaattctcagcattaccaaaaaaatattaatagtttgcaggaagagcttttacagttgaaagctatacaccaagaagaggtgaaagagttgatgtgccagattgaagcatcagctaaggaacatgaagcagagataaataagttgaacgagctaaaagagaacttagtaaaacaatgtgaggcaagtgaaaagaacatccagaagaaatatgaatgtgagttagaaaatttaaggaaagccacctcaaatgcaaaccaagacaatcagatatgttctattctcttgcaagaaaatacatttgtagaacaagtagtaaatgaaaaagtcaaacacttagaagataccttaaaagaacttgaatctcaacacagtatcttaaaagatgaggtaacttatatgaataatcttaagttaaaacttgaaatggatgctcaacatataaaggatgagttttttcatgaacgggaagacttagagtttaaaattaatgaattattactagctaaagaagaacagggctgtgtaattgaaaaattaaaatctgagctagcaggtttaaataaacagttttgctatactgtagaacagcataacagagaagtacagagtcttaaggaacaacatcaaaaagaaatatcagaactaaatgagacatttttgtcagattcagaaaaagaaaaattaacattaatgtttgaaatacagggtcttaaggaacagtgtgaaaacctacagcaagaaaagcaagaagcaattttaaattatgagagtttacgagagattatggaaattttacaaacagaactgggggaatctgctggaaaaataagtcaagagttcgaatcaatgaagcaacagcaagcatctgatgttcatgaactgcagcagaagctcagaactgcttttactgaaaaagatgcccttctcgaaactgtgaatcgcctccagggagaaaatgaaaagttactatctcaacaagaattggtaccagaacttgaaaataccataaagaaccttcaagaaaagaatggagtatacttacttagtctcagtcaaagagataccatgttaaaagaattagaaggaaagataaattctcttactgaggaaaaagatgattttataaataaactgaaaaattcccatgaagaaatggataatttccataagaaatgtgaaagggaagaaagattgattcttgaacttgggaagaaagtagagcaaacaatccagtacaacagtgaactagaacaaaaggtaaatgaattaacaggaggactagaggagactttaaaagaaaaggatcaaaatgaccaaaaactagaaaaacttatggttcaaatgaaagttctctctgaagacaaagaagtattgtcagctgaagtgaagtctctttatgaggaaaacaataaactcagttcagaaaaaaaacagttgagtagggatttggaggtttttttgtctcaaaaagaagatgttatccttaaagaacatattactcaattagaaaagaaacttcagttaatggttgaagagcaagataatttaaataaactgcttgaaaatgagcaagttcagaagttatttgttaaaactcagttgtatggttttcttaaagaaatgggatcagaagtttcagaagacagtgaagagaaagatgttgttaatgtcctacaggcagtcggtgaatccttggcaaaaataaatgaggaaaaatgcaacctggcttttcagcgtgatgaaaaagtattagagttagaaaaagagattaagtgccttcaagaagagagtgtagttcagtgtgaagaacttaagtctttattgagagactatgagcaagagaaagttctcttaaggaaagagttagaagaaatacagtcagaaaaagaggccctgcagtctgatcttctagaaatgaagaatgctaatgaaaaaacaaggcttgaaaatcagaatcttttaattcaagttgaagaagtatctcaaacatgtagcaaaagtgaaatccataatgaaaaagaaaaatgttttataaaggaacatgaaaacctaaagccactactagaacaaaaagaattacgagataggagagcagagttgatactattaaaggattccttagcaaaatcaccttctgtaaaaaatgatcctctgtcttcagtaaaagagttggaagaaaaaatagaaaatctggaaaaagaatgcaaagaaaaggaggagaaaataaataagataaaattagttgccgtaaaggcaaagaaagaactagattccagcagaaaagagacccagactgtgaaggaagaacttgaatctcttcgatcagaaaaggaccagttatctgcttccatgagagatctcattcaaggagcagaaagctataagaatcttttattagaatatgaaaagcagtcagagcaactggatgtggaaaaagaacgtgctaataattttgagcatcgtattgaagaccttacaagacaattaagaaattcgactttgcagtgtgaaacaataaattctgataatgaagatctcctggctcgtattgagacattacagtctaatgccaaattattagaagtacagattttagaagtccagagagccaaagcaatggtagacaaagaattagaagctgaaaaacttcagaaagaacagaagataaaggaacatgccactactgtaaatgaacttgaagaacttcaggtacaacttcaaaaggaaaagaaacagcttcagaaaaccatgcaagaattagagctggttaaaaaggatgcccaacaaaccacattgatgaatatggaaatagctgattatgaacgtttgatgaaagaactaaatcaaaagttaactaataaaaacaacaagatagaagatttggagcaagaaataaaaattcaaaaacagaaacaagaaaccctacaagaagaaataacttcattacagtcttcagtacaacaatatgaagaaaaaaacaccaaaatcaagcaattgcttgtgaaaaccaaaaaggaactggcagattcaaagcaagcagaaactgatcacttaatacttcaagcatctttaaaaggtgagctggaggcaagccagcagcaagtagaagtctataaaatacagctggctgaaataacatcagagaagcacaaaatccacgagcacctgaaaacctctgcggaacagcaccagcgtacgctaagtgcataccagcagagagtgacagcactacaggaagagtgccgtgctgccaaggcagaacaagctactgtaacctctgaattcgagagctacaaagtccgagttcataatgttctaaaacaacagaaaaataaatctatgtctcaggctgaaactgagggcgctaaacaagaaagggaacatctggaaatgctgattgaccagctaaaaatcaaattacaagatagccaaaataacttacagattaatgtatctgaacttcaaacattgcagtctgaacatgatacactgctagaaaggcacaacaagatgctgcaggaaactgtgtccaaagaggcggaactccgggaaaaattgtgttcaatacagtcagagaacatgatgatgaaatctgaacatacacagactgtgagtcagctaacatcccagaacgaggtccttcgaaatagcttccgagatcaagtgcgacatttgcaggaagaacacagaaagacagtggagacattacagcagcagctctccaagatggaagcacagctcttccagcttaagaatgaaccgaccacaagaagcccagtttcctctcaacaatctttgaagaaccttcgagaaaggagaaacacagacctcccgcttctagacatgcacactgtaacccgggaagagggagaaggcatggagacaactgatacggagtctgtgtcttccgccagcacatacacacagtctttagagcagctgcttaactctcccgaaactaaacttgagcctccattatggcatgctgaatttaccaaagaagaattggttcagaagctcagttccaccacaaaaagtgcagatcacttaaacggcctgcttcgggaaacagaagcaaccaatgcaattcttatggagcaaattaagcttctcaaaagtgaaataagaagattggaaaggaatcaagagcgagagaagtctgcagctaacctggaatacttgaagaacgtcttgctgcagttcattttcttgaaaccaggtagtgaaagagagagacttcttcctgttataaatacgatgttgcagctcagccctgaagaaaagggaaaacttgctgcggttgctcaaggtgaggaagaaaatgcttcccgttcttctggatgggcatcctatcttcatagttggtctggacttcgataggttgatggaaggaatatttttattaaccaaatagaatctatttacaaaaatggttcacgtatattaccacaattcttttgtcaaaaagtgtgtatatatgtttgcatctacatatatttgtacatctatatgacagatgtattttaaaagtttcatcttgaagtaaaagtacaacagcttgaagtgttgatagcaggccacagccctctaactcatgtgatttcccatgcatgctgccagaataaaaccaccaggaatgaattcactccccacttctctggaacctcaggacccgcccatttctcggcagtactgtgaattttgaagttaaactaaattttggtaccataccaactggaatttaggctttaaaaataatgtttcaaggccaggtgtggtgattcatgcctgaaatcccactactttgggaggctgaggctggagaattgcttgaggctagtgagctgtgactcccactgcactccagctcggggaacagagcgagaccttgtctctaaaaataatagtaataaaataaaaataacgttttatgactatttattgcaaggtcagagttacagattgttataaattgttgagaaatttttgtgattagaatatgaaggaaaaagctttgttggtaaaagtgacatgttaaggggctatgaagtaaatatgctgcagttaattatgctaagttaaaatacagtttagttatttgctttaaaataaactcttctttttttctttaaagtatactatctcaaaactcattatgttgtcagagccctagagctggctagtgtaacactgactatgagtaggtgggcccacacttgagttgaggtgatttcatggtgtctttccaggctcttgatagggtgtcactgcatgcaagccatgaatctgttttgagaatcctctccattttcccaaataaaaacctatcacaacagtgactatatcactcagcattggatctaaatataaaagtggtgctttcagtgtttttggcagatagtgttccataagctttccatcagaagggattttagacaccttagaggtccgtgctacatcgtcacagttcctccgaataaccttaggtggtagtgttacttgcctttgacacctctgcatatgttttaatgactagatccaaactgtgttgttcttaaatcaaaaattggataatttgtaatatttatgtgttaatcacacagtatgctctctgaagttctcttaagccttcagtttatactcttaatttaattttctttctgagctggagaactggctttgcactttggttacacagaacattggtttccaattcagtttaactgaaatttgctgctgatatgttgagtttgttctttaaaaaatagctcatatatctcatctttcctcctgtcttagaagaacagacctaactagtgaatgtattaatgaaaatgcatctatttcagagctgacatgaagagtttagtttttttactttataaactgtgaatatgagtatgccagctgcatacgatgtaactaatcatatttaaatatatttcactttctctttgactttagaccttttgaagtctgtataaacttgttttgaaatatagtctctgcttacgaatgtcataacaaaataattttttgcatgataaaaaattactttgattacaaaaggcatattctttcatggtttctgcaatgagaggaagtgtaatgattattttaatatttctattaaatatgtttaactgta

SEQ ID NO: 592 - protein, 1684 aa, Homo sapiens
MEDLVQDGVASPATPGTGKSKLETLPKEDLIKFAKKQMMLIQKAKSRCTELEKEIEELRSKPVTEGTGDIIKALTERLDALLLEKAETEQQCLSLKKENIKMKQEVEDSVTKMGDAHKELEQSHINYVKEIENLKNELMAVRSKYSEDKANLQKQLEEAMNTQLELSEQLKFQNNSEDNVKKLQEEIEKIRPGFEEQILYLQKQLDATTDEKKETVTQLQNIIEANSQHYQKNINSLQEELLQLKAIHQEEVKELMCQIEASAKEHEAEINKLNELKENLVKQCEASEKNIQKKYECELENLRKATSNANQDNQICSILLQENTFVEQVVNEKVKHLEDTLKELESQHSILKDEVTYMNNLKLKLEMDAQHIKDEFFHEREDLEFKINELLLAKEEQGCVIEKLKSELAGLNKQFCYTVEQHNREVQSLKEQHQKEISELNETFLSDSEKEKLTLMFEIQGLKEQCENLQQEKQEAILNYESLREIMEILQTELGESAGKISQEFESMKQQQASDVHELQQKLRTAFTEKDALLETVNRLQGENEKLLSQQELVPELENTIKNLQEKNGVYLLSLSQRDTMLKELEGKINSLTEEKDDFINKLKNSHEEMDNFHKKCEREERLILELGKKVEQTIQYNSELEQKVNELTGGLEETLKEKDQNDQKLEKLMVQMKVLSEDKEVLSAEVKSLYEENNKLSSEKKQLSRDLEVFLSQKEDVILKEHITQLEKKLQLMVEEQDNLNKLLENEQVQKLFVKTQLYGFLKEMGSEVSEDSEEKDVVNVLQAVGESLAKINEEKCNLAFQRDEKVLELEKEIKCLQEESVVQCEELKSLLRDYEQEKVLLRKELEEIQSEKEALQSDLLEMKNANEKTRLENQNLLIQVEEVSQTCSKSEIHNEKEKCFIKEHENLKPLLEQKELRDRRAELILLKDSLAKSPSVKNDPLSSVKELEEKIENLEKECKEKEEKINKIKLVAVKAKKELDSSRKETQTVKEELESLRSEKDQLSASMRDLIQGAESYKNLLLEYEKQSEQLDVEKERANNFEHRIEDLTRQLRNSTLQCETINSDNEDLLARIETLQSNAKLLEVQILEVQRAKAMVDKELEAEKLQKEQKIKEHATTVNELEELQVQLQKEKKQLQKTMQELELVKKDAQQTTLMNMEIADYERLMKELNQKLTNKNNKIEDLEQEIKIQKQKQETLQEEITSLQSSVQQYEEKNTKIKQLLVKTKKELADSKQAETDHLILQASLKGELEASQQQVEVYKIQLAEITSEKHKIHEHLKTSAEQHQRTLSAYQQRVTALQEECRAAKAEQATVTSEFESYKVRVHNVLKQQKNKSMSQAETEGAKQEREHLEMLIDQLKIKLQDSQNNLQINVSELQTLQSEHDTLLERHNKMLQETVSKEAELREKLCSIQSENMMMKSEHTQTVSQLTSQNEVLRNSFRDQVRHLQEEHRKTVETLQQQLSKMEAQLFQLKNEPTTRSPVSSQQSLKNLRERRNTDLPLLDMHTVTREEGEGMETTDTESVSSASTYTQSLEQLLNSPETKLEPPLWHAEFTKEELVQKLSSTTKSADHLNGLLRETEATNAILMEQIKLLKSEIRRLERNQEREKSAANLEYLKNVLLQFIFLKPGSERERLLPVINTMLQLSPEEKGKLAAVAQGEEENASRSSGWASYLHSWSGLR

SEQ ID NO: 593 - DNA, 534 bp, Homo sapiens
ctggcgcaaacgcagcgggtggctggggtaggggctcattgggagcccacggagcgcggcggcggctcgggggccgagttccctacaacaaggatggcggtgacgggcgcagggagcggggcccggctctccttgcctcgaggctcctctgattccactcgcgtggctgcgcggccctggcagcggccttcgtcccgggggtgggagctacacagggttccgccccgtcctggcgaggacgcctgagggggctctgtggtaaggctctgtcgggcaggccgggcttccgggaggacctggtctggatcggtcaccgctgggtgcctgagctccgcatggagcctgcagcctttgtttaacttataaagaaatgggggctccgagcagtcaagaagaacatgccccaagttattcgtcagtgaggcggaaattgtggtgtacttgttccagaccaactatgaagataggatgcccatccagaagaacgggaagcattttcttcctcacctttggaaagtaaaacaaaaaaaaaaa

SEQ ID NO: 594 - protein, 50 aa, Homo sapiens
MAVTGAGSGARLSLPRGSSDSTRVAARPWQRPSSRGWELHRVPPRPGEDA

SEQ ID NO: 595 - DNA, 1559 bp, Homo sapiens
tagttcaagacaacagagacaaagctaagatgaggaagttctgtacagtttaggaaatagaggctttcaaagataattcgcagtgatgtgaaactggcctcccaagccctgataacaacatggccaacgccctggccagcgccacttgcgagcgctgcaagggcggctttgcgcccgctgagaagatcgtgaacagtaatggggagctgtaccatgagcagtgtttcgtgtgcgctcagtgcttccagcagttcccagaaggactcttctatgagtttgaaggaagaaagtactgtgaacatgactttcagatgctctttgccccttgctgtcatcagtgtggtgaattcatcattggccgagttatcaaagccatgaataacagctggcatccggagtgcttccgctgtgacctctgccaggaagttctggcagatatcgggtttgtcaagaatgctgggagacacctgtgtcgcccctgtcataatcgtgagaaagccagaggccttgggaaatacatctgccagaaatgccatgctatcatcgatgagcagcctctgatattcaagaacgacccctaccatccagaccatttcaactgcgccaactgcgggaaggagctgactgccgatgcacgggagctgaaaggggagctatactgcctcccatgccatgataaaatgggggtccccatctgtggtgcttgccgacggcccatcgaagggcgcgtggtgaacgctatgggcaagcagtggcatgtggagcattttgtttgtgccaagtgtgagaaaccctttcttggacatcgccattatgagaggaaaggcctggcatattgtgaaactcactataaccagctatttggtgatgtttgcttccactgcaatcgtgttatagaaggtgatgtggtctctgctcttaataaggcctggtgcgtgaactgctttgcctgttctacctgcaacactaaattaacactcaagaataagtttgtggagtttgacatgaagccagtctgtaagaagtgctatgagaaatttccattggagctgaagaaaagacttaagaaactagctgagaccttaggaaggaaataagttcctttattttttcttttctatgcaagataagagattaccaacattacttgtcttgatctacccatatttaaagctatatctcaaagcagttgagagaagaggacctatatgaatggttttatgtcatttttttaattaaaaaagaaaaattcatataatcgtgtttaaaacacaaatgaagtcagtatttgcctttgttaacccttatccatttgttgacatgtagactgtttacaaaaaaaaaacacatggttaaatgttaaattttaattaaggcccccaaaaattaaatataactttttaaaatgaaaggagtcaccttttacatgactcaggtgaaaaaacagtataaacattaatttactttgtgttcaaaagaaaattccaactgctgttggggaaggacacagaaaagaaaaataaccacccaaaaaaaaaaaaaaaaaaaaaaaaaaaaaa

SEQ ID NO: 596 - protein, 325 aa, Homo sapiens
MANALASATCERCKGGFAPAEKIVNSNGELYHEQCFVCAQCFQQFPEGLFYEFEGRKYCEHDFQMLFAPCCHQCGEFIIGRVIKAMNNSWHPECFRCDLCQEVLADIGFVKNAGRHLCRPCHNREKARGLGKYICQKCHAIIDEQPLIFKNDPYHPDHFNCANCGKELTADARELKGELYCLPCHDKMGVPICGACRRPIEGRVVNAMGKQWHVEHFVCAKCEKPFLGHRHYERKGLAYCETHYNQLFGDVCFHCNRVIEGDVVSALNKAWCVNCFACSTCNTKLTLKNKFVEFDMKPVCKKCYEKFPLELKKRLKKLAETLGRK

SEQ ID NO: 597 - DNA, 8192 bp, Homo sapiens
cacagtggtcctccgccggctacggcgctgcgtcactggtttgcaggcgctttcctcttggaagtggcgactgctgcgggcctgagcgctggtctcacgcgcctcgggagccaggttggcggcgcgatgaggcgcagcaaggctgacgtggagcggtacatcgcctcggtgcagggctccaccccgtcgcctcgacagaagtcaatgaaaggattctattttgcaaagctgtattatgaagctaaagaatatgatcttgctaaaaaatacatatgtacttacattaatgtgcaagagagggatcccaaagctcacagatttctgggtcttctttatgaattggaagaaaacacagacaaagccgttgaatgttacaggcgttcagtggaattaaacccaacacaaaaagatcttgtgttgaagattgcagaattgctttgtaaaaatgatgttactgatggaagagcaaaatactggcttgaaagagcagccaaacttttcccaggaagtcctgcaatttataaactaaaggaacagcttctagattgtgaaggtgaagatggatggaataaactttttgacttgattcagtcagaactttatgtaagacctgatgacgtccatgtgaacatccggctagtggaggtgtatcgctcaactaaaagattgaaggatgctgtggcccactgccatgaggcagagaggaacatagctttgcgttcaagtttagaatggaattcgtgtgttgtacagacccttaaggaatatctggagtctttacagtgtttggagtctgataaaagtgactggcgagcaaccaatacagacttactgctggcctatgctaatcttatgcttcttacgctttccactagagatgtgcaggaaagtagagaattactgcaaagttttgatagtgctcttcagtctgtgaaatctttgggtggaaatgatgaactgtcagctactttcttagaaatgaaaggacatttctacatgcatgctggttctctgcttttgaagatgggtcagcatagtagtaatgttcaatggcgagctctttctgagctggctgcattgtgctatctcatagcatttcaggttccaagaccaaagattaaattaataaaaggtgaagctggacaaaatctgctggaaatgatggcctgtgaccgactgagccaatcagggcacatgttgctaaacttaagtcgtggcaagcaagattttttaaaagagattgttgaaacttttgccaacaaaagcgggcagtctgcattatatgatgctctgttttctagtcagtcacctaaggatacatcttttcttggtagcgatgatattggaaacattgatgtacgagaaccagagcttgaagatttgactagatacgatgttggtgctattcgagcacataatggtagtcttcagcaccttacttggcttggcttacagtggaattcattgcctgctttacctggaatccgaaaatggctaaaacagcttttccatcatttgccccatgaaacctcaaggcttgaaacaaatgcacctgaatcaatatgtattttagatcttgaagtatttctccttggagtagtatataccagccacttacaattaaaggagaaatgtaattctcaccacagctcctatcagccgttatgcctgccccttcctgtgtgtaaacagctttgtacagaaagacaaaaatcttggtgggatgcggtttgtactctgattcacagaaaagcagtacctggaaacgtagcaaaattgagacttctagttcagcatgaaataaacactctaagagcccaggaaaaacatggccttcaacctgctctgcttgtacattgggcagaatgccttcagaaaacgggcagcggtcttaattctttttatgatcaacgagaatacatagggagaagtgttcattattggaagaaagttttgccattgttgaagataataaaaaagaagaacagtattcctgaacctattgatcctctgtttaaacattttcatagtgtagacattcaggcatcagaaattgttgaatatgaagaagacgcacacataacttttgctatattggatgcagtaaatggaaatatagaagatgctgtgactgcttttgaatctataaaaagtgttgtttcttattggaatcttgcactgatttttcacaggaaggcagaagacattgaaaatgatgccctttctcctgaagaacaagaagaatgcaaaaattatctgagaaagaccagggactacctaataaagattatagatgacagtgattcaaatctttcagtggtcaagaaattgcctgtgcccctggagtctgtaaaagagatgcttaattcagtcatgcaggaactcgaagactatagtgaaggaggtcctctctataaaaatggttctttgcgaaatgcagattcagaaataaaacattctacaccgtctcctaccaaatattcactatcaccaagtaaaagttacaagtattctcccaaaacaccacctcgatgggcagaagatcagaattctttactgaaaatgatttgccaacaagtagaggccattaagaaagaaatgcaggagttgaaactaaatagcagtaactcagcatcccctcatcgttggcccacagagaattatggaccagactcggtgcctgatggatatcaggggtcacagacatttcatggggctccactaacagttgcaactactggcccttcagtatattatagtcagtcaccagcatataattcccagtatcttctcagaccagcagctaatgttactcccacaaagggcccagtctatggcatgaataggcttccaccccaacagcatatttatgcctatccgcaacagatgcacacaccgccagtgcaaagctcatctgcttgtatgttctctcaggagatgtatggtcctcctgcattgcgttttgagtctcctgcaacgggaattctatcgcccaggggtgatgattactttaattacaatgttcaacagacaagcacaaatccacctttgccagaaccaggatatttcacaaaacctccgattgcagctcatgcttcaagatctgcagaatctaagactatagaatttgggaaaactaattttgttcagcccatgccgggtgaaggattaaggccatctttgccaacacaagcacacacaacacagccaactccttttaaatttaactcaaatttcaaatcaaatgatggtgacttcacgttttcctcaccacaggttgtgacacagccccctcctgcagcttacagtaacagtgaaagccttttaggtctcctgacttcagataaacccttgcaaggagatggctatagtggagccaaaccaattcctggtggtcaaaccattgggcctcgaaatacattcaattttggaagcaaaaatgtgtctggaatttcatttacagaaaacatggggtcgagtcagcaaaagaattctggttttcggcgaagtgatgatatgtttactttccatggtccagggaaatcagtatttggaacacccactttagagacagcaaacaagaatcatgagacagatggaggaagtgcccatggggatgatgatgatgacggtcctcactttgagcctgtagtacctcttcctgataagattgaagtaaaaactggtgaggaagatgaagaagaattcttttgcaaccgcgcgaaattgtttcgtttcgatgtagaatccaaagaatggaaagaacgtgggattggcaatgtaaaaatactgaggcataaaacatctggtaaaattcgccttctaatgagacgagagcaagtattgaaaatctgtgcaaatcattacatcagtccagatatgaaattgacaccaaatgctggatcagacagatcttttgtatggcatgcccttgattatgcagatgagttgccaaaaccagaacaacttgctattaggttcaaaactcctgaggaagcagcactttttaaatgcaagtttgaagaagcccagagcattttaaaagccccaggaacaaatgtagccatggcgtcaaatcaggctgtcagaattgtaaaagaacccacaagtcatgataacaaggatatttgcaaatctgatgctggaaacctgaattttgaatttcaggttgcaaagaaagaagggtcttggtggcattgtaacagctgctcattaaagaatgcttcaactgctaagaaatgtgtatcatgccaaaatctaaacccaagcaataaagagctcgttggcccaccattagctgaaactgtttttactcctaaaaccagcccagagaatgttcaagatcgatttgcattggtgactccaaagaaagaaggtcactgggattgtagtatttgtttagtaagaaatgaacctactgtatctaggtgcattgcgtgtcagaatacaaaatctgctaacaaaagtggatcttcatttgttcatcaagcttcatttaaatttggccagggagatcttcctaaacctattaacagtgatttcagatctgttttttctacaaaggaaggacagtgggattgcagtgcatgtttggtacaaaatgaggggagctctacaaaatgtgctgcttgtcagaatccgagaaaacagagtctacctgctacttctattccaacacctgcctcttttaagtttggtacttcagagacaagtaaaactctaaaaagtggatttgaagacatgtttgctaagaaggaaggacagtgggattgcagttcatgcttagtgcgaaatgaagcaaatgctacaagatgtgttgcttgtcagaatccggataaaccaagtccatctacttctgttccagctcctgcctcttttaagtttggtacttcagagacaagcaaggctccaaagagcggatttgagggaatgttcactaagaaggagggacagtgggattgcagtgtgtgcttagtaagaaatgaagccagtgctaccaaatgtattgcttgtcagaatccaggtaaacaaaatcaaactacttctgcagtttcaacacctgcctcttcagagacaagcaaggctccaaagagcggatttgagggaatgttcactaagaaggagggacagtgggattgcagtgtgtgcttagtaagaaatgaagccagtgctaccaaatgtattgcttgtcagaatccaggtaaacaaaatcaaactacttctgcagtttcaacacctgcctcttcagagacaagcaaggctccaaagagcggatttgagggaatgttcactaagaaggaaggacagtgggattgcagtgtgtgcttagtaagaaatgaagccagtgctaccaaatgtattgcttgtcagtgtccaagtaaacaaaatcaaacaactgcaatttcaacacctgcctcttcggagataagcaaggctccaaagagtggatttgaaggaatgttcatcaggaaaggacagtgggattgtagtgtttgctgtgtacaaaatgagagttcttccttaaaatgtgtggcttgtgatgcctctaaaccaactcataaacctattgcagaagctccttcagctttcacactgggctcagaaatgaagttgcatgactcttctggaagtcaggtgggaacaggatttaaaagtaatttctcagaaaaagcttctaagtttggcaatacagagcaaggattcaaatttgggcatgtggatcaagaaaattcaccttcatttatgtttcagggttcttctaatacagaatttaagtcaaccaaagaaggattttccatccctgtgtctgctgatggatttaaatttggcatttcggaaccaggaaatcaagaaaagaaaagtgaaaagcctcttgaaaatggtactggcttccaggctcaggatattagtggccagaagaatggccgtggtgtgatttttggccaaacaagtagcacttttacatttgcagatcttgcaaaatcaacttcaggagaaggatttcagtttggcaaaaaagaccccaatttcaagggattttcaggtgctggagaaaaattattctcatcacaatacggtaaaatggccaataaagcaaacacttccggtgactttgagaaagatgatgatgcctataagactgaggacagcgatgacatccattttgaaccagtagttcaaatgcccgaaaaagtagaacttgtaacaggagaagaagatgaaaaagttctgtattcacagcgggtaaaactatttagatttgatgctgaggtaagtcagtggaaagaaaggggcttggggaacttaaaaattctcaaaaacgaggtcaatggcaaactaagaatgctgatgcgaagagaacaagtactaaaagtgtgtgctaatcattggataacgactacgatgaacctgaagcctctctctggatcagatagagcatggatgtggttagccagtgatttctctgatggtgatgccaaactagagcagttggcagcaaaatttaaaacaccagagctggctgaagaattcaagcagaaatttgaggaatgccagcggcttctgttagacataccacttcaaactccccataaacttgtagatactggcagagctgccaagttaatacagagagctgaagaaatgaagagtggactgaaagatttcaaaacatttttgacaaatgatcaaacaaaagtcactgaggaagaaaataagggttcaggtacaggtgcggccggtgcctcagacacaacaataaaacccaatcctgaaaacactgggcccacattagaatgggataactatgatttaagggaagatgctttggatgatagtgtcagtagtagctcagtacatgcttctccattggcaagtagccctgtgagaaaaaatcttttccgttttggtgagtcaacaacaggatttaacttcagttttaaatctgctttgagtccatctaagtctcctgccaagttgaatcagagtgggacttcagttggcactgatgaagaatctgatgttactcaagaagaagagagagatggacagtactttgaacctgttgttcctttacctgatctagttgaagtatccagtggtgaggaaaatgaacaagttgtttttagtcacagggcaaaactctacagatatgataaagatgttggtcaatggaaagaaaggggcattggtgatataaagattttacagaattatgataataagcaagttcgtatagtgatgagaagggaccaagtattaaaactttgtgccaatcacagaataactccagacatgactttgcaaaatatgaaagggacagaaagagtatggttgtggactgcatgtgattttgcagatggagaaagaaaagtagagcatttagctgttcgttttaaactacaggatgttgcagactcgtttaagaaaatttttgatgaagcaaaaacagcccaggaaaaagattctttgataacacctcatgtttctcggtcaagcactcccagagagtcaccatgtggcaaaattgctgtagctgtattagaagaaaccacaagagagaggacagatgttattcagggtgatgatgtagcagatgcaacttcagaagttgaagtgtctagcacatctgaaacaacaccaaaagcagtggtttctcctccaaagtttgtatttggttcagagtctgttaaaagcatttttagtagtgaaaaatcaaaaccatttgcattcggcaacagttcagccactgggtctttgtttggatttagttttaatgcacctttgaaaagtaacaatagtgaaactagttcagtagcccagagtggatctgaaagcaaagtggaacctaaaaaatgtgaactgtcaaagaactctgatatcgaacagtcttcagatagcaaagtcaaaaatctctttgcttcctttccaacggaagaatcttcaatcaactacacatttaaaacaccagaaaaggcaaaagagaagaaaaaacctgaagattctccctcagatgatgatgttctcattgtatatgaactaactccaaccgctgagcagaaagcccttgcaaccaaacttaaacttcctccaactttcttctgctacaagaatagaccagattatgttagtgaagaagaggaggatgatgaagatttcgaaacagctgtcaagaaacttaatggaaaactata

SEQ ID NO: 598 - protein, 3224 aa, Homo sapiens
MRRSKADVERYIASVQGSTPSPRQKSMKGFYFAKLYYEAKEYDLAKKYICTYINVQERDPKAHRFLGLLYELEENTDKAVECYRRSVELNPTQKDLVLKIAELLCKNDVTDGRAKYWLERAAKLFPGSPAIYKLKEQLLDCEGEDGWNKLFDLIQSELYVRPDDVHVNIRLVEVYRSTKRLKDAVAHCHEAERNIALRSSLEWNSCVVQTLKEYLESLQCLESDKSDWRATNTDLLLAYANLMLLTLSTRDVQESRELLQSFDSALQSVKSLGGNDELSATFLEMKGHFYMHAGSLLLKMGQHSSNVQWRALSELAALCYLIAFQVPRPKIKLIKGEAGQNLLEMMACDRLSQSGHMLLNLSRGKQDFLKEIVETFANKSGQSALYDALFSSQSPKDTSFLGSDDIGNIDVREPELEDLTRYDVGAIRAHNGSLQHLTWLGLQWNSLPALPGIRKWLKQLFHHLPHETSRLETNAPESICILDLEVFLLGVVYTSHLQLKEKCNSHHSSYQPLCLPLPVCKQLCTERQKSWWDAVCTLIHRKAVPGNVAKLRLLVQHEINTLRAQEKHGLQPALLVHWAECLQKTGSGLNSFYDQREYIGRSVHYWKKVLPLLKIIKKKNSIPEPIDPLFKHFHSVDIQASEIVEYEEDAHITFAILDAVNGNIEDAVTAFESIKSVVSYWNLALIFHRKAEDIENDALSPEEQEECKNYLRKTRDYLIKIIDDSDSNLSVVKKLPVPLESVKEMLNSVMQELEDYSEGGPLYKNGSLRNADSEIKHSTPSPTKYSLSPSKSYKYSPKTPPRWAEDQNSLLKMICQQVEAIKKEMQELKLNSSNSASPHRWPTENYGPDSVPDGYQGSQTFHGAPLTVATTGPSVYYSQSPAYNSQYLLRPAANVTPTKGPVYGMNRLPPQQHIYAYPQQMHTPPVQSSSACMFSQEMYGPPALRFESPATGILSPRGDDYFNYNVQQTSTNPPLPEPGYFTKPPIAAHASRSAESKTIEFGKTNFVQPMPGEGLRPSLPTQAHTTQPTPFKFNSNFKSNDGDFTFSSPQVVTQPPPAAYSNSESLLGLLTSDKPLQGDGYSGAKPIPGGQTIGPRNTFNFGSKNVSGISFTENMGSSQQKNSGFRRSDDMFTFHGPGKSVFGTPTLETANKNHETDGGSAHGDDDDDGPHFEPVVPLPDKIEVKTGEEDEEEFFCNRAKLFRFDVESKEWKERGIGNVKILRHKTSGKIRLLMRREQVLKICANHYISPDMKLTPNAGSDRSFVWHALDYADELPKPEQLAIRFKTPEEAALFKCKFEEAQSILKAPGTNVAMASNQAVRIVKEPTSHDNKDICKSDAGNLNFEFQVAKKEGSWWHCNSCSLKNASTAKKCVSCQNLNPSNKELVGPPLAETVFTPKTSPENVQDRFALVTPKKEGHWDCSICLVRNEPTVSRCIACQNTKSANKSGSSFVHQASFKFGQGDLPKPINSDFRSVFSTKEGQWDCSACLVQNEGSSTKCAACQNPRKQSLPATSIPTPASFKFGTSETSKTLKSGFEDMFAKKEGQWDCSSCLVRNEANATRCVACQNPDKPSPSTSVPAPASFKFGTSETSKAPKSGFEGMFTKKEGQWDCSVCLVRNEASATKCIACQNPGKQNQTTSAVSTPASSETSKAPKSGFEGMFTKKEGQWDCSVCLVRNEASATKCIACQNPGKQNQTTSAVSTPASSETSKAPKSGFEGMFTKKEGQWDCSVCLVRNEASATKCIACQCPSKQNQTTAISTPASSEISKAPKSGFEGMFIRKGQWDCSVCCVQNESSSLKCVACDASKPTHKPIAEAPSAFTLGSEMKLHDSSGSQVGTGFKSNFSEKASKFGNTEQGFKFGHVDQENSPSFMFQGSSNTEFKSTKEGFSIPVSADGFKFGISEPGNQEKKSEKPLENGTGFQAQDISGQKNGRGVIFGQTSSTFTFADLAKSTSGEGFQFGKKDPNFKGFSGAGEKLFSSQYGKMANKANTSGDFEKDDDAYKTEDSDDIHFEPVVQMPEKVELVTGEEDEKVLYSQRVKLFRFDAEVSQWKERGLGNLKILKNEVNGKLRMLMRREQVLKVCANHWITTTMNLKPLSGSDRAWMWLASDFSDGDAKLEQLAAKFKTPELAEEFKQKFEECQRLLLDIPLQTPHKLVDTGRAAKLIQRAEEMKSGLKDFKTFLTNDQTKVTEEENKGSGTGAAGASDTTIKPNPENTGPTLEWDNYDLREDALDDSVSSSSVHASPLASSPVRKNLFRFGESTTGFNFSFKSALSPSKSPAKLNQSGTSVGTDEESDVTQEEERDGQYFEPVVPLPDLVEVSSGEENEQVVFSHRAKLYRYDKDVGQWKERGIGDIKILQNYDNKQVRIVMRRDQVLKLCANHRITPDMTLQNMKGTERVWLWTACDFADGERKVEHLAVRFKLQDVADSFKKIFDEAKTAQEKDSLITPHVSRSSTPRESPCGKIAVAVLEETTRERTDVIQGDDVADATSEVEVSSTSETTPKAVVSPPKFVFGSESVKSIFSSEKSKPFAFGNSSATGSLFGFSFNAPLKSNNSETSSVAQSGSESKVEPKKCELSKNSDIEQSSDSKVKNLFASFPTEESSINYTFKTPEKAKEKKKPEDSPSDDDVLIVYELTPTAEQKALATKLKLPPTFFCYKNRPDYVSEEEEDDEDFETAVKKLNGKLYLDGSEKCRPLEENTADNEKECIIVWEKKPTVEEKAKADTLKLPPTFFCGVCSDTDEDNGNGEDFQSELQKVQEAQKSQTEEITSTTDSVYTGGTEVMVPSFCKSEEPDSITKSISSPSVSSETMDKPVDLSTRKEIDTDSTSQGESKIVSFGFGSSTGLSFADLASSNSGDFAFGSKDKNFQWANTGAAVFGTQSVGTQSAGKVGEDEDGSDEEVVHNEDIHFEPIVSLPEVEVKSGEEDEEILFKERAKLYRWDRDVSQWKERGVGDIKILWHTMKNYYRILMRRDQVFKVCANHVITKTMELKPLNVSNNALVWTASDYADGEAKVEQLAVRFKTKEVADCFKKTFEECQQNLMKLQKGHVSLAAELSKETNPVVFFDVCADGEPLGRITMELFSNIVPRTAENFRALCTGEKGFGFKNSIFHRVIPDFVCQGGDITKHDGTGGQSIYGDKFEDENFDVKHTGPGLLSMANQGQNTNNSQFVITLKKAEHLDFKHVVFGFVKDGMDTVKKIESFGSPKGSVCRRITITECGQI

SEQ ID NO: 599 - DNA, 2196 bp, Homo sapiens
gtagcgccgcgggtttgatgaacgcggttcccggggagactggtacggttgctgtgtgctatggagccgagggtcgtcaagccaccggggcaggatttagtagtggagagtctcaaaagccgctacggactcgggggcagctgccccgacgagtatgatttttcaaatttttatcagtctaagtataagagaagaactctaacctccccaggtgatttggatatctactctggagataaagttggttcatcgttaaaatattctgatgaaagcaagcattgtagaacaccattgggcagcttattcaagcacgtaaatgtgaattgcctagatgatgaactggattctttccatgatttgaagaaacaggaaacagaagaagagttaattgaaaatgattatagagttagtacctcgaaaataaccaagcagtcttttaaagaaatagaaaaagttgccttgccaactaatacgacctcatcgagacctcggactgagtgttgtagtgatgcaggtgactctcctttgaaacctgtcagctgtccaaaatctaaagcatcagacaagcggagtttacttccacatcagatcagtcagatatatgacgaattatttcagatacatctgaaattgcagtgtgaaactgcagcacaacagaaatttgctgaagaacttcaaaagcgagaacgttttttacttgaaagagaacaactgcttttcagacatgaaaatgccttgagtaaaattaaaggtgttgaagaagaggttcttacaagatttcaaattataaaagagcagcatgatgcagaagttgaacacttaaccgaagttcttaaggaaaagaataaagaaaccaagagactgaggtcctcttttgatgcattgaaagaattgaatgataccttaaaaaaacagttaaatgaagcaagtgaagaaaacaggaagatagacattcaggctaaaagagttcaagcacgtttagataatttacagaggaagtacgagtttatgacaatacagagattgaaaggaagttcccatgctgttcatgaaatgaaaagtttaaaacaagaaaaagcaccagtttcaaaaacttacaaggtaccacttaatgggcaagtttatgaacttttaactgtcttcatggactggatttcggatcatcatcttagcaaagtgaaacatgaagaatctggaatggatggtaaaaaaccacaactcaaatttgcttcccagagaaatgatattcaggagaagtgtgtaaagcttttgcctctaatgacagagcagctacagtggatgccatttgtgaatatcaaacttcacgagccttttgtaaaatttatatattggtccctaaggcagctagatgctggagcacagcactcgactatgacatcaacattgaggagattgggtgaagacatttttaaaggagtggtaactaaaggaattcaggataattctccacagcattctgtggagaataaaccaaagacagctgctttctttaagagctccaatttgccattgagatttttatcaaccttaattgttctcaaaacagtcactcaagctgattacctggctcaggcatttgattctctttgtttggacttgaagacagaagaaggaaaaaccttgtttttggagtatcaggctgttccagtaatattaagtcatctaagaatatccagtaaaggactcctgtctaatgttattgatagtttgctccagatgacggtggaatctaaatccttgcagcctttcctggaagcctgtagcaactctttattttttcgtacttgctctgtgctgcttcgagcccctaagcttgatcttcaaatactagaaaaactcagtattattttacagaaactttccaaaatcaagagtaataagaagctctttgaactttttacgattcatctgatgcttcaagaaatacaaaggacaacaaacccagagcatgcatttctctgtattaatctaaattcaactctgttcaatctgggtttaacaaaatgtaactccctggtctccagtgcaagcccttagactggctaattttttaatatagtatatgtggtgcttatttataaacatgtagaaattaccaaagtaactacaattctaccaagtaaagttatcagtagcatcatttatcatgaaaaataaataatttttttgaactgt

SEQ ID NO: 600 - protein, 665 aa, Homo sapiens
MEPRVVKPPGQDLVVESLKSRYGLGGSCPDEYDFSNFYQSKYKRRTLTSPGDLDIYSGDKVGSSLKYSDESKHCRTPLGSLFKHVNVNCLDDELDSFHDLKKQETEEELIENDYRVSTSKITKQSFKEIEKVALPTNTTSSRPRTECCSDAGDSPLKPVSCPKSKASDKRSLLPHQISQIYDELFQIHLKLQCETAAQQKFAEELQKRERFLLEREQLLFRHENALSKIKGVEEEVLTRFQIIKEQHDAEVEHLTEVLKEKNKETKRLRSSFDALKELNDTLKKQLNEASEENRKIDIQAKRVQARLDNLQRKYEFMTIQRLKGSSHAVHEMKSLKQEKAPVSKTYKVPLNGQVYELLTVFMDWISDHHLSKVKHEESGMDGKKPQLKFASQRNDIQEKCVKLLPLMTEQLQWMPFVNIKLHEPFVKFIYWSLRQLDAGAQHSTMTSTLRRLGEDIFKGVVTKGIQDNSPQHSVENKPKTAAFFKSSNLPLRFLSTLIVLKTVTQADYLAQAFDSLCLDLKTEEGKTLFLEYQAVPVILSHLRISSKGLLSNVIDSLLQMTVESKSLQPFLEACSNSLFFRTCSVLLRAPKLDLQILEKLSIILQKLSKIKSNKKLFELFTIHLMLQEIQRTTNPEHAFLCINLNSTLFNLGLTKCNSLVSSASP

SEQ ID NO: 601 - DNA, 4235 bp, Homo sapiens
gggggcagacggccgaagagccaggtgtgccagggacctatggcagcagggctgaacgtgcccgctccagcctctccagtgctgggagagacctctagatggtgcaggtgagtttgcaatgagggaaagcccctcggcaaggactgagtttccaaacttgcagacagggcagggagcggtcaaggaagagttcccgggaagccctttaaacggaaaggaagcggggctagtgtcagagaggtgtgccaggtcccaggcagccctgctgacccctaaggacatagagtacctgcttctgagagggctgccacggtggccacctgtgaagcctgtcacccagaactggatggtacctgactttcttcatagacccatcttctgctgggactgaagctgacctccaacagaagccaggtgagcccttgggagaggatggcccatgtgggggactgcacgcagacgccctggctccccgtcctggtggtgtctctgatgtgctcagcccgagcggaatactcaaactgcggtgagaacgagtactacaaccagactacggggctgtgccaggagtgccccccgtgtgggccgggagaggagccctacctgtcctgtggctacggcaccaaagacgaggactacggctgcgtcccctgcccggcggagaagttttccaaaggaggctaccagatatgcaggcgtcacaaagactgtgagggcttcttccgggccaccgtgctgacaccaggggacatggagaatgacgctgagtgtggcccttgcctccctggctactacatgctggagaacagaccgaggaacatctatggcatggtctgctactcctgcctcctggcaccccccaacaccaaggaatgtgtgggagccacttcaggagcttctgccaacttccctggcacctcgggcagcagcaccctgtctcccttccagcacgcccacaaagaactctcaggccaaggacacctggccactgccctgatcattgcaatgtccaccatcttcatcatggccatcgccatcgtcctcatcatcatgttctacatcctgaagacaaagccctctgccccagcctgttgcaccagccacccggggaagagcgtggaggcccaagtgagcaaggacgaggagaagaaagaggccccagacaacgtggtgatgttctccgagaaggatgaatttgagaagctgacagcaactccagcaaagcccaccaagagcgagaacgatgcctcatccgagaatgagcagctgctgagccggagcgtcgacagtgatgaggagcccgcccctgacaagcagggctccccggagctgtgcctgctgtcgctggttcacctggccagggagaagtctgccaccagcaacaagtcagccgggattcaaagccggaggaaaaagatcctcgatgtgtatgccaacgtgtgtggagtcgtggaaggtcttagccccacggagctgccatttgattgcctcgagaagactagccgaatgctcagctccacgtacaactctgagaaggctgttgtgaaaacgtggcgccacctcgccgagagcttcggcctgaagagggatgagattgggggcatgacagacggcatgcaactctttgaccgcatcagcacggcaggctacagcatccctgagctactcacaaaactggtgcagattgagcggctggatgctgtggagtccttgtgtgcagacatactggagtgggcgggggttgtgccacctgcctcccagccacatgctgcatcctgaaaagcatgcctgtgggctgtcctcccaggacaagccaaggatccaacgagggctctggagctgtgagtggtgccaaaagactgccaagaatcaaggcttttgtgatatgtcaccgtatgccttaggatgttcaaggagccagacgaaataaggcctgtcttccaatttaaccaaagataaaggactagagccgggatactttcagatgctcgcctgtacctcaccaggcagagtaaatatctactcactcatacagccagcccaccagcccaccattaactcactgaacaatgagacaatgttgaggactcaaatgaatcaaaccccgtgggaatgacagaagtgaagaatctggtccctgtctttaaggagtttgcactccagtagaagacagaaggaacgtatgtttacaaaccacttcactggaagacgtcaaacaagctgaatgaaggggcgcttagaaaacgttaatagaagttctaagcgggagatgactccctactgggatgatgaaggatggcatcctagtgaagaagcagctcaaacattttgataaaatggcaacaaaatgcagacaccctgctccaggtattatttcaggtttagtacaagtctgttaataccctatgtggtttcattaggataactttttacctatccttgaggtcatccatattcttacaggccttccagtcaataatggaagagctcactctatacaaaaccaatatgcaaggcatgtgtttgtccaagcaattggatgtgtgcagtagccaatttcatttactgcattactctttggcctgggaaccctgtggtctgcactacatgtgaatggccttccacttcagtcttaggcagatttgaccttttaggggcagcaatgctgaaggacacagcaatttaaattataatgtgtcaggctgtgttttcacttcaaacatgtatgagtagtcagctgtaattagagaaatgatgacttcctaagagttcagccacgcataattctagatttcaagagcatctaagacttgtggattagcctcatggcatgagagtttcagactcagccttctgagccagtcagggaaagtggagttctgcagcgcaaatgagagcctgggcttggtgtcgagggagctggcttctagttgtgccaccttgggccttgtcttttcctctctctgcctcagtttctcgtctgccaatgagatgttagttagtgattctataattggggcaggtagggttcaggtgagcaaaaagaaagtggagctataggaaatgccaggcctttgaggtgctctatggaagtcaacacagtgtggtttgtccatttaaatgggaataaaaacagaaaaactcagacttggcattttcacaataactgcaatggtttgacataacatttataggcagaaagttaataaactggcattgttcttggcatattattgtactatccctgtaactgccaagagctcaggagccaggctagtgatcacaccaggggttagagttcactgctgaactccctgatggcaggtctgtgtttattactacattaaaacaaagtctctgacttataaagcgaggtcgtaaaaattacaagttgcatgactgaaaaaatgctttagggggaaaatcagtcatatctttaacaccaacaagcaatttcccaccaacgaatgtagtacatactgtgagaggatcataatgaggtcctgaatatttaatatcatcatttactgtgtctgtttgctgctgtttttcgaacctatttggtttaccctgcaagctaaatactccacggcagagcttaattatccttttaattcctctttgaaatcctgtggtgcccccttccccctgccttgtgatgatgatgagtgagtctccccttaattagactgcaaatgtcacttgtgatgagtgtgccattccaggataacagcttgcaccctcctcagaatgttttcagcgaaagagtggggtggctgttctctgctcctggtgctttggcctcatttcacactattagaattctggggctgtaaggccagccagtgtcagctcatgttccattggctctccacctgccatttttagggagctattccttatatagttacaaattcccttgtcatttacttatttggaaacatgggatttactctgacaagctttagcctatgttatgggattcagaacaatgagatcataataattctcactgaccaaagctgggactccatcctgccatttttgtgtggagatattcataattctgcaatactttaaaacatttagaaaacaccccagggtaggtctgtggcccttagacagtgaagtcttaattgtcaatattatttttgtctaattctgtatatatataacttattatattttataatctcaataaacacattaataaaaaaaaaaaaaaaaaaaaaaaa

SEQ ID NO: 602 - protein, 448 aa, Homo sapiens
MAHVGDCTQTPWLPVLVVSLMCSARAEYSNCGENEYYNQTTGLCQECPPCGPGEEPYLSCGYGTKDEDYGCVPCPAEKFSKGGYQICRRHKDCEGFFRATVLTPGDMENDAECGPCLPGYYMLENRPRNIYGMVCYSCLLAPPNTKECVGATSGASANFPGTSGSSTLSPFQHAHKELSGQGHLATALIIAMSTIFIMAIAIVLIIMFYILKTKPSAPACCTSHPGKSVEAQVSKDEEKKEAPDNVVMFSEKDEFEKLTATPAKPTKSENDASSENEQLLSRSVDSDEEPAPDKQGSPELCLLSLVHLAREKSATSNKSAGIQSRRKKILDVYANVCGVVEGLSPTELPFDCLEKTSRMLSSTYNSEKAVVKTWRHLAESFGLKRDEIGGMTDGMQLFDRISTAGYSIPELLTKLVQIERLDAVESLCADILEWAGVVPPASQPHAAS

SEQ ID NO: 603 - DNA, 6656 bp, Homo sapiens
atgtcggggttcaggctgggtgaccacgtgtggctggagcctccctccacccacaagaccggcgtggccatcgggggcatcatcaaagaggcaaagccaggcaaagtcttggttgaagatgacgagggcaaggaacactggatccgagcagaggactttggtgtcctcagtcccatgcaccccaactcagtccagggtgtggacgacatgatccgcctgggggacctgaacgaggcaggcatggtgcacaacctcctgatccgctaccagcagcacaagatctatacatacacaggctccatcctggtggccgtcaacccgttccaggtgctgccgctctacaccctggagcaggtacagctctactacagccgccatatgggcgagctgcccccgcatgtctttgccatcgccaacaactgctacttcagcatgaagaggaacaagagggaccagtgctgcatcatcagcggcgagtctggggctggcaagacggagaccaccaagctcatcctgcagttcctggccaccatcagtggccagcattcgtggattgagcagcaggtcctggaagccaaccccatcctggaggcctttggaaatgccaagacaatccgcaacgacaactcaagccgctttgggaagtacattgacatctactttaaccccagcggggtgatcgagggcgcgcgcatcgagcaatttctcctggagaagtcccgggtctgccggcaggctcccgaggagcggaactaccatatcttctactgcatgctcatgggggtgagtgctgaggacaagcagctgctgagcctgggcacgccctccgagtaccactacctgaccatggggaactgcacttcctgtgaggggctcaacgacgccaaggactacgcccacatccgctcggccatgaagatcctccagttctccgactccgagagctgggacgtcatcaagctgctggctgccattctccacctggggaatgtggggttcatggcttcggtcttcgagaacctggacgcctcagacgtgatggagacgcccgcctttcccaccgtgatgaagttactggaggtgcagcaccaggagctccgggactgtctgatcaagcacaccatcctcatccgaggggaatttgtcaccaggtccctgaacattgcccaggctgctgaccggagggacgcctttgtcaagggcatctatgggcacctcttcctgtggattgtcaagaagatcaatgccgccatcttcacaccaccagcccaggaccccaaaaatgtgcggagggccatcggcctcctggacatatttggctttgaaaatttcgagaacaatagcttcgagcagctctgcatcaacttcgccaacgagcacctgcagcagttctttgtgcagcacgtgttcaccatggagcaagaggagtaccgctcggagaacatctcctgggactatatccactacaccgacaatcggcccaccctggacctgctggccctcaagcccatgagcatcatctccctcctggacgaagaaagccgcttcccgcaggggacagatctcaccatgctgcaaaagctgaacagcgtccatgccaacaacaaggccttcctacagcccaagaacatccacgatgccagatttggcattgcccattttgccggcgaggtgtactaccaagcagaaggcttcctggagaagaaccgagacgtgctgagcacagatatcctcaccctggtttactcctccaaaaacaagtttctgagggagatattcaacttggagttagcagagaccaagctgggccatgggaccatccgccaggcaaaggcaggaaaccatctcttcaagtctgcagactcaaataaacggccctccaccttaggaagccagttcaaacagtctctggaccagctgatgaaaatcctgaccaactgccagccttacttcatccgctgcatcaaacctaatgagtacaagaagccgctgctgttcgaccgggagctgtgcctgcggcagctgcgatactcgggcatgatggagaccgtgcacatccgcaagtcgggcttccccatccgctacacgttcgaggagttctcgcagaggttcggcgtgttgctgcccaacgccatgcggatgcagctgcaaggcaagctccgccagatgaccctgggcatcactgacgtgtggctgcggacagacaaagactggaaagcggggaagacaaaaattttcctgagggatcatcaggacactctgctggaggtacagagaagccaggtgctagacagagcggcgctcagcatccagaaagtccttcggggctacagatacaggaaggagttcctgaggcagaggcgggcagctgtgaccctgcaggcctggtggagaggctactgcaacaggaggaatttcaagctgatcctcgtgggctttgagcgcctgcaggctattgcccggagccagccgctggcgaggcagtaccaggccatgcggcagaggacagtccagctgcaggccctgtgcaggggatacctggtgcgccagcaagtccaggccaagaggagggcagtggtggtcattcaggcccatgccaggggcatggctgcccggcgcaacttccagcaaaggaaggccaatgcgccgctggtcatcccggccgaggggcagaaaagccaaggcgctctccctgccaagaagcgcagatccatctacgacaccgtcactgacacggagatggtggagaaggtgttcggcttcctccctgccatgattgggggccaggagggccaggcctcgccgcactttgaggatctggaatcgaagacccagaagctgcttgaggttgacctggacacagtccccatggcggaggagcctgaggaggatgtggatggcctggccgagtacaccttccccaagtttgctgtgacttacttccagaaatcagccagccacacacacatccggcggcccctccgatacccgttgctttaccacgaagatgacactgactgcttggccgccctggtcatatggaacgtcatcctgaggttcatgggtgatctcccagagccagtgctgtatgccaggagcagccagcagggcagctcagtgatgcggcagatccatgacacgctgggcagggagcacggtgcccaggttccacagcacagtagatctgcacaggtggccagccagctgaacattggagaggaggcattggagcctgatggccttggtgcagaccggcccatgtccaacctggagaaggtgcacttcatcgtgggctacgccatcctgcggcccagcctcagggatgagatttactgccagatctgcaagcagctctcggagaacttcaaaacaagcagcctggcccggggctggatcctgctcagcctctgcctcggctgcttcccaccctcagagaggttcatgaagtatctactgaacttcatcggccaagggccggcgacctacggccccttctgtgccgagcgcctgagacgcacctatgccaatggggtgcgtgcggagccccccacctggctggagctgcaggctgtcaagtccaagaagcacatccccatccaagtcatcttggccactggagagagcctaaccgtccccgtggactcagcctccacatctcgggaaatgtgcatgcacatcgctcacaagcagggcctcagcgaccacctgggcttctccctccaggtcgccgtgtacgacaagttctggtccctgggcagcgggcgcgaccacatgatggatgccatcgcccggtgtgagcagatggcccaggagaggggcgagagccagcgccagtcaccctggcgcatctacttccggaaggaattcttcaccccctggcacgactcccgggaggaccctgtcagcaccgagcttatttaccgccaagtcctccgaggagtctggtctggcgagtacagcttcgagaaggaggaagagctggttgagctgctggcccggcactgctacgtgcagctcggcgcctcagcagagagcaaggctgtccaggagctgctgcccagctgcatcccccacaagctgtacaggaccaagcccccagacaggtgggcgagcctcgtcactgccgcctgcgccaaggccccatacactcagaagcaagtcacaccactggccgtgcgagagcaggtggtggacgccgcccgcctgcagtggccgctgctcttctcccggctcttcgaagtcatcacactctcaggcccccgcctgcccaagacgcagctgatcttggctgttaactggaaggggctttgcttcctggaccagcaggagaagatgctgctggaactctctttcccagaggtcatgggtctggccaccaacagggaggcccagggcgggcagaggctgctgctctccacgatgcatgaggagtacgagtttgtgtcacccagcagtgtggccatcgctgagctggtggccctgttcctggagggcctgaaggagaggtccattttcgccatggccctgcaggacaggaaggccacagatgacaccaccctcctggccttcaagaagggggacctgttggtcctcacaaagaagcaggggctgctggcctctgagaactggaccctcggccagaacgacaggacaggcaagacggggctggtgcccatggcctgcctctacaccatccccacggtcactaagccctcggcacagctgctgagcttgcttgccatgtcaccagagaagaggaagctggcggctcaggaggggcagttcacagagccacgtcctgaggagccacccaaggaaaagctgcacaccctggaggagttctcctatgagttcttcagggctccagagaaggacatggtgagcatggccgtgctgcccctggcccgtgcccgtggccacctgtgggcctattcctgcgagccgctgcgacagccgctgctcaagcgagtccacgccaacgtcgacctctgggacatcgcctgccagatctttgtcgccatcctccggtacatgggcgactacccttctcggcaggcctggcccaccctggagctcaccgaccagatcttcacactggccctgcagcacccggccctccaggacgaggtctactgccagatcctgaagcagctgacgcacaactccaacaggcacagcgaagagcggggctggcagctgctgtggctgtgcacgggcctcttcccgcccagcaaggggctgctgccccatgcccagaagtttatagacactcggagggggaagctgctggcccccgactgcagccgccgaatccagaaggtcctgaggacggggccccggaagcagcccccgcaccaggtggaggtggaggccgcagagcagaacgtctcccgcatctgccacaagatctacttccccaatgacaccagtgagatgctggaggtggttgccaacacacgggtgcgggatgtgtgtgacagcattgccaccaggctgcagctggcctcctgggagggctgcagcctcttcatcaagatttcagacaaggtcatcagccagaaggagggagacttcttctttgattccttgagggaggtgtctgactgggtgaagaagaacaagccccagaaagaaggggcccccgtgacgctcccctaccaggtgtacttcatgcggaaattgtggctcaacatatctccagggaaggatgtgaatgcagacaccatactccattaccaccaggagctgcccaagtacctgcgcggattccacaagtgttcgcgggaggatgccatccacctggcgggcctcatctacaaggcccagttcaacaacgaccggtcccagctggctagtgtccccaagatcctgagggaactggtgcctgagaacctcacacgcctgatgtcctcggaggagtggaaaaagagcatccttctagcctatgacaagcataaggacaagacagtggaggaggccaaggtggccttcctgaagtggatctgccggtggcccaccttcggatccgccttcttcgaggtgaagcaaacctcggagccttcctacccggacgtcatcctcatcgccatcaaccgacatggggttctgctcatccaccccaagaccaaggacctgctcaccacctatcccttcaccaagatctccagctggagcagcggcagcacctacttccacatggcgctggggagcctgggccgtggcagccgcctgctgtgcgagacctccctgggctataagatggatgacctgctgacctcatatgtgcagcagctcctgagtgccatgaacaagcagcggggctccaaggccccagccctggccagcacctagcagcggatgctggcgtgtctgctcaggcgcccttcccgacctctagcctggcggcaccttcccaggccctctcaacccagggcctgtccttggcgggcagccttccatgctgccccccatacaaagcccactcagccccgcaggcggccccctctgtcctgggcgctgcccagggaggccaaaagacgggcccagaatggggtcgggagtctcggacccccaggctattggtggatgactgactgacaggacacctcccaaccccaccccaccccaccagaatgttcaataaaaactcctggagc

SEQ ID NO: 604 - protein, 2116 aa, Homo sapiens
MSGFRLGDHVWLEPPSTHKTGVAIGGIIKEAKPGKVLVEDDEGKEHWIRAEDFGVLSPMHPNSVQGVDDMIRLGDLNEAGMVHNLLIRYQQHKIYTYTGSILVAVNPFQVLPLYTLEQVQLYYSRHMGELPPHVFAIANNCYFSMKRNKRDQCCIISGESGAGKTETTKLILQFLATISGQHSWIEQQVLEANPILEAFGNAKTIRNDNSSRFGKYIDIYFNPSGVIEGARIEQFLLEKSRVCRQAPEERNYHIFYCMLMGVSAEDKQLLSLGTPSEYHYLTMGNCTSCEGLNDAKDYAHIRSAMKILQFSDSESWDVIKLLAAILHLGNVGFMASVFENLDASDVMETPAFPTVMKLLEVQHQELRDCLIKHTILIRGEFVTRSLNIAQAADRRDAFVKGIYGHLFLWIVKKINAAIFTPPAQDPKNVRRAIGLLDIFGFENFENNSFEQLCINFANEHLQQFFVQHVFTMEQEEYRSENISWDYIHYTDNRPTLDLLALKPMSIISLLDEESRFPQGTDLTMLQKLNSVHANNKAFLQPKNIHDARFGIAHFAGEVYYQAEGFLEKNRDVLSTDILTLVYSSKNKFLREIFNLELAETKLGHGTIRQAKAGNHLFKSADSNKRPSTLGSQFKQSLDQLMKILTNCQPYFIRCIKPNEYKKPLLFDRELCLRQLRYSGMMETVHIRKSGFPIRYTFEEFSQRFGVLLPNAMRMQLQGKLRQMTLGITDVWLRTDKDWKAGKTKIFLRDHQDTLLEVQRSQVLDRAALSIQKVLRGYRYRKEFLRQRRAAVTLQAWWRGYCNRRNFKLILVGFERLQAIARSQPLARQYQAMRQRTVQLQALCRGYLVRQQVQAKRRAVVVIQAHARGMAARRNFQQRKANAPLVIPAEGQKSQGALPAKKRRSIYDTVTDTEMVEKVFGFLPAMIGGQEGQASPHFEDLESKTQKLLEVDLDTVPMAEEPEEDVDGLAEYTFPKFAVTYFQKSASHTHIRRPLRYPLLYHEDDTDCLAALVIWNVILRFMGDLPEPVLYARSSQQGSSVMRQIHDTLGREHGAQVPQHSRSAQVASQLNIGEEALEPDGLGADRPMSNLEKVHFIVGYAILRPSLRDEIYCQICKQLSENFKTSSLARGWILLSLCLGCFPPSERFMKYLLNFIGQGPATYGPFCAERLRRTYANGVRAEPPTWLELQAVKSKKHIPIQVILATGESLTVPVDSASTSREMCMHIAHKQGLSDHLGFSLQVAVYDKFWSLGSGRDHMMDAIARCEQMAQERGESQRQSPWRIYFRKEFFTPWHDSREDPVSTELIYRQVLRGVWSGEYSFEKEEELVELLARHCYVQLGASAESKAVQELLPSCIPHKLYRTKPPDRWASLVTAACAKAPYTQKQVTPLAVREQVVDAARLQWPLLFSRLFEVITLSGPRLPKTQLILAVNWKGLCFLDQQEKMLLELSFPEVMGLATNREAQGGQRLLLSTMHEEYEFVSPSSVAIAELVALFLEGLKERSIFAMALQDRKATDDTTLLAFKKGDLLVLTKKQGLLASENWTLGQNDRTGKTGLVPMACLYTIPTVTKPSAQLLSLLAMSPEKRKLAAQEGQFTEPRPEEPPKEKLHTLEEFSYEFFRAPEKDMVSMAVLPLARARGHLWAYSCEPLRQPLLKRVHANVDLWDIACQIFVAILRYMGDYPSRQAWPTLELTDQIFTLALQHPALQDEVYCQILKQLTHNSNRHSEERGWQLLWLCTGLFPPSKGLLPHAQKFIDTRRGKLLAPDCSRRIQKVLRTGPRKQPPHQVEVEAAEQNVSRICHKIYFPNDTSEMLEVVANTRVRDVCDSIATRLQLASWEGCSLFIKISDKVISQKEGDFFFDSLREVSDWVKKNKPQKEGAPVTLPYQVYFMRKLWLNISPGKDVNADTILHYHQELPKYLRGFHKCSREDAIHLAGLIYKAQFNNDRSQLASVPKILRELVPENLTRLMSSEEWKKSILLAYDKHKDKTVEEAKVAFLKWICRWPTFGSAFFEVKQTSEPSYPDVILIAINRHGVLLIHPKTKDLLTTYPFTKISSWSSGSTYFHMALGSLGRGSRLLCETSLGYKMDDLLTSYVQQLLSAMNKQRGSKAPALAST

SEQ ID NO: 605 - DNA, 2130 bp, Homo sapiens
agcgggacgtgagctcgcgaccagcgcgggggaggcgcccacacgcccgtcccgtcttggtgtctggccccaggcggccgcgcctcccctccgaggtggtcgcatagcccctgcaccaggcggcccgcgcccgcgacctcaaggcggctgccccgcgccatggcggcccggctgggtgcgctggccgcgtcggggctgtaccggcggcgccagcaccggcagagcccgccgccagccacgggcaatatgtcggacgccttggccaacgccgtgtgccagcgctgccaggcccgcttctcccccgccgagcgcattgtcaacagcaatggggagctgtaccatgagcactgcttcgtgtgtgcccagtgcttccggcccttccccgaggggctcttctatgagtttgaaggccggaagtactgcgaacacgacttccaaatgctgtttgctccgtgctgtggatcctgcggtgagttcatcattggccgcgtcatcaaggccatgaacaacaactggcacccgggctgcttccgctgcgagctgtgtgatgtggagctggctgacctgggctttgtgaagaatgccggcaggcatctctgccggccttgccacaaccgtgagaaggccaaaggcctgggcaagtacatctgccagcggtgccacctggtcatcgacgagcagcccctcatgttcaggagcgacgcctaccaccctgaccacttcaactgcacccactgtgggaaggagctgacagccgaggcccgcgagctgaagggtgagctctactgcctgccctgccatgacaagatgggcgtccccatctgcggggcctgccgccggcccatcgagggccgagtggtcaacgcgctgggcaagcagtggcacgtggagcactttgtctgtgccaagtgtgagaagccattcctggggcaccggcactatgagaagaagggcctggcctactgcgagactcactacaaccagctcttcggggacgtctgctacaactgcagccatgtgattgaaggcgatgtggtgtcggccctcaacaaggcctggtgtgtgagctgcttctcctgctccacctgcaacagcaagctcaccctgaagaacaagtttgtggagttcgacatgaagcccgtgtgtaagaggtgctacgagaagttcccgctggagctgaagaagcggctgaagaagctgtcggagctgacctcccgcaaggcccagcccaaggccacagacctcaactctgcctgaaggccctcttgcgcagctgcctctcggcccctccgccttctcccctcctgctgtccatgcttggccccctcgtccccatccacctgtgccctccgcatcttaccctccctttctctttcctcattgccttctcccttcctgttccctcatctctgccttccccatgtctctcctctccttggccgtggcttctgtctgtgaggaggcaggagctggggagtgggagcctatgaccccacgtctgacagccatgtccacctgtgcccacagcttccgcccacagacctccagggacaggagcaaattgcaccacagctccccgcctggcctggccctccccaggcggctcagtggctcatgctgtcctgtgagagcccctgccccagagcggccccactaagcgcatgtggctcctgggctacccacagccagggcagcctgctggagccacagggccagggccatgcagatggaggcctctgggagccacctccaatccctcaccactcactcaaccagtggcacagtgtccttgtgcccacactgagccagcaagtcctgctgtccacacccacaagctacctggagggacaggacccacctccatccttcggaaggccttcctggaatcccaccttggcctccgccctcggttccgccccgcccctctccccccgaccttggggcttgtgtcgagcccttgggtggggccaggaggaggtgatggcgtcagaggaggtgtggtcagaggtgacttgttcccacctccagggaggacgcttcgtcttcggccagcgcagacctggtgtttgtttgttgggctcacgcttgcacaatgaaggcttgttcacacaaaaaaaaaaaaaaaaaaaa

SEQ ID NO: 606 - protein, 365 aa, Homo sapiens
MAARLGALAASGLYRRRQHRQSPPPATGNMSDALANAVCQRCQARFSPAERIVNSNGELYHEHCFVCAQCFRPFPEGLFYEFEGRKYCEHDFQMLFAPCCGSCGEFIIGRVIKAMNNNWHPGCFRCELCDVELADLGFVKNAGRHLCRPCHNREKAKGLGKYICQRCHLVIDEQPLMFRSDAYHPDHFNCTHCGKELTAEARELKGELYCLPCHDKMGVPICGACRRPIEGRVVNALGKQWHVEHFVCAKCEKPFLGHRHYEKKGLAYCETHYNQLFGDVCYNCSHVIEGDVVSALNKAWCVSCFSCSTCNSKLTLKNKFVEFDMKPVCKRCYEKFPLELKKRLKKLSELTSRKAQPKATDLNSA

SEQ ID NO: 607 - DNA, 2070 bp, Homo sapiens
ccgacacccacgggcggagatcacctgctgccccgcagacccctgtcccttcctcccggaccagcagctagaggatgtccaaacggagttggtgggctggatccagaaagcccccaagagagatgctgaaactctcaggctctgactccagccaaagcatgaatggccttgaagtggctcccccaggtctgatcaccaacttctccctggccacggcagagcaatgtggccaggagacgccactggagaacatgctgttcgcctccttctaccttctggattttatcctggctttagttggcaataccctggctctgtggcttttcatccgagaccacaagtccgggaccccggccaacgtgttcctgatgcatctggccgtggccgacttgtcgtgcgtgctggtcctgcccacccgcctggtctaccacttctctgggaaccactggccatttggggaaatcgcatgccgtctcaccggcttcctcttctacctcaacatgtacgccagcatctacttcctcacctgcatcagcgccgaccgtttcctggccattgtgcacccggtcaagtccctcaagctccgcaggcccctctacgcacacctggcctgtgccttcctgtgggtggtggtggctgtggccatggccccgctgctggtgagcccacagaccgtgcagaccaaccacacggtggtctgcctgcagctgtaccgggagaaggcctcccaccatgccctggtgtccctggcagtggccttcaccttcccgttcatcaccacggtcacctgctacctgctgatcatccgcagcctgcggcagggcctgcgtgtggagaagcgcctcaagaccaaggcagtgcgcatgatcgccatagtgctggccatcttcctggtctgcttcgtgccctaccacgtcaaccgctccgtctacgtgctgcactaccgcagccatggggcctcctgcgccacccagcgcatcctggccctggcaaaccgcatcacctcctgcctcaccagcctcaacggggcactcgaccccatcatgtatttcttcgtggctgagaagttccgccacgccctgtgcaacttgctctgtggcaaaaggctcaagggcccgccccccagcttcgaagggaaaaccaacgagagctcgctgagtgccaagtcagagctgtgagcggggggcgccgtccaggccgagcgcagactgtttaggactcagcagacccagcaagaggcatctgccctttccccagccacctccccagcaagcaacctgaaatctcagcagatgcccaccatttctctagatcgcctagtctcaacccataaaaaggaagaactgacaaaggggatccatcggccacccctctgcaggggcttgtgatggctacaatggctcctagacactcaacgacttcatctgtggcagggagagaggaggccggaagaacaacccctgaacaatggaggcctttctttcccgctaggctcccagcctccttcccgctacagaatcgctcatcggcgaggctcagcagaaagaccctgaaggcaggctgcaaatgacccagaagagggacctgggagtcctggtggggacggggagggagtctcaatactcctttgcagcgcaaggtactctgagtcccctctgtagtgcctctgccagacacacactgcctgagttgaagagacacaggccacacatttcaggctggttgccagcggacgtcagcactcacggcctgcggggactcagcacagctctggattctggatctctcctgctgtaaccccacgcacaagcctgcaacccccagagctctttgacaggctcccaggcctcccagtcctggacaagcatgtgcagtcacgggagctcagctcaggccagggctgggctgtgcacctgcctcccactgacccagacccacttcctccagagaggcctctctccgcctgagctatttcccttgctagtgtgcagatatttccctaacatgtccttttttgtatttgtttgtacggaccataaatataactgtagctttaagactaaaaaaaaa

SEQ ID NO: 608 - protein, 367 aa, Homo sapiens
MSKRSWWAGSRKPPREMLKLSGSDSSQSMNGLEVAPPGLITNFSLATAEQCGQETPLENMLFASFYLLDFILALVGNTLALWLFIRDHKSGTPANVFLMHLAVADLSCVLVLPTRLVYHFSGNHWPFGEIACRLTGFLFYLNMYASIYFLTCISADRFLAIVHPVKSLKLRRPLYAHLACAFLWVVVAVAMAPLLVSPQTVQTNHTVVCLQLYREKASHHALVSLAVAFTFPFITTVTCYLLIIRSLRQGLRVEKRLKTKAVRMIAIVLAIFLVCFVPYHVNRSVYVLHYRSHGASCATQRILALANRITSCLTSLNGALDPIMYFFVAEKFRHALCNLLCGKRLKGPPPSFEGKTNESSLSAKSEL

SEQ ID NO: 609 - DNA, 2824 bp, Homo sapiens
gaacttttttaaaaattaaatttttattttgagatcactgtttgtgttcagttgtaagaaacaagagagattctgtgtaccctttacccattcctccatgttgcaaaactagcacaatatcaccgccacggtagacgcagtgaggccataagacatttccgtcagcaaaagggtcacttcttgtgcccctttagaaccacacccacccctgccttccaactattaatgctggcaggacttagccagaccgcaagggcgcctactccgaacaaggaagagggtcaggcgctgggagggcgactgcaagcggacaggcagcacctgcgaccacggtacttggggacaccacaaaagtccgcagagcaggcaccgcggcacttccgcgagcgccgcaggccctgcccctttcgccgtcgccgaccaattgccgcccgaagaccgaaccgcttcagcggagggccggaagtgagccgcagcttttcctttctgccaccgccttgtccaagatggcggacctccaccgccagctgcaggagtacctggcgcaggggaaagctggcggcccggcggccgcggagccgctgctcgccgcggagaaggcggaggagcccggggaccggccggcggaggagtggctgggccgcgcgggcttgcgctggacgtgggcgcggagccctgcggagtcggcagcggccggcctgacgtgcctcccgagcgtgacgcgcgggcagcggctggcggcgggcggcgggtgcctgctgctggctgcactgtgtttcggcctagccgcgctctacgcaccggtgttgctgctgcgcgcgcgcaagttcgcgctgctctggtcactgggctcggcgctggcgttggcgggaagcgcgctgctgcggggcggcgcggcgtgcggacgcctgctgcgctgcgaagaagcgccgtcccggcccgcgctgctctacatggcagcgctgggcgccacgctgttcgccgcgctgggccttcgcagcacgctgctcacggtgctgggcgcgggcgcgcaggtggccgcgctgctggccgcgctggttgggctgctgccctggggcggcggcaccgcgctgcgcctcgcactgggtcgcctgggccgcggcgccggcctcgccaaggtgctgcccgtgtgaggacctcgcgccctcgccgctggggaagtacgcggagccagcgccgtcggagaccgcgccggccgagctgaggactgcacgccgctgtgcggaagcccgtggcgaaggccctgccctaacagcctgcgagtctaatccgggagcggctgctgccagcggaggcgacagcagcgttgggagctcctcgatgtcagctttttgtgctggacttggcacacgctctgaaaactgagattttgtcattgaactggtgacaggatgtgagacggttattagaagttgctttcgaagtaactgtggtcttaggttcggctgagtaaagaaaaaggatttttcttcgagttagctgctcttgtgatttttctcaggctgttttgtcattttaaaatccagtggtagatgtagcttagcgacggtagttttttgttttggctatactaagacttggaaattattctctccagtgtcagcgaatccagaagggtatcagattaaacaccgaattcagccactggacttttaaaagtacttaagatggtttatctcgggttttttcttcagttaacaaaatcataaatatggtgccttataacatgaaaggaaaattagttgtgtatttcacgacgaaagcgacggaccaaaagaaatttcctgccccaagaagcatgggatccaggaaggggcgcgtagatgcttaacggtctcttcggaaatcctgcaaatagaaagataattctagatccggaatacctgtatctggtggaaaccatggatttctacaagctcgaattattcctcattgtatagcctgctttgtaaactagtttacaatttgcaggctgatcttaagatttttttatatctaattgctgctgccttcattttaggttcagcagttacttttaactaccttaatttattgccagaaggtatgagcctaacattctgatgagtccagaaaactacgttttgtcagtagcaatacactaggaagtaaaatatatttagaatttaaacattgtgtgccagtggtcctcgcgcttgactgcacatcagttacttgaagagccacacctcagatcaatgcagtcagaacctgggaagtaggtcccagacatcaggacctttttaaagctccccaagtgattctacgttccccaagtttgaggaccacttttctgtgcattggcttgcacaatttgaaaataatgcttttcctgagctggatcccagtgttgccttaacagggtgtctgtcgtgccgcagtagagcactgctgcttcctccaaccccaaaatttatgttcctaagtaagtcaggtccctaagccccgtcccaagaagtgacacaagtggccaacatccacactgtaggcttgcaggctacccgccctgagatttggtaaagaacactgccttgttccccatcagtaaacaaggttacctacctcaggaggctgcttgtgagagagcaaatgcagtatcttcagaatgatttatttttttaattaattgtaaagacttgtgccattggctgctctttctagtcccctaaatttctgttctagttttaaatttctctagaacttgcaatagttgggggttttataatgatgttttacaatgtttatttcttaaataaaaacttaaaaattcaaaaaaaaaaaaaaa

SEQ ID NO: 610 - protein, 215 aa, Homo sapiens
MADLHRQLQEYLAQGKAGGPAAAEPLLAAEKAEEPGDRPAEEWLGRAGLRWTWARSPAESAAAGLTCLPSVTRGQRLAAGGGCLLLAALCFGLAALYAPVLLLRARKFALLWSLGSALALAGSALLRGGAACGRLLRCEEAPSRPALLYMAALGATLFAALGLRSTLLTVLGAGAQVAALLAALVGLLPWGGGTALRLALGRLGRGAGLAKVLPV

SEQ ID NO: 611 - DNA, 1174 bp, Homo sapiens
agagcgtgcgttcggtggcccataggggaagatggcggctgctcctttggaggagcgggattgagaggatcggggtggggagaccaaacaagagagacatttctggctctgaaggcgaacgcttcgctggccatttaggagctctgctcaaagccagacgtatcctagaaggaaaacatcaccatggctacagaaattggttctcctcctcgttttttccatatgccaaggttccagcaccaggcacctcgacagctgttttataagcgacctgattttgcacaacagcaagcaatgcaacagcttacttttgatggaaaacgaatgagaaaagctgtgaaccgaaaaaccatagactacaatccatctgtaattaagtatttggagaacagaatatggcaaagagaccagagagatatgcgggcaattcagcctgatgcaggttattacaatgatctggtcccacctataggaatgttgaataatcctatgaatgcagtaacaacaaaatttgttcggacatcaacaaataaagtaaagtgtcctgtatttgttgttaggtggactccagaaggaagacgcttggtcactggagcttctagtggggagtttaccctgtggaatggactcactttcaattttgaaacaatattacaggctcacgacagcccagtgagggccatgacgtggtcacataatgacatgtggatgttgacagcagaccacggaggatatgtgaaatattggcagtcgaacatgaacaacgtcaagatgttccaggcacataaggaggcgattagagaggccaggtttatacacaatataccattttctgtagtccctattgtcatggttaaattattctctaagtgtattctgggtgcagagatgcatgggctctgtcagtttctgggaaactttctgcaccctataaacacaatatttttctttgttttcacacattcaccattttgctggcacctttctgaagtagtgttgtcccggtatcagcctttgcaatatgttagagatgtactgtctgccgcattttgcactggttttctcttttcatttatgattaataatgtgtatacgttattcctttttattatctactgtgtaagacaagaatatttcattccaaataaagaattcagtctttaattatgaaaaa

SEQ ID NO: 612 - protein, 326 aa, Homo sapiens
MATEIGSPPRFFHMPRFQHQAPRQLFYKRPDFAQQQAMQQLTFDGKRMRKAVNRKTIDYNPSVIKYLENRIWQRDQRDMRAIQPDAGYYNDLVPPIGMLNNPMNAVTTKFVRTSTNKVKCPVFVVRWTPEGRRLVTGASSGEFTLWNGLTFNFETILQAHDSPVRAMTWSHNDMWMLTADHGGYVKYWQSNMNNVKMFQAHKEAIREARFIHNIPFSVVPIVMVKLFSKCILGAEMHGLCQFLGNFLHPINTIFFFVFTHSPFCWHLSEVVLSRYQPLQYVRDVLSAAFCTGFLFSFMINNVYTLFLFIIYCVRQEYFIPNKEFSL

SEQ ID NO: 613 - DNA, 3574 bp, Homo sapiens
agagcgtgcgttcggtggcccataggggaagatggcggctgctcctttggaggagcgggattgagaggatcggggtggggagaccaaacaagagagacatttctggctctgaaggcgaacgcttcgctggccatttaggagctctgctcaaagccagacgtatcctagaaggaaaacatcaccatggctacagaaattggttctcctcctcgttttttccatatgccaaggttccagcaccaggcacctcgacagctgttttataagcgacctgattttgcacaacagcaagcaatgcaacagcttacttttgatggaaaacgaatgagaaaagctgtgaaccgaaaaaccatagactacaatccatctgtaattaagtatttggagaacagaatatggcaaagagaccagagagatatgcgggcaattcagcctgatgcaggttattacaatgatctggtcccacctataggaatgttgaataatcctatgaatgcagtaacaacaaaatttgttcggacatcaacaaataaagtaaagtgtcctgtatttgttgttaggtggactccagaaggaagacgcttggtcactggagcttctagtggggagtttaccctgtggaatggactcactttcaattttgaaacaatattacaggctcacgacagcccagtgagggccatgacgtggtcacataatgacatgtggatgttgacagcagaccacggaggatatgtgaaatattggcagtcgaacatgaacaacgtcaagatgttccaggcacataaggaggcgattagagaggccagtttctcacccacggataataaatttgctacatgctctgatgacggcactgttagaatctgggactttcttcgttgccatgaggaaagaattctccgagatacatgttttcatcactgccgttgttacttcctttctgtcaagaggtgaataacagtaggtggacaaagtttagggagccacatttaccaacttctgtgaatatacccaagaagattctggcaaaacatagattcaaattacagttgatgctgtggatggctatgggttaactactcttctactttgacacggattatttgttgcttttatgtttctaaattctcaattaaaaagaagtgtatccttaatctggccaactgaaagtgaacttgttcattcacctctaccttgctttcaaaaggactgcttaccatggaagtgctccagaagaatcatttgaaacatcttttgttttccttcttggttctgcgttttcttccttaccaggggcttcagtcatggcttctctttattcttggcctgggttgtctgctggcactaatacatctattattaacgtagtgtaggtactggcctttctaatagtcttggtatttagtgccagactcccatcaatcttttgaatgtcttttctttttctttttgcacttttctagcttttcaagtgatgactatatactgcttttcttgactgtatatattgttactgaattgtgaatatctgcagaaatgtttactagagaacctgtgactgttgaataacatgtgcccgaacatacacacacacatatgtacacacacacctcagagtactctttcttacagcggactttgctgctgctttctgcatgtgtgggacactggtatctcccgtctcagacaaatggctgatgttctctatgatattggtgttaatatcaaagaattgaatgaatacaacagaattgaggttgaaaaatatttgattgccacattcctttaagcatctttgatgaatactctgcaaagtagcctttaaaaaaatgtaaattttttaaaaagtccacagaggagaatttgctggttagcacaaaacatactgcaaaattgcttctttctggttattataactgaagaatatagaagattgacacacattttatacaccctcaggcagtgttttggaataatattgtaccttttcaaattgttatcaattaactgtttttctccatttcataattctcaagatttttctaaatacagcctttaaatttgactcaaatggaaattgtgcactttcctgtttatacccttccccacgttattgtaaaagagtttaacagcagcctgatatgtaagtttcagcaaaacttatacctgtatatgtttttatttgactcaaaaattagatattttaccatatagtcataagaatttgctcactttgatgccagaagtacttaagaagttacacggcactaattttatgagttgtatgcctaatttcaatttctaacctatttgacagtttcttttaggtcagcctttgttggtcttccatgtaaatacaagttggtacaaatcaatagaaaccattttacctacataggcaaagtaaatgtgtgacttagagactgccagatttatggtgcatctacctttttatccatttgagcttgcttttttatgtttgtgtattggttgctcctgacactatacatttcaaaattttttataacttgaaaaacacttctgtgctaccactcagttctgatcaaatccttacattttgcaacactcatttctgaattttcagtaaagaaatacacattacaaattaaaggttaaaggcccctttacatgcccttccccagtctcctcttcctcccccggaagtgtccattctgctgaattcaggttcatcattgccagacaaatgtagtaagctagtgtttcacatttccaaaatcagccttctggcagacttggaagtactcttgagaaaagaagactcgtgaccaaattctcccacagatttgtaataatgtacatattgaaaggactgaaggctctcagactgggaaagaaacttacccattttaaaattcagcattgctcaacttacctgactgccggaccccttcacccatgattctatgcactgtattgttggaacatacattgtgaaaacactgccctgcctaggcataccccctttccagaattaactttccatttaattctatagtttttcactgatgtaactttctagactggacaacaaagatgactaatagtaatcactccaagttgatgttgactgttgggttgtggtgaaatcattttgcattaaaggaaggtaaaatactaataaattgcatattccttgaccagagcacagattacttatgcttcttaattttttaaaatcttaaatcctctgtccaactggagtatctggctatgggccatgggtactcatataccctttgtcttaaactgatctgttacattttatgttcttgtggctagaagtagcctgagtttgctgttaatgtttaacacattttcttgagtaacagttctgttaatattgtacaagatggtacttgaattctttgtttgccttttttcttcctgtattagaaaatcttggtgctttttataagttttgtataaaagaattttttttaagatttgttcataaaatggtctgatccaggaaaaataaaatgggaacatggacaccatttctgaccttcaaataaaacttattatgtat

SEQ ID NO: 614 - protein, 257 aa, Homo sapiens
MATEIGSPPRFFHMPRFQHQAPRQLFYKRPDFAQQQAMQQLTFDGKRMRKAVNRKTIDYNPSVIKYLENRIWQRDQRDMRAIQPDAGYYNDLVPPIGMLNNPMNAVTTKFVRTSTNKVKCPVFVVRWTPEGRRLVTGASSGEFTLWNGLTFNFETILQAHDSPVRAMTWSHNDMWMLTADHGGYVKYWQSNMNNVKMFQAHKEAIREASFSPTDNKFATCSDDGTVRIWDFLRCHEERILRDTCFHHCRCYFLSVKR

SEQ ID NO: 615 - DNA, 6299 bp, Homo sapiens
agagcgtgcgttcggtggcccataggggaagatggcggctgctcctttggaggagcgggattgagaggatcggggtggggagaccaaacaagagagacatttctggctctgaaggcgaacgcttcgctggccatttaggagctctgctcaaagccagacgtatcctagaaggaaaacatcaccatggctacagaaattggttctcctcctcgttttttccatatgccaaggttccagcaccaggcacctcgacagctgttttataagcgacctgattttgcacaacagcaagcaatgcaacagcttacttttgatggaaaacgaatgagaaaagctgtgaaccgaaaaaccatagactacaatccatctgtaattaagtatttggagaacagaatatggcaaagagaccagagagatatgcgggcaattcagcctgatgcaggttattacaatgatctggtcccacctataggaatgttgaataatcctatgaatgcagtaacaacaaaatttgttcggacatcaacaaataaagtaaagtgtcctgtatttgttgttaggtggactccagaaggaagacgcttggtcactggagcttctagtggggagtttaccctgtggaatggactcactttcaattttgaaacaatattacaggctcacgacagcccagtgagggccatgacgtggtcacataatgacatgtggatgttgacagcagaccacggaggatatgtgaaatattggcagtcgaacatgaacaacgtcaagatgttccaggcacataaggaggcgattagagaggccagtttctcacccacggataataaatttgctacatgctctgatgacggcactgttagaatctgggactttcttcgttgccatgaggaaagaattctccgagggcatggtgctgatgtgaaatgtgtagactggcatccaaccaaagggttagttgtttcaggaagtaaagatagtcaacagccaatcaagttctgggatcccaagactgggcagagtcttgcaacacttcatgcccataaaaacacagtaatggaagtgaaattaaacctcaatggcaattggctactcacagcatcacgtgatcatctctgtaaactttttgatatcagaaacctaaaagaagagcttcaagtcttccgaggtcataagaaagaagccacagctgtggcctggcatcctgttcatgaaggactttttgccagtggagggtctgatggttctttgttattctggcatgttggggtagagaaggaagtgggtgggatggagatggctcacgaagggatgatctggagtctggcttggcatcctcttgggcatattctctgctcaggctcaaatgaccatactagcaaattctggactcgaaaccgaccaggtgataaaatgcgagatcgatataatctaaaccttttacctggaatgtctgaagatggagtagaatatgatgacctcgaacctaatagcctggcagtaattccaggaatgggaataccagaacaactaaaattagctatggaacaagaacagatggggaaagatgaatcaaatgaaattgaaatgacaattccaggtttagattggggaatggaggaagtgatgcaaaaggatcagaaaaaagtacctcagaagaaagttccttatgcaaaacccattcctgctcagttccagcaggcttggatgcaaaataaagttccaattcctgctccaaatgaggtgctgaatgacagaaaagaagacattaaattggaagagaagaaaaaaacacaagcagaaattgagcaagaaatggctacattacaatatactaacccacaacttctggagcaacttaaaattgaaagacttgcacagaaacaagttgagcaaattcagcctcctccctcatctggcacccctctcctcggaccccagccttttccaggacaaggtccaatgtctcagattcctcaaggttttcaacagccccatccatctcagcagatgccaatgaacatggctcaaatggggcctccaggtccacagggacagtttaggcctcctggaccccagggacaaatgggaccacaaggtcctccactgcatcagggaggtggggggccacaaggattcatgggaccacaggggccccagggcccgccccaggggttgccacggcctcaggacatgcatgggccccaaggaatgcagaggcatcctggacctcatggccctttgggacctcaagggccacctggaccacaaggtagttctggtcctcaaggtcatatgggtcctcagggtccacctggcccacagggtcacataggcccccaaggcccgcctggccctcagggtcacttgggcccacaggggcctccgggtactcaaggtatgcagggaccacctggtcccagaggaatgcaagggcctcctcatcctcatgggatccaaggcggaccagggtctcaagggatccaaggtcctgtgtctcagggacctctgatgggattgaatccaagaggaatgcaggggcctccaggcccccgggagaaccagggtcctgctccccaagggatgattatgggccacccgcctcaagagatgagaggacctcaccctccaggtggactactgggacacggccctcaggaaatgagaggtcctcaggagatccgaggcatgcaggggcctccaccccaaggatcaatgctgggacctccccaggaattgcgagggcctccaggctcacaaagtcagcaggggccgccccagggctctttaggacctccaccccagggtggcatgcaaggaccccccggacctcagggacagcagaacccagcaagagggccacatccatctcaagggccaataccattccagcaacagaaaacgcctctgctaggtgatgggccccgggcccccttcaaccaggaaggacagagcacaggccccccacccctgataccaggcctagggcagcagggagcacaaggtcgcattccccctctgaaccccggacaaggacctggccccaacaaaggtgactcccgcggccctccaaaccatcacatgggcccgatgtcagagaggcggcatgagcagagcggcgggcctgagcatgggcccgagagggggcctttccggggtggccaggactgcaggggtccccctgataggcgtggccctcacccagacttccccgatgacttcagcagaccagatgacttccaccctgacaagcgctttggccaccggttacgtgaatttgaggggcgaggaggacctttaccgcaagaagagaagtggaggcgagggggccctgggcctccgtttccccctgatcacagggaattcagcgagggggatggccggggtgcagcccgaggccctccgggggcatgggaaggccgcaggcccggagatgaacgtttcccccgggatcccgaggacccacgttttcgagggcgcagagaagaaagtttcagaagaggagccccgccgaggcatgagggccgtgctccccccagaggaagggatggttttcctggtcctgaagactttggtccagaggagaattttgatgcttctgaggaagcggcccgaggacgagatctcagaggtcgaggtcggggtaccccacgaggaggaaggaagggtttacttcccactcctgacgagttccctcgctttgaaggagggcggaagccagattcctgggatggaaacagagagcctgggccaggtcatgaacattttcgtgatactccccgccctgatcatccccctcacgacggtcattccccagccagcagagaacgctcctcttctctccaaggcatggacatggcatccctacctccccgaaagcgcccctggcatgatggcccaggcacttctgagcacagagagatggaggccccaggaggcccttctgaagaccgaggaggcaaaggccgagggggcccaggacctgctcagagagtgcccaaatctgggcgttccagctccttagacggagagcaccacgatggataccacagagatgaaccttttgggggccctccaggcagtggcaccccttctcgagggggccggagtggcagtaactggggtagagggagtaacatgaactctggcccgccgaggcgaggagcttcacggggtggtggaaggggtcggtagaagctggaactgagtaccctgaggcctctctggacagtatgtaagaacttcttgtggactcaccaagagaaacaaaaggaagcctgcaccattgtagccctgaactcttttctgggcacctgaatcccaggaaccctcaatgaggtcttcaagatgaagagactgctgccagctaccagcctggctggccctgtcctgtccaccctcattgccccaactcccatgttgttttgtgaagataaaagctgggatctttttcttttttttaagtctcacaagacatggggcatctccacaaatttaagttcctgtccatttggaaatttgtttctatgtgtacagtttgtcagagaaaaacaaagtttttgtatgaatacagaatgtgatttacgcaagaattgacagaaaactagttgtgaagtgcttgccttaaggaaacctttggtttccatcgcatcccatctgccaaggaatgcacggttgttgctgatgttcatgagcatattaaccactaggttatctaaattaatctcagctgtgaactttgtgtttttcaacacattctgtcacaccatttttgtgacagaaaaatacttgaaaattattctaatgtagtttgtagtaggttcaaatttttattcagacatgctctgacagatggaaaattgtactctgaagagaaaatgcaatcttctggatgtccaacgagggagcttccccttggaagcatctcctaagaatcacagtttaggtttgaatcgccttgttatgatgaggagaggaacttgatgttagtcagaaataaagtcacatgccctttagataacttgaaatcacacatggagttgataaggaatggaccaaaataggtcctcaaacaattttgcaacacttaattaagttttcctctcttcctcttccatactatgtggaaataccagtgttacggcagggcgtacttctaactcacagtaagccagatagatcttgtccatggcaaattccttgtttaaaataaacataccatttagcccagtttggattggaagccaaaaattcagtttgttatataccccatgatactttctatactgacctttattttggttttacatggaagcttttattaaaaggactgtcctatggccaccttaacatttcattacattggcagcttcagttttggcatcagtcaaatttatttggcaaatttagtggtgctggaagtttctttttttcttttccttttttgacagagtcttgctctgtcacccagccaggagtgcagtggtgcaatcacggctcacttcagctttgaccctgcctcagcctccctagtagctaggactacaggcatatgccaccatgcccagctaattttttgtgtgtgtgttttttgtagagatggagtttcaccactttgtctatgctggtttcaaactcctgggctcaagcggtccacctgctgtggcctcccaaagtgctgggattgcagatctgagccacagtacctggccgctggtgctggaagtttcaatggttgcttagaaaaggcatactgatatagtttaacaggatatgaaaatttaactggttctctatgaatgtaaaaaacagcaaaagctaattgatttctgtggagtgagaaaatgtcagccatatacactgcttttcagtgttagaatctagagactattttttttttaactttgaaattacagcttatttaatcagcgctccaccataaacatgctattaggaggctcaagattgctttaggttatgggtatttcttcactcacccccaactggtatagcttaaagagagagaaactgtaatcaaatttcatgaagctaaaaccggatccagagaccaaacccatatcaagattagactttttttccctgagattctagtggaaaaattttcattattttgggctttaactttagaaacatagtatctcagtaagcagataaccagatcacatttaaaaattttcattttaccttgaagctctactggacttgacagatcacattttgagagtgaattcatttaaacaataaacctctacattatacttataaaaaaaaaaaaaaaa

SEQ ID NO: 616 - protein, 1336 aa, Homo sapiens
MATEIGSPPRFFHMPRFQHQAPRQLFYKRPDFAQQQAMQQLTFDGKRMRKAVNRKTIDYNPSVIKYLENRIWQRDQRDMRAIQPDAGYYNDLVPPIGMLNNPMNAVTTKFVRTSTNKVKCPVFVVRWTPEGRRLVTGASSGEFTLWNGLTFNFETILQAHDSPVRAMTWSHNDMWMLTADHGGYVKYWQSNMNNVKMFQAHKEAIREASFSPTDNKFATCSDDGTVRIWDFLRCHEERILRGHGADVKCVDWHPTKGLVVSGSKDSQQPIKFWDPKTGQSLATLHAHKNTVMEVKLNLNGNWLLTASRDHLCKLFDIRNLKEELQVFRGHKKEATAVAWHPVHEGLFASGGSDGSLLFWHVGVEKEVGGMEMAHEGMIWSLAWHPLGHILCSGSNDHTSKFWTRNRPGDKMRDRYNLNLLPGMSEDGVEYDDLEPNSLAVIPGMGIPEQLKLAMEQEQMGKDESNEIEMTIPGLDWGMEEVMQKDQKKVPQKKVPYAKPIPAQFQQAWMQNKVPIPAPNEVLNDRKEDIKLEEKKKTQAEIEQEMATLQYTNPQLLEQLKIERLAQKQVEQIQPPPSSGTPLLGPQPFPGQGPMSQIPQGFQQPHPSQQMPMNMAQMGPPGPQGQFRPPGPQGQMGPQGPPLHQGGGGPQGFMGPQGPQGPPQGLPRPQDMHGPQGMQRHPGPHGPLGPQGPPGPQGSSGPQGHMGPQGPPGPQGHIGPQGPPGPQGHLGPQGPPGTQGMQGPPGPRGMQGPPHPHGIQGGPGSQGIQGPVSQGPLMGLNPRGMQGPPGPRENQGPAPQGMIMGHPPQEMRGPHPPGGLLGHGPQEMRGPQEIRGMQGPPPQGSMLGPPQELRGPPGSQSQQGPPQGSLGPPPQGGMQGPPGPQGQQNPARGPHPSQGPIPFQQQKTPLLGDGPRAPFNQEGQSTGPPPLIPGLGQQGAQGRIPPLNPGQGPGPNKGDSRGPPNHHMGPMSERRHEQSGGPEHGPERGPFRGGQDCRGPPDRRGPHPDFPDDFSRPDDFHPDKRFGHRLREFEGRGGPLPQEEKWRRGGPGPPFPPDHREFSEGDGRGAARGPPGAWEGRRPGDERFPRDPEDPRFRGRREESFRRGAPPRHEGRAPPRGRDGFPGPEDFGPEENFDASEEAARGRDLRGRGRGTPRGGRKGLLPTPDEFPRFEGGRKPDSWDGNREPGPGHEHFRDTPRPDHPPHDGHSPASRERSSSLQGMDMASLPPRKRPWHDGPGTSEHREMEAPGGPSEDRGGKGRGGPGPAQRVPKSGRSSSLDGEHHDGYHRDEPFGGPPGSGTPSRGGRSGSNWGRGSNMNSGPPRRGASRGGGRGR

SEQ ID NO: 617 - DNA, 1909 bp, Homo sapiens
gctggtggtggcgcgcggcgcggcgcggcgatggcggcgggtggcagcgatccgcgggctggcgacgtagaggaggacgcctcacagctcatctttcctaaagagtttgaaacagctgagacacttctaaattcagaagttcatatgcttctggaacatcgaaagcagcagaatgagagtgcagaggacgaacaggagctctcagaagtcttcatgaaaacattaaactacacagcccgtttcagtcgtttcaaaaacagagagaccattgccagtgttcgtagcttgctactccagaaaaagcttcataagtttgagttggcctgtttggccaacctttgcccagagactgctgaggagtccaaggctctaatcccaagcttggagggacggtttgaagatgaggagctgcagcagattcttgatgatatccagacaaagcgcagctttcagtattaatctccaaacatcactgctgctcggagaaaccacatccccaggcataacaccaccttcccactgtctggggctgacttgcacagaaattctgttgaagacagttgagaattcctttggagaaaacagcccagcttggcgtggggttaggttgctgtttcaaataactcacaggcccaggtgacatggaatcttggagcagccttgtgcagtggcagccagtggcttcctgaacgtgcctctgcgaagtgtgagatgaggggtcacataaccacactgttgactacctcattcctggtttttggcctccacatcatcttttttcttaatatttcatgttttaatttcagggtgtttatactttttgaaactagaccagaagatagtagactttatagagaaagaccagttttacctagatactaaaggaagaattaaaccgctgttagtttgaaatgctttttttttttttttttaaatggagatagggtcttaactcttgtccaggctggaggagtgcagtcgtacagtcatggctcactgaagtcttgaccccgctgcctcagcctcccaaataactggggccacaggtgtgcaccacaactctcagctaatttttaaaattttttatagaggtggggttttactatgctgtccagactggtcttaaactcctgggctcaagtgatccccctgccttggcctcccaaactggtgagattacaggcatgagccaccacaactggcctgaaattcttaaaggatgggagtgtcgatgacagcaccttggcatcgttgtgcctaacctgggagacggaagaagcacgccatgggaagtgtttacacttgggggacaagtgctaagtattgtggagcccatagccccttgagatagatggctactttgcctttcttcttgaactgtcttgcagaatgtggatttggggtaagtggtcttgaaggattcatttagtcaccctcaaattaagatttttacttcatctttcttgggcctgcacctccaagataacaaagaagaagcaatggtcgtgccaaagaggtccacaaccaggtgtgcactgttcactgcagcccatttgctgtatgaactgtggttgttgtgtgcccaatgacaaggctactaagaaattcatcatttgaaacgtagaggccgcagcagtcagcgatgtttctgaaatgagcatccttgacgcctgtgtacttcccaggctggatgtgaagctacattaccatgtgagttgtgccattcacagcacagtggtgaggaattgagctcatgaagcaggcaaggaccgaacacctccaccccaacgtagacctgcaggtgctgccccatgacctccaccaaagcccatataaggagcggagttgttaaggactgaagaaaaacttctctggagaaaaataaaattgcaattctacttaaaaaaaa

SEQ ID NO: 618 - protein, 142 aa, Homo sapiens
MAAGGSDPRAGDVEEDASQLIFPKEFETAETLLNSEVHMLLEHRKQQNESAEDEQELSEVFMKTLNYTARFSRFKNRETIASVRSLLLQKKLHKFELACLANLCPETAEESKALIPSLEGRFEDEELQQILDDIQTKRSFQY

SEQ ID NO: 619 - DNA, 4698 bp, Homo sapiens
gttggtgaagagatcaggaagagatttcttcgagactaaggatggatgacccttagcaacagtgaccgtctcctcccggcatagcaagatggcctgccctcaggtacaggaagaaggaatggaatcggaaggaagaaaattcattccagagacaaaatagctcccctcctctgttgtagctgttcctctggcaatacaaactttctgctttcaggttctgcagcattccagaccttgagcactgaatcaggatgggaaaaagacgttgtgttcctccactcgagcccaagttggcagcaggctgttgtggggtcaagaagcccaaattatctggaagtggaacgcacagtcacgggaatcagtccacaactgtccccggctctagttcaggacctcttcaaaaccaccagcatgtggacagcagcagtggacgggagaatgtgtcagacttaactctgggacctggaaactctcccatcacacgaatgaatcccgcatcgggagcgctgagccctcttccccggcctaatggaactgccaacaccactaagaatctggtggtgactgcagagatgtgctgctactgcttcgacgtactctactgtcacctctatggcttcccacagccacgacttcctagattcaccaatgacccctatccgctctttgtgacgtggaagacagggcgggacaagcggcttcgtggctgcattgggaccttctcagccatgaatcttcattcaggactcagggaatacacgttaaccagtgcacttaaggacagccgatttccccccctgacccgagaggagctgcctaaacttttctgctctgtctccctccttactaactttgaggatgccagtgattacctggactgggaggtaggggtccatgggattcgaattgaattcattaatgaaaaaggtgtcaaacgcacagccacatatttacctgaggttgctaaggaacaagactgggatcagatccagacaatagactccttgctcaggaaaggtggctttaaagctccaattaccagtgaattcagaaaaacgatcaaactcaccaggtaccgaagtgagaaggtgacaatcagttacgcagagtatattgcttcccgacagcactgtttccagaacggcactcttcatgccccgcccctctacaatcattactcctgacacacggctgcatgaccagtcccacccccccgtggccaccaatggctatgacatcattggagcagatgcctcctcttcctggtccagttacttctattactgcaccattttatgatgctagcttccgttgccaagtctgcctcccgctgactgagggagggtagggttaccttgaacgaaacagaacttgaggggcccaagccttatctcagcctttcctcaatatggggttccgttggattggggctcctccatgactagtgggaattactgtgggttcagaagacccttgtctggtatttgccacatggggtattggccacacgctggaagctgaaattgatgatccctgaaggttgaacccacacacacccctgcagcctccccagatgaagtaggtgtattcccctggcagtctgggcaacggagaccaagaaacatttttaggttgttttaaattcctttttttaaacttccagtttattgcgtaccaagagttgattacaacctccatgcttcataagcggacgccacgttagggttggacgtgggcaccacgagtcctttgaggctcctggacagagacccacatcaagatcggaagccctttgggtggcgttgcagatctcattgctcagtaggccgtgaagattttcatcctcatcccactctcagttggattttctggcactcttcctgcattgagtctcctgattactgaacagagctccgtcatgtagcctgctgaggaatggaatggaatggagatgcccacaggaggtcctgatgtcatcactgcacgcaggtgtgagaggagagacctcttctgcaccgcctggctacctcactcctctgctggtagcagtgcctatagctggacctaagttctcagaagcgtagatgtgcaaacaagcgattgagttgggctttaggaggacacatcataggagagaatccagggtctgtaagctggttttcttttcaggtgacatcctgaggggcctgtaagcaggggagctcctttttctagtttgcctgtagaggtgggaagactgttggtgtttctgtcctttacaggacattaggaaacagttgtgtaattacacaaggtggacctttatcttgcctgacatgctgggaatcttcaccccaccagggcaaatttccaaatagctcattttattctaggtctttcaaactttcatgtgacatatttccctttcccattgttgctgatttccaaatcgctgtcagcaattttttcctctctccttgcctattcttcactcatttggtggcaaagttcatagaactaggggacttggaagatgctttgaaaatattgttacaaaggcactgctaaaatgattcacagggagagtggccagttggaagaaggatcctaaggatgtgacactggttttcaacaacatgcttagagaactcatgaagtggattgggtgtcaacccagtgaacatgtttttatttaatttattttttgaagtttatgtggtgatggtgtggctttccgaaatgggcaaatattcagaagatcttttgcattttcttctgtcaggaatggggaaggggagtgggggcacaatctgagaaaggacacctgtgctgttctaggcatcgctggcaagtttgtgggaagggatgggcaagggtgagtgggtttgctccacaccgtcctgtgctgctcgagaggacctgggacgtgcgagggaaacgtgggtgacggtgcctaggctgcggcccttcactgctgtgctgggttcctgcagcctgctacgtttcccttggcaatgtaaatgaagatggaggggtcgtttcgtgatttcctgctgctgagaataaatgtcttgttaaaaacgtggcaacggttactcttaggtgccatggatcgatgtcagggtggtcagctctggactaagccacccacctccaatttgtacaacagtattgatacatagggctacactcattactgttcaagtgttctatgttaagagttgtgtttaatttctaaagattaaaaaaagcaaaaaaattggtgctaaaccttcacccctgagcacgctcagtgagactggtcatgcaagcatttacagtgccatgctcctcaagccgattttttcttgtagaaatgttgccctatttgtcttctccaatgtatggtatgttattttattttattattttattttattttattttattttatcgagggggggtacgatacctgccatttaagaaaatgaatagaaaattttaaaacccgagaaatggggaaaaaaaaatcagtgcacaagaattgggctggttaggcccagcaccacactgaagtgggctcagtggtttttggagtgaagaagccttactccctgcacattccctcatgctcccacacaagtccagcaatggaaatgcttgggttcctcttgctttgtcaggggactcaggagtcgaccaagggaaaccatttggccccgtgaggaatgggcattgtcagtatccgtcctgaacggggcctagtcaggaagcggtctagaagtgtacggtcacggtcgcctcatgaaagtgtgtagcaggtggctctcaggaaaaataccaagtctggatcatccatgtggcagctttgcatagggagaggatagctccgaactggaactgaactgccttctctgcacgcttgaccaaagcagtgatgagggcggccagtacctgcggtgtgcgtggtaggtttaaagaaaagggaatgttttctgctgagtgtttcctttgtccttgggctgctcgagctggacagtaggtaaccactgttttcaaggaccagcccaatttctctggcttggttcggagttcgtttcatccctagctgtgagtgccttttggtctggaaagttggcttgtctcataatacccacagctaggacattctctctgtaattatgaattgtccttgttttacattaaaagagaatgtctttgatcactagagtctgtcggtgttggattatttccactgtgagattcttaaaacttttttgcttcataataataaaacaactcatgttagagaccctttcaacatgaaaggtttgtagttgagacattacatatattttattgtttataataaaaatcatctatacaaaagaagtcctgggtgttaatattttgcacaagatctgttttccatgatgtgttgacatctacaatttcactaactgttgacgttattttctattgagattctggagcctagggagctatgtgttctttttgttcatttcgttcttacttccctgaagcaagagactatatggccttcagtgcaaagacttcagaccaattctttgtattacacttggttgcctcttggctatataacttctgagtgcaaatcattgaacactttaacgaagtattgtagagaataaatcataatggataaaaaaaaaaaaaaaaaaaaaaaaaaaaaaaaaaaaaaaaaaaaaaaaaaaaaaa

SEQ ID NO: 620 - protein, 310 aa, Homo sapiens
MGKRRCVPPLEPKLAAGCCGVKKPKLSGSGTHSHGNQSTTVPGSSSGPLQNHQHVDSSSGRENVSDLTLGPGNSPITRMNPASGALSPLPRPNGTANTTKNLVVTAEMCCYCFDVLYCHLYGFPQPRLPRFTNDPYPLFVTWKTGRDKRLRGCIGTFSAMNLHSGLREYTLTSALKDSRFPPLTREELPKLFCSVSLLTNFEDASDYLDWEVGVHGIRIEFINEKGVKRTATYLPEVAKEQDWDQIQTIDSLLRKGGFKAPITSEFRKTIKLTRYRSEKVTISYAEYIASRQHCFQNGTLHAPPLYNHYS

SEQ ID NO: 621 - DNA, 4082 bp, Homo sapiens
gaggactgcgagcacagcggcggccgggtggcgggggtgagtggggccagcggggctggacagcagcgggccccgggcgccgccgccgcgatccctccccgcgcccgccgagcacatcgccgccgccgagatgggccctccgcggcacccccaggccggcgagatagaagcgggcggtgcgggcggcgggcggcggctacaggtggaaatgagttctcaacagtttcctcggttaggagccccttctaccgggctgagccaggccccttctcagattgcaaacagtggttctgctggattgataaacccagctgctacagtcaatgatgaatctggtcgagattctgaagtcagtgccagggagcacatgagttccagcagctccctccagtcccgggaggagaagcaagagcctgttgtggtaaggccctatccacaggtgcagatgttgtcgacacaccatgctgtcgcatcagccacacctgttgcagtgacagccccgccagcacacctgacgccagcagtgccactttcattttcggagggacttatgaagccgcccccgaagcccaccatgcctagccgtcccattgctcctgctccaccttctaccctgtcacttccccccaaggttccagggcaggttaccgttaccatggagagtagcatccctcaagcttcagccattcctgtggcaacaatcagtggacaacagggccatcccagtaacctgcatcacatcatgactacaaatgtgcaaatgtctatcatccgcagcaatgctcctgggccccctcttcacattggagcttctcatttacctcgaggtgcagctgctgctgctgtgatgtccagttctaaagtaaccacagtcctgaggccgacctcacagctgccaaatgctgctactgctcagccagcagtacagcacatcattcaccaaccaatccagtctcggccacctgtgaccacctccaatgccatccctcctgctgtggtagcaactgtctcagccaccagagctcagtctccagtcatcactacgacagcggcgcatgctactgattcagcacttagtaggccaaccttgtctatccagcatcctccatctgcagcaatcagtattcagcgtcctgcccagtcacgagatgtcacaacaagaatcacactaccatctcaccctgcattagggacgccaaaacagcagcttcatacaatggctcagaaaacaatcttcagtactggcacgccagtggctgcagccacagtagcacctattttggcaaccaacaccattccttcagcgaccacagctggatctgtgtcacacacgcaagctcccacaagtaccattgttaccatgacagtaccctcccattcctcccatgctactgctgtgaccacctcaaacatcccagtcgccaaggtggtgccccagcagatcacgcacacttctcctcggatccagccagactaccctgccgagaggagtagcctgattcccatctccggacatcgggcctctcccaatcctgtggccatggaaacccgaagtgacaacagaccgtctgttcccgttcagttccaatattttttgccaacttaccccccttctgcatacccactggcggcacatacctacaccccaatcaccagttccgtgtccactatccgacagtatccagtttcagctcaggctccaaactctgccatcacagctcagactggtgttggggtagcgtctaccgtccacctaaaccccatgcagttgatgacagtggatgcatcgcatgctcgacatattcaagggatccagccagcacccatcagtacccagggtatccagccggcccccattgggaccccagggatacagcctgcaccacttggcacacagggaattcactcagcaaccccaatcaacacacaagggcttcagcctgcacctatgggtactcagcagcctcagcctgaaggaaagacttcagcagtggtgttggcagatggagccacaattgtggccaaccctattagcaatccattcagtgctgctccagcagcaacaaccgtggtgcagacccacagccagagtgctagcaccaacgctcccgcccagggctcatcgccacggccaagcatactccggaagaaacctgccacagatggtgccaaacccaagtctgaaatccacgtgtctatggccactccggtcactgtgtccatggagactgtatccaatcaaaataatgatcagcctaccattgccgtccctccaactgcccagcagcccccaccgaccattccaactatgattgcagcagccagtcccccgtcacaaccagccgttgccctttcaaccattcctggagcggtccccatcactccacccatcaccaccattgcagctgcaccacctccatcagtcactgtgggtggcagtctttcctccgtcttgggccctcccgttcctgaaattaaagtgaaagaagaagtagaaccaatggatatcatgaggccagtttctgcagttcctccactggctaccaacactgtgtctccatctcttgcattgctggcaaacaacttgtccatgcctacaagtgacctaccacctggtgcctccccaaggaaaaagcctcgaaagcaacagcatgtgatctcaacagaagaaggtgacatgatggagacaaacagcactgatgatgagaagtccactgccaagagtcttctggtgaaggctgagaagcgcaagtctcctcccaaggagtatattgatgaggaaggtgtgagatatgtcccagtgcgtccaagaccccccattactttgcttcgtcactatcggaacccctggaaagctgcttaccaccactttcagaggtacagtgacgtccgggtcaaagaggagaagaaagctatgctgcaggaaatagctaatcagaaaggagtatcctgtcgtgctcaaggctggaaagtccacctctgtgctgcccagttactacagctgacgaatctagaacatgatgtctatgaaagacttactaacctgcaggaagggattatcccaaagaaaaaagcagcaacagatgatgatctccaccgaataaacgaactgatacagggaaatatgcagaggtgtaaacttgtgatggatcaaatcagtgaagccagagactccatgcttaaggttttagatcataaagaccgtgtcctgaagctgcttaacaagaacgggactgtcaaaaaagtgtccaaattgaagcgaaaggaaaaagtctagacccagaacaatcaggagattggaagcaaatttatgaagaatgatggtgggggtggggggagggttttggttttttccaaagtggaacattgaaataaaggaagtgttccttagttcccgtgtgaaagcagaggaacccatgacatccaagggcgtgaaaggatcagagctgactggacatagtgagctgccttcttgcgttcgggtgcacccctgttaaacctgatctgtgtcataagtgactccggatgcatcagtgtccaccagttggaagcaatgacaaggatggctggctggtgtttttcagccttccggtttatagactgtatttatctagtggattcctgcaggccccatactgagcctggactgaaagtatccactcggaccatctgttatctctctacactgaaaataaaacctcttccacccaccccattcggttcttctgcctgaccttcaaatgcccatgttggccttttacagcagtgccacggcaccaagcgagctgccacatctcacactctaaagggtttgaactattagttcttgtcattttttaaaaaaaaccattcccaagtgaaattgttatatcgtctgtcttgcgtgtgtcagaactgggtttttgtggaggttcagagcaggcaacaccataagttgctctcagatccttgttctgaagtacattcttggttatctgtacttctgtagctggtgtgatgctgttaattgtatgtaccacacatctccagacgttaataaaggactcaaagaggtttttgtaaaaaaaaaaaaaaaaaaaaaa

SEQ ID NO: 622 - protein, 1048 aa, Homo sapiens
MGPPRHPQAGEIEAGGAGGGRRLQVEMSSQQFPRLGAPSTGLSQAPSQIANSGSAGLINPAATVNDESGRDSEVSAREHMSSSSSLQSREEKQEPVVVRPYPQVQMLSTHHAVASATPVAVTAPPAHLTPAVPLSFSEGLMKPPPKPTMPSRPIAPAPPSTLSLPPKVPGQVTVTMESSIPQASAIPVATISGQQGHPSNLHHIMTTNVQMSIIRSNAPGPPLHIGASHLPRGAAAAAVMSSSKVTTVLRPTSQLPNAATAQPAVQHIIHQPIQSRPPVTTSNAIPPAVVATVSATRAQSPVITTTAAHATDSALSRPTLSIQHPPSAAISIQRPAQSRDVTTRITLPSHPALGTPKQQLHTMAQKTIFSTGTPVAAATVAPILATNTIPSATTAGSVSHTQAPTSTIVTMTVPSHSSHATAVTTSNIPVAKVVPQQITHTSPRIQPDYPAERSSLIPISGHRASPNPVAMETRSDNRPSVPVQFQYFLPTYPPSAYPLAAHTYTPITSSVSTIRQYPVSAQAPNSAITAQTGVGVASTVHLNPMQLMTVDASHARHIQGIQPAPISTQGIQPAPIGTPGIQPAPLGTQGIHSATPINTQGLQPAPMGTQQPQPEGKTSAVVLADGATIVANPISNPFSAAPAATTVVQTHSQSASTNAPAQGSSPRPSILRKKPATDGAKPKSEIHVSMATPVTVSMETVSNQNNDQPTIAVPPTAQQPPPTIPTMIAAASPPSQPAVALSTIPGAVPITPPITTIAAAPPPSVTVGGSLSSVLGPPVPEIKVKEEVEPMDIMRPVSAVPPLATNTVSPSLALLANNLSMPTSDLPPGASPRKKPRKQQHVISTEEGDMMETNSTDDEKSTAKSLLVKAEKRKSPPKEYIDEEGVRYVPVRPRPPITLLRHYRNPWKAAYHHFQRYSDVRVKEEKKAMLQEIANQKGVSCRAQGWKVHLCAAQLLQLTNLEHDVYERLTNLQEGIIPKKKAATDDDLHRINELIQGNMQRCKLVMDQISEARDSMLKVLDHKDRVLKLLNKNGTVKKVSKLKRKEKV

SEQ ID NO: 623 - DNA, 5078 bp, Homo sapiens
taatactcctttattccctgttttaaaaatttttttaaatttgatacaataattatacataataatggagtaccatgtgagattcaatccacatatacattgtgaaatgatcaaattaggatagttagcatgcacatcacccccaaataattattacttttgtggtgagaacacttaaaattgtctcttttagaaatatacgttattattaaccatagtcacctcgctgtgcaatagaacaccagaacttattcctcctaaatgtaactttttacccattgaccactccctcctcacccccctctctcctccccacccctggtaaccactgttctgttatctcctatgatagcaactttttagcttctgcatgtgagattgtacggtagttgcctttctgtgcctggattatttcatttagcataatgtccttcgggtatatccctgttgctgcaaaagacaggatttctctctctttttctggttgaatagtattccattgtcagagaatgttgtaagactaggaaaggaacactgcaggctggagccctggggaaatggtctgaggcaggtggtgggactagagctggggtctggcaaacaggctgggtttgattgtcagcataatagagagcactcatgtgccagctgggtgggaggagcagccgagtgaagaaggggaagcctctcaggaagcatgtgcagggtttatggtaatgagcagaccagcaggtacgtagtgggagaggggtgtgatggggcagaggaacttacgttatgatagtacaagacagaggttgagcctcattttaataggcattgtggtgggtgttgaatagtgatggaatgtatgggtctggaatcaggctgcctggtcaagggctctgaaacatgagtgtgcatcagaatcacctcgaggcttgttaaaggataggctgtggaccacatctcctcagttgctgattcagtgggtgtgggtggggcctgagaattcacatttcccactggtgatgctgctgttactgattgggaccacatttggggaacactggtctagaattgagaggttggcaaaccttctctgttaagaggtagatagtaaatattttaggccttctgggctacaaagagtatctgttacatattttttattgcttttcatgacccattaagcatatatatatcattctctgccatatacaaacaggctgttgggggagtgaggatgatgtagggaaggtggggcatggtttaataacccctgggccatgcctagatgatcagtcctctgccacatagctggctgacctttgccaagttaatcaccttttacctttattttctcatgtttctaataaaacagagacgataatattcatacttcttaccatatagaacttctgaggattcagtgagcaaagccacaaaagatggtatgtcacaatatctgggatatagctagaatttataatttatttttactctgttgataggcaatgggaaaacagtaagaggcagaccaacagtgatccagggctctgaaagctaattgcttcaagatcctgctaccattttcttttgggccgcttgcaaagaagaatcctttgactgaagcatgtatgtacactctgaagtacagcctgggttagtctcttataagggatcggatcattgctcagctctcccttgagtggcacttagaaaatggcgctattcgtaagctgactggtattgggcccaggactctggctgaaggggtgggcatgctggtaaccatttgcaacctatgctcaggtcctacttgttgggaagccctgattgagaagagtggcctggtctgtgctggcattagataggatctggctgcattaatattgaaactactctgccttttaatgtctcattttgcctcatggtgggagtgaaagtgagaaccacagaaaatctgcctgccaggtgttccacatttcttgtgctacagcatgcaagtgagcagtgaggtgtaccttttcctcatgtagctgggaaagcaatacccctgcttgtacctctggcatatcttctctgtgctggtgcacctagagaggttgcctggtggccctgagagagccatctcatcactaaacactgatggtgaaaagctggccatgctcaaataagatgtagcaatctacctcttctttgtctagttacccccaagggggcatccactttcttgctcacctcaccagttgcatgttctagtccttgccagaagcacataataatgactttgtaagcttaagttacaggcacacaaaagggcctgatggtgatatgactccaccctccccgtttttgctgacattccgccaaatatccttctgtctcctccccaccttgcaaaacaaacttcctgttttgaatttggtccaggctggaacagccccaccacacctgttaacacacgcagacgcacacttcccccttcataattgcttagcttcttgttgcctagccagatttcccctcagcttacagttcctgaatcataagatattgaaccagcaaatttaagagttgacattttacttagaggtattcaagtgaaaacatggcttctggtttattttgctgtattgtgccatgaccacttggctaattcttctcctccttcacatcagaatggaagtgaggaaaggcaaccagctgacacaggagccagagtgagaccagcagactctcacactcaacctacaccatgaatttgtgtctatcttctacgcgttaagagccaaggacaggtgaagttgccagagagcaatggctctcttcactccgtggaagttgtcctctcagaagctgggctttttcctggtgacttttggcttcatttggggtatgatgcttctgcactttaccatccagcagcgaactcagcctgaaagcagctccatgctgcgcgagcagatcctggacctcagcaaaaggtacatcaaggcactggcagaagaaaacaggaatgtggtggatgggccatacgctggagtcatgacagcttatgatctgaagaaaacccttgctgtgttattagataacattttgcagcgcattggcaagttggagtcgaaggtggacaatcttgttgtcaatggcaccggaacaaactcaaccaactccactacagctgttcccagcttggttgcacttgagaaaattaatgtggcagatatcattaacggagctcaagaaaaatgtgtattgcctcctatggacggctaccctcactgtgagggaaagatcaagtggatgaaagacatgtggcgttcagatccctgctacgcagactatggagtggatggatccacctgctctttttttatttacctcagtgaggttgaaaattggtgtcctcatttaccttggagagcaaaaaatccctacgaagaagctgatcataattcattggcggaaattcgtacagattttaatattctctacagtatgatgaaaaagcatgaagaattccggtggatgagactacggatccggcgaatggctgacgcatggatccaagcaatcaagtccctggcagaaaagcagaaccttgaaaagagaaagcggaagaaagtcctcgttcacctgggactcctgaccaaggaatctggatttaagattgcagagacagctttcagtggtggccctcttggtgaattagttcaatggagtgatttaattacatctctgtacttactgggccatgacattaggatttcagcttcactggctgagctcaaggaaatcatgaagaaggttgtaggaaaccgatctggctgcccaactgtaggagacagaattgttgagctcatttacattgatattgtaggacttgctcaattcaagaaaactcttggaccatcctgggttcattaccagtgcatgctccgagtccttgattcatttggtactgaacccgaatttaatcatgcaaattatgcccaatcgaaaggccacaagaccccttggggaaaatggaatctgaaccctcagcagttttataccatgttccctcataccccagacaacagctttctggggtttgtggttgagcagcacctgaactccagtgatatccaccacattaatgaaatcaaaaggcagaaccagtcccttgtgtatggcaaagtggatagcttctggaagaataagaagatctacttggacattattcacacatacatggaagtgcatgcaactgtttatggctccagcacaaagaatattcccagttacgtgaaaaaccatggtatcctcagtggacgggacctgcagttccttcttcgagaaaccaagttgtttgttggacttgggttcccttacgagggcccagctcccctggaagctatcgcaaatggatgtgcttttctgaatcccaagttcaacccacccaaaagcagcaaaaacacagactttttcattggcaagccaactctgagagagctgacatcccagcatccttacgctgaagttttcatcgggcggccacatgtgtggactgttgacctcaacaatcaggaggaagtagaggatgcagtgaaagcaattttaaatcagaagattgagccatacatgccatatgaatttacgtgcgaggggatgctacagagaatcaatgctttcattgaaaaacaggacttctgccatgggcaagtgatgtggccacccctcagcgccctacaggtcaagcttgctgagcccgggcagtcctgcaagcaggtgtgccaggagagccagctcatctgcgagccttctttcttccagcacctcaacaaggacaaggacatgctgaagtacaaggtgacctgccaaagctcagagctggccaaggacatcctggtgccctcctttgaccctaagaataagcactgtgtgtttcaaggtgacctcctgctcttcagctgtgcaggcgcccaccccaggcaccagagggtctgcccctgccgggacttcatcaagggccaggtggctctctgcaaagactgcctatagcagctacctgctcagccctgcaccatgctgctggggaagacagtggcccc

SEQ ID NO: 624 - protein, 741 aa, Homo sapiens
MALFTPWKLSSQKLGFFLVTFGFIWGMMLLHFTIQQRTQPESSSMLREQILDLSKRYIKALAEENRNVVDGPYAGVMTAYDLKKTLAVLLDNILQRIGKLESKVDNLVVNGTGTNSTNSTTAVPSLVALEKINVADIINGAQEKCVLPPMDGYPHCEGKIKWMKDMWRSDPCYADYGVDGSTCSFFIYLSEVENWCPHLPWRAKNPYEEADHNSLAEIRTDFNILYSMMKKHEEFRWMRLRIRRMADAWIQAIKSLAEKQNLEKRKRKKVLVHLGLLTKESGFKIAETAFSGGPLGELVQWSDLITSLYLLGHDIRISASLAELKEIMKKVVGNRSGCPTVGDRIVELIYIDIVGLAQFKKTLGPSWVHYQCMLRVLDSFGTEPEFNHANYAQSKGHKTPWGKWNLNPQQFYTMFPHTPDNSFLGFVVEQHLNSSDIHHINEIKRQNQSLVYGKVDSFWKNKKIYLDIIHTYMEVHATVYGSSTKNIPSYVKNHGILSGRDLQFLLRETKLFVGLGFPYEGPAPLEAIANGCAFLNPKFNPPKSSKNTDFFIGKPTLRELTSQHPYAEVFIGRPHVWTVDLNNQEEVEDAVKAILNQKIEPYMPYEFTCEGMLQRINAFIEKQDFCHGQVMWPPLSALQVKLAEPGQSCKQVCQESQLICEPSFFQHLNKDKDMLKYKVTCQSSELAKDILVPSFDPKNKHCVFQGDLLLFSCAGAHPRHQRVCPCRDFIKGQVALCKDCL

SEQ ID NO: 625 - DNA, 1679 bp, Homo sapiens
ggcatttctgactcgagtccccgccgcgcttgtcgtcgccgcagccgggatccgcagccccgcgccatggagccggccgcgggcatccagcgccgcagctcccaggggcccaccgtcccgccgccgccccggggccacgcgccaccggctgccgcccccggcccggccccgctgagctccccggtgcgcgagccgccccagctggaggaggagcggcaggtgcggatcagcgagagcggccagttcagcgacgggctggaggaccgaggcttactagaaagcagcacccgcctgaaacctcacgaagcccagaactacaggaagaaggcattgtgggtgtcctggttctccatcattgtcaccctggccctcgcggtggctgcctttactgtctccgttatgaggtacagcgcctctgcttttgggtttgcatttgatgccatcctggacgtcctgtcatcggcgattgtcctgtggcgttacagcaacgcggccgctgtgcactctgcccatagggagtacatagcctgtgtcatcttgggggtgatattccttctgtcatccatatgtatagtggtcaaagccatccatgacctctcaactaggctgctcccagaagtggacgatttcctgttcagtgtctccattttaagtgggattctttgcagcatcctggccgtgttgaagttcatgctggggaaggttctgaccagtagagcactcataacagatgggtttaactccctcgtgggtggcgtgatgggcttctccattcttctgagcgcggaagtgttcaagcatgactcagcggtctggtacctggacggcagcataggcgttctgatcggcctcaccatatttgcctatggggtcaaactcctcatcgacatggtgccgagggtgaggcagacacgtcactacgagatgtttgagtgaagggggccagcatccgcatgagaccattgagatgaggagtttccacataggcaaagggtgccaatatttaactgaacatctggtttctttttggaagttttctttcacatggtttgtcattacaagacaaggtctgcccagccaggtggatctaccttgcccccatcacctgccgcccccatcaaacatgttgggacaatgcccataggaatggacctccttccccgtctccagctgggactggtgtttttttagtctctggagtatgatggttctcatgggtaggatgagatctttggcagaaaggtcttcggtggtgctctgagcctgcgctgcataggactgagcagacccacctcctccagcttgggtggccctgccactcctggttccaagtctctcctttcctggcaggtcttaagggaagattgtacccctcaccctttacatacccagaatcatcagtatgtcacttcctaatttctatcagtgtatctcattatttcatactgttttactaatcctaagtctaaacagatttgctcaaaaggagaccattctattttttaaagtacttagtgatacacgtataagctttgcatggacgaattaaataagcacattgaccttttcttgtacattcagaacctgaacatccatgtgaaaactgggtccatttttgagagatgtgaaactacagtttatttgtaataaataaatataatctaaaaaaaaaaaaaaaa

SEQ ID NO: 626 - protein, 289 aa, Homo sapiens
MEPAAGIQRRSSQGPTVPPPPRGHAPPAAAPGPAPLSSPVREPPQLEEERQVRISESGQFSDGLEDRGLLESSTRLKPHEAQNYRKKALWVSWFSIIVTLALAVAAFTVSVMRYSASAFGFAFDAILDVLSSAIVLWRYSNAAAVHSAHREYIACVILGVIFLLSSICIVVKAIHDLSTRLLPEVDDFLFSVSILSGILCSILAVLKFMLGKVLTSRALITDGFNSLVGGVMGFSILLSAEVFKHDSAVWYLDGSIGVLIGLTIFAYGVKLLIDMVPRVRQTRHYEMFE

SEQ ID NO: 627 - DNA, 5885 bp, Homo sapiens
atgggcctgatcaagcaggcactttattatccaatgcgtaactcagtaatggatatatctgatgagcaggttttcattgctagtttagaaagtccgtggggaaggtgtacaggagactgtggtcccggaggagtccagagtcgggcagtgtggtgttttcatgttgacgggtggacaagtcacctgtctaactgtggtgagagcaacaggcctccaaaggaaagaagttgtttccgagtttgtgactggcacagtgacctctttcagtgggaggtttctgactggcaccactgtgtgcttgttccttacgctcgcggtgaagtcaagcctcggactgcagagtgtgtgacggctcagcatggactgcagcaccggatggtgcgctgcattcagaagctgaaccgaactgtggttgcaaatgaaatatgcgaacactttgcccttcagcctcctacagaacaggcttgcctcattccttgtccccgggattgtgtagtatctgagttcttaccatggtccaactgtagcaagggatgtgggaagaaattgcagcatagaactcgcgcggtcatagctccccctctctttggtggtttgcaatgtccaaatctgactgagtcaagagcctgtgatgctcccatttcctgtcctcttggggaagaggaatatacatttagccttaaggttggaccatggagtaaatgcagactgcctcatcttaaagaaattaatccaagcggaagaactgttctggattttaactctgattcaaatgagcgagtcacctttaaacatcaaagttacaaagcacatcatcattcgaagtcttgggcaatagagataggttatcaaacccggcaggtttcgtgtacaagaagtgatggacaaaatgctatgttaagcctttgccttcaagattccttcccattgactgttcagtcctgcatcatgcccaaagactgtgaaacctcccagtggtcctcctggagcccctgctccaagacatgccgttcagggagtctcttgccaggatttaggagcaggagccggaacgtgaagcacatggctattggaggtggaaaggagtgtcctgaacttcttgagaaagaggcctgcattgttgaaggagaacttctgcagcaatgtcccaggtattcctggagaacttctgaatggaaagaatgccaagtctctctcctcctcgagcagcaggatccccactggcatgtgacgggacccgtgtgtggcggtgggatccagacccgggaggtgtactgtgcccagagcgtaccagcagctgccgcactgagggccaaggaagtctctagacctgtggaaaaggcattatgtgtgggacccgccccgttgccctctcagctctgcaatatcccttgctctacggactgcatagtatcttcctggtcagcctggggcctgtgcatccatgaaaactgtcatgatcctcaggggaaaaaaggatttagaacgaggcagcgccatgtcctcatggaatctacagggcctgcagggcattgccctcatttggtggagtctgttccttgtgaggatccaatgtgctaccgatggctggcatcagaagggatctgtttccctgatcatggaaaatgtggcctgggacatcgtattctgaaggccgtctgccagaatgaccgcggagaagatgtatcagggagtctttgcccagttccccctcctcctgagaggaagtcttgtgaaattccctgccgaatggactgtgtgctgagcgagtggacggagtggtcatcctgttcccagtcctgttcaaataaaaactcagatgggaaacagaccaggtcaagaactatcctggcactggctggggaaggtggaaagccatgtccccctagtcaggctctccaagagcatcgtttgtgtaatgaccattcctgtatgcagcttcactgggagacatcgccttggggcccttgttctgaggacacattggtaactgcccttaatgcaaccattggctggaatggagaagccacgtgtggtgtaggcattcagactcggagagtcttctgtgtcaagagtcacgtgggacaagtaatgaccaaaagatgtccagattctactcgacctgaaactgtgcgcccctgttttctcccatgcaaaaaagactgtattgtgactgctttcagtgagtggacaccctgcccaaggatgtgccaagcaggaaatgccacagtaaaacagtctcgatacagaatcatcatccaagaagcagccaatggaggccaggaatgcccagataccttatatgaggagagagagtgtgaagatgtttccttgtgtcctgtatatcggtggaagccacagaaatggagcccttgcatcttagtgccagagtctgtctggcagggaataacgggcagcagtgaagcctgtggaaaggggttacaaacaagagctgtctcatgcatctctgatgacaaccggtcagcagaaatgatggaatgcctcaagcagacaaacggcatgcctctccttgtgcaagaatgcacagtcccatgtcgagaagactgcaccttcactgcttggtccaagtttacgccctgctccacgaactgtgaagccacaaaaagtaggcggcgacagctcacagggaaaagcagaaagaaggagaaatgccaggattctgacctttaccctctagtggagacagaactatgtccttgtgatgaatttatatcccaaccttatggaaactggtcagattgcattcttccagaaggcagaagggagcctcaccgaggactgcgggtacaagcagacagcaaagaatgtggagaaggcctgcgctttcgagcagtagcctgttctgataaaaatggaagacctgttgacccctccttctgcagcagctctggttacattcaagaaaaatgtgtcattccctgcccatttgattgcaagttaagcgattggtctagttgggggtcttgcagttcatcttgtggaattggagtgagaattcgatccaaatggctaaaagaaaaaccttacaatggaggacgaccatgtcccaaactggatctcaagaatcaggctcaggtacatgaggcagtcccatgttacagtgagtgcaatcagtattcctgggttgtagaacactggtcttcatgcaaaatcaacaatgagctgaggtccctgcgctgtggaggaggaacacaatctaggaaaatcagatgtgtgaatactgcggatggtgaaggtggagcagtggatagcaacctgtgcaaccaggatgaaattcccccagaaacccagtcctgttctcttatgtgtcccaatgagtgtgtcatgtctgagtggggactttggagcaaatgcccacagtcatgcgatccccacacaatgcagagaagaactcgccacctgctaagaccatcactgaactcaaggacttgtgctgaagactcacaggtgcagccttgcctcctgaatgaaaattgcttccagttccagtacaatctaacagagtggagcacatgccagctgagtgaaaacgcaccctgtggtcaaggcgtcaggacccgcctgctaagctgtgtgtgcagtgatggcaagccagtcagcatggaccaatgtgagcagcataatttggagaagccccagagaatgagcattccctgcttggtggaatgcgtggtcaactgtcagctctcagggtggacggcttggacagagtgttcacagacctgtggccatggaggtcgaatgagccggactcgatttatcattatgccaacccaaggagaaggacggccatgccccacagagcttacccaggagaaaacctgcccagtgaccccctgctacagctgggtccttggcaactggtctgcatgtaaattggagggtggagactgtggggaaggagttcagatccgcagcctttcctgcatggtccacagtggttcaatatctcatgcagctggacgtgtcgaggatgcactgtgtggagaaatgccctttcaggacagcatcctgaagcagctgtgttctgtgccttgcccaggagactgccatttaacagaatggtcagagtggagcacatgtgaattaacctgcattgatggaagaagctttgagactgtgggccgccagtctagatcaaggacttttataattcagtcttttgagaaccaagacagctgcccccaacaggttctagaaacacgcccttgtacaggaggcaaatgttatcactacacatggaaagcaagtctttggaacaataacgaacgaactgtatggtgccagcgttcagatggcgttaatgtcacaggaggctgctcccctcaggcccgtcctgctgccattcggcagtgcattccagcctgcagaaaacctttctcctactgtacacagggtggagtctgtggttgtgagaagggctatacagagataatgaaatcaaatggtttcctggattactgcatgaaagtaccaggctcagaggataaaaaagctgatgtgaaaaacctttctgggaaaaacagacctgtgaattcaaaaatacatgatatttttaaaggatggtctcttcaaccacttgatccagatggccgagtaaaaatttgggtttatggcgtttcaggtggcgcttttctcatcatgattttcctaatatttacttcctaccttgtttgcaagaagccaaaaccacatcaaagcacacctccccaacagaagcctctgaccttagcctacgatggagacttagacatgtaatctgaaaaagaaatccaaatgtagacatcaactgccttaaccgctttctcttttgtagctctcagacttctcagttttttgaggaatctcaagatgtgatatattgggcagaatacaaatattgcaaaagtaatattgcctcaacttcatttggacatggagtcaaggattattaggtctgccattttgttttcaagttgtttgtgggtgtgttttatttttttggttttcccaagggacctgaaaacccttctcttcctgtttggaactgggaggaagaaaacatgatggaattcccacagacttgagtaaacttgatcttcagcagcataatgacaatccagaggaaaatacagtcaaggcatttactctaaatgacgagtctgacactgcattgttacgcactatattagtgcaaagtctttattcttcccatacttcaacactgagttttctagagtttactttggtttaaagactttcaaattggattgcctatttttcatgaacacagagagaatggattaccatttcagaaattctctgagtttttaacctttaaatattgtattttgttttgtagccaggggatgatggcgcttcatgggttgcagctactgaaaatagcagcgtgtgtgtaattgctggactagatgaaagctaggtcatttctgaagggaatgtgtactgaatgttagagtgtacaaatgaaatatgtggttaaattggagaatgaggtagattatttgattactaaaactgtattttaacaaaaacttatccatgtagatatagcattaaccacacacagttgtaattcagtttaatgatgacaaactctgcttttgtaatttcaattttcttatctgaatatttataaattcttctttcaaatttaattatctgacctcatttaatatacatcaaacaccgatcctgtttgtacaaagtcttgcttttataaggtttcaataatatctaaaacaacacattaaaaagctgagaccattttatgaagataattgtttgtaatcataggtgttgaaagtaaaaaggtgccatcttgtggtattgacttgtatttataacaaataaactgctcaaga

SEQ ID NO: 628 - protein, 1592 aa, Homo sapiens
MGLIKQALYYPMRNSVMDISDEQVFIASLESPWGRCTGDCGPGGVQSRAVWCFHVDGWTSHLSNCGESNRPPKERSCFRVCDWHSDLFQWEVSDWHHCVLVPYARGEVKPRTAECVTAQHGLQHRMVRCIQKLNRTVVANEICEHFALQPPTEQACLIPCPRDCVVSEFLPWSNCSKGCGKKLQHRTRAVIAPPLFGGLQCPNLTESRACDAPISCPLGEEEYTFSLKVGPWSKCRLPHLKEINPSGRTVLDFNSDSNERVTFKHQSYKAHHHSKSWAIEIGYQTRQVSCTRSDGQNAMLSLCLQDSFPLTVQSCIMPKDCETSQWSSWSPCSKTCRSGSLLPGFRSRSRNVKHMAIGGGKECPELLEKEACIVEGELLQQCPRYSWRTSEWKECQVSLLLEQQDPHWHVTGPVCGGGIQTREVYCAQSVPAAAALRAKEVSRPVEKALCVGPAPLPSQLCNIPCSTDCIVSSWSAWGLCIHENCHDPQGKKGFRTRQRHVLMESTGPAGHCPHLVESVPCEDPMCYRWLASEGICFPDHGKCGLGHRILKAVCQNDRGEDVSGSLCPVPPPPERKSCEIPCRMDCVLSEWTEWSSCSQSCSNKNSDGKQTRSRTILALAGEGGKPCPPSQALQEHRLCNDHSCMQLHWETSPWGPCSEDTLVTALNATIGWNGEATCGVGIQTRRVFCVKSHVGQVMTKRCPDSTRPETVRPCFLPCKKDCIVTAFSEWTPCPRMCQAGNATVKQSRYRIIIQEAANGGQECPDTLYEERECEDVSLCPVYRWKPQKWSPCILVPESVWQGITGSSEACGKGLQTRAVSCISDDNRSAEMMECLKQTNGMPLLVQECTVPCREDCTFTAWSKFTPCSTNCEATKSRRRQLTGKSRKKEKCQDSDLYPLVETELCPCDEFISQPYGNWSDCILPEGRREPHRGLRVQADSKECGEGLRFRAVACSDKNGRPVDPSFCSSSGYIQEKCVIPCPFDCKLSDWSSWGSCSSSCGIGVRIRSKWLKEKPYNGGRPCPKLDLKNQAQVHEAVPCYSECNQYSWVVEHWSSCKINNELRSLRCGGGTQSRKIRCVNTADGEGGAVDSNLCNQDEIPPETQSCSLMCPNECVMSEWGLWSKCPQSCDPHTMQRRTRHLLRPSLNSRTCAEDSQVQPCLLNENCFQFQYNLTEWSTCQLSENAPCGQGVRTRLLSCVCSDGKPVSMDQCEQHNLEKPQRMSIPCLVECVVNCQLSGWTAWTECSQTCGHGGRMSRTRFIIMPTQGEGRPCPTELTQEKTCPVTPCYSWVLGNWSACKLEGGDCGEGVQIRSLSCMVHSGSISHAAGRVEDALCGEMPFQDSILKQLCSVPCPGDCHLTEWSEWSTCELTCIDGRSFETVGRQSRSRTFIIQSFENQDSCPQQVLETRPCTGGKCYHYTWKASLWNNNERTVWCQRSDGVNVTGGCSPQARPAAIRQCIPACRKPFSYCTQGGVCGCEKGYTEIMKSNGFLDYCMKVPGSEDKKADVKNLSGKNRPVNSKIHDIFKGWSLQPLDPDGRVKIWVYGVSGGAFLIMIFLIFTSYLVCKKPKPHQSTPPQQKPLTLAYDGDLDM

SEQ ID NO: 629 - DNA, 8192 bp, Homo sapiens
gtgataaaactacaaagcagaatacgaagaagacagaggcaaaggcttcttccctcagaccataactcaagaatatgggggtctcgcagtaatttatgctctttgcttttgtcttttcatagttttccttgtatagtttgtcacttagggcatctcctgctgccttcagctgcctaagctgtgggttctctgaagcaggaagcacattataatctgcttttcctttattcttttcatagtcttctttgtattttgctgctgaggaaatttatttggtagattgaaggtttgaacgagagctacagaaacgaaagaaaaagtctgtataagccaatggtgttcgggaagaaaataaccccattgccttgagtttgtaggtgccactactactctgaaaaatggcagatgacgaagactatgaggaggtggtggagtactacacagaagaagtggtttacgaagaggtgccgggagagacaataacaaaaatttatgagactacgacaacaaggacatctgactatgagcaatcagaaacttccaaaccagctctggcacagccagcactggcacagccagcatcagcaaagccggtggagaggaggaaggtcatccggaagaaagtggatccttcaaagttcatgaccccctacattgcacacagtcagaaaatgcaggatctttttagcccaaataaatacaaggagaagtttgagaaaacaaaaggacagccatacgccagcacaacagatactccagaacttcgcagaatcaaaaaagtacaagatcaactcagtgaggttaagtatcgaatggatggtgatgttgctaagactatatgtcacgtagatgaaaaagcaaaggatattgaacatgcaaagaaagtgtcgcagcaagtcagtaaggttttatacaagcagaactgggaagacaccaaggataagtacctgcttcctcctgatgcccctgaacttgtccaggccgttaagaacaccgccatgttcagcaagaaactgtacactgaagactgggaagcagacaaaagtttgttttacccctataatgatagcccggaactgaggagagttgcccaggcccagaaagctctcagtgatgttgcctacaaaaaaggtctcgctgaacagcaagctcaattcacgcctctggccgatcctccagatatagaatttgccaagaaagtaaccaatcaagtgagcaagcaaaaatacaaagaagactatgaaaataaaatcaaaggcaaatggagtgagacaccttgctttgaagttgcaaatgccagaatgaatgctgataacattagcacaaggaaataccaggaagattttgaaaacatgaaagaccagatctacttcatgcagaccgaaacaccagagtataaaatgaataaaaaagctggtgtggcagctagcaaggtaaaatacaaagaagactatgaaaagaataaaggaaaagcagattataatgtgcttcctgcttcagagaacccacagcttaggcagctgaaggcagcaggagatgccctaagtgacaaactatacaaggaaaactatgaaaagacaaaagcaaagagcataaattactgcgagacccccaaattcaagctcgatactgttctgcagaacttcagtagtgataaaaaatataaagattcctacttaaaagatattttgggacattatgtaggcagcttcgaggatccataccattcacactgcatgaaagtcacagctcaaaacagtgataaaaactacaaagcagaatacgaagaagacagaggcaaaggcttcttccctcagaccataactcaagaatatgaagcaattaagaaactagatcagtgtaaagaccacacctacaaagtccatccagataagacaaaattcacccaagttacagactctcctgttctgctacaagcccaagtcaattccaaacaactgagtgacttaaattacaaagcaaaacatgaaagtgaaaagttcaagtgccatatcccccctgatactcctgcttttatccagcacaaagtcaatgcctataacttgagtgataatctttataagcaagactgggagaagagcaaagccaaaaagtttgacattaaagtggatgccattcccctgctggcagccaaagccaacaccaagaacaccagcgatgtgatgtacaagaaagactatgaaaaaaacaaagggaaaatgattggagtcctcagcattaatgacgatcccaagatgctgcactccttgaaggtggccaaaaaccagagtgatagattatacaaggaaaactatgagaagacaaaggcaaagagtatgaattactgtgagaccccaaaatatcaacttgatactcagctgaagaacttcagtgaggctagatataaagacttatatgtaaaggatgttttgggacattatgtaggcagcatggaggacccatatcacacacactgcatgaaagttgcagctcaaaacagtgataaaagttacaaagcagaatatgaagaagataaaggaaaatgctatttccctcagacaataacacaagaatatgacgcaatcaagaagctggaccagtgtaaagatcatacctacaaagttcatccagataagaccaaattcacggcagtcactgattctcctgtactgttgcaagcccagctcaacacgaaacagcttagtgatctgaattacaaagcaaaacatgaaggtgagaggttcaagtgccatataccagcagatgctccacagtttatccaacacagagtcaatgcctataatctgagtgataatgtttataagcaagactgggagaagagcaaagccaagaagtttgacattaaagtggacgccattcccctgttggcagccaaagccaacaccaagaacaccagcgatgtgatgtacaagaaagactatgaaaagagcaaagggaaaatgattggagccctcagcattaatgacgatccaaagatgctgcactccttgaagacagccaaaaaccagagtgatcgcgaatatcgaaaagattatgaaaagtcaaaaactatctacacggcacctcttgatatgctccaagtcactcaagctaagaaatctcaggcaattgccagcgacgttgattataagcacatcttacacagttacagctacccccctgatagcatcaatgtggaccttgccaagaaggcatatgcgctgcagagcgatgttgaatacaaagctgactacaatagctggatgaaaggttgtggctgggtgccttttgggtccttagaaatggaaaaggcaaagcgagcttcagacatcctcaatgagaaaaaatatcgccaacatccagacaccctcaagtttacctcgattgaagatgctccaattacagtacagtctaaaattaaccaggcccagaggagtgatatcgcttacaaagccaaaggagaggaaattattcacaattacaacctgccaccagacctgccccagttcatccaggctaaagttaatgcctacaatatcagtgagaatatgtacaaagcagacttgaaagacttgagcaagaagggatatgacctgagaactgatgcgattcccatcagagctgccaaagctgccaggcaggcggcgagtgacgttcagtacaaaaaagactatgaaaaggctaaagggaaaatggttggcttccaaagtcttcaagatgaccctaaactggttcattatatgaacgtggccaagatacaatcagatcgggagtataaaaaagactatgagaagacaaagtccaaatacaacacgccccatgatatgttcaatgtcgtggcggctaagaaagcccaggatgtggtcagcaatgtcaactataagcattctctccatcattacacctacttgcctgacgccatggacctggagctgtctaagaacatgatgcagatacagagtgataacgtctacaaggaagactacaacaactggatgaaaggcattggctggattcctattggcagtctcgacgtcgaaaaagttaaaaaggccggtgatgctctgaatgaaaagaagtacaggcaacatccagacaccctcaaatttaccagcattgtggactccccagttatggtccaggcaaaacagaacacgaagcaagtcagtgatatcttatacaaggctaaaggagaagatgtgaaacataaatacaccatgagtcctgatcttcctcagtttctccaggccaagtgcaatgcttacagtataagtgacgtctgttataaacgggattggcatgacttaatacgcaagggcaacaatgtgctgggcgatgctattcccatcactgcagccaaggcatcgagaaacattgccagtgattataaatacaaggaagcttatgagaagtcaaagggaaagcatgtgggtttcagaagcctccaggatgatcccaagctggtccactatatgaatgtggcaaagctgcagtctgatcgtgaatacaagaagaactatgagaacaccaaaaccagctaccatacccctggggacatggttacgatcacagctgcaaagatggcccaggatgtcgctaccaatgtcaactacaaacagccattgcatcattacacatacctacctgacgccatgagtcttgagcatacgaggaatgtcaatcaaattcagagtgataatgtgtataaagacgagtataacagcttcttgaagggcatcggatggatccctattggttccctggaggtggagaaggtcaagaaagcaggcgatgcattaaatgagaggaagtatcgacagcacccagataccgtcaagttcacaagtgtgcctgattccatgggcatgatgttggctcagcataacacaaagcagctaagtgatttgaactacaaggtagagggagagaaactgaagcacaagtatactattgaccctgaattgcctcagtttattcaagccaaagtcaacgccctcaacatgagtgatgctcattataaagcagattggaagaaaaccattcgcaagggctatgatttgagaccagatgccatcccaattgttgctgcaaaaagttcaaggaatattgctagtgattgcaaatataaggaggcctacgagaaagccaaaggcaagcaagttggatttctcagtcttcaggatgatcctaaactggttcactacatgaatgtggccaaaatccagtctgatcgtgagtacaaaaagggctatgaagccagcaagaccaagtaccacacacctctggatatggtcagtgtgacagctgcaaagaaatctcaggaggttgccaccaacgccaactacagacagtcataccaccactacactctcctgcccgatgccttgaatgtggagcactccaggaatgccatgcagattcagagtgataatctgtacaaatctgacttcaccaattggatgaaagggatcggctgggtgcccatagagtccctggaggtggagaaggcaaagaaagcaggagagattcttagtgagaagaagtatcgccagcaccccgagaagctgaagttcacttacgccatggacacaatggaacaggcacttaacaagagtaacaaactgaacatggacaagaggctctacactgaaaaatggaacaaggacaagaccaccattcatgtcatgcctgacacaccggatattttactctccagagtaaaccaaatcaccatgagtgataaactgtacaaagctggctgggaagaggaaaagaagaaaggatatgacctgaggcctgatgccattgcaataaaggctgcaagagcctctagagacattgccagtgattacaaatacaagaaagcctatgaacaagccaaagggaaacacattggcttccggagcctggaagatgaccccaagctggtgcacttcatgcaagtggccaagatgcagtcagaccgggaatacaagaagggatatgagaaatccaagacctccttccacaccccggtggacatgctcagtgtggtggcagccaagaagtctcaggaagtggccaccaatgccaactacaggaacgtgatccatacctacaacatgcttcctgatgccatgagctttgaattggccaaaaatatgatgcagattcaaagtgataatcagtacaaggctgactatgctgacttcatgaagggcattggatggctccctctgggctccctggaagcagagaaaaacaagaaagccatggagattattagtgaaaagaagtaccgccagcacccagacactttgaagtattccacactcatggactcgatgaacatggttttggcccagaataatgcaaaaattatgaacgaacatctctacaaacaagcatgggaggctgacaaaaccaaagtccacatcatgcctgatatcccccagattattttggcaaaggcaaatgcaattaatataagtgataaactctacaaactttccttggaagagtctaaaaagaaaggctatgatctcagacctgatgcaattcctatcaaagctgccaaggcttccagagatattgcaagtgattataaatacaagtacaattatgaaaaagggaaggggaaaatggttggtttccgcagtctcgaggatgatcccaaattagtccattccatgcaagtggctaagatgcaatctgatcgggagtacaagaaaaactatgagaacacaaagaccagctaccacacccctgccgacatgctcagtgtcacggctgcaaaggatgcccaagccaacatcaccaacactaactacaagcacctgattcacaagtacatcctccttccagatgcaatgaacattgagctgaccaggaatatgaatcgcatacagagtgataatgaatataagcaagattacaatgaatggtacaaagggcttggctggagtccagcaggttctctggaagtggagaaggccaagaaagcaactgaatatgccagtgatcagaaataccgccagcacccgagcaacttccagtttaagaagctgactgattccatggacatggtgcttgccaagcagaatgcacataccatgaacaagcatttatacaccattgattggaataaagataagaccaagattcatgtgatgcctgatacaccagatattttacaagccaagcagaatcaaacactgtatagtcagaaactctataaacttggatgggaagaagctttgaagaaaggctatgatctcccagttgatgcaatttctgtacagctagctaaagcttcaagagacattgctagtgattataaatacaaacaaggctaccgaaagcaacttggccaccatgttggattccggagtctgcaagatgacccaaaacttgtgttgtccatgaatgtagccaaaatgcagagtgaaagagaatacaagaaggactttgagaagtggaaaactaagttctccagcccagtggacatgttgggagtggtactggccaagaagtgtcaggagttggttagtgacgtggactacaagaactacctgcatcagtggacatgtctgcctgatcagaacgatgttgtgcaagctaagaaagtttatgaactgcaaagtgagaatctatataaatctgaccttgagtggctgagaggcataggatggagtcccttgggttctttagaggcagaaaagaacaagcgggcttcggaaatcatcagtgagaagaaatatcgtcagcctccagacagaaacaagttcaccagcattcctgatgccatggatatagttctggcaaagacaaatgccaaaaataggagtgatagactttatagagaagcttgggacaaagacaagactcagatccacatcatgcctgatacacctgacattgttctggctaaagcaaacttaatcaacacaagtgataaactctaccgaatgggttatgaggagctgaagagaaaaggttacgatcttcctgttgatgccataccaatcaaagcagcaaaagcctcccgggaaattgccagtgaatacaagtacaaggaaggctttcgcaagcagctcggccaccacattggtgcccggaacattgaagatgaccccaagatgatgtggtccatgcatgtggccaagatccagagtgacagggagtacaagaaggactttgagaagtggaagacc

SEQ ID NO: 630 - protein, 6669 aa, Homo sapiens
MADDEDYEEVVEYYTEEVVYEEVPGETITKIYETTTTRTSDYEQSETSKPALAQPALAQPASAKPVERRKVIRKKVDPSKFMTPYIAHSQKMQDLFSPNKYKEKFEKTKGQPYASTTDTPELRRIKKVQDQLSEVKYRMDGDVAKTICHVDEKAKDIEHAKKVSQQVSKVLYKQNWEDTKDKYLLPPDAPELVQAVKNTAMFSKKLYTEDWEADKSLFYPYNDSPELRRVAQAQKALSDVAYKKGLAEQQAQFTPLADPPDIEFAKKVTNQVSKQKYKEDYENKIKGKWSETPCFEVANARMNADNISTRKYQEDFENMKDQIYFMQTETPEYKMNKKAGVAASKVKYKEDYEKNKGKADYNVLPASENPQLRQLKAAGDALSDKLYKENYEKTKAKSINYCETPKFKLDTVLQNFSSDKKYKDSYLKDILGHYVGSFEDPYHSHCMKVTAQNSDKNYKAEYEEDRGKGFFPQTITQEYEAIKKLDQCKDHTYKVHPDKTKFTQVTDSPVLLQAQVNSKQLSDLNYKAKHESEKFKCHIPPDTPAFIQHKVNAYNLSDNLYKQDWEKSKAKKFDIKVDAIPLLAAKANTKNTSDVMYKKDYEKNKGKMIGVLSINDDPKMLHSLKVAKNQSDRLYKENYEKTKAKSMNYCETPKYQLDTQLKNFSEARYKDLYVKDVLGHYVGSMEDPYHTHCMKVAAQNSDKSYKAEYEEDKGKCYFPQTITQEYDAIKKLDQCKDHTYKVHPDKTKFTAVTDSPVLLQAQLNTKQLSDLNYKAKHEGERFKCHIPADAPQFIQHRVNAYNLSDNVYKQDWEKSKAKKFDIKVDAIPLLAAKANTKNTSDVMYKKDYEKSKGKMIGALSINDDPKMLHSLKTAKNQSDREYRKDYEKSKTIYTAPLDMLQVTQAKKSQAIASDVDYKHILHSYSYPPDSINVDLAKKAYALQSDVEYKADYNSWMKGCGWVPFGSLEMEKAKRASDILNEKKYRQHPDTLKFTSIEDAPITVQSKINQAQRSDIAYKAKGEEIIHNYNLPPDLPQFIQAKVNAYNISENMYKADLKDLSKKGYDLRTDAIPIRAAKAARQAASDVQYKKDYEKAKGKMVGFQSLQDDPKLVHYMNVAKIQSDREYKKDYEKTKSKYNTPHDMFNVVAAKKAQDVVSNVNYKHSLHHYTYLPDAMDLELSKNMMQIQSDNVYKEDYNNWMKGIGWIPIGSLDVEKVKKAGDALNEKKYRQHPDTLKFTSIVDSPVMVQAKQNTKQVSDILYKAKGEDVKHKYTMSPDLPQFLQAKCNAYSISDVCYKRDWHDLIRKGNNVLGDAIPITAAKASRNIASDYKYKEAYEKSKGKHVGFRSLQDDPKLVHYMNVAKLQSDREYKKNYENTKTSYHTPGDMVTITAAKMAQDVATNVNYKQPLHHYTYLPDAMSLEHTRNVNQIQSDNVYKDEYNSFLKGIGWIPIGSLEVEKVKKAGDALNERKYRQHPDTVKFTSVPDSMGMMLAQHNTKQLSDLNYKVEGEKLKHKYTIDPELPQFIQAKVNALNMSDAHYKADWKKTIRKGYDLRPDAIPIVAAKSSRNIASDCKYKEAYEKAKGKQVGFLSLQDDPKLVHYMNVAKIQSDREYKKGYEASKTKYHTPLDMVSVTAAKKSQEVATNANYRQSYHHYTLLPDALNVEHSRNAMQIQSDNLYKSDFTNWMKGIGWVPIESLEVEKAKKAGEILSEKKYRQHPEKLKFTYAMDTMEQALNKSNKLNMDKRLYTEKWNKDKTTIHVMPDTPDILLSRVNQITMSDKLYKAGWEEEKKKGYDLRPDAIAIKAARASRDIASDYKYKKAYEQAKGKHIGFRSLEDDPKLVHFMQVAKMQSDREYKKGYEKSKTSFHTPVDMLSVVAAKKSQEVATNANYRNVIHTYNMLPDAMSFELAKNMMQIQSDNQYKADYADFMKGIGWLPLGSLEAEKNKKAMEIISEKKYRQHPDTLKYSTLMDSMNMVLAQNNAKIMNEHLYKQAWEADKTKVHIMPDIPQIILAKANAINISDKLYKLSLEESKKKGYDLRPDAIPIKAAKASRDIASDYKYKYNYEKGKGKMVGFRSLEDDPKLVHSMQVAKMQSDREYKKNYENTKTSYHTPADMLSVTAAKDAQANITNTNYKHLIHKYILLPDAMNIELTRNMNRIQSDNEYKQDYNEWYKGLGWSPAGSLEVEKAKKATEYASDQKYRQHPSNFQFKKLTDSMDMVLAKQNAHTMNKHLYTIDWNKDKTKIHVMPDTPDILQAKQNQTLYSQKLYKLGWEEALKKGYDLPVDAISVQLAKASRDIASDYKYKQGYRKQLGHHVGFRSLQDDPKLVLSMNVAKMQSEREYKKDFEKWKTKFSSPVDMLGVVLAKKCQELVSDVDYKNYLHQWTCLPDQNDVVQAKKVYELQSENLYKSDLEWLRGIGWSPLGSLEAEKNKRASEIISEKKYRQPPDRNKFTSIPDAMDIVLAKTNAKNRSDRLYREAWDKDKTQIHIMPDTPDIVLAKANLINTSDKLYRMGYEELKRKGYDLPVDAIPIKAAKASREIASEYKYKEGFRKQLGHHIGARNIEDDPKMMWSMHVAKIQSDREYKKDFEKWKTKFSSPVDMLGVVLAYKCQTLVSDVDYKNYLHQWTCLPDQSDVIHARQAYDLQSDNLYKSDLQWLKGIGWMTSGSLEDEKNKRATQILSDHVYRQHPDQFKFSSLMDSIPMVLAKNNAITMNHRLYTEAWDKDKTTVHIMPDTPEVLLAKQNKVNYSEKLYKLGLEEAKRKGYDMRVDAIPIKAAKASRDIASEFKYKEGYRKQLGHHIGARAIRDDPKMMWSMHVAKIQSDREYKKDFEKWKTKFSSPVDMLGVVLAKKCQTLVSDVDYKNYLHQWTCLPDQSDVIHARQAYDLQSDNMYKSDLQWMRGIGWVSIGSLDVEKCKRATEILSDKIYRQPPDRFKFTSVTDSLEQVLAKNNALNMNKRLYTEAWDKDKTQIHIMPDTPEIMLARQNKINYSETLYKLANEEAKKKGYDLRSDAIPIVAAKASRDVISDYKYKDGYRKQLGHHIGARNIEDDPKMMWSMHVAKIQSDREYKKDFEKWKTKFSSPVDMLGVVLAKKCQTLVSDVDYKNYLHEWTCLPDQNDVIHARQAYDLQSDNIYKSDLQWLRGIGWVPIGSMDVVKCKRAAEILSDNIYRQPPDKLKFTSVTDSLEQVLAKNNALNMNKRLYTEAWDKDKTQVHIMPDTPEIMLARQNKINYSESLYRQAMEEAKKEGYDLRSDAIPIVAAKASRDIASDYKYKEAYRKQLGHHIGARAVHDDPKIMWSLHIAKVQSDREYKKDFEKYKTRYSSPVDMLGIVLAKKCQTLVSDVDYKHPLHECICLPDQNDIIHARKAYDLQSDNLYKSDLEWMKGIGWVPIDSLEVVRAKRAGELLSDTIYRQRPETLKFTSITDTPEQVLAKNNALNMNKRLYTEAWDNDKKTIHVMPDTPEIMLAKLNRINYSDKLYKLALEESKKEGYDLRLDAIPIQAAKASRDIASDYKYKEGYRKQLGHHIGARNIKDDPKMMWSIHVAKIQSDREYKKEFEKWKTKFSSPVDMLGVVLAKKCQILVSDIDYKHPLHEWTCLPDQNDVIQARKAYDLQSDAIYKSDLEWLRGIGWVPIGSVEVEKVKRAGEILSDRKYRQPADQLKFTCITDTPEIVLAKNNALTMSKHLYTEAWDADKTSIHVMPDTPDILLAKSNSANISQKLYTKGWDESKMKDYDLRADAISIKSAKASRDIASDYKYKEAYEKQKGHHIGAQSIEDDPKIMCAIHAEKIQSEREYKKEFQKWKTKFSSPVDMLSILLAKKCQTLVTDIYYRNYLHEWTCMPDQNDIIQAKKAYDLQSDALYKADLEWLRGIGWMPQGSPEVLRVKNAQNIFCDSVYRTPVVNLKYTSIVDTPEVVLAKSNAENISIPKYREVWDKDKTSIHIMPDTPEINLARANALNVSNKLYREGWDEMKAGCDVRLDAIPIQAAKASREIASDYKYKLDHEKQKGHYVGTLTARDDNKIRWALIADKLQNEREYRLDWAKWKAKIQSPVDMLSILHSKNSQALVSDMDYRNYLHQWTCMPDQNDVIQAKKAYELQSDNVYKADLEWLRGIGWMPNDSVSVNHAKHAADIFSEKKYRTKIETLNFTPVDDRVDYVTAKQSGEILDDIKYRKDWNATKSKYTLTETPLLHTAQEAARILDQYLYKEGWERQKATGYILPPDAVPFVHAHHCNDVQSELKYKAEHVKQKGHYVGVPTMRDDPKLVWFEHAGQIQNERLYKEDYHKTKAKINIPADMVSVLAAKQGQTLVSDIDYRNYLHQWMCHPDQNDVIQARKAYDLQSDNVYRADLEWLRGIGWIPLDSVDHVRVTKNQEMMSQIKYKKNALENYPNFTSVVDPPEIVLAKINSVNQSDVKYKETFNKAKGKYTFSPDTPHISHSKDMGKLYSTILYKGAWEGTKAYGYTLDERYIPIVGAKHADLVNSELKYKETYEKQKGHYLAGKVIGEFPGVVHCLDFQKMRSALNYRKHYEDTKANVHIPNDMMNHVLAKRCQYILSDLEYRHYFHQWTSLLEEPNVIRVRNAQEILSDNVYKDDLNWLKGIGCYVWDTPQILHAKKSYDLQSQLQYTAAGKENLQNYNLVTDTPLYVTAVQSGINASEVKYKENYHQIKDKYTTVLETVDYDRTRNLKNLYSSNLYKEAWDRVKATSYILPSSTLSLTHAKNQKHLASHIKYREEYEKFKALYTLPRSVDDDPNTARCLRVGKLNIDRLYRSVYEKNKMKIHIVPDMVEMVTAKDSQKKVSEIDYRLRLHEWICHPDLQVNDHVRKVTDQISDIVYKDDLNWLKGIGCYVWDTPEILHAKHAYDLRDDIKYKAHMLKTRNDYKLVTDTPVYVQAVKSGKQLSDAVYHYDYVHSVRGKVAPTTKTVDLDRALHAYKLQSSNLYKTSLRTLPTGYRLPGDTPHFKHIKDTRYMSSYFKYKEAYEHTKAYGYTLGPKDVPFVHVRRVNNVTSERLYRELYHKLKDKIHTTPDPPEIRQVKKTQEAVSELIYKSDFFKMQGHMISLPYTPQVIHCRYVGDITSDIKYKEDLQVLKGFGCFLYDTPDMVRSRHLRKLWSNYLYTDKAREMRDKYKVVLDTPEYRKVQELKTHLSELVYRAAGKKQKSIFTSVPDTPDLLRAKRGQKLQSQYLYVELATKERPHHHAGNQTTALKHAKDVKDMVSEKKYKIQYEKMKDKYTPVPDTPILIRAKRAYWNASDLRYKETFQKTKGKYHTVKDALDIVYHRKVTDDISKIKYKENYMSQLGIWRSIPDRPEHFHHRAVTDTVSDVKYKEDLTWLKGIGCYAYDTPDFTLAEKNKTLYSKYKYKEVFERTKSDFKYVADSPINRHFKYATQLMNEKKYRADYEQRKDKYHLVVDEPRHLLAKTRSDQISQIKYRKNYEKSKDKFTSIVDTPEHLRTTKVNKQISDILYKLEYNKAKPRGYTTIHDTPMLLHVRKVKDEVSDLKYKEVYQRNKSNCTIEPDAVHIKAAKDAYKVNTNLDYKKQYEANKAHWKWTPDRPDFLQAAKSSLQQSDFEYKLDREFLKGCKLSVTDDKNTVLALRNTLIESDLKYKEKHVKERGTCHAVPDTPQILLAKTVSNLVSENKYKDHVKKHLAQGSYTTLPETRDTVHVKEVTKHVSDTNYKKKFVKEKGKSNYSIMLEPPEVKHAMEVAKKQSDVAYRKDAKENLHYTTVADRPDIKKATQAAKQASEVEYRAKHRKEGSHGLSMLGRPDIEMAKKAAKLSSQVKYRENFDKEKGKTPKYNPKDSQLYKVMKDANNLASEVKYKADLKKLHKPVTDMKESLIMNHVLNTSQLASSYQYKKKYEKSKGHYHTIPDNLEQLHLKEATELQSIVKYKEKYEKERGKPMLDFETPTYITAKESQQMQSGKEYRKDYEESIKGRNLTGLEVTPALLHVKYATKIASEKEYRKDLEESIRGKGLTEMEDTPDMLRAKNATQILNEKEYKRDLELEVKGRGLNAMANETPDFMRARNATDIASQIKYKQSAEMEKANFTSVVDTPEIIHAQQVKNLSSQKKYKEDAEKSMSYYETVLDTPEIQRVRENQKNFSLLQYQCDLKNSKGKITVVQDTPEILRVKENQKNFSSVLYKEDVSPGTAIGKTPEMMRVKQTQDHISSVKYKEAIGQGTPIPDLPEVKRVKETQKHISSVMYKENLGTGIPTTVTPEIERVKRNQENFSSVLYKENLGKGIPTPITPEMERVKRNQENFSSVLYKENMGKGTPLPVTPEMERVKHNQENISSVLYKENVGKATATPVTPEMQRVKRNQENISSVLYKENLGKATPTPFTPEMERVKRNQENFSSVLYKENMRKATPTPVTPEMERAKRNQENISSVLYSDSFRKQIQGKAAYVLDTPEMRRVRETQRHISTVKYHEDFEKHKGCFTPVVTDPITERVKKNMQDFSDINYRGIQRKVVEMEQKRNDQDQETITGLRVWRTNPGSVFDYDPAEDNIQSRSLHMINVQAQRRSREQSRSASALSVSGGEEKSEHSEAPDHHLSTYSDGGVFAVSTAYKHAKTTELPQQRSSSVATQQTTVSSIPSHPSTAGKIFRAMYDYMAADADEVSFKDGDAIINVQAIDEGWMYGTVQRTGRTGMLPANYVEAI

SEQ ID NO: 631 - DNA, 2913 bp, Homo sapiens
cccgcccgcgtggtcgtcgccaccgcagccgcccgagaggagctgggggaggacggtggcccgcgaggctcgtcgcagacaacgcggcggcgatgtccgcgagccaggcgacacaaagttatcattgttgggctggataatgcagggaaaactaccattctttaccaattttctatgaatgaagttgtacatacatctcctacaataggaagtaatgtagaagagatagtgattaataatacacgtttcctaatgtgggatattggtggccaagaatctcttcgttcttcctggaacacttactatactaacacagagtttgtaatagttgttgtggacagtacagacagagagaggatttctgtaactagagaagaactctataaaatgttagcgcatgaggacctaagaaaagctggattgctgatttttgctaataaacaagatgttaaagaatgcatgactgtagcagaaatctcccagtttttgaagctaacttctattaaagatcaccagtggcatatccaggcatgctgtgctctaactggcgagggattgtgccaaggacttgaatggatgatgtcacgacttaagattagatgatctctactgacctcttctcatagattttgtataaatgaagtgctggactttacctgaaagctgcaaaaattaatggtttagatatatttataataaactgatttaaactttttctataagaagaaaaattaagaccacttatttgaaaacaaagatgaagtctcaccttccagtttgctttctcattagttttttccaaagtaagttattgaagctgtgattgacatttttctcataatgaatcctctcaggacattgtgtagcctatggtaagtacaaagggagaggaagacattttgaattttaagagctttattatcagtttaaccctccctagttgaatgttattttcttcttgttccattaagtcagaatacaaatcagcacagatattcgaatgtttccaatattttaaaatgtaatgttacttatgaaaagtattttgcttaaggttgtgtgtgtattgtgtatatacctcaagttcaagttaatggcattgatttatgttccagacaaaaataacacaaataataatatccttcgttataaccacaatgagataagtattggcattagtgttcagtgccattttatactttctctctgtgttctctgtattgtactaaccaacctcccaaatcgctgagctgcttgtttaaaaaaaaaaaaaaggaaaaggaaaaagcatgacattgtgtatcgattttttgttgttgaccaaaatcacacacatggaaacatgtaattcaacagagtgggaaagctagcagattcttggcttagtattactaataggcaggattgtacaatgagcaactatcagattattcctttcagtggttcttatggcatctaaattactgaataaattattaatccattaatcagtgaatcaaattatgattacaattatcaaatgaatgctcagcattaattgaaaactgttttgtgaaacatgtctacccagaaaagtagcattctataaatactattaaacaacttagctatattatttttaagtattaaattatatgtcaagcagttaaagtgaatttcagagtaaaagtaaggcatgtttctgagcaacattgataatttcttaatttgcaaatttcttcttattttggtacttggaatatagtgtgagattttttatttctaaattttgttgtatcttctattacataaatgcattgacaattataaaatgcaagtgttttttgaatgattttaagaatttggcttaaaaattgattgatacaacgtattatttgtactaagaagtaacttgacccaaaacaccttttatgtttgcttagggtatattttttcagtgtctgaaagtcaaaggtattcctgtcacaactgtaaacaaacttatcctaaatgtgttaaaacatattcttgggtactctatttatgtatctttcatgccttgaaaatctgaaggttaatccaaactcacatgttttagcatatttgagaaaaaaaaactaccttcaatatcagccttttaaatttcatgaagattttggtgaggaataatagtatatagtttaagtattgacaaaactttgaaagtttctttctttaaaatgggaaatactcaatatctaaatccaggtcaggcatgggatatcagtatttaacattggatgttttatgttttatatttataatgttcaaaatgcaagcataacatttaatatttgtccacatggttttacaaaagtaaatcttaaattactaagcttttcccatatgttctcgtactttctcaaatccctataaagaattacttgttatctattaaaaatctcctttacccaaatctgtattatggtttcgccagacaaatattatgtgatgtagcccagaaaatccacaccttttgtcctttttatgttttaatttgaataatcatgtgcttagtcccttggattactgccacatcagtttaacacgatatcagcacattcccttgtcatcatcaaggtgttggctcagatttattcttaattggatgtttaaagcatgtactaccttgttacagttggtttagtgtagtggattattgacatgacatcatgagaagatgtgtaattttataccacatttataaaacatgattttgttttctacccttcaaggtaaacattaaaaataaggtggtacttgtgtacttgtacataaaaccaaaattatagttgggaaaaaaataaatttatatatgaaaatgtcaaaatcattttaaaagtattattttcaaataaaatggagaagctggtgaaaagtcatattggcaatttt

SEQ ID NO: 632 - protein, 142 aa, Homo sapiens
MNEVVHTSPTIGSNVEEIVINNTRFLMWDIGGQESLRSSWNTYYTNTEFVIVVVDSTDRERISVTREELYKMLAHEDLRKAGLLIFANKQDVKECMTVAEISQFLKLTSIKDHQWHIQACCALTGEGLCQGLEWMMSRLKIR

SEQ ID NO: 633 - DNA, 3169 bp, Homo sapiens
cccgcccgcgtggtcgtcgccaccgcagccgcccgagaggagctgggggaggacggtggcccgcgaggctcgtcgcagacaacgcggcggcgatgtccgcgagccaggcgagtgccgcggcggcagcggcggggccttgcgcgcggcagggcggcctgggcttcggcctccctccggttccctggaagcgggcccgcgaccagcgcgggagcagcagcagaggcggaggctccagcgcgtctctctcctccccctcagcctgagccgggggaagccaggcggcccgggtgtctggagggggggggtccgctgcccgagaatgggaattctcttcactagaatatggagactgttcaatcaccaggagcacaaagttatcattgttgggctggataatgcagggaaaactaccattctttaccaattttctatgaatgaagttgtacatacatctcctacaataggaagtaatgtagaagagatagtgattaataatacacgtttcctaatgtgggatattggtggccaagaatctcttcgttcttcctggaacacttactatactaacacagagtttgtaatagttgttgtggacagtacagacagagagaggatttctgtaactagagaagaactctataaaatgttagcgcatgaggacctaagaaaagctggattgctgatttttgctaataaacaagatgttaaagaatgcatgactgtagcagaaatctcccagtttttgaagctaacttctattaaagatcaccagtggcatatccaggcatgctgtgctctaactggcgagggattgtgccaaggacttgaatggatgatgtcacgacttaagattagatgatctctactgacctcttctcatagattttgtataaatgaagtgctggactttacctgaaagctgcaaaaattaatggtttagatatatttataataaactgatttaaactttttctataagaagaaaaattaagaccacttatttgaaaacaaagatgaagtctcaccttccagtttgctttctcattagttttttccaaagtaagttattgaagctgtgattgacatttttctcataatgaatcctctcaggacattgtgtagcctatggtaagtacaaagggagaggaagacattttgaattttaagagctttattatcagtttaaccctccctagttgaatgttattttcttcttgttccattaagtcagaatacaaatcagcacagatattcgaatgtttccaatattttaaaatgtaatgttacttatgaaaagtattttgcttaaggttgtgtgtgtattgtgtatatacctcaagttcaagttaatggcattgatttatgttccagacaaaaataacacaaataataatatccttcgttataaccacaatgagataagtattggcattagtgttcagtgccattttatactttctctctgtgttctctgtattgtactaaccaacctcccaaatcgctgagctgcttgtttaaaaaaaaaaaaaaggaaaaggaaaaagcatgacattgtgtatcgattttttgttgttgaccaaaatcacacacatggaaacatgtaattcaacagagtgggaaagctagcagattcttggcttagtattactaataggcaggattgtacaatgagcaactatcagattattcctttcagtggttcttatggcatctaaattactgaataaattattaatccattaatcagtgaatcaaattatgattacaattatcaaatgaatgctcagcattaattgaaaactgttttgtgaaacatgtctacccagaaaagtagcattctataaatactattaaacaacttagctatattatttttaagtattaaattatatgtcaagcagttaaagtgaatttcagagtaaaagtaaggcatgtttctgagcaacattgataatttcttaatttgcaaatttcttcttattttggtacttggaatatagtgtgagattttttatttctaaattttgttgtatcttctattacataaatgcattgacaattataaaatgcaagtgttttttgaatgattttaagaatttggcttaaaaattgattgatacaacgtattatttgtactaagaagtaacttgacccaaaacaccttttatgtttgcttagggtatattttttcagtgtctgaaagtcaaaggtattcctgtcacaactgtaaacaaacttatcctaaatgtgttaaaacatattcttgggtactctatttatgtatctttcatgccttgaaaatctgaaggttaatccaaactcacatgttttagcatatttgagaaaaaaaaactaccttcaatatcagccttttaaatttcatgaagattttggtgaggaataatagtatatagtttaagtattgacaaaactttgaaagtttctttctttaaaatgggaaatactcaatatctaaatccaggtcaggcatgggatatcagtatttaacattggatgttttatgttttatatttataatgttcaaaatgcaagcataacatttaatatttgtccacatggttttacaaaagtaaatcttaaattactaagcttttcccatatgttctcgtactttctcaaatccctataaagaattacttgttatctattaaaaatctcctttacccaaatctgtattatggtttcgccagacaaatattatgtgatgtagcccagaaaatccacaccttttgtcctttttatgttttaatttgaataatcatgtgcttagtcccttggattactgccacatcagtttaacacgatatcagcacattcccttgtcatcatcaaggtgttggctcagatttattcttaattggatgtttaaagcatgtactaccttgttacagttggtttagtgtagtggattattgacatgacatcatgagaagatgtgtaattttataccacatttataaaacatgattttgttttctacccttcaaggtaaacattaaaaataaggtggtacttgtgtacttgtacataaaaccaaaattatagttgggaaaaaaataaatttatatatgaaaatgtcaaaatcattttaaaagtattattttcaaataaaatggagaagctggtgaaaagtcatattggcaatttt

SEQ ID NO: 634 - protein, 179 aa, Homo sapiens
MGILFTRIWRLFNHQEHKVIIVGLDNAGKTTILYQFSMNEVVHTSPTIGSNVEEIVINNTRFLMWDIGGQESLRSSWNTYYTNTEFVIVVVDSTDRERISVTREELYKMLAHEDLRKAGLLIFANKQDVKECMTVAEISQFLKLTSIKDHQWHIQACCALTGEGLCQGLEWMMSRLKIR

SEQ ID NO: 635 - DNA, 2911 bp, Homo sapiens
cccgcccgcgtggtcgtcgccaccgcagccgcccgagaggagctgggggaggacggtggcccgcgaggctcgtcgcagacaacgcggcggcgatgtccgcgagccagagcacaaagttatcattgttgggctggataatgcagggaaaactaccattctttaccaattttctatgaatgaagttgtacatacatctcctacaataggaagtaatgtagaagagatagtgattaataatacacgtttcctaatgtgggatattggtggccaagaatctcttcgttcttcctggaacacttactatactaacacagagtttgtaatagttgttgtggacagtacagacagagagaggatttctgtaactagagaagaactctataaaatgttagcgcatgaggacctaagaaaagctggattgctgatttttgctaataaacaagatgttaaagaatgcatgactgtagcagaaatctcccagtttttgaagctaacttctattaaagatcaccagtggcatatccaggcatgctgtgctctaactggcgagggattgtgccaaggacttgaatggatgatgtcacgacttaagattagatgatctctactgacctcttctcatagattttgtataaatgaagtgctggactttacctgaaagctgcaaaaattaatggtttagatatatttataataaactgatttaaactttttctataagaagaaaaattaagaccacttatttgaaaacaaagatgaagtctcaccttccagtttgctttctcattagttttttccaaagtaagttattgaagctgtgattgacatttttctcataatgaatcctctcaggacattgtgtagcctatggtaagtacaaagggagaggaagacattttgaattttaagagctttattatcagtttaaccctccctagttgaatgttattttcttcttgttccattaagtcagaatacaaatcagcacagatattcgaatgtttccaatattttaaaatgtaatgttacttatgaaaagtattttgcttaaggttgtgtgtgtattgtgtatatacctcaagttcaagttaatggcattgatttatgttccagacaaaaataacacaaataataatatccttcgttataaccacaatgagataagtattggcattagtgttcagtgccattttatactttctctctgtgttctctgtattgtactaaccaacctcccaaatcgctgagctgcttgtttaaaaaaaaaaaaaaggaaaaggaaaaagcatgacattgtgtatcgattttttgttgttgaccaaaatcacacacatggaaacatgtaattcaacagagtgggaaagctagcagattcttggcttagtattactaataggcaggattgtacaatgagcaactatcagattattcctttcagtggttcttatggcatctaaattactgaataaattattaatccattaatcagtgaatcaaattatgattacaattatcaaatgaatgctcagcattaattgaaaactgttttgtgaaacatgtctacccagaaaagtagcattctataaatactattaaacaacttagctatattatttttaagtattaaattatatgtcaagcagttaaagtgaatttcagagtaaaagtaaggcatgtttctgagcaacattgataatttcttaatttgcaaatttcttcttattttggtacttggaatatagtgtgagattttttatttctaaattttgttgtatcttctattacataaatgcattgacaattataaaatgcaagtgttttttgaatgattttaagaatttggcttaaaaattgattgatacaacgtattatttgtactaagaagtaacttgacccaaaacaccttttatgtttgcttagggtatattttttcagtgtctgaaagtcaaaggtattcctgtcacaactgtaaacaaacttatcctaaatgtgttaaaacatattcttgggtactctatttatgtatctttcatgccttgaaaatctgaaggttaatccaaactcacatgttttagcatatttgagaaaaaaaaactaccttcaatatcagccttttaaatttcatgaagattttggtgaggaataatagtatatagtttaagtattgacaaaactttgaaagtttctttctttaaaatgggaaatactcaatatctaaatccaggtcaggcatgggatatcagtatttaacattggatgttttatgttttatatttataatgttcaaaatgcaagcataacatttaatatttgtccacatggttttacaaaagtaaatcttaaattactaagcttttcccatatgttctcgtactttctcaaatccctataaagaattacttgttatctattaaaaatctcctttacccaaatctgtattatggtttcgccagacaaatattatgtgatgtagcccagaaaatccacaccttttgtcctttttatgttttaatttgaataatcatgtgcttagtcccttggattactgccacatcagtttaacacgatatcagcacattcccttgtcatcatcaaggtgttggctcagatttattcttaattggatgtttaaagcatgtactaccttgttacagttggtttagtgtagtggattattgacatgacatcatgagaagatgtgtaattttataccacatttataaaacatgattttgttttctacccttcaaggtaaacattaaaaataaggtggtacttgtgtacttgtacataaaaccaaaattatagttgggaaaaaaataaatttatatatgaaaatgtcaaaatcattttaaaagtattattttcaaataaaatggagaagctggtgaaaagtcatattggcaatttt

SEQ ID NO: 636 - protein, 142 aa, Homo sapiens; identical to SEQ ID NO: 632

SEQ ID NO: 637 - DNA, 3079 bp, Homo sapiens
catgcggcggctctgaacgatgtcctcctcctcctacgccaagaacgggaccgcggacgggccgcactcccccacctcgcaggtggcccgaggcaccacaacccggaggagcaggttgaaaagatccgatggcagcaccacttcgaccagcttcatcctcagacagggttcagcggattcctacacaagcaggccgtctgactccgatgtctctttggaagaggaccgggaagcaattcgacaggagagagaacagcaagcagctatccagcttgagagagcaaagtccaaacctgtagcatttgccgtgaagacaaatgtgagctactgcggcgccctggacgaggatgtgcctgttccaagcacagctatctcctttgatgctaaagactttctacatattaaagagaaatataacaatgattggtggataggaaggctggtgaaagagggctgtgaaattggcttcattccaagtccactcagattggagaacatacggatccagcaagaacaaaaaagaggacgttttcacggagggaaatcaagtggaaattcttcttcaagtcttggagaaatggtatctgggacattccgagcaactcccacatcaacagcaaaacagaagcaaaaagtgacggagcacattcctccttacgatgttgtaccgtcaatgcgtccggtggtgttagtggggccgtcactgaaaggttacgaggtaacagacatgatgcagaaagccctctttgatttcctgaagcacaggtttgatgggaggatttcaataacgagagtgacagctgacatttctcttgctaagaggtctgtcctaaataatcccagcaagagagcaataattgaacgttcgaacacccggtccagcttagcggaagtacaaagtgaaattgaaagaatctttgagttggcaagatctttgcaactggttgttcttgatgcagacaccatcaatcacccagcacaacttataaagacttccttagcaccaattattgttcatgtaaaagtctcatctccaaaggttttacagcggttgattaaatctagaggaaagtcacaaagtaaacacttgaatgttcaactggtggcagctgataaacttgcacaatgccccccagaaatgtttgatgttatattggatgaaaatcagcttgaggatgcatgtgaacatctaggggagtacctggaggcgtactggcgtgccacccacacaaccagtagcacacccatgaccccgctgctgggaaggaatttgggctccacggcactctcaccatatcccacagcaatttctgggttacagagtcagcgaatgaggcacagcaaccactccacagagaactctccaattgaaagacgaagtctaatgacctctgatgaaaattatcacaatgaaagggctcggaagagtaggaaccgcttgtcttccagttctcagcatagccgagatcattaccctcttgtggaagaagattaccctgactcataccaggacacttacaaaccccataggaaccgaggatcacctgggggatatagccatgactcccgacataggctttgagtctaatgaaacaaaaaatattcatctgttgacaatttgccatagcagtgctaggataaaccaatcatcttaacttggctaacatagcacagtatttactgtgctaatgggctgctgtcattttatgctaagtaaggggcaaaaaaaaaaattacattatgcccttgagtctagatggatattagatgcccgatcatatagatatttttaagtgcaacatttacatgataacagtacattttgttttcttcatagatttagacacatcaatttgtaatttagggtacttacaaggcacatataaaataatttcccatgctggaaattccaaatgaccagttccagttggaaccaatttataaaccaattcctgttggaatttgggtgaattgactagaaagtctacttgagcatgttgtaatcaactgaaaaatctggggggaaaaaaaaaaaactaataagaaaatcgaaataccaatagaagccaaatccagctttggtatttatttgctggaagctaaatttacacttaaagttggagtgtataaacattttaatatatgttaatgttgccagaatgacttttcagacttaccaaatgtattgatagtgccaaaaaaaaaatctcagaaatcttaatgcagaaattatatagtctcctcagattttaatatttttatttctttcctggcacagctgttgtattcaaagtgttttgctttttgtttggtcagtactgttagctcatttgaagttggcaaaaacaaatacaaacaagcaaaaaacctcaaatttttttcagcagtgagagagaatagtaaagagaggcccaagcatagctggttatgtgaaatataaaatggggtgttgttctccctttaatcaatctgagcacaactacatacatccaggaatctgaagtcagatagtaaggatgtggtaccaatcctcccgagtgcaatgctaaacacttccaggtgggaattcatctatttcacttaacacaaacgcagggtctgtatttcctgccaacaagattgagtatctttccattgcttctctcagtctctgtctttgaatatctgaatgttctggcccttcaacaaattctttaaatcatgctaaggaatttcgttttatgtggacacactcaactttgatattcaggagatgtttttacaaaatgactaattgaaaaaagttgaaacaaatgattttaaaagcttgcagtaaaaaataaactcatagattcagcaaatatttgttgactaaaattatagcatttttaatgcagaaaattataaagaatttggagattgagctgccttatttctaatgaacactcctcttcatcttattaagtcttcacagtttttccagtggctataattatggaattggtgacctatgttttatattatcaaggaagccttagattcactctgatctaagaaattattgaaattgaccctttttacacaaatgtctttaaaaaaa

SEQ ID NO: 638 - protein, 520 aa, Homo sapiens
MSSSSYAKNGTADGPHSPTSQVARGTTTRRSRLKRSDGSTTSTSFILRQGSADSYTSRPSDSDVSLEEDREAIRQEREQQAAIQLERAKSKPVAFAVKTNVSYCGALDEDVPVPSTAISFDAKDFLHIKEKYNNDWWIGRLVKEGCEIGFIPSPLRLENIRIQQEQKRGRFHGGKSSGNSSSSLGEMVSGTFRATPTSTAKQKQKVTEHIPPYDVVPSMRPVVLVGPSLKGYEVTDMMQKALFDFLKHRFDGRISITRVTADISLAKRSVLNNPSKRAIIERSNTRSSLAEVQSEIERIFELARSLQLVVLDADTINHPAQLIKTSLAPIIVHVKVSSPKVLQRLIKSRGKSQSKHLNVQLVAADKLAQCPPEMFDVILDENQLEDACEHLGEYLEAYWRATHTTSSTPMTPLLGRNLGSTALSPYPTAISGLQSQRMRHSNHSTENSPIERRSLMTSDENYHNERARKSRNRLSSSSQHSRDHYPLVEEDYPDSYQDTYKPHRNRGSPGGYSHDSRHRL

SEQ ID NO: 639 - DNA, 3062 bp, Homo sapiens
agcctcccccagcggatgccggggactcggaccccgcaccctgagagtctttgttaatggatgtggtggcccgaggcaccacaacccggaggagcaggttgaaaagatccgatggcagcaccacttcgaccagcttcatcctcagacagggttcagcggattcctacacaagcaggccgtctgactccgatgtctctttggaagaggaccgggaagcaattcgacaggagagagaacagcaagcagctatccagcttgagagagcaaagtccaaacctgtagcatttgccgtgaagacaaatgtgagctactgcggcgccctggacgaggatgtgcctgttccaagcacagctatctcctttgatgctaaagactttctacatattaaagagaaatataacaatgattggtggataggaaggctggtgaaagagggctgtgaaattggcttcattccaagtccactcagattggagaacatacggatccagcaagaacaaaaaagaggacgttttcacggagggaaatcaagtggaaattcttcttcaagtcttggagaaatggtatctgggacattccgagcaactcccacatcaacagcaaaacagaagcaaaaagtgacggagcacattcctccttacgatgttgtaccgtcaatgcgtccggtggtgttagtggggccgtcactgaaaggttacgaggtaacagacatgatgcagaaagccctctttgatttcctgaagcacaggtttgatgggaggatttcaataacgagagtgacagctgacatttctcttgctaagaggtctgtcctaaataatcccagcaagagagcaataattgaacgttcgaacacccggtccagcttagcggaagtacaaagtgaaattgaaagaatctttgagttggcaagatctttgcaactggttgttcttgatgcagacaccatcaatcacccagcacaacttataaagacttccttagcaccaattattgttcatgtaaaagtctcatctccaaaggttttacagcggttgattaaatctagaggaaagtcacaaagtaaacacttgaatgttcaactggtggcagctgataaacttgcacaatgccccccagaaatgtttgatgttatattggatgaaaatcagcttgaggatgcatgtgaacatctaggggagtacctggaggcgtactggcgtgccacccacacaaccagtagcacacccatgaccccgctgctgggaaggaatttgggctccacggcactctcaccatatcccacagcaatttctgggttacagagtcagcgaatgaggcacagcaaccactccacagagaactctccaattgaaagacgaagtctaatgacctctgatgaaaattatcacaatgaaagggctcggaagagtaggaaccgcttgtcttccagttctcagcatagccgagatcattaccctcttgtggaagaagattaccctgactcataccaggacacttacaaaccccataggaaccgaggatcacctgggggatatagccatgactcccgacataggctttgagtctaatgaaacaaaaaatattcatctgttgacaatttgccatagcagtgctaggataaaccaatcatcttaacttggctaacatagcacagtatttactgtgctaatgggctgctgtcattttatgctaagtaaggggcaaaaaaaaaaattacattatgcccttgagtctagatggatattagatgcccgatcatatagatatttttaagtgcaacatttacatgataacagtacattttgttttcttcatagatttagacacatcaatttgtaatttagggtacttacaaggcacatataaaataatttcccatgctggaaattccaaatgaccagttccagttggaaccaatttataaaccaattcctgttggaatttgggtgaattgactagaaagtctacttgagcatgttgtaatcaactgaaaaatctggggggaaaaaaaaaaaactaataagaaaatcgaaataccaatagaagccaaatccagctttggtatttatttgctggaagctaaatttacacttaaagttggagtgtataaacattttaatatatgttaatgttgccagaatgacttttcagacttaccaaatgtattgatagtgccaaaaaaaaaatctcagaaatcttaatgcagaaattatatagtctcctcagattttaatatttttatttctttcctggcacagctgttgtattcaaagtgttttgctttttgtttggtcagtactgttagctcatttgaagttggcaaaaacaaatacaaacaagcaaaaaacctcaaatttttttcagcagtgagagagaatagtaaagagaggcccaagcatagctggttatgtgaaatataaaatggggtgttgttctccctttaatcaatctgagcacaactacatacatccaggaatctgaagtcagatagtaaggatgtggtaccaatcctcccgagtgcaatgctaaacacttccaggtgggaattcatctatttcacttaacacaaacgcagggtctgtatttcctgccaacaagattgagtatctttccattgcttctctcagtctctgtctttgaatatctgaatgttctggcccttcaacaaattctttaaatcatgctaaggaatttcgttttatgtggacacactcaactttgatattcaggagatgtttttacaaaatgactaattgaaaaaagttgaaacaaatgattttaaaagcttgcagtaaaaaataaactcatagattcagcaaatatttgttgactaaaattatagcatttttaatgcagaaaattataaagaatttggagattgagctgccttatttctaatgaacactcctcttcatcttattaagtcttcacagtttttccagtggctataattatggaattggtgacctatgttttatattatcaaggaagccttagattcactctgatctaagaaattattgaaattgaccctttttacacaaatgtctttaaaaaaa

SEQ ID NO: 640 - protein, 502 aa, Homo sapiens
MDVVARGTTTRRSRLKRSDGSTTSTSFILRQGSADSYTSRPSDSDVSLEEDREAIRQEREQQAAIQLERAKSKPVAFAVKTNVSYCGALDEDVPVPSTAISFDAKDFLHIKEKYNNDWWIGRLVKEGCEIGFIPSPLRLENIRIQQEQKRGRFHGGKSSGNSSSSLGEMVSGTFRATPTSTAKQKQKVTEHIPPYDVVPSMRPVVLVGPSLKGYEVTDMMQKALFDFLKHRFDGRISITRVTADISLAKRSVLNNPSKRAIIERSNTRSSLAEVQSEIERIFELARSLQLVVLDADTINHPAQLIKTSLAPIIVHVKVSSPKVLQRLIKSRGKSQSKHLNVQLVAADKLAQCPPEMFDVILDENQLEDACEHLGEYLEAYWRATHTTSSTPMTPLLGRNLGSTALSPYPTAISGLQSQRMRHSNHSTENSPIERRSLMTSDENYHNERARKSRNRLSSSSQHSRDHYPLVEEDYPDSYQDTYKPHRNRGSPGGYSHDSRHRL

SEQ ID NO: 641 - DNA, 3185 bp, Homo sapiens
gtgctctgtattgggaaggcagataaaatgccaggtctggactgcctctggggataacctcaccctgtgggatgtgaatgaatagcatcttgcctggtaaatccacaggaattgataaggcaggcgcagttctcccaaacaggccttttctctttaagctgtagctgtggtttctgcagcaattttgtttttgccttgaaagaggtgctctggattatcacacctccatgtatgacaatttgtacctgcatggaattgaagactcggaggctggttcagcggattcctacacaagcaggccgtctgactccgatgtctctttggaagaggaccgggaagcaattcgacaggagagagaacagcaagcagctatccagcttgagagagcaaagtccaaacctgtagcatttgccgtgaagacaaatgtgagctactgcggcgccctggacgaggatgtgcctgttccaagcacagctatctcctttgatgctaaagactttctacatattaaagagaaatataacaatgattggtggataggaaggctggtgaaagagggctgtgaaattggcttcattccaagtccactcagattggagaacatacggatccagcaagaacaaaaaagaggacgttttcacggagggaaatcaagtggaaattcttcttcaagtcttggagaaatggtatctgggacattccgagcaactcccacatcaacagcaaaacagaagcaaaaagtgacggagcacattcctccttacgatgttgtaccgtcaatgcgtccggtggtgttagtggggccgtcactgaaaggttacgaggtaacagacatgatgcagaaagccctctttgatttcctgaagcacaggtttgatgggaggatttcaataacgagagtgacagctgacatttctcttgctaagaggtctgtcctaaataatcccagcaagagagcaataattgaacgttcgaacacccggtccagcttagcggaagtacaaagtgaaattgaaagaatctttgagttggcaagatctttgcaactggttgttcttgatgcagacaccatcaatcacccagcacaacttataaagacttccttagcaccaattattgttcatgtaaaagtctcatctccaaaggttttacagcggttgattaaatctagaggaaagtcacaaagtaaacacttgaatgttcaactggtggcagctgataaacttgcacaatgccccccagaaatgtttgatgttatattggatgaaaatcagcttgaggatgcatgtgaacatctaggggagtacctggaggcgtactggcgtgccacccacacaaccagtagcacacccatgaccccgctgctgggaaggaatttgggctccacggcactctcaccatatcccacagcaatttctgggttacagagtcagcgaatgaggcacagcaaccactccacagagaactctccaattgaaagacgaagtctaatgacctctgatgaaaattatcacaatgaaagggctcggaagagtaggaaccgcttgtcttccagttctcagcatagccgagatcattaccctcttgtggaagaagattaccctgactcataccaggacacttacaaaccccataggaaccgaggatcacctgggggatatagccatgactcccgacataggctttgagtctaatgaaacaaaaaatattcatctgttgacaatttgccatagcagtgctaggataaaccaatcatcttaacttggctaacatagcacagtatttactgtgctaatgggctgctgtcattttatgctaagtaaggggcaaaaaaaaaaattacattatgcccttgagtctagatggatattagatgcccgatcatatagatatttttaagtgcaacatttacatgataacagtacattttgttttcttcatagatttagacacatcaatttgtaatttagggtacttacaaggcacatataaaataatttcccatgctggaaattccaaatgaccagttccagttggaaccaatttataaaccaattcctgttggaatttgggtgaattgactagaaagtctacttgagcatgttgtaatcaactgaaaaatctggggggaaaaaaaaaaaactaataagaaaatcgaaataccaatagaagccaaatccagctttggtatttatttgctggaagctaaatttacacttaaagttggagtgtataaacattttaatatatgttaatgttgccagaatgacttttcagacttaccaaatgtattgatagtgccaaaaaaaaaatctcagaaatcttaatgcagaaattatatagtctcctcagattttaatatttttatttctttcctggcacagctgttgtattcaaagtgttttgctttttgtttggtcagtactgttagctcatttgaagttggcaaaaacaaatacaaacaagcaaaaaacctcaaatttttttcagcagtgagagagaatagtaaagagaggcccaagcatagctggttatgtgaaatataaaatggggtgttgttctccctttaatcaatctgagcacaactacatacatccaggaatctgaagtcagatagtaaggatgtggtaccaatcctcccgagtgcaatgctaaacacttccaggtgggaattcatctatttcacttaacacaaacgcagggtctgtatttcctgccaacaagattgagtatctttccattgcttctctcagtctctgtctttgaatatctgaatgttctggcccttcaacaaattctttaaatcatgctaaggaatttcgttttatgtggacacactcaactttgatattcaggagatgtttttacaaaatgactaattgaaaaaagttgaaacaaatgattttaaaagcttgcagtaaaaaataaactcatagattcagcaaatatttgttgactaaaattatagcatttttaatgcagaaaattataaagaatttggagattgagctgccttatttctaatgaacactcctcttcatcttattaagtcttcacagtttttccagtggctataattatggaattggtgacctatgttttatattatcaaggaagccttagattcactctgatctaagaaattattgaaattgaccctttttacacaaatgtctttaaaaaaa

SEQ ID NO: 642 - protein, 486 aa, Homo sapiens
MYDNLYLHGIEDSEAGSADSYTSRPSDSDVSLEEDREAIRQEREQQAAIQLERAKSKPVAFAVKTNVSYCGALDEDVPVPSTAISFDAKDFLHIKEKYNNDWWIGRLVKEGCEIGFIPSPLRLENIRIQQEQKRGRFHGGKSSGNSSSSLGEMVSGTFRATPTSTAKQKQKVTEHIPPYDVVPSMRPVVLVGPSLKGYEVTDMMQKALFDFLKHRFDGRISITRVTADISLAKRSVLNNPSKRAIIERSNTRSSLAEVQSEIERIFELARSLQLVVLDADTINHPAQLIKTSLAPIIVHVKVSSPKVLQRLIKSRGKSQSKHLNVQLVAADKLAQCPPEMFDVILDENQLEDACEHLGEYLEAYWRATHTTSSTPMTPLLGRNLGSTALSPYPTAISGLQSQRMRHSNHSTENSPIERRSLMTSDENYHNERARKSRNRLSSSSQHSRDHYPLVEEDYPDSYQDTYKPHRNRGSPGGYSHDSRHRL

SEQ ID NO: 643 - DNA, 7644 bp, Homo sapiens
agcggaggctttgctgtggcagctgctggagcggcggccgcctcgggagccggaggagaggcagccgcggagcgccgagctggcctcgccccgaggcccggccctgggtgtggggaaccgcgctgaggagctggaaactttcccggcaggagctgactgctgggcaggaacgtctctcaggagaaagagtggaagagaaaattgtgaactaaggccccctgcccccttttcctggtgcatgtgaagttatcaaaaacagaaacaagtgttgaaaatgttaaaggctgtgctgaagaagagccgagagggaggaaagggaggcaagaaggaagcaggaagtgactttggtccagagacttctccagtcctgcaccttgaccacagtgctgactctcctgtgagcagtcttcccacagcagaggacacctatagggtgagcttggccaaaggtgtctcgatgtctctgccttcctcacctttgctgcctcgacagtctcacttggtgcaatcaagagtgaacaaaaaatccccaggtcccgtcaggaagcccaagtatgtggaaagccccagagtgcctggagatgcagttataatgccattcagagaagtagccaagccaacagagcctgatgagcatgaagcaaaggccgataatgaaccgagctgttcgccggcagctcaagaactgttgacaaggctgggatttttactgggagaagggatcccaagtgccacacacataaccattgaagacaaaaatgaaaccatgtgcacagctctgagtcaaggcatcagtccttgctccacactaacaagcagcaccgcatctcctagcaccgatagcccctgctcaaccttgaatagctgtgtcagcaagacggcagccaacaaaagtccctgtgagaccattagcagccctagttccaccctggaaagcaaggacagtggaattatagccacaattacaagttcatccgaaaatgatgaccggagtggctccagtttggaatggaataaagatggaagcctaagattaggggttcagaagggagtgcttcatgaccgcagggcagataactgctccccagtggcagaagaggagaccaccgggtcagcagagagcacgctgcccaaagcagaatcctcagctggagatggtccagtcccttattctcagggctccagctcactaataatgccacggcccaactcagttgcagcaacaagctcaaccaaattggaagatctgagttatttagacgggcagagaaatgctcctctacggacgtcaattagattaccatggcacaatacggccggaggtagggcacaggaagttaaagcacgatttgctccctacaagccacaagacattttgttgaaacccttgttgtttgaagtaccaagcataacaacagactctgtgtttgtgggaagggattggctctttcaccagatagaagaaaacttgaggaacacagaactggcagaaaacagaggcgcggtggtggttggcaatgtgggatttgggaagacggcaatcatttccaagttggtggccctgagctgccacggaagccgcatgaggcagattgcttccaacagcccgggttcatcacctaaaacctctgaccccactcaggatcttcatttcactccgttgctttcaccgagttcttccacaagtgcttccagcacagctaaaacacctcttgggtctatcagtgctgaaaaccagagaccaagagaggatgcagtgaaatatcttgcttctaaggtggtggcctaccactactgccaggctgacaacacgtacacttgcctggtgcccgagtttgtgcacagcatcgcagctttgctctgccggtcccatcagctggccgcctacagagaccttctgataaaggagccccaactacagagcatgctgagcctccgatcctgtgtgcaggacccggtggcagctttcaagaggggagtgctggagccactcacaaacctgagaaatgagcagaaaattcctgaagaagaatacattattttgatagatggcttaaatgaagctgagtttcataaacctgattatggagatacgctttcttcatttattaccaaaattatttctaaatttcctgcctggttgaagttgattgtgactgtaagagcaaattttcaggaaatcataagtgcgctgccatttgtcaagctttccttagatgacttcccagacaacaaagacatccacagtgacctgcacgcctacgtccagcacagggtgcacagcagccaggacatcctcagcaacatctccctgaacggcaaggccgatgccacactcattggaaaagtgagcagccacctggtgctgcggagcctcggctcctacctgtacctcaagctcaccctggaccttttccagaggggccacttggtcattaagagtgccagctacaaggtggtgcccgtgtctctctctgagctctatttgcttcagtgcaacatgaagttcatgacccagtccgcctttgagagggcacttccgattctcaacgtggccctcgcatccctccaccccatgacagacgagcagatctttcaggctattaatgctggccacatccagggggagcagggatgggaagactttcagcagaggatggacgccctctcctgcttcctcattaagaggcgagacaaaacccgcatgttctgccacccgtccttcagggagtggcttgtatggagagcagacggggaaaacacggccttcctgtgtgagcccaggaacgggcacgcgctcttggcattcatgttctcgcgtcaggagggcaagttgaaccgccagcagaccatggagcttggccaccacatcctgaaggcgcacattttcaagggcctcagtaagaagacgggaatttcttcaagccatctccaagccctgtggatcggctacagcaccgaggggctgtccgccgccctggcctctctcaggaatctctatactcccaacgtgaaggtgagccgtctcctgattttgggaggggccaacgtgaactacaggacagaagtgttaaataatgccccaatcctgtgcgtccagtctcaccttggccacgaggaagttgtcactctgctcctggaatttggtgcctgcctggacggaacgtcagagaacggcatgactgccctctgttacgcagcagctgctggccacatgaagctggtgtgtctgctgaccaagaagggagtgagagtggaccacttggataagaagggccagtgtgcgcttgtccacagtgccctacggggccacggtgacattctccagtacctgctgacttgtgagtggtcgccgggtcctccccagccaggcaccctgaggaagagccacgccctgcagcaggcgctgaccgcggcggccagcatgggccacagctcggtggtccagtgcttgctggggatggagaaggaacatgaagtagaagtcaatggcaccgacacattgtggggagaaacagccctgactgccgccgcaggaagagggaagctggaggtctgtgagctgctgctggggcatggagctgctgtgtcgcggacaaacaggagaggggttccacctttgttttgtgcagcacgccaggggcattggcagattgttagactgctgttggaacgcggctgtgatgtgaacctaagtgacaagcaaggccggacgcccctcatggtggctgcttgtgaagggcacttgagcaccgtggaattcctcctttcaaaaggtgcagccctttcttctctagacaaagagggtctgtcagcattaagctgggcttgtctgaaaggtcacagggcagtggtccagtatctggttgaagaaggagctgcaatagaccagacagacaagaatggccgcacacccttggacctggctgccttctatggcgatgccgagactgtgctgtacctggtggagaagggagccgtgatcgagcatgtggaccacagcgggatgcggcccttggacagagccatcggctgccggaacacatctgtagtggtggcgctactcagaaagggagccaagttaggaaatgctgcttgggcgatggccacttccaaacctgatatcttgattatacttttacagaaattaatggaggaaggaaatgtgatgtacaaaaaagggaaaatgaaagaggcagcccagaggtaccagtatgccttaagaaagtttcctcgagaaggattcggagaggacatgagacccttcaatgaattaagggtttccctctatctcaatttgtcgcgatgccgaagaaaaacaaatgactttggcatggcagaggaatttgcttccaaggctctcgaattgaagcccaagtcctatgaagccttttatgccagagcaagagcgaagagaaatagcaggcaattcgtggcagctctggctgacctgcaagaggctgtgaaactctgtcccaccaatcaggaagtcaagaggcttctggcccgcgtagaagaggagtgcaaacaactccagaggagtcaacagcaaaaacagcagggcccgctaccagctccactcaacgactccgagaacgaagaggacaccccaacccctggcttaagtgaccactttcactctgaggagactgaagaggaagaaacttctccccaggaagaatctgtttccccaactcccaggtcccagccatcctcatctgtcccttcctcatacatccgaaaccttcaagaagggttacagtccaaaggaaggccggtatcgccacagagcagggcaggaatcggcaagtccctgagagagcctgtggcccagccagggctgctcctgcagccctccaagcaggcccagatcgtgaaaaccagccagcacctgggctctggccagtcggcagtgagaaatggcagtatgaaagttcagatctcttctcagaaccctcctccaagtcccatgccagggagaatcgctgccactcctgctgggagcagaacccagcatttagagggaacaggtactttcactacaagagctggttgtggccactttggggatcggctgggccccagccagaatgtccgcctgcagtgtggtgagaatggccctgcacaccctttaccaagtaagacgaaaaccacagagaggcttctgtctcattcctccgtggctgtggacgcagcccctccaaaccaaggtgggctggcgacctgcagcgacgtgcgacacccagcttccctcaccagctcaggctcttctggttctccatccagcagcataaagatgtcaagttcaaccagtagtttgacttcgagcagcagtttttcagatggcttcaaggtccaaggaccagatactagaattaaagacaaggttgtaacccacgttcagagcggtacagctgagcacagaccccgcaacacgccgttcatgggcatcatggataagactgcgaggttccaacagcagagcaatcctccaagccgcagctggcactgtccggcaccagaggggctgctgacaaacacgtcttctgcagctggcctgcagtctgctaacactgagaagccctctctcatgcaagtgggaggatataataaccaagccaaaacctgttctgtttctaccctgagtgcaagtgtccacaatggggcacaagtgaaggagctagaagaaagcaagtgccaaattccagtccactctcaagagaacaggataactaagactgtttctcatctgtaccaggaaagtatctccaaacagcagcctcatattagtaatgaagcccacaggagccacctcactgcagccaaaccaaagcgatcatttatagagtcaaatgtgtgaaccttaagaaatccccatttgtggaatttggaaacgtgtgttgactcctggtggtaaattaaatagtttttttcatcagaaaaattattttttagccattttttttctttggggtggatctgatgccattgatatatctaaaatgtgggataaaacttctttaatagctagaaatcaccataaataagaatgctaaacagaattgaaaattatatcaacttaaaattttaagacagcccagaagacattaatgactctcacttatgaaattgtttggcttttgccactttcttccttgcctttgctatatggtagaatcacagaacttacttagagaataaatatgtctattgttcaagagtaacaggtttaactcatgaccaagtgatgtacatccaagtgatgtattctggaaacgatggaattttacagttacagttccattgagtcaaatcccattttatatatacataaaaattaagttctgagtgagttctagctaaatataagtgcgactgtaaacgcagccaatttttttaagcagaatatgagaacacctaagtattctcttcatagcagttcctataaagggattaaacacttatttctgtgttatggttcttattcatatatttttatagcacttttggaacctatatttgtgcttgaaggtgtttttgatatttggaaacagtataagccatttggagtcatgattggtggtcaagtggattcaagctaaaatactaagaccagcattcttagtggcgcttataaattagctctcacctggtttccaaactgcttttaacaatggtagtgctcctggaacaatccttccaagctcctctaaggacaatatttaattcagatactaaaggtaagactggttgttacttttgttttgttgtacaattagtactttatagtcacatgttgtatatattaaatagcccagttttattcagacttgtaaatagaactatttcaatgtagttaatctaaaaacaaaaaagaaaaccccagtcacgatttgcatgttctctgtaagcttcatccatgctggttattgcactgaatgatatattattagggcatgttaacagtataccagtaacagcactttatctcatttatatgaacacctttgaggtgctacttaagtccaagctctgatgtattattcatttgtaaagataaggtacaggaatgaaccttggtttaaaggtatttttatatgaaaatggtgtgttattggaagatgttaaaatgctaatttgagagaagtaggagtgtatctgttttatatgttgggatgtgaaatttattttctaaaattgaggagaaggaagttatatatttgcagaatgttttaaagtgaattgttgtaatgaagttcctgtgaacatcattatggttttgtacaaataggaacctctgatgtcattcttcaacgtttgttcctgtgtgtacaattgtactttgtatgaacagctttatcatttttataggctttccatgagttttgctgtaactactatggcttatttattttctttaatatttgtgaaagtcttactcctttgttagttttgtttctgcacaactactgtacttttccatatggaataaagactattaatagaaaaaaaaaaaaaaaaaaaaaaaaaaaaaaaaaaaaaaaaaaaaaaaaaaaaaaaaaaaaaaaaaaaaaaaaaaaaaaaaaaaaaaaaaaaaaaaaaaaaaaaaaaaaaaaaaaaaaaaaaaaaaaaaaaaaaaaaaaa

SEQ ID NO: 644 - protein, 1861 aa, Homo sapiens
MLKAVLKKSREGGKGGKKEAGSDFGPETSPVLHLDHSADSPVSSLPTAEDTYRVSLAKGVSMSLPSSPLLPRQSHLVQSRVNKKSPGPVRKPKYVESPRVPGDAVIMPFREVAKPTEPDEHEAKADNEPSCSPAAQELLTRLGFLLGEGIPSATHITIEDKNETMCTALSQGISPCSTLTSSTASPSTDSPCSTLNSCVSKTAANKSPCETISSPSSTLESKDSGIIATITSSSENDDRSGSSLEWNKDGSLRLGVQKGVLHDRRADNCSPVAEEETTGSAESTLPKAESSAGDGPVPYSQGSSSLIMPRPNSVAATSSTKLEDLSYLDGQRNAPLRTSIRLPWHNTAGGRAQEVKARFAPYKPQDILLKPLLFEVPSITTDSVFVGRDWLFHQIEENLRNTELAENRGAVVVGNVGFGKTAIISKLVALSCHGSRMRQIASNSPGSSPKTSDPTQDLHFTPLLSPSSSTSASSTAKTPLGSISAENQRPREDAVKYLASKVVAYHYCQADNTYTCLVPEFVHSIAALLCRSHQLAAYRDLLIKEPQLQSMLSLRSCVQDPVAAFKRGVLEPLTNLRNEQKIPEEEYIILIDGLNEAEFHKPDYGDTLSSFITKIISKFPAWLKLIVTVRANFQEIISALPFVKLSLDDFPDNKDIHSDLHAYVQHRVHSSQDILSNISLNGKADATLIGKVSSHLVLRSLGSYLYLKLTLDLFQRGHLVIKSASYKVVPVSLSELYLLQCNMKFMTQSAFERALPILNVALASLHPMTDEQIFQAINAGHIQGEQGWEDFQQRMDALSCFLIKRRDKTRMFCHPSFREWLVWRADGENTAFLCEPRNGHALLAFMFSRQEGKLNRQQTMELGHHILKAHIFKGLSKKTGISSSHLQALWIGYSTEGLSAALASLRNLYTPNVKVSRLLILGGANVNYRTEVLNNAPILCVQSHLGHEEVVTLLLEFGACLDGTSENGMTALCYAAAAGHMKLVCLLTKKGVRVDHLDKKGQCALVHSALRGHGDILQYLLTCEWSPGPPQPGTLRKSHALQQALTAAASMGHSSVVQCLLGMEKEHEVEVNGTDTLWGETALTAAAGRGKLEVCELLLGHGAAVSRTNRRGVPPLFCAARQGHWQIVRLLLERGCDVNLSDKQGRTPLMVAACEGHLSTVEFLLSKGAALSSLDKEGLSALSWACLKGHRAVVQYLVEEGAAIDQTDKNGRTPLDLAAFYGDAETVLYLVEKGAVIEHVDHSGMRPLDRAIGCRNTSVVVALLRKGAKLGNAAWAMATSKPDILIILLQKLMEEGNVMYKKGKMKEAAQRYQYALRKFPREGFGEDMRPFNELRVSLYLNLSRCRRKTNDFGMAEEFASKALELKPKSYEAFYARARAKRNSRQFVAALADLQEAVKLCPTNQEVKRLLARVEEECKQLQRSQQQKQQGPLPAPLNDSENEEDTPTPGLSDHFHSEETEEEETSPQEESVSPTPRSQPSSSVPSSYIRNLQEGLQSKGRPVSPQSRAGIGKSLREPVAQPGLLLQPSKQAQIVKTSQHLGSGQSAVRNGSMKVQISSQNPPPSPMPGRIAATPAGSRTQHLEGTGTFTTRAGCGHFGDRLGPSQNVRLQCGENGPAHPLPSKTKTTERLLSHSSVAVDAAPPNQGGLATCSDVRHPASLTSSGSSGSPSSSIKMSSSTSSLTSSSSFSDGFKVQGPDTRIKDKVVTHVQSGTAEHRPRNTPFMGIMDKTARFQQQSNPPSRSWHCPAPEGLLTNTSSAAGLQSANTEKPSLMQVGGYNNQAKTCSVSTLSASVHNGAQVKELEESKCQIPVHSQENRITKTVSHLYQESISKQQPHISNEAHRSHLTAAKPKRSFIESNV

SEQ ID NO: 645 - DNA, 1811 bp, Homo sapiens
agcggcggtggcggcaggtggggaagcgcggctgggcctgctcgcgcggggcgtctgagccctccatttcccggttctaaccgcgcagcagggcccaaccgggaccttgagtgcggcgaggcgtggctgtttttcttcaaataaagaacatggtgaaactgattcacacattagctgatcatggtgacgatgtcaactgctgtgccttctccttttccctcttggctacttgctccttggacaaaacaattcgcctgtactcgttacgtgactttactgaactgccacattctccattgaagtttcatacctatgctgtccactgctgctgtttctccccttcaggacatattttggcatcgtgttcaacagatggtaccactgtcctatggaatactgaaaatggacagatgctggcagtgatggaacagcctagtggcagccctgtgagggtttgccagttttccccagactccacgtgtttggcatcaggggcagctgatggaactgtggttttgtggaatgcacagtcatacaaattatatagatgtggtagtgttaaagatggctccttggcggcatgtgcattttctcctaatggaagcttctttgtcactggctcctcatgtggtgatttaacagtgtgggatgataaaatgaggtgtctgcatagtgaaaaagcacatgatcttggaattacctgctgcgatttttcttcacagccagtttctgatggagaacaaggtcttcagttttttcgactggcatcatgtggtcaggattgccaagtcaaaatttggattgtttcttttacccatatcttaggttttgaattaaaatataaaagtacactgagtgggcactgtgctcctgttctggcttgtgctttttcccatgatgggcagatgctagtctcagggtcagtggataagtctgtcatagtatatgatactaatactgagaatatacttcacacattgactcagcacaccaggtatgtcacaacttgtgcttttgcacctaatacccttttacttgctactggttcaatggacaaaacagtgaacatctggcaatttgacctggaaacactttgccaagcaaggagcacagaacatcagctgaagcaatttaccgaagattggtcagaggaggatgtctcaacatggctttgtgcacaagatttaaaagatcttgttggtattttcaagatgaataacattgatggaaaagaactgttgaatcttacaaaagaaagtctggctgatgatttgaaaattgaatctctaggactgcgtagtaaagtgctgaggaaaattgaagagctcaggaccaaggttaaatccctttcttcaggaattcctgatgaatttatatgtccaataactagagaacttatgaaagatccggtcatcgcatcagatggctattcatatgaaaaggaagcaatggaaaattggatcagcaaaaagaaacgtacaagtcccatgacaaatcttgttcttccttcagcggtacttacaccaaataggactctgaaaatggccatcaatagatggctggagacacaccaaaagtaaaattgttgatattgtattatttatattttcagtgatctcatttgaatgatttataggtaaatactaatcagacattattaaaagcaaaacaggaaaaaggtaaacttcttaaatttagttacctataaaaattgtcaattttcattctttaaaaacacatggacttactataaaagcctttttgtactagtgaaaagaatcttcagctatatagaaataaagttatacttt

SEQ ID NO: 646 - protein, 476 aa, Homo sapiens
MVKLIHTLADHGDDVNCCAFSFSLLATCSLDKTIRLYSLRDFTELPHSPLKFHTYAVHCCCFSPSGHILASCSTDGTTVLWNTENGQMLAVMEQPSGSPVRVCQFSPDSTCLASGAADGTVVLWNAQSYKLYRCGSVKDGSLAACAFSPNGSFFVTGSSCGDLTVWDDKMRCLHSEKAHDLGITCCDFSSQPVSDGEQGLQFFRLASCGQDCQVKIWIVSFTHILGFELKYKSTLSGHCAPVLACAFSHDGQMLVSGSVDKSVIVYDTNTENILHTLTQHTRYVTTCAFAPNTLLLATGSMDKTVNIWQFDLETLCQARSTEHQLKQFTEDWSEEDVSTWLCAQDLKDLVGIFKMNNIDGKELLNLTKESLADDLKIESLGLRSKVLRKIEELRTKVKSLSSGIPDEFICPITRELMKDPVIASDGYSYEKEAMENWISKKKRTSPMTNLVLPSAVLTPNRTLKMAINRWLETHQK

SEQ ID NO: 647 - DNA, 8145 bp, Homo sapiens
acttggttcatgaagccttcgcctagaagtgaagctgctgaacaaaccttgagaagaatcatctcctgcttcaatctgctgctggataggaactaatcagagagagagaggcggaagacggagaaggagggagtcgaaggctttcccgatcacaaatctcacctccactacaactctctttatacttttcttgcagaaataataatagaaataaggaggtggtggggtttccaaaaatcttaaccttcaaccatctggggaaaaggcaaaaatcccatctaccgcaactctcagttcgagagtaaaggtttcccaacagtgatgtcacaagattgaccacattgatcacaatatggagtctggagaacggttaccatcctcagcagcctcctctactacaccaacttcatcttcgacaccttctgtggcttcagtagtttcaaaaggtggcctttccactggagttgcttcacttagctctacaatcaacccatgtggacatttattcagaacagctggggatcaaccgtttaacctgtccacagtgtcgagtgccttcccaatggtcagccacccagtctttggtctacattcagccagctcagggcattcagaatttggtggtttggggacacttggtacacccacagccttagccgcacatccccaactagcatcttttccaggtgcagaatggtggcgaacaactgatgctcatactcgtacaggagcaaccttctttccaccattactgggaattccaccactatttgctcccccagcccagaatcatgattcttcttcattccattcaaggacttcgggaaaaagtaatcgaaatggtcccgaaaaaggtgtaaatgggtcaataaatggaagtaatacatcatctgtaattggtatcaacacatctgtactatccactactgcttcaagttccatgggacaaactaaaagtacaagctcaggtggaggaaatcgaaaatgtaatcaggaacaaagcaaaaaccagcctttggatgctagagttgacaaaatcaaagataagaaaccaaggaagaaagcaatggaaagttctagcaacagtgatagtgattcaggcacatcatcagacacctcaagtgaaggcattagtagcagtgattcagatgatctagaagaagatgaagaagaagaagatcaaagtattgaagaaagtgaagatgatgattctgattcagagagtgaagcacaacataaaagtaacaaccaggtgctattacatggtatttcagacccaaaagcagatggacagaaagcaactgaaaaagcccaggaaaaaagaatacaccagccattacctcttgcgtctgaatcccagactcactcattccaatcccagcagaagcagcctcaggttttgtcacagcagcttccatttattttccaaagctctcaggcaaaggaggaatctgtgaacaaacacaccagtgtaatacagtctacgggattggtgtccaatgtgaaacctttatctttggtaaatcaagccaaaaaggaaacttacatgaaactcatagttccttctcctgatgttcttaaagcagggaataaaaatacctctgaagaatctagtttattgaccagtgaattgagatccaaacgggaacaatataaacaggcattcccatcacagttaaagaaacaagagtcatcgaagagcctgaagaaggttattgcagctttgtcaaatccaaaagcaacctctagttcaccagcacatccaaaacaaacattagaaaacaaccacccaaatccattcttgacaaatgcacttttaggtaatcaccaaccaaatggagttattcaaagtgtcattcaagaagctcctctagcacttactaccaaaactaaaatgcagagcaagattaatgaaaacattgctgctgcaagtagcacccctttttcctcacctgtaaatctgagtacaagtgggagaagaacccctggcaatcagacacctgtaatgccctctgcctctcccatcctgcatagtcaagggaaggaaaaagcagttagcaataatgtaaacccagtaaaaacacagcatcactcccatcctgcaaaatctttagtggaacaattcagaggaacagattcagacattcccagtagtaaagattctgaagattcaaatgaggatgaagaggaagatgatgaagaagaagatgaggaagatgatgaagatgatgaatctgatgacagccaatcagaatcagatagtaattcagaatcagatacagaaggatcagaagaagaagatgatgatgataaagaccaagatgaatcagatagtgatactgaaggagagaaaacttcaatgaaactgaataaaacaacttcctctgtcaaaagcccttccatgagtctcacaggtcactcaacacctcgtaacctccacatagcaaaagccccaggctctgctcctgctgccttatgttctgaatcccagtcacctgcttttcttggtacatcttcttccacacttacttcaagcccacactctggcacttccaaaagaagaagagtaacagatgaacgtgaactgcgtattccattggaatatggctggcagagagagacaagaataagaaactttggagggcgccttcaaggagaagtagcatattatgctccatgtggaaagaaacttaggcagtaccctgaagtaataaagtatctcagcagaaatggaataatggatatctcaagggacaatttcagcttcagtgcaaaaataagagtgggtgacttctatgaagccagagatggaccgcagggaatgcagtggtgtcttttgaaagaagaggatgtcattcctcgtatcagggcaatggaaggtcgtagaggaagaccaccaaatccagatagacaacgagcaagagaggaatccaggatgagacgtcggaaaggtcgacctccaaatgttggcaatgctgaattcctagataacgcagatgcaaagttgctaagaaaactgcaagctcaagaaatagccaggcaagcagcacaaataaagcttttgagaaaacttcaaaagcaggaacaggctcgggttgctaaagaagccaaaaaacaacaagcaataatggctgctgaggagaagcggaagcaaaaagaacagataaagattatgaaacagcaggaaaaaattaagagaatacagcaaatcagaatggaaaaagaacttcgagctcagcaaattctagaggctaaaaagaaaaagaaggaagaagcggcaaatgccaaattattggaggccgagaaacgaataaaggaaaaagaaatgagaagacaacaagctgttcttctgaaacatcaggaacgagagcgaaggcgacaacacatgatgcttatgaaagctatggaagctcgtaaaaaagcagaagaaaaagagcggttgaaacaagaaaaacgtgatgagaaaagattaaataaagagcgtaaactagagcagcgaagattagaattagaaatggcaaaggaactaaagaagcctaatgaagacatgtgcttagcagaccaaaagcctttgccagagttgcctcgtattccaggacttgttctctctggaagtacattttcagactgtctcatggtggtgcagttcttacgaaactttggtaaagttttgggctttgatgtgaatattgatgttccaaacctgagtgttcttcaagagggattgctaaatataggggacagcatgggtgaagtacaagacttgcttgtgaggctcctctcagctgctgtatgtgatccaggtctaataacaggatacaaggctaaaacagctcttggagaacatttgctgaatgttggtgtgaatcgagacaatgtttccgagattttacagatatttatggaagcccactgtggacaaactgagcttactgaaagtctgaagaccaaagcttttcaggctcacactccagcacagaaagcttcagtcctggctttcctgatcaatgaactggcatgcagcaagagtgtggtcagtgaaatcgacaagaacattgattatatgtcaaacttgaggagagataaatgggtggtagaaggtaaactccgcaagctcagaatcattcatgctaagaaaacaggcaaaagagacacttcaggtggcattgatctgggagaagagcagcatcccttgggcacacccactccaggacgcaagcgaagaaggaagggaggagacagtgattatgacgatgatgatgacgatgacagtgatgaccaaggggatgaagatgatgaggatgaagaagataaagaagacaaaaaaggaaaaaagactgatatctgtgaagatgaggatgaaggtgaccaagcagcaagtgttgaagagctggaaaaacagattgaaaaactgagtaaacaacagagtcagtacagaaggaagctctttgatgcgtctcactcattgcgttcagtgatgtttggccaagatcgttacagacgccggtactggattcttccccaatgtggggggatttttgtagaaggcatggagagtggtgaaggactagaagaaattgcaaaagaaagagaaaaactgaaaaaggcagaaagtgtccagatcaaagaagaaatgtttgagacttctggggacagtttaaattgttcaaatacagatcactgtgaacaaaaggaagatcttaaagaaaaagataacacaaatctattccttcagaaacctggctctttttccaaattaagcaagcttttggaagtagctaagatgcctcctgagtcagaggttatgacccccaaaccaaatgctggtgcaaatgggtgcacgttgtcttatcagaacagtggaaaacattcactgggcagcgttcagtcaacagcaacgcaaagcaatgtggaaaaggcagactctaataatctgtttaatactggttcaagtggtccagggaagttctacagtcctctccccaatgaccagttactaaaaacgctgactgaaaagaatagacaatggtttagtcttttgccacgaacaccctgtgatgacacttcacttactcatgccgatatgtcaactgcttctttggtgactcctcagtctcagccaccatctaagtcaccttcacctaccccagctcctcttggatcttctgctcagaatcctgttggcttaaatccatttgctttatcacctcttcaggtgaaaggtggagtatctatgatgggacttcagttttgtggatggcccactggtgtggttacttctaatattccatttacatcatctgtacctagtctaggatcggggttagggttatcagaaggaaatggtaattcattcttgacttccaatgttgcttcaagtaaaagtgaatctccagtaccacagaatgaaaaggccacttcagctcaacctgcagctgttgaagtagcaaaaccagtagattttcctagtccaaaacctattccagaagaaatgcagtttggttggtggagaattattgacccagaggacctaaaagctttgctcaaagtgctgcatctcagaggaataagagaaaaggcattacaaaaacaaattcagaaacatttggattatattactcaagcctgcctcaagaataaggatgttgctattattgaactgaatgaaaatgaagaaaaccaagtaactcgagatattgtggagaactggtcagtagaagaacaagcaatggaaatggatttgagtgtccttcaacaggtagaagatctagaaaggagagttgcatcagcaagtttgcaagtgaagggttggatgtgtccagagcctgcatcagaaagggaggacttggtatattttgaacataaatcatttactaaattgtgcaaggagcatgatggagaatttactggcgaagacgaaagcagtgcacatgcactagaacggaagagtgacaaccccctagatatagctgtaaccaggctggctgatttggagcggaacattgaaagaagaattgaagaggatattgctccagggctcagggtatggagaagggcattatcagaagctcgcagtgctgcacaggtagctctgtgcattcagcaattacagaaatcaatagcatgggaaaaatcaattatgaaagtttactgccaaatctgtcgaaagggagataatgaagaactgcttcttctttgtgatggctgtgacaaaggctgtcatacctactgccatagacccaagattacaacaatcccagatggagactggttttgtccagcttgcattgctaaggcaagtggtcaaactctaaaaatcaaaaaacttcatgtcaaaggaaaaaagactaatgagtcaaagaaaggcaagaaggtaactttaacaggagatactgaagatgaagactctgcatctacaagtagttcactaaaaagaggaaacaaagacctcaagaaaagaaaaatggaggaaaacacttctattaacttgtcaaaacaagaaagttttacttcagttaagaaacctaaaagagatgactccaaggacctagctctttgcagtatgattctgactgaaatggaaactcatgaggatgcatggccttttctacttcctgtaaacttgaaacttgttcctggttataagaaagttattaagaagcctatggatttttccacaattagagagaaactaagtagtggacagtatccaaaccttgaaacctttgctctagatgtcaggcttgtttttgacaactgtgaaacatttaatgaagatgattctgatataggcagagctggccacaatatgaggaagtattttgaaaaaaagtggacagatactttcaaagtgagctgaagttataataatctctttatttttttccttctaaacaaggacaaatgagaccagcaatgtgaactgtatttacataaacgtgcaaggcacatacataatgactttctttttccttaagtataaaaaaaaagtatcagaagaatgataccatttttaaaggcttcattcctacaacaaccaaggccctcggttattggtttgtgtgatttatcagctaatttaggtagaacagggaagcacacccaaagaattttcaaaggaaagggtgttatagtgcaatagcaattaaaatatatcaaatcgcactgaatactcaacaccagagctctaatgtgggaaatggttctcctttccctctcaataaatatctatttttcatttttttactttgtagtttattttttagtgaatgtatttaattttatgaattatttatgattaaaccacatccagaatcttcgttttctgtgaaaaggaagaactagaaaattgctttaaatcttgaaaatacaaggaatgttttaaaatataaaacaaagccaagttaaactgtttacactgatgtgctataaaagcaccaaaaagaaactttactgtagagttacaagtacatttatatatatatgttgctgcatcacttgtgtagttaaattgtatttcaaaacagtgaaaaaattgacatgtatatactgttcattcttgtttatattaagtcttgttttaaatatgtattatgtgtatatattgtttgcagacattattgttcatgccttagaggattgtagcattttattttcgtctgaaggtaatgatagctatacagtctgtacagtaattatcctctaccaacactgtggcgtctccttaatcttggtagtgcctgcctttgaaacagggtgtaggggatattagttttccatttttctattttgttatataattttaagccaccagggcctaaattaaagtataatcatttgtatccatgtggaataaaattgtgacaatttcctacgcacacagtattttttcatagaaacatttccctcccatttgccttgcctcagaaataaatttaaaagacgtttgtaaccactgtgttttatctactgtgtgttgtggtggcctgttggaggcaaatagatcagattttttttgtacctacgtaagagtacttgaagttttatttaaaataaaatgttgtggaaaaggtagcattctttttttaggagtgttatttttcactatgtgtggcacggatacaataaaagacttttacaaactaa

SEQ ID NO: 648 - protein, 2168 aa, Homo sapiens
MESGERLPSSAASSTTPTSSSTPSVASVVSKGGLSTGVASLSSTINPCGHLFRTAGDQPFNLSTVSSAFPMVSHPVFGLHSASSGHSEFGGLGTLGTPTALAAHPQLASFPGAEWWRTTDAHTRTGATFFPPLLGIPPLFAPPAQNHDSSSFHSRTSGKSNRNGPEKGVNGSINGSNTSSVIGINTSVLSTTASSSMGQTKSTSSGGGNRKCNQEQSKNQPLDARVDKIKDKKPRKKAMESSSNSDSDSGTSSDTSSEGISSSDSDDLEEDEEEEDQSIEESEDDDSDSESEAQHKSNNQVLLHGISDPKADGQKATEKAQEKRIHQPLPLASESQTHSFQSQQKQPQVLSQQLPFIFQSSQAKEESVNKHTSVIQSTGLVSNVKPLSLVNQAKKETYMKLIVPSPDVLKAGNKNTSEESSLLTSELRSKREQYKQAFPSQLKKQESSKSLKKVIAALSNPKATSSSPAHPKQTLENNHPNPFLTNALLGNHQPNGVIQSVIQEAPLALTTKTKMQSKINENIAAASSTPFSSPVNLSTSGRRTPGNQTPVMPSASPILHSQGKEKAVSNNVNPVKTQHHSHPAKSLVEQFRGTDSDIPSSKDSEDSNEDEEEDDEEEDEEDDEDDESDDSQSESDSNSESDTEGSEEEDDDDKDQDESDSDTEGEKTSMKLNKTTSSVKSPSMSLTGHSTPRNLHIAKAPGSAPAALCSESQSPAFLGTSSSTLTSSPHSGTSKRRRVTDERELRIPLEYGWQRETRIRNFGGRLQGEVAYYAPCGKKLRQYPEVIKYLSRNGIMDISRDNFSFSAKIRVGDFYEARDGPQGMQWCLLKEEDVIPRIRAMEGRRGRPPNPDRQRAREESRMRRRKGRPPNVGNAEFLDNADAKLLRKLQAQEIARQAAQIKLLRKLQKQEQARVAKEAKKQQAIMAAEEKRKQKEQIKIMKQQEKIKRIQQIRMEKELRAQQILEAKKKKKEEAANAKLLEAEKRIKEKEMRRQQAVLLKHQERERRRQHMMLMKAMEARKKAEEKERLKQEKRDEKRLNKERKLEQRRLELEMAKELKKPNEDMCLADQKPLPELPRIPGLVLSGSTFSDCLMVVQFLRNFGKVLGFDVNIDVPNLSVLQEGLLNIGDSMGEVQDLLVRLLSAAVCDPGLITGYKAKTALGEHLLNVGVNRDNVSEILQIFMEAHCGQTELTESLKTKAFQAHTPAQKASVLAFLINELACSKSVVSEIDKNIDYMSNLRRDKWVVEGKLRKLRIIHAKKTGKRDTSGGIDLGEEQHPLGTPTPGRKRRRKGGDSDYDDDDDDDSDDQGDEDDEDEEDKEDKKGKKTDICEDEDEGDQAASVEELEKQIEKLSKQQSQYRRKLFDASHSLRSVMFGQDRYRRRYWILPQCGGIFVEGMESGEGLEEIAKEREKLKKAESVQIKEEMFETSGDSLNCSNTDHCEQKEDLKEKDNTNLFLQKPGSFSKLSKLLEVAKMPPESEVMTPKPNAGANGCTLSYQNSGKHSLGSVQSTATQSNVEKADSNNLFNTGSSGPGKFYSPLPNDQLLKTLTEKNRQWFSLLPRTPCDDTSLTHADMSTASLVTPQSQPPSKSPSPTPAPLGSSAQNPVGLNPFALSPLQVKGGVSMMGLQFCGWPTGVVTSNIPFTSSVPSLGSGLGLSEGNGNSFLTSNVASSKSESPVPQNEKATSAQPAAVEVAKPVDFPSPKPIPEEMQFGWWRIIDPEDLKALLKVLHLRGIREKALQKQIQKHLDYITQACLKNKDVAIIELNENEENQVTRDIVENWSVEEQAMEMDLSVLQQVEDLERRVASASLQVKGWMCPEPASEREDLVYFEHKSFTKLCKEHDGEFTGEDESSAHALERKSDNPLDIAVTRLADLERNIERRIEEDIAPGLRVWRRALSEARSAAQVALCIQQLQKSIAWEKSIMKVYCQICRKGDNEELLLLCDGCDKGCHTYCHRPKITTIPDGDWFCPACIAKASGQTLKIKKLHVKGKKTNESKKGKKVTLTGDTEDEDSASTSSSLKRGNKDLKKRKMEENTSINLSKQESFTSVKKPKRDDSKDLALCSMILTEMETHEDAWPFLLPVNLKLVPGYKKVIKKPMDFSTIREKLSSGQYPNLETFALDVRLVFDNCETFNEDDSDIGRAGHNMRKYFEKKWTDTFKVS

SEQ ID NO: 649 - DNA, 3484 bp, Homo sapiens
ggtggctggttctgcgccggatccgggagaggggcgggcgccattgtgcttcgctgccgactgcatttcctcagtcacgggcctagaactccaaggagaaaggcggcgaaaaatctttaagaatggagtctaaaccttcaaggattccaagaagaatttctgttcaaccttccagctccttaagtgctaggatgatgtctggaagcagaggaagtagtttaaatgatacctatcactcaagagactcttcatttagattggattctgaatatcagtctacatcagcatcagcatctgcgtcaccatttcaatctgcatggtatagtgaatctgagataactcagggagcacgctcaagatcgcagaaccagcaacgggatcatgattcaaaaagacctaaactttcctgtacaaactgtactacctcagctgggagaaatgttggaaatggtttaaacacattatcagattcatcttggaggcatagtcaagttcctagatcttcatcaatggtacttggatcatttggaacagacttaatgagagagaggagagatttggagagaagaacagattcctctattagtaatcttatggattatagtcaccgaagtggtgatttcacaacttcatcatatgttcaagacagagttccttcatattcacaaggagcaagaccaaaagaaaactcaatgagcactttacagttgaatacatcatccacaaaccaccaattgccttctgaacatcagaccatactaagttctagggactccagaaattctttaagatcaaatttttcttcaagagaatcagaatcttcccgaagcaatacgcagcctggattttcttacagttcaagtagagatgaagccccaatcataagcaattcagaaagggttgtttcatctcaaagaccatttcaagaatcttctgacaatgaaggtaggcggacaacgaggagattgctgtcacgcatagcttctagcatgtcatctacttttttttcacgaagatctagtcaggattccttgaatacaagatcattgaattctgaaaattcttacgtttctccaagaatcttgacagcttcacagtcccgtagtaatgtaccatcagcttctgaagttcccgataatagggcatctgaagcttctcagggatttcgatttcttaggcgaagatggggtttgtcatctcttagccacaatcatagctctgagtcagattcagaaaattttaaccaagaatctgaaggtagaaatacaggaccatggttatcttcctcacttagaaatagatgcacacctttgttctctagaaggaggcgagagggaagagatgaatcttcaaggatacctacctctgatacatcatctagatctcatatttttagaagagaatcaaatgaagtggttcaccttgaagcacagaatgatcctcttggagctgctgccaacagaccacaagcatctgcagcatcaagcagtgccacaacaggtggctctacatcagattcggctcaaggtggaagaaatacaggaatatcagggattcttcctggttccttattccggtttgcagtccctccagcacttgggagtaatttgaccgacaatgtcatgatcacagtagatattattccttcaggttggaattcagctgatggtaaaagtgataaaactaaaagtgcgccttcaagagatccagaaagattgcagaaaataaaagagagcctccttttagaggactcagaagaagaagaaggtgacttatgtagaatttgtcaaatggcagctgcatcatcatctaatttgctgatagagccatgcaagtgcacaggaagtttgcagtatgtccaccaagactgtatgaaaaagtggttacaggccaaaattaactctggttcttcattagaagctgtaaccacctgtgaactatgtaaagagaagttggagcttaacctggaggattttgatattcatgaactacatagagctcatgcaaatgaacaagctgagtatgagtttatcagctctggtctctacctagtggtgttattgcacttgtgcgaacaaagcttttctgatatgatgggaaatacaaatgaaccaagcacacgtgtccgatttattaaccttgcaagaactcttcaggcacatatggaagatctcgaaacttcagaggatgattccgaagaagacggagaccataacaggacatttgatattgcctaacttcatataagacagatggatgatctgtgaacataagtgtttattaaaaatggcaattaaatataaattacttttgtgggggaatgcctaataaatacattgactatatataaaatgaatatatacatacacatgtatgcctgtatatatatattcattctccagtgttgctgaattaaaattctgctggactttttaacatagcaaatccgatgtttataaactggtaatcaaaaaggttttttcttttaggtgagtgggaaagtattacccttgttttaaatatctaagcaatgcctatcaacccttttttgtgttatgattactgtagtcatatttatgaaaaaaggtttgtgttttactcttgctagtgagaaaagtgggacaaaatatacttttgaaataaaatgctatatggcacctaattattttttcttttaaaatgccttaagttgcagtctcattttgataatcatttgcttccagtgtttaaaaattaaaaaaagaatggggagaaggttatgagaagagcattattaagtttccaaatttaatttgaattccaaattcacctagcaataaaatctaatttttaaaaagtatataaatataaaatgtataaatgatggatagatttttgtattgatttgcaaaatgcagattatatttgataggctatagtatgtagatattccttttaggaatattacagctgtaaattatatgagacttgccagtcaaatgctatttggtttaaaaaaattattgcaatctcaagttaatggaatatttttaaatcccacattcagagtttaaaacactggttttcaatgtgttttttagtgttgtcacttgtttatagataaatatataaataacctgtttggatcctggtcctttttaactgttccttggtaattctgagcatttatttgatgacttaatatttttcactacctttggagaacagatgaacattattcaccatgaatggatctatactgtgtggtcatgagttgtgtatacttccataacactgtatttttcttctgtcagtacccttaggatacactttaaaacaccttaaggtctgatgttatggcaacaaactactttttcaaacctaaataggaaccatgtaatttctcaaaagtgattgaacagtttgcccacacttagtttgttggtcttatgtaaaacattggctcaaaataaagtacacactgatttaaaaaaaaaaaaaaaaa

SEQ ID NO: 650 - protein, 704 aa, Homo sapiens
MESKPSRIPRRISVQPSSSLSARMMSGSRGSSLNDTYHSRDSSFRLDSEYQSTSASASASPFQSAWYSESEITQGARSRSQNQQRDHDSKRPKLSCTNCTTSAGRNVGNGLNTLSDSSWRHSQVPRSSSMVLGSFGTDLMRERRDLERRTDSSISNLMDYSHRSGDFTTSSYVQDRVPSYSQGARPKENSMSTLQLNTSSTNHQLPSEHQTILSSRDSRNSLRSNFSSRESESSRSNTQPGFSYSSSRDEAPIISNSERVVSSQRPFQESSDNEGRRTTRRLLSRIASSMSSTFFSRRSSQDSLNTRSLNSENSYVSPRILTASQSRSNVPSASEVPDNRASEASQGFRFLRRRWGLSSLSHNHSSESDSENFNQESEGRNTGPWLSSSLRNRCTPLFSRRRREGRDESSRIPTSDTSSRSHIFRRESNEVVHLEAQNDPLGAAANRPQASAASSSATTGGSTSDSAQGGRNTGISGILPGSLFRFAVPPALGSNLTDNVMITVDIIPSGWNSADGKSDKTKSAPSRDPERLQKIKESLLLEDSEEEEGDLCRICQMAAASSSNLLIEPCKCTGSLQYVHQDCMKKWLQAKINSGSSLEAVTTCELCKEKLELNLEDFDIHELHRAHANEQAEYEFISSGLYLVVLLHLCEQSFSDMMGNTNEPSTRVRFINLARTLQAHMEDLETSEDDSEEDGDHNRTFDIA

SEQ ID NO: 651 - DNA, 3740 bp, Homo sapiens
ctctccggccgcgcagccgctgccgcccacccgcacccgccgtcatgctccgggccgcgctgcccgcgctcctgctgccgttgctgggcctcgccgctgctgccgtcgcggactgtccttcatctacttggattcagttccaagacagttgttacatttttctccaagaagccatcaaagtagaaagcatagaggatgtcagaaatcagtgtactgaccatggagcggacatgataagcatacataatgaagaagaaaatgcttttatactggatactttgaaaaagcaatggaaaggcccagatgatatcctactaggcatgttttatgacacagatgatgcgagtttcaagtggtttgataattcaaatatgacatttgataagtggacagaccaagatgatgatgaggatttagttgacacctgtgcttttctgcacatcaagacaggtgaatggaaaaaaggaaattgtgaagtttcttctgtggaaggaacactatgcaaaacagctatcccatacaaaaggaaatatttatcagataaccacattttaatatcagcattggtgattgctagcacggtaattttgacagttttgggagcaatcatttggttcctgtacaaaaaacattctgattctcgtttcaccacagttttttcaaccgcaccccaatcaccttataatgaagactgtgttttggtagttggagaagaaaatgaatatcctgttcaatttgactaagtttttggtaatcttgcactaagacatcaacaaatgccctggcagagataacttgggaaagattttaatataaaacttgacattggatattagagctttaatggtattccttattccagtaacatttttatgtactcatctgctgtgaaaagtctttaggttcattaaaaaaacaggttttagaaatgatcttagatctaatatagtgattttaagcatcccgtcaaaggcagaatctgtcacttgaatgaaggaaagcttaaagcccaagcagataaaaataaaagcccagcctatttgtcttgcctgctgtatcttccctatttagttgacccactttagtttatatgtttattagtaaacatgaaatggggaataagtgattttaagtacatcccatacatttaaatatctttgataattgttatttttttggcagataattcctctagaatgtgtatctttttatgatttagatgaagaaaattttacaacttttaacaccccacaccaattttagtttcattacttttacacacaccattttatcacaaatgactcaagttttaatgaatgtttataaattatttgaaacaaaatatgatcgctgtgtccaggatggcatagagaaagctggcaattaggttaacacttacatattatagtgcccctttaaggatttctctcttgccaccataccttttgtactttcccctatacaagatgtatctcattctcctcaagcatttataaatttttccttcaatgacatgaaaactgtgcaagcaaaaaccgaagaaaaacacttaagtacaactgtagtgacagtgatcaaagttttcagtgcatttattgtacattttaagaaaaaggtgaaaatcatttggggagtaaaaaaatgaaaaagctgaaacgagtaattttcctcaccatcaataaaccaaaaacaggaaagataaagaatgtataaatttcacgtaaattagtcacgtatcacttatcaatggggatacgttctaagaaatgcatagttagggaatcttgtgtgaaaatcagcttgtatttacacaaacccagatggtagagcctattttgtcccaaacctacacagcatgttactgtgctgaatactgcagacaattgtaacacaatatttgtgtatctaaatatagaaaaggtacagtaaaaatatggtctactaaggaaacactgttctatatgtggtccattactgactgaagtatactgtctagaagtctgaggctcaaagaaaagtaatccctcttctgaatccacaccccatcaattatcttactttcttctggggagatagatagatatactatctcactagcttgactaatggcaacaaagttccagcttgtgtagtctctttttattgaccacatgaatcgaaaacactcatcacaattaatggcactatcattaatgagacatgagtaactaaaaagtgatagaaaactattacagtgcggctacatggtactgaaaatgcaggcattacaccagctgttacacaagcacaagcatgctctgtaagagctttacatttctgagattttgtatagtgattgagatgtctattttattattgatagactattactaatgtcaatattgaacactaccctggaattcctgcctggttttcctacccaaattgtaccactccttgaagaactacaggcacagtaaaaaaatatggcgtattatgtgaactaaaagagttctaaaggagttcttaaaggagtggtagaatttgggtaggaaagtgattaagtccaacttaaaaccaacagtctcaaacgtctacaactacaatgtccaatgagccactagccacatgaggctatttaagtaaatttagtttaaaatccagttttcgaattacattagccacattgtcaagtgttcaaatcacaggtggttagtggctactgtactgggcaacatacattatagaacattttcattataggaagttttattgggcagtgctgctcttaaatcctaccttccactcaactcccatacaactttcttttgtacattttgatactttctacctaatggcagctcttccaaaatagctgctttaaactctgatttaattttcaatatttggtttcatttttcaacaggccaagaggcctctggtaatgaagtgctatatatatatatatatgacggagtctcactgtgctgcccaggctacagtgcagtggctcgatcttggctctctccaatctccgccttgcaggttttcaagcaattctcctgcctcagcctccttagtagctgggaccacagacatctgtcaccacacccagctaactttttgtatttttggtagagacggggtttcgccatattgactgggctggtctcaaactcctgacctcaagtgatccacccaccttggtctcccaaagtgctgggattacatgcgtgagccaccacacttggcctacattttttctttatataccagaacatctataacaggcaccttatctactcattagtgaagagataattggattacacaggcaggcttgtttactacatccagaatgtagaaactgctttcttcaacatcttggttctagctagtaataacaatataattctttggcagatattcagaataacattttaaactacattttcttagaaaattgcattcttgtagtgagcagtgtatggtctcttttgttcagaatttaaaactgataaccaatgaaagccttttctcttattcctctaccgtcatttacatgataatctgaagctaatatgacaatatttaaatactaagtggtactagggaactacaagaatactgtaaagcttaagccattgttatcactgtcatttagcatttaataacaaaactatacagaattatgtgcataccaatgaatgttttgtaccatctagttaaattttttaaataaagttttatgggttaagcag

SEQ ID NO: 652 - protein, 232 aa, Homo sapiens
MLRAALPALLLPLLGLAAAAVADCPSSTWIQFQDSCYIFLQEAIKVESIEDVRNQCTDHGADMISIHNEEENAFILDTLKKQWKGPDDILLGMFYDTDDASFKWFDNSNMTFDKWTDQDDDEDLVDTCAFLHIKTGEWKKGNCEVSSVEGTLCKTAIPYKRKYLSDNHILISALVIASTVILTVLGAIIWFLYKKHSDSRFTTVFSTAPQSPYNEDCVLVVGEENEYPVQFD

SEQ ID NO: 653 - DNA, 6928 bp, Homo sapiens
ggcgggagcgcgtgcgcccgaggacccggccggaaggcttgcgccagctcaggatgaggacaggctgggcgacccctcgccgcccggcggggctcctcatgctgctcttctggttcttcgatctcgcggagccctctggccgcgcagctaatgaccccttcaccatcgtccatggaaatacgggcaagtgcatcaagccagtgtatggctggatagtagcagacgactgtgatgaaactgaggacaagttatggaagtgggtgtcccagcatcggctctttcatttgcactcccaaaagtgccttggcctcgatattaccaaatcggtaaatgagctgagaatgttcagctgtgactccagtgccatgctgtggtggaaatgtgagcaccactctctgtacggagctgcccggtaccggctggctctgaaggatggacatggcacagcaatctcaaatgcatctgatgtctggaagaaaggaggctcagaggaaagcctttgtgaccagccttatcatgagatctataccagagatgggaactcttatgggagaccttgtgaatttccattcttaattgatgggacctggcatcatgattgcattcttgatgaagatcatagtgggccatggtgtgccaccaccttaaattatgaatatgaccgaaagtggggcatctgcttaaagcctgaaaacggttgtgaagataattgggaaaagaacgagcagtttggaagttgctaccaatttaatactcagacggctctttcttggaaagaagcttatgtttcatgtcagaatcaaggagctgatttactgagcatcaacagtgctgctgaattaacttaccttaaagaaaaagaaggcattgctaagattttctggattggtttaaatcagctatactctgctagaggctgggaatggtcagaccacaaaccattaaactttctcaactgggatccagacaggcccagtgcacctactataggtggctccagctgtgcaagaatggatgctgagtctggtctgtggcagagcttttcctgtgaagctcaactgccctatgtctgcaggaaaccattaaataatacagtggagttaacagatgtctggacatactcagatacccgctgtgatgcaggctggctgccaaataatggattttgctatctgctggtaaatgaaagtaattcctgggataaggcacatgcgaaatgcaaagccttcagtagtgacctaatcagcattcattctctagcagatgtggaggtggttgtcacaaaactccataatgaggatatcaaagaagaagtgtggataggccttaagaacataaacataccaactttatttcagtggtcagatggtactgaagttactctaacatattgggatgagaatgagccaaatgttccctacaataagacgcccaactgtgtttcctacttaggagagctaggtcagtggaaagtccaatcatgtgaggagaaactaaaatatgtatgcaagagaaagggagaaaaactgaatgacgcaagttctgataagatgtgtcctccagatgagggctggaagagacatggagaaacctgttacaagatttatgaggatgaggtcccttttggaacaaactgcaatctgactatcactagcagatttgagcaagaatacctaaatgatttgatgaaaaagtatgataaatctctaagaaaatacttctggactggcctgagagatgtagattcttgtggagagtataactgggcaactgttggtggaagaaggcgggctgtaaccttttccaactggaattttcttgagccagcttccccgggcggctgcgtggctatgtctactggaaagtctgttggaaagtgggaggtgaaggactgcagaagcttcaaagcactttcaatttgcaagaaaatgagtggaccccttgggcctgaagaagcatcccctaagcctgatgacccctgtcctgaaggctggcagagtttccccgcaagtctttcttgttataaggtattccatgcagaaagaattgtaagaaagaggaactgggaagaagctgaacgattctgccaagcccttggagcacacctttctagcttcagccatgtggatgaaataaaggaatttcttcactttttaacggaccagttcagtggccagcattggctgtggattggtttgaataaaaggagcccagatttacaaggatcctggcaatggagtgatcgtacaccagtgtctactattatcatgccaaatgagtttcagcaggattatgacatcagagactgtgctgctgtcaaggtatttcataggccatggcgaagaggctggcatttctatgatgatagagaatttatttatttgaggccttttgcttgtgatacaaaacttgaatgggtgtgccaaattccaaaaggccgtactccaaaaacaccagactggtacaatccagaccgtgctggaattcatggacctccacttataattgaaggaagtgaatattggtttgttgctgatcttcacctaaactatgaagaagccgtcctgtactgtgccagcaatcacagctttcttgcgactataacatcttttgtgggactaaaagccatcaaaaacaaaatagcaaatatatctggtgatggacagaagtggtggataagaattagcgagtggccaatagatgatcattttacatactcacgatatccatggcaccgctttcctgtgacatttggagaggaatgcttgtacatgtctgccaagacttggcttatcgacttaggtaaaccaacagactgtagtaccaagttgcccttcatctgtgaaaaatataatgtttcttcgttagagaaatacagcccagattctgcagctaaagtgcaatgttctgagcaatggattccttttcagaataagtgttttctaaagatcaaacccgtgtctctcacattttctcaagcaagcgatacctgtcactcctatggtggcacccttccttcagtgttgagccagattgaacaagactttattacatccttgcttccggatatggaagctactttatggattggtttgcgctggactgcctatgaaaagataaacaaatggacagataacagagagctgacgtacagtaactttcacccattattggttagtgggaggctgagaataccagaaaatttttttgaggaagagtctcgctaccactgtgccctaatactcaacctccaaaaatcaccgtttactgggacgtggaattttacatcctgcagtgaacgccactttgtgtctctctgtcagaaatattcagaagttaaaagcagacagacgttgcagaatgcttcagaaactgtaaagtatctaaataatctgtacaaaataatcccaaagactctgacttggcacagtgctaaaagggagtgtctgaaaagtaacatgcagctggtgagcatcacggacccttaccagcaggcattcctcagtgtgcaggcgctccttcacaactcttccttatggatcggactcttcagtcaagatgatgaactcaactttggttggtcagatgggaaacgtcttcattttagtcgctgggctgaaactaatgggcaactcgaagactgtgtagtattagacactgatggattctggaaaacagttgattgcaatgacaatcaaccaggtgctatttgctactattcaggaaatgagactgaaaaagaggtcaaaccagttgacagtgttaaatgtccatctcctgttctaaatactccgtggataccatttcagaactgttgctacaatttcataataacaaagaataggcatatggcaacaacacaggatgaagttcatactaaatgccagaaactgaatccaaaatcacatattctgagtattcgagatgaaaaggagaataactttgttcttgagcaactgctgtacttcaattatatggcttcatgggtcatgttaggaataacttatagaaataattctcttatgtggtttgataagaccccactgtcatatacacattggagagcaggaagaccaactataaaaaatgagaagtttttggctggtttaagtactgacggcttctgggatattcaaacctttaaagttattgaagaagcagtttattttcaccagcacagcattcttgcttgtaaaattgaaatggttgactacaaagaagaacataatactacactgccacagtttatgccatatgaagatggtatttacagtgttattcaaaaaaaggtaacatggtatgaagcattaaacatgtgttctcaaagtggaggtcacttggcaagcgttcacaaccaaaatggccagctctttctggaagatattgtaaaacgtgatggatttccactatgggttgggctctcaagtcatgatggaagtgaatcaagttttgaatggtctgatggtagtacatttgactatatcccatggaaaggccaaacatctcctggaaattgtgttctcttggatccaaaaggaacttggaaacatgaaaaatgcaactctgttaaggatggtgctatttgttataaacctacaaaatctaaaaagctgtcccgtcttacatattcatcaagatgtccagcagcaaaagagaatgggtcacggtggatccagtacaagggtcactgttacaagtctgatcaggcattgcacagtttttcagaggccaaaaaattgtgttcaaaacatgatcactctgcaactatcgtttccataaaagatgaagatgagaataaatttgtgagcagactgatgagggaaaataataacattaccatgagagtttggcttggattatctcaacattctgttgaccagtcttggagttggttagatggatcagaagtgacatttgtcaaatgggaaaataaaagtaagagtggtgttggaagatgtagcatgttgatagcttcaaatgaaacttggaaaaaagttgaatgtgaacatggttttggaagagttgtctgcaaagtgcctctgggccctgattacacagcaatagctatcatagttgccacactaagtatcttagttctcatgggcggactgatttggttcctcttccaaaggcaccgtttgcacctggcgggtttctcatcagttcgatatgcacaaggagtgaatgaagatgagattatgcttccttctttccatgactaaattcttctaaaagttttctaatttgcactaatgtggttatggagaaattagtcacttaaaatgtcccagtgtcagtatttactctgctccaaagtagaactcttaaatactttttcagttgtttagatcttaggcatgtgctggtatccacagttaattccctgctaaatgccatgtttatcaccctaattaatagaatggaggggactccaaagctggaactgaagtccaaattgtttgtacagtaatatgtttaatgttcattttctctgtatgaatgtgattggtaactaggatatgtatattttaatagaatttttaacaaaacttcttagaaaattaaaataggcatattactaggtgacatgtctactttttaatttttaagagcatccggccaaatgcaaaattagtacctcaaagtaaaaattgaactgtaaactctatcagcattgtttcaaaatagtcatttttagcactggggaaaaataaacaataagacatgcttactttttaatttttatttttttgagactgagtctctctctgttgcccaggctggagtacaatggcgtgatctcggctcactgcaaatctccgcctcccaggttcaagcgattctcctgcctcagcctcctgagtagctgggattacaggcaactgccaccatgcccggctaatttttgtatttttagtagagatggggtttcaccatgttggccaggctggtctcgaactcgtgaccgcagtgatcctcccgcctcggcctcccaaagtgctgggattacaggcatgagccaccgcgcctggcctctgcttactttttatatagcaaaatgattccccttggcaagatgtttcttatattattccaaagttatttcataccattattatgtaaatatgaagagtttttttctgtttataattgtttataaaacaatgacttttaaagatttagtgcttaacattttcccaagtgtgggaacattatttttagattgagtaggtaccttgtagcagtgtgctttgcattttctgatgtattacatgactgtttcttttgtaaagagaatcaactaggtatttaagactgataattttacaatttatatgcttcacatagcatgtcaacttttgactaagaattttgttttacttttttaacatgtgttaaacagagaaagggtccatgaaggaaagtgtatgagttgcatttgtaaaaatgagactttttcagtggaactctaaaccttgtgatgactactaacaaatgtaaaattatgagtgattaagaaaacattgctttgtggttatcactttaagttttgacacctagattatagtcttagtaatagcatccactggaaaaggtgaaaatgttttattcagcatttaacttacatttgtactttagagtatttttgtataaaatccatagatttattttacatttagagtatttacactatgataaagttgtaaataattttctaagacagtttttatatagtctacagttgtcctgatttcttattgaatttgttagactagttctcttgtcttgtgatctgtgtacaattttagtcactaagactttcctccaagaactaagccaacttgatgtgaaaagcacggctgtatataatggtgatgtcataataaagttgttttatcttttaagtaaaaaaaaaaaaaaaaaaaaa

SEQ ID NO: 654 - protein, 1722 aa, Homo sapiens
MRTGWATPRRPAGLLMLLFWFFDLAEPSGRAANDPFTIVHGNTGKCIKPVYGWIVADDCDETEDKLWKWVSQHRLFHLHSQKCLGLDITKSVNELRMFSCDSSAMLWWKCEHHSLYGAARYRLALKDGHGTAISNASDVWKKGGSEESLCDQPYHEIYTRDGNSYGRPCEFPFLIDGTWHHDCILDEDHSGPWCATTLNYEYDRKWGICLKPENGCEDNWEKNEQFGSCYQFNTQTALSWKEAYVSCQNQGADLLSINSAAELTYLKEKEGIAKIFWIGLNQLYSARGWEWSDHKPLNFLNWDPDRPSAPTIGGSSCARMDAESGLWQSFSCEAQLPYVCRKPLNNTVELTDVWTYSDTRCDAGWLPNNGFCYLLVNESNSWDKAHAKCKAFSSDLISIHSLADVEVVVTKLHNEDIKEEVWIGLKNINIPTLFQWSDGTEVTLTYWDENEPNVPYNKTPNCVSYLGELGQWKVQSCEEKLKYVCKRKGEKLNDASSDKMCPPDEGWKRHGETCYKIYEDEVPFGTNCNLTITSRFEQEYLNDLMKKYDKSLRKYFWTGLRDVDSCGEYNWATVGGRRRAVTFSNWNFLEPASPGGCVAMSTGKSVGKWEVKDCRSFKALSICKKMSGPLGPEEASPKPDDPCPEGWQSFPASLSCYKVFHAERIVRKRNWEEAERFCQALGAHLSSFSHVDEIKEFLHFLTDQFSGQHWLWIGLNKRSPDLQGSWQWSDRTPVSTIIMPNEFQQDYDIRDCAAVKVFHRPWRRGWHFYDDREFIYLRPFACDTKLEWVCQIPKGRTPKTPDWYNPDRAGIHGPPLIIEGSEYWFVADLHLNYEEAVLYCASNHSFLATITSFVGLKAIKNKIANISGDGQKWWIRISEWPIDDHFTYSRYPWHRFPVTFGEECLYMSAKTWLIDLGKPTDCSTKLPFICEKYNVSSLEKYSPDSAAKVQCSEQWIPFQNKCFLKIKPVSLTFSQASDTCHSYGGTLPSVLSQIEQDFITSLLPDMEATLWIGLRWTAYEKINKWTDNRELTYSNFHPLLVSGRLRIPENFFEEESRYHCALILNLQKSPFTGTWNFTSCSERHFVSLCQKYSEVKSRQTLQNASETVKYLNNLYKIIPKTLTWHSAKRECLKSNMQLVSITDPYQQAFLSVQALLHNSSLWIGLFSQDDELNFGWSDGKRLHFSRWAETNGQLEDCVVLDTDGFWKTVDCNDNQPGAICYYSGNETEKEVKPVDSVKCPSPVLNTPWIPFQNCCYNFIITKNRHMATTQDEVHTKCQKLNPKSHILSIRDEKENNFVLEQLLYFNYMASWVMLGITYRNNSLMWFDKTPLSYTHWRAGRPTIKNEKFLAGLSTDGFWDIQTFKVIEEAVYFHQHSILACKIEMVDYKEEHNTTLPQFMPYEDGIYSVIQKKVTWYEALNMCSQSGGHLASVHNQNGQLFLEDIVKRDGFPLWVGLSSHDGSESSFEWSDGSTFDYIPWKGQTSPGNCVLLDPKGTWKHEKCNSVKDGAICYKPTKSKKLSRLTYSSRCPAAKENGSRWIQYKGHCYKSDQALHSFSEAKKLCSKHDHSATIVSIKDEDENKFVSRLMRENNNITMRVWLGLSQHSVDQSWSWLDGSEVTFVKWENKSKSGVGRCSMLIASNETWKKVECEHGFGRVVCKVPLGPDYTAIAIIVATLSILVLMGGLIWFLFQRHRLHLAGFSSVRYAQGVNEDEIMLPSFHD

SEQ ID NO: 655 - DNA, 5160 bp, Homo sapiens
cccgagtgtcggttcactgtggagacagcggtggcggagtgggtctccagggctctgggctggcaaggcccccggagggggtggggcgcggaggaggctacggatccgcttccgcgcggcggggccgggtgcttgggacgcggctctgggctcccgggataaggggctcccgggacaaggggctcccggagagcccagtggttagcgatgctgctgtcgccgtcgctgctgctgctgctgctgctgggggcgccgcggggctgcgccgagggtgtggcggcggcgcttacccccgagcggctcctggagtggcaggataaaggaatatttgttatccaaagtgagagtctcaagaaatgcattcaagcaggtaaatcggttctgaccctggagaactgcaagcaagcaaacaagcacatgctgtggaaatgggtttcaaaccatggcctctttaacataggaggcagtggttgcctgggcctgaatttctccgccccagagcagccattaagcttatatgaatgtgactccaccctcgtttccttacggtggcgctgtaacaggaagatgatcacaggcccgctgcagtactctgtccaggtggcgcatgacaacacagtggtggcctcacggaagtatattcataagtggatttcttatgggtcaggtggtggagacatttgtgaatatctacacaaagatttgcatacaatcaaagggaacacccacgggatgccgtgtatgtttcccttccagtataaccatcagtggcatcatgaatgtacccgtgaaggtcgggaagatgacttactgtggtgtgccacgacaagccgttatgaaagagatgaaaagtggggattttgccctgatcccacctctgcagaagtaggttgtgatactatttgggagaaggacctcaattcacacatttgctaccagttcaacctgctttcatctctctcttggagtgaggcacattcttcatgccagatgcaaggaggtacgctgttaagtattacagatgaaactgaagaaaatttcataagggagcacatgagcagtaaaacagtggaggtgtggatgggcctcaatcagctggatgaacacgctggctggcagtggtctgatggaacgccgctcaactatctgaattggagcccagaggtaaattttgagccatttgttgaagatcactgtggaacatttagttcatttatgccaagtgcctggaggagtcgggattgtgagtccaccttgccatatatatgtaaaaaatatctaaaccacattgatcatgaaatagttgaaaaagatgcgtggaaatattatgctacccactgtgagcctggctggaatccctacaatcgtaattgctacaaacttcagaaagaagaaaagacctggcatgaggctctgcgttcttgtcaggctgataacagtgcattaatagacataacctcattagcagaggtggagtttcttgtaaccctccttggagatgaaaatgcatcagaaacatggattggtttgagcagcaataaaattccagtttcctttgaatggtctaatgactcttcagtcatctttactaattggcacacacttgagccccacatttttccaaatagaagccagctgtgtgtctcagcagagcagtctgagggacactggaaagtcaaaaattgtgaagaaagacttttttacatttgtaaaaaagcaggccatgtcctctctgatgctgaatcaggatgtcaagagggatgggagagacatggtggattctgttacaaaattgacacagtccttcgaagctttgaccaagcttccagcggttattactgtcctcctgcacttgtaaccattacaaacaggtttgaacaggcttttattaccagtttgatcagtagtgtggtaaaaatgaaggacagttatttttggatagctcttcaggaccaaaatgatacgggagaatacacttggaagccagtagggcagaaacccgagccggtgcagtacacacactggaacacacaccagccgcgctacagtggtggctgtgttgccatgcgaggaaggcatccacttggtcgctgggaagtgaagcactgtcggcactttaaggcaatgtccttgtgcaagcagccagttgaaaatcaggaaaaagcagagtatgaagagagatggccctttcacccctgctatttggactgggagtcagagcctggtctggccagttgcttcaaggtatttcatagtgaaaaagttctgatgaaaagaacatggagagaagctgaagcattttgcgaagaatttggagctcatcttgcaagctttgcccatattgaggaagagaattttgtgaatgagctcttacattcaaaatttaattggacagaagaaaggcagttctggattggatttaataaaagaaacccactgaatgccggctcatgggagtggtctgatagaactcctgttgtctcttcgtttttagacaacacttattttggagaagatgcaagaaactgtgctgtttataaggcaaacaaaacattgctgcccttacactgtggttccaaacgtgaatggatatgcaaaatcccaagagatgtgaaacccaagattccgttctggtaccagtacgatgtaccctggctcttttatcaggatgcagaatacctttttcatacctttgcctcagaatggttgaactttgagtttgtctgtagctggctgcacagtgatcttctcacaattcattctgcacatgagcaagaattcatccacagcaaaataaaagcgctatcaaagtatggtgcaagttggtggattggacttcaagaagaaagagccaatgatgaatttcgctggagagatggaacaccagtgatataccagaactgggacacaggaagagaaagaactgtgaataatcagagccagagatgtggctttatttcttctataacaggactctggggtagtgaagagtgttcagtttctatgcctagtatctgtaagcgaaaaaaggtttggctcatagagaaaaagaaagatacaccaaaacaacatggaacgtgtcccaaaggatggctatattttaactataagtgccttctgctgaatatccccaaagacccaagcagttggaagaactggacgcatgctcaacatttctgtgctgaagaaggggggaccctggtcgccattgaaagtgaggtggagcaagctttcattactatgaatctttttggccagaccaccagtgtgtggataggtttacaaaatgatgattatgaaacatggctaaatggaaagcctgtggtatattctaactggtctccatttgatataataaatattccaagtcacaataccactgaagttcagaaacacattcctctctgtgccttactctcaagtaatcctaattttcatttcactggaaaatggtattttgaagactgtggaaaggaaggctatgggtttgtttgtgaaaaaatgcaagatacttctggacacggtgtaaatacatctgatatgtatccaatgcccaataccttagaatatggaaacagaacttacaaaataattaatgcaaatatgacttggtatgcagcaataaaaacctgcctgatgcacaaagcacaactggtcagcatcacagaccagtatcaccagtccttcctcactgttgtcctcaaccggctaggatatgcccactggattggactgttcaccacagataatggtcttaattttgactggtctgatggcaccaaatcttctttcactttttggaaagatgaggagtcctccctccttggtgactgcgtttttgccgacagcaacggacgctggcatagcacagcctgcgagtcatttctgcaaggtgccatttgtcatgtgccacctgaaacaagacaatctgaacacccagagttgtgctcagaaacatctattccctggataaaatttaaaagtaattgctacagtttttctacagtcctagacagtatgagttttgaggctgctcatgaattttgcaaaaaggaaggttctaatcttttaacaatcaaggatgaggctgaaaatgcatttctcctagaagagctgtttgcttttggttcttctgtccagatggtttggttgaatgctcaatttgatggtaacagtaagtgatttgggtagaggagaggacataaataaatacatggttgttaaagctgatgataatggcatctgtgagccagaaaactctccttggatacgttttctgagaaaaaatagcatgaagcctaaagccatttcttccaaaaacaacattgcaacccttttctttacccttttgtcttttaaaataatcccagaacaccaaaaataaaaacaaacaataacatgtttatctttacccttagcaggaagatgcttggctggaactttgtgttcacagacttagtcattgcataccaaaaccatatttactggaaaatatcccaggtttctaaatgttataaaagcacaatagagttatggaaatgtttccatgatgaactgtgctgttaggattcttatttgctactcataaaaaccagagtttgtaataaaatggaagcatggtattcttttctttatgtaattgatggttattgaaaggtacttgtgaagaaaattattttaattggtatggagagcttgttacagtggtgtaccaaggttgggggtgagcctaccctttcgaggaggagtattttaatcaccaacattgtttagaatttcaagcagatggtgataataaaaagcagaccaacttttagttagctgtattgttagttttaaattattttcagacaatacactattgcccacacatgggatggactctcctaccgcccctacccccttggtacatggctggcttggtattaaagaaattcactgtaaaatctttttagaaagtgagccattttgtaatgatgaagatgttaggacttcaaaggatttttctttactcgattagttttgtttatcaaatgatttctttaaatcgattatatatatatatggaatatttcaaaattcaaactgtcacattaagaaacatgataacctaaatgacctaaataagaacactgtacctaaaataaagaggcaacttta

SEQ ID NO: 656 - protein, 1324 aa, Homo sapiens
MLLSPSLLLLLLLGAPRGCAEGVAAALTPERLLEWQDKGIFVIQSESLKKCIQAGKSVLTLENCKQANKHMLWKWVSNHGLFNIGGSGCLGLNFSAPEQPLSLYECDSTLVSLRWRCNRKMITGPLQYSVQVAHDNTVVASRKYIHKWISYGSGGGDICEYLHKDLHTIKGNTHGMPCMFPFQYNHQWHHECTREGREDDLLWCATTSRYERDEKWGFCPDPTSAEVGCDTIWEKDLNSHICYQFNLLSSLSWSEAHSSCQMQGGTLLSITDETEENFIREHMSSKTVEVWMGLNQLDEHAGWQWSDGTPLNYLNWSPEVNFEPFVEDHCGTFSSFMPSAWRSRDCESTLPYICKKYLNHIDHEIVEKDAWKYYATHCEPGWNPYNRNCYKLQKEEKTWHEALRSCQADNSALIDITSLAEVEFLVTLLGDENASETWIGLSSNKIPVSFEWSNDSSVIFTNWHTLEPHIFPNRSQLCVSAEQSEGHWKVKNCEERLFYICKKAGHVLSDAESGCQEGWERHGGFCYKIDTVLRSFDQASSGYYCPPALVTITNRFEQAFITSLISSVVKMKDSYFWIALQDQNDTGEYTWKPVGQKPEPVQYTHWNTHQPRYSGGCVAMRGRHPLGRWEVKHCRHFKAMSLCKQPVENQEKAEYEERWPFHPCYLDWESEPGLASCFKVFHSEKVLMKRTWREAEAFCEEFGAHLASFAHIEEENFVNELLHSKFNWTEERQFWIGFNKRNPLNAGSWEWSDRTPVVSSFLDNTYFGEDARNCAVYKANKTLLPLHCGSKREWICKIPRDVKPKIPFWYQYDVPWLFYQDAEYLFHTFASEWLNFEFVCSWLHSDLLTIHSAHEQEFIHSKIKALSKYGASWWIGLQEERANDEFRWRDGTPVIYQNWDTGRERTVNNQSQRCGFISSITGLWGSEECSVSMPSICKRKKVWLIEKKKDTPKQHGTCPKGWLYFNYKCLLLNIPKDPSSWKNWTHAQHFCAEEGGTLVAIESEVEQAFITMNLFGQTTSVWIGLQNDDYETWLNGKPVVYSNWSPFDIINIPSHNTTEVQKHIPLCALLSSNPNFHFTGKWYFEDCGKEGYGFVCEKMQDTSGHGVNTSDMYPMPNTLEYGNRTYKIINANMTWYAAIKTCLMHKAQLVSITDQYHQSFLTVVLNRLGYAHWIGLFTTDNGLNFDWSDGTKSSFTFWKDEESSLLGDCVFADSNGRWHSTACESFLQGAICHVPPETRQSEHPELCSETSIPWIKFKSNCYSFSTVLDSMSFEAAHEFCKKEGSNLLTIKDEAENAFLLEELFAFGSSVQMVWLNAQFDGNSK

SEQ ID NO: 657 - DNA, 4876 bp, Homo sapiens
cccgagtgtcggttcactgtggagacagcggtggcggagtgggtctccagggctctgggctggcaaggcccccggagggggtggggcgcggaggaggctacggatccgcttccgcgcggcggggccgggtgcttgggacgcggctctgggctcccgggataaggggctcccgggacaaggggctcccggagagcccagtggttagcgatgctgctgtcgccgtcgctgctgctgctgctgctgctgggggcgccgcggggctgcgccgagggtgtggcggcggcgcttacccccgagcggctcctggagtggcaggataaaggaatatttgttatccaaagtgagagtctcaagaaatgcattcaagcaggtaaatcggttctgaccctggagaactgcaagcaagcaaacaagcacatgctgtggaaatgggtttcaaaccatggcctctttaacataggaggcagtggttgcctgggcctgaatttctccgccccagagcagccattaagcttatatgaatgtgactccaccctcgtttccttacggtggcgctgtaacaggaagatgatcacaggcccgctgcagtactctgtccaggtggcgcatgacaacacagtggtggcctcacggaagtatattcataagtggatttcttatgggtcaggtggtggagacatttgtgaatatctacacaaagatttgcatacaatcaaagggaacacccacgggatgccgtgtatgtttcccttccagtataaccatcagtggcatcatgaatgtacccgtgaaggtcgggaagatgacttactgtggtgtgccacgacaagccgttatgaaagagatgaaaagtggggattttgccctgatcccacctctgcagaagtaggttgtgatactatttgggagaaggacctcaattcacacatttgctaccagttcaacctgctttcatctctctcttggagtgaggcacattcttcatgccagatgcaaggaggtacgctgttaagtattacagatgaaactgaagaaaatttcataagggagcacatgagcagtaaaacagtggaggtgtggatgggcctcaatcagctggatgaacacgctggctggcagtggtctgatggaacgccgctcaactatctgaattggagcccagaggtaaattttgagccatttgttgaagatcactgtggaacatttagttcatttatgccaagtgcctggaggagtcgggattgtgagtccaccttgccatatatatgtaaaaaatatctaaaccacattgatcatgaaatagttgaaaaagatgcgtggaaatattatgctacccactgtgagcctggctggaatccctacaatcgtaattgctacaaacttcagaaagaagaaaagacctggcatgaggctctgcgttcttgtcaggctgataacagtgcattaatagacataacctcattagcagaggtggagtttcttgtaaccctccttggagatgaaaatgcatcagaaacatggattggtttgagcagcaataaaattccagtttcctttgaatggtctaatgactcttcagtcatctttactaattggcacacacttgagccccacatttttccaaatagaagccagctgtgtgtctcagcagagcagtctgagggacactggaaagtcaaaaattgtgaagaaagacttttttacatttgtaaaaaagcaggccatgtcctctctgatgctgaatcaggatgtcaagagggatgggagagacatggtggattctgttacaaaattgacacagtccttcgaagctttgaccaagcttccagcggttattactgtcctcctgcacttgtaaccattacaaacaggtttgaacaggcttttattaccagtttgatcagtagtgtggtaaaaatgaaggacagttatttttggatagctcttcaggaccaaaatgatacgggagaatacacttggaagccagtagggcagaaacccgagccggtgcagtacacacactggaacacacaccagccgcgctacagtggtggctgtgttgccatgcgaggaaggcatccacttggtcgctgggaagtgaagcactgtcggcactttaaggcaatgtccttgtgcaagcagccagttgaaaatcaggaaaaagcagagtatgaagagagatggccctttcacccctgctatttggactgggagtcagagcctggtctggccagttgcttcaaggtatttcatagtgaaaaagttctgatgaaaagaacatggagagaagctgaagcattttgcgaagaatttggagctcatcttgcaagctttgcccatattgaggaagagaattttgtgaatgagctcttacattcaaaatttaattggacagaagaaaggcagttctggattggatttaataaaagaaacccactgaatgccggctcatgggagtggtctgatagaactcctgttgtctcttcgtttttagacaacacttattttggagaagatgcaagaaactgtgctgtttataaggcaaacaaaacattgctgcccttacactgtggttccaaacgtgaatggatatgcaaaatcccaagagatgtgaaacccaagattccgttctggtaccagtacgatgtaccctggctcttttatcaggatgcagaatacctttttcatacctttgcctcagaatggttgaactttgagtttgtctgtagctggctgcacagtgatcttctcacaattcattctgcacatgagcaagaattcatccacagcaaaataaaagcgctatcaaagtatggtgcaagttggtggattggacttcaagaagaaagagccaatgatgaatttcgctggagagatggaacaccagtgatataccagaactgggacacaggaagagaaagaactgtgaataatcagagccagagatgtggctttatttcttctataacaggactctggggtagtgaagagtgttcagtttctatgcctagtatctgtaagcgaaaaaaggtttggctcatagagaaaaagaaagatacaccaaaacaacatggaacgtgtcccaaaggatggctatattttaactataagtgccttctgctgaatatccccaaagacccaagcagttggaagaactggacgcatgctcaacatttctgtgctgaagaaggggggaccctggtcgccattgaaagtgaggtggagcaagctttcattactatgaatctttttggccagaccaccagtgtgtggataggtttacaaaatgatgattatgaaacatggctaaatggaaagcctgtggtatattctaactggtctccatttgatataataaatattccaagtcacaataccactgaagttcagaaacacattcctctctgtgccttactctcaagtaatcctaattttcatttcactggaaaatggtattttgaagactgtggaaaggaaggctatgggtttgtttgtgaaaaaatgcaagatacttctggacacggtgtaaatacatctgatatgtatccaatgcccaataccttagaatatggaaacagaacttacaaaataattaatgcaaatatgacttggtatgcagcaataaaaacctgcctgatgcacaaagcacaactggtcagcatcacagaccagtatcaccagtccttcctcactgttgtcctcaaccggctaggatatgcccactggattggactgttcaccacagataatggtcttaattttgactggtctgatggcaccaaatcttctttcactttttggaaagatgaggagtcctccctccttggtgactgcgtttttgccgacagcaacggacgctggcatagcacagcctgcgagtcatttctgcaaggtgccatttgtcatgtgccacctgaaacaagacaatctgaacacccagagttgtgctcagaaacatctattccctggataaaatttaaaagtaattgctacagtttttctacagtcctagacagtatgagttttgaggctgctcatgaattttgcaaaaaggaaggttctaatcttttaacaatcaaggatgaggctgaaaatgcatttctcctagaagagctgtttgcttttggttcttctgtccagatggtttggttgaatgctcaatttgatggtaacaatgaaaccataaagtggtttgatggaactcccacagaccagtcaaactggggcattcggaagccagacacagactacttcaagccccatcattgtgttgccttgaggatccctgaaggattatggcagctatccccgtgtcaagaaaaaaaaggctttatatgtaaaatggaggcagatattcacactgcagaggcgctgccagaaaaaggaccaagtcacagcatcattcctcttgcggttgtactgacactgatagtcattgtggccatttgcacactttccttctgcatatacaagcataacggtggcttcttcaggagacttgcagggtttcggaatccttactatcctgcaaccaactttagtacagtatatttagaagaaaatattctcatttctgatcttgagaagagtgaccaataataatgaggtcagagaatgccacagacaccagggtaagtaaagaagactaaacaggagtctcatctgtctttccctttacagcacagatgccattagaatgtgaattgggtcactattttaattattcttgaagtgattactggttttgaatcttaaccaaatcagatgggttttgatttattcatttccctaaactgtgatccattcttaaaaggggtaaattatgcattggttatttttcagaaagacaagaactattaaaagaaactccctattg

SEQ ID NO: 658 - protein, 1463 aa, Homo sapiens
MLLSPSLLLLLLLGAPRGCAEGVAAALTPERLLEWQDKGIFVIQSESLKKCIQAGKSVLTLENCKQANKHMLWKWVSNHGLFNIGGSGCLGLNFSAPEQPLSLYECDSTLVSLRWRCNRKMITGPLQYSVQVAHDNTVVASRKYIHKWISYGSGGGDICEYLHKDLHTIKGNTHGMPCMFPFQYNHQWHHECTREGREDDLLWCATTSRYERDEKWGFCPDPTSAEVGCDTIWEKDLNSHICYQFNLLSSLSWSEAHSSCQMQGGTLLSITDETEENFIREHMSSKTVEVWMGLNQLDEHAGWQWSDGTPLNYLNWSPEVNFEPFVEDHCGTFSSFMPSAWRSRDCESTLPYICKKYLNHIDHEIVEKDAWKYYATHCEPGWNPYNRNCYKLQKEEKTWHEALRSCQADNSALIDITSLAEVEFLVTLLGDENASETWIGLSSNKIPVSFEWSNDSSVIFTNWHTLEPHIFPNRSQLCVSAEQSEGHWKVKNCEERLFYICKKAGHVLSDAESGCQEGWERHGGFCYKIDTVLRSFDQASSGYYCPPALVTITNRFEQAFITSLISSVVKMKDSYFWIALQDQNDTGEYTWKPVGQKPEPVQYTHWNTHQPRYSGGCVAMRGRHPLGRWEVKHCRHFKAMSLCKQPVENQEKAEYEERWPFHPCYLDWESEPGLASCFKVFHSEKVLMKRTWREAEAFCEEFGAHLASFAHIEEENFVNELLHSKFNWTEERQFWIGFNKRNPLNAGSWEWSDRTPVVSSFLDNTYFGEDARNCAVYKANKTLLPLHCGSKREWICKIPRDVKPKIPFWYQYDVPWLFYQDAEYLFHTFASEWLNFEFVCSWLHSDLLTIHSAHEQEFIHSKIKALSKYGASWWIGLQEERANDEFRWRDGTPVIYQNWDTGRERTVNNQSQRCGFISSITGLWGSEECSVSMPSICKRKKVWLIEKKKDTPKQHGTCPKGWLYFNYKCLLLNIPKDPSSWKNWTHAQHFCAEEGGTLVAIESEVEQAFITMNLFGQTTSVWIGLQNDDYETWLNGKPVVYSNWSPFDIINIPSHNTTEVQKHIPLCALLSSNPNFHFTGKWYFEDCGKEGYGFVCEKMQDTSGHGVNTSDMYPMPNTLEYGNRTYKIINANMTWYAAIKTCLMHKAQLVSITDQYHQSFLTVVLNRLGYAHWIGLFTTDNGLNFDWSDGTKSSFTFWKDEESSLLGDCVFADSNGRWHSTACESFLQGAICHVPPETRQSEHPELCSETSIPWIKFKSNCYSFSTVLDSMSFEAAHEFCKKEGSNLLTIKDEAENAFLLEELFAFGSSVQMVWLNAQFDGNNETIKWFDGTPTDQSNWGIRKPDTDYFKPHHCVALRIPEGLWQLSPCQEKKGFICKMEADIHTAEALPEKGPSHSIIPLAVVLTLIVIVAICTLSFCIYKHNGGFFRRLAGFRNPYYPATNFSTVYLEENILISDLEKSDQ

SEQ ID NO: 659 - DNA, 1635 bp, Homo sapiens
caacatgagggacccactgacagattgtccgtataataaagtatacaagaacctaaaggagttttctcaaaatggagagaatttctgcaaacaggtcacatctgttcttcagcaaagggcaaacctggaaattagctatgccaaaggacttcagaaactggcaagcaagctgagcaaagcattacagaacacgagaaaaagttgtgttagcagtgcctgggcctgggcctcagagggaatgaaatccacagcggacctgcatcaaaaacttggcaaagcaattgaattggaagcaataaaaccgacttatcaagtcctaaatgtacaagagaagaagagaaaatcacttgacaatgaagttgaaaagacagcaaatcttgtcattagcaactggaatcagcaaattaaggccaagaagaaattaatggttagtaccaagaaacatgaagcacttttccagcttgtagaaagctccaagcaatctatgactgagaaggagaagcggaagctcctcaataaactgacaaaatcaactgaaaagttggaaaaggaagatgaaaattactaccaaaaaaacatggcgggttattctaccagactgaaatgggaaaacacactagagaactgctaccagagcattctggagctggagaaggaaagaattcaacttttatgcaataacttaaaccagtacagccaacatatttctctttttggccaaaccctgaccacatgccacacgcagattcactgtgccatcagcaagattgacattgaaaaagatatccaggctgtaatggaagaaactgcaattttatctacagaaaacaaatctgagttcctgttaacggattactttgaagaagatcctaacagtgcaatggataaagagagacgaaagtctttactaaaaccaaaattattgagactgcagagagacattgaaaaagcctcaaaagacaaggaaggcctggaacgaatgcttaaaacgtactccagcacctcctccttctctgatgcaaagagccagaaagacacagcagcgttaatggatgagaacaatttgaaactagaccttttggaagcgaactcctacaaactgtcatcaatgttagcagaacttgagcaaagacctcaacccagccatccttgtagtaattccatcttcaggtggagggaaaaggagcatactcatagctatgtgaaaatatctcggccttttttaatgaagagattagagaatattgtgagcaaggcatcttctggtgggcagagcaatccaggttcttcaactccagcccctggtgcagcccagctcagcagcagactttgcaaggccttgtattcttttcaagccaggcaagatgatgagttgaatttggaaaagggtgacattgtgattatacacgagaaaaaagaagaaggatggtggtttggatctttgaatgggaaaaaaggccattttcctgccgcttatgtggaggagttaccttcaaatgctggcaacacagctacaaaggcataaaacaagactctgaacatactaccttcacactcggtaatcaacaatacagtgtggttcaaataagaataaagtgctcttacccaaaaaaaaaaaaaaaaaaaaaaaaaaaa

SEQ ID NO: 660 - protein, 506 aa, Homo sapiens
MRDPLTDCPYNKVYKNLKEFSQNGENFCKQVTSVLQQRANLEISYAKGLQKLASKLSKALQNTRKSCVSSAWAWASEGMKSTADLHQKLGKAIELEAIKPTYQVLNVQEKKRKSLDNEVEKTANLVISNWNQQIKAKKKLMVSTKKHEALFQLVESSKQSMTEKEKRKLLNKLTKSTEKLEKEDENYYQKNMAGYSTRLKWENTLENCYQSILELEKERIQLLCNNLNQYSQHISLFGQTLTTCHTQIHCAISKIDIEKDIQAVMEETAILSTENKSEFLLTDYFEEDPNSAMDKERRKSLLKPKLLRLQRDIEKASKDKEGLERMLKTYSSTSSFSDAKSQKDTAALMDENNLKLDLLEANSYKLSSMLAELEQRPQPSHPCSNSIFRWREKEHTHSYVKISRPFLMKRLENIVSKASSGGQSNPGSSTPAPGAAQLSSRLCKALYSFQARQDDELNLEKGDIVIIHEKKEEGWWFGSLNGKKGHFPAAYVEELPSNAGNTATKA

SEQ ID NO: 661 - DNA, 1588 bp, Homo sapiens
ccagaatgctggagcgtaggtgaaaggacaaaagccagacacatttcaacatgagggacccactgacagattgtccgggcaaacctggaaattagctatgccaaaggacttcagaaactggcaagcaagctgagcaaagcattacagaacacgagaaaaagttgtgttagcagtgcctgggcctgggcctcagagggaatgaaatccacagcggacctgcatcaaaaacttggcaaagcaattgaattggaagcaataaaaccgacttatcaagtcctaaatgtacaagagaagaagagaaaatcacttgacaatgaagttgaaaagacagcaaatcttgtcattagcaactggaatcagcaaattaaggccaagaagaaattaatggttagtaccaagaaacatgaagcacttttccagcttgtagaaagctccaagcaatctatgactgagaaggagaagcggaagctcctcaataaactgacaaaatcaactgaaaagttggaaaaggaagatgaaaattactaccaaaaaaacatggcgggttattctaccagactgaaatgggaaaacacactagagaactgctaccagagcattctggagctggagaaggaaagaattcaacttttatgcaataacttaaaccagtacagccaacatatttctctttttggccaaaccctgaccacatgccacacgcagattcactgtgccatcagcaagattgacattgaaaaagatatccaggctgtaatggaagaaactgcaattttatctacagaaaacaaatctgagttcctgttaacggattactttgaagaagatcctaacagtgcaatggataaagagagacgaaagtctttactaaaaccaaaattattgagactgcagagagacattgaaaaagcctcaaaagacaaggaaggcctggaacgaatgcttaaaacgtactccagcacctcctccttctctgatgcaaagagccagaaagacacagcagcgttaatggatgagaacaatttgaaactagaccttttggaagcgaactcctacaaactgtcatcaatgttagcagaacttgagcaaagacctcaacccagccatccttgtagtaattccatcttcaggtggagggaaaaggagcatactcatagctatgtgaaaatatctcggccttttttaatgaagagattagagaatattgtgagcaaggcatcttctggtgggcagagcaatccaggttcttcaactccagcccctggtgcagcccagctcagcagcagactttgcaaggccttgtattcttttcaagccaggcaagatgatgagttgaatttggaaaagggtgacattgtgattatacacgagaaaaaagaagaaggatggtggtttggatctttgaatgggaaaaaaggccattttcctgccgcttatgtggaggagttaccttcaaatgctggcaacacagctacaaaggcataaaacaagactctgaacatactaccttcacactcggtaatcaacaatacagtgtggttcaaataagaataaagtgctcttacctttaaaaaaaaaaaaaaaaaaa

SEQ ID NO: 662 - protein, 428 aa, Homo sapiens
MKSTADLHQKLGKAIELEAIKPTYQVLNVQEKKRKSLDNEVEKTANLVISNWNQQIKAKKKLMVSTKKHEALFQLVESSKQSMTEKEKRKLLNKLTKSTEKLEKEDENYYQKNMAGYSTRLKWENTLENCYQSILELEKERIQLLCNNLNQYSQHISLFGQTLTTCHTQIHCAISKIDIEKDIQAVMEETAILSTENKSEFLLTDYFEEDPNSAMDKERRKSLLKPKLLRLQRDIEKASKDKEGLERMLKTYSSTSSFSDAKSQKDTAALMDENNLKLDLLEANSYKLSSMLAELEQRPQPSHPCSNSIFRWREKEHTHSYVKISRPFLMKRLENIVSKASSGGQSNPGSSTPAPGAAQLSSRLCKALYSFQARQDDELNLEKGDIVIIHEKKEEGWWFGSLNGKKGHFPAAYVEELPSNAGNTATKA

SEQ ID NO: 663 - DNA, 1375 bp, Homo sapiens
gtttgaaatcggaaagttggcggggctgcgggagctgagcctagagtccggctgttggctagagtgggcgcggatctggtgtggggaaggcggcgggactcaggcctgcctgcgaagcattgtcctacataatggtagaggacgaactggcacttttcgataaaagcataaatgaattttggaataaattcaaaagtacggacacctcctgtcagatggcgggactaagagatacctacaaggattccatcaaagcatttgcagaaaagctgtctgtgaaattaaaggaagaagaacgaatggttgagatgtttctggaatatcaaaatcagatcagcaggcaaaataagctcattcaagaaaaaaaggataacttgttaaaattgattgctgaagtaaaaggcaaaaagcaggaattggaagtactgactgcaaatatccaggatcttaaggaagaatattctaggaagaaggaaactatttctactgctaataaagcgaatgcagagaggttgaaaaggctgcagaaatctgcagacttgtataaagatcgacttggactagaaattcgaaaaatttatggtgagaaattgcagtttattttcactaatattgaccctaagaatcctgagagcccatttatgttttccttacatctcaatgaagcaagggactatgaagtgtcagatagtgcccctcatcttgagggcctagcagaatttcaagagaatgtaaggaagaccaacaatttttcagcttttcttgccaatgttcggaaagcttttactgccacggtttataattaacatacaaatagtgtatataaaaacggtttatttttcttctctattacatatctctttttttcttgtttttattattattatactttaagttttagggtacatgtgcacaatgtgcaggtttgttacatatgtatacatgtgccatattggtgtgctgcacccattaactcgtcatttcattaggtatatctcctaatgctatccctcccccctcccccaacccacaacagtccccgttgtgtgatgttccccttcctgtgtccatgtgttctcattgttcaattcccacctaggagtgagaatatgtggtgtttggttttttgtcctttcgatagtttgctgagaatgatggtttccagcttcatccatgttcctacaaaggacatgaactcatccttttttatggctgcatagtattccatggtgtatatgtgccacattttcttaatccagtctatcattgttggacatttgggttggttccaagtctttgctattgtgaatagtgccgaaataaacatacgtgtgcatgtgtctttaaaaaaaaaaaaaaaaaaaaaaaaaaaaaa

SEQ ID NO: 664 - protein, 224 aa, Homo sapiens
MVEDELALFDKSINEFWNKFKSTDTSCQMAGLRDTYKDSIKAFAEKLSVKLKEEERMVEMFLEYQNQISRQNKLIQEKKDNLLKLIAEVKGKKQELEVLTANIQDLKEEYSRKKETISTANKANAERLKRLQKSADLYKDRLGLEIRKIYGEKLQFIFTNIDPKNPESPFMFSLHLNEARDYEVSDSAPHLEGLAEFQENVRKTNNFSAFLANVRKAFTATVYN

SEQ ID NO: 665 - DNA, 1068 bp, Homo sapiens
atggatttccttcacaggaatggagtgctcataattcagcatttgcagaaggactaccgagcttactacacttttctaaattttatgtccaatgttggagaccccaggaatatctttttcatttattttccactttgttttcaatttaatcagacagttggaaccaagatgatatgggtagcagtcattggggattggttaaatcttatatttaaatggatattatttggtcatcgaccttactggtgggtccaagaaactcagatttacccaaatcactcaagtccatgccttgaacagttccctactacatgtgaaacaggtccaggaagtccatctggccatgcaatgggcgcatcctgtgtctggtatgtcatggtaaccgctgccctgagccacactgtctgtgggatggataagttctctatcactctgcacagactgacctggtcatttctttggagtgttttttggttgattcaaatcagtgtctgcatctccagagtattcatagcaacacattttcctcatcaagttattcttggagtaattggtggcatgctggtggcagaggcctttgaacacactccaggcatccaaacggccagtctgggcacatacctgaagaccaacctctttctcttcctgtttgcagttggcttttacctgcttcttagggtgctcaacattgacctgctgtggtccgtgcccatagccaaaaagtggtgtgctaaccccgactggatccacattgacaccacgccttttgctggactcgtgagaaaccttggggtcctctttggcttgggctttgcaatcaactcagagatgttcctcctgagctgccgagggggaaataactacacactgagcttccggttgctctgtgccttgacctcattgacaatactgcagctctaccatttcctccagatcccgactcacgaagagcatttattttatgtgctgtctttttgtaaaagtgcatccattcccctaactgtggttgctttcattccctactctgttcatatgttaatgaaacaaagcggaaagaagagtcagtag

SEQ ID NO: 666 - protein, 355 aa, Homo sapiens
MDFLHRNGVLIIQHLQKDYRAYYTFLNFMSNVGDPRNIFFIYFPLCFQFNQTVGTKMIWVAVIGDWLNLIFKWILFGHRPYWWVQETQIYPNHSSPCLEQFPTTCETGPGSPSGHAMGASCVWYVMVTAALSHTVCGMDKFSITLHRLTWSFLWSVFWLIQISVCISRVFIATHFPHQVILGVIGGMLVAEAFEHTPGIQTASLGTYLKTNLFLFLFAVGFYLLLRVLNIDLLWSVPIAKKWCANPDWIHIDTTPFAGLVRNLGVLFGLGFAINSEMFLLSCRGGNNYTLSFRLLCALTSLTILQLYHFLQIPTHEEHLFYVLSFCKSASIPLTVVAFIPYSVHMLMKQSGKKSQ

SEQ ID NO: 667 - DNA, 4775 bp, Homo sapiens
gaatgatgaaaaccgaggttggaaaaggttgtgaaaccttttaactctccacagtggagtccattatttcctctggcttcctcaaattcatattcacagggtcgttggctgtgggttgcaattaccatgtctgactcagtaattcttcgaagtataaagaaatttggagaggagaatgatggttttgagtcagataaatcatataataatgataagaaatcaaggttacaagatgagaagaaaggtgatggcgttagagttggcttctttcaattgtttcggttttcttcatcaactgacatttggctgatgtttgtgggaagtttgtgtgcatttctccatggaatagcccagccaggcgtgctactcatttttggcacaatgacagatgtttttattgactacgacgttgagttacaagaactccagattccaggaaaagcatgtgtgaataacaccattgtatggactaacagttccctcaaccagaacatgacaaatggaacacgttgtgggttgctgaacatcgagagcgaaatgatcaaatttgccagttactatgctggaattgctgtcgcagtacttatcacaggatatattcaaatatgcttttgggtcattgccgcagctcgtcagatacagaaaatgagaaaattttactttaggagaataatgagaatggaaatagggtggtttgactgcaattcagtgggggagctgaatacaagattctctgatgatattaataaaatcaatgatgccatagctgaccaaatggcccttttcattcagcgcatgacctcgaccatctgtggtttcctgttgggatttttcaggggttggaaactgaccttggttattatttctgtcagccctctcattgggattggagcagccaccattggtctgagtgtgtccaagtttacggactatgagctgaaggcctatgccaaagcaggggtggtggctgatgaagtcatttcatcaatgagaacagtggctgcttttggtggtgagaaaagagaggttgaaaggtatgagaaaaatcttgtgttcgcccagcgttggggaattagaaaaggaatagtgatgggattctttactggattcgtgtggtgtctcatctttttgtgttatgcactggccttctggtacggctccacacttgtcctggatgaaggagaatatacaccaggaacccttgtccagattttcctcagtgtcatagtaggagctttaaatcttggcaatgcctctccttgtttggaagcctttgcaactggacgtgcagcagccaccagcatttttgagacaatagacaggaaacccatcattgactgcatgtcagaagatggttacaagttggatcgaatcaagggtgaaattgaattccataatgtgaccttccattatccttccagaccagaggtgaagattctaaatgacctcaacatggtcattaaaccaggggaaatgacagctctggtaggacccagtggagctggaaaaagtacagcactgcaactcattcagcgattctatgacccctgtgaaggaatggtgaccgtggatggccatgacattcgctctcttaacattcagtggcttagagatcagattgggatagtggagcaagagccagttctgttctctaccaccattgcagaaaatattcgctatggcagagaagatgcaacaatggaagacatagtccaagctgccaaggaggccaatgcctacaacttcatcatggacctgccacagcaatttgacacccttgttggagaaggaggaggccagatgagtggtggccagaaacaaagggtagctatcgccagagccctcatccgaaatcccaagattctgcttttggacatggccacctcagctctggacaatgagagtgaagccatggtgcaagaagtgctgagtaagattcagcatgggcacacaatcatttcagttgctcatcgcttgtctacggtcagagctgcagataccatcattggttttgaacatggcactgcagtggaaagagggacccatgaagaattactggaaaggaaaggtgtttacttcactctagtgactttgcaaagccagggaaatcaagctcttaatgaagaggacataaaggatgcaactgaagatgacatgcttgcgaggacctttagcagagggagctaccaggatagtttaagggcttccatccggcaacgctccaagtctcagctttcttacctggtgcacgaacctccattagctgttgtagatcataagtctacctatgaagaagatagaaaggacaaggacattcctgtgcaggaagaagttgaacctgccccagttaggaggattctgaaattcagtgctccagaatggccctacatgctggtagggtctgtgggtgcagctgtgaacgggacagtcacacccttgtatgcctttttattcagccagattcttgggactttttcaattcctgataaagaggaacaaaggtcacagatcaatggtgtgtgcctactttttgtagcaatgggctgtgtatctcttttcacccaatttctacagggatatgcctttgctaaatctggggagctcctaacaaaaaggctacgtaaatttggtttcagggcaatgctggggcaagatattgcctggtttgatgacctcagaaatagccctggagcattgacaacaagacttgctacagatgcttcccaagttcaaggggctgccggctctcagatcgggatgatagtcaattccttcactaacgtcactgtggccatgatcattgccttctcctttagctggaagctgagcctggtcatcttgtgcttcttccccttcttggctttatcaggagccacacagaccaggatgttgacaggatttgcctctcgagataagcaggccctggagatggtgggacagattacaaatgaagccctcagtaacatccgcactgttgctggaattggaaaggagaggcggttcattgaagcacttgagactgagctggagaagcccttcaagacagccattcagaaagccaatatttacggattctgctttgcctttgcccagtgcatcatgtttattgcgaattctgcttcctacagatatggaggttacttaatctccaatgaggggctccatttcagctatgtgttcagggtgatctctgcagttgtactgagtgcaacagctcttggaagagccttctcttacaccccaagttatgcaaaagctaaaatatcagctgcacgcttttttcaactgctggaccgacaacccccaatcagtgtatacaatactgcaggtgaaaaatgggacaacttccaggggaagattgattttgttgattgtaaatttacatatccttctcgacctgactcgcaagttctgaatggtctctcagtgtcgattagtccagggcagacactggcgtttgttgggagcagtggatgtggcaaaagcactagcattcagctgttggaacgtttctatgatcctgatcaagggaaggtgatgatagatggtcatgacagcaaaaaagtaaatgtccagttcctccgctcaaacattggaattgtttcccaggaaccagtgttgtttgcctgtagcataatggacaatatcaagtatggagacaacaccaaagaaattcccatggaaagagtcatagcagctgcaaaacaggctcagctgcatgattttgtcatgtcactcccagagaaatatgaaactaacgttgggtcccaggggtctcaactctctagaggggagaaacaacgcattgctattgctcgggccattgtacgagatcctaaaatcttgctactagatgaagccacttctgccttagacacagaaagtgaaaagacggtgcaggttgctctagacaaagccagagagggtcggacctgcattgtcattgcccatcgcttgtccaccatccagaacgcggatatcattgctgtcatggcacagggggtggtgattgaaaaggggacccatgaagaactgatggcccaaaaaggagcctactacaaactagtcaccactggatcccccatcagttgacccaatgcaagaatctcagacacacatgacgcaccagttacaggggttgtttttaaagaaaaaaacaatcccagcaggagggattgctgggattgttttttctttaaagaagaatgttaatattttacttttacagtcattttcctacatcggaatccaagctaatttctaatggccttccataataattctgctttagatgtgtatacagaaaatgaaagaaactagggtccatatgagggaaaacccaatgtcaagtggcagctcagccaccactcagtgcttctctgtgcaggagccagtcctgattaatatgtgggaattagtgagacatcagggagtaagtgacactttgaactcctcaagggcagagaactgtctttcatttttgaaccctcggtgtacacagaggcgggtctataacaggcaatcaacaaacgtttcttgagctagaccaaggtcagatttgaaaagaacagaaggactgaagaccagctgtgtttcttaactaaatttgtctttcaagtgaaaccagcttccttcatctctaaggctaaggatagggaaagggtggatgctctcaggctgagggaggcagaaagggaaagtattagcatgagctttccagttagggctgttgatttatgctttaacttcagagtgagtgtaggggtggtgatgct

SEQ ID NO: 668 - protein, 1321 aa, Homo sapiens
MSDSVILRSIKKFGEENDGFESDKSYNNDKKSRLQDEKKGDGVRVGFFQLFRFSSSTDIWLMFVGSLCAFLHGIAQPGVLLIFGTMTDVFIDYDVELQELQIPGKACVNNTIVWTNSSLNQNMTNGTRCGLLNIESEMIKFASYYAGIAVAVLITGYIQICFWVIAAARQIQKMRKFYFRRIMRMEIGWFDCNSVGELNTRFSDDINKINDAIADQMALFIQRMTSTICGFLLGFFRGWKLTLVIISVSPLIGIGAATIGLSVSKFTDYELKAYAKAGVVADEVISSMRTVAAFGGEKREVERYEKNLVFAQRWGIRKGIVMGFFTGFVWCLIFLCYALAFWYGSTLVLDEGEYTPGTLVQIFLSVIVGALNLGNASPCLEAFATGRAAATSIFETIDRKPIIDCMSEDGYKLDRIKGEIEFHNVTFHYPSRPEVKILNDLNMVIKPGEMTALVGPSGAGKSTALQLIQRFYDPCEGMVTVDGHDIRSLNIQWLRDQIGIVEQEPVLFSTTIAENIRYGREDATMEDIVQAAKEANAYNFIMDLPQQFDTLVGEGGGQMSGGQKQRVAIARALIRNPKILLLDMATSALDNESEAMVQEVLSKIQHGHTIISVAHRLSTVRAADTIIGFEHGTAVERGTHEELLERKGVYFTLVTLQSQGNQALNEEDIKDATEDDMLARTFSRGSYQDSLRASIRQRSKSQLSYLVHEPPLAVVDHKSTYEEDRKDKDIPVQEEVEPAPVRRILKFSAPEWPYMLVGSVGAAVNGTVTPLYAFLFSQILGTFSIPDKEEQRSQINGVCLLFVAMGCVSLFTQFLQGYAFAKSGELLTKRLRKFGFRAMLGQDIAWFDDLRNSPGALTTRLATDASQVQGAAGSQIGMIVNSFTNVTVAMIIAFSFSWKLSLVILCFFPFLALSGATQTRMLTGFASRDKQALEMVGQITNEALSNIRTVAGIGKERRFIEALETELEKPFKTAIQKANIYGFCFAFAQCIMFIANSASYRYGGYLISNEGLHFSYVFRVISAVVLSATALGRAFSYTPSYAKAKISAARFFQLLDRQPPISVYNTAGEKWDNFQGKIDFVDCKFTYPSRPDSQVLNGLSVSISPGQTLAFVGSSGCGKSTSIQLLERFYDPDQGKVMIDGHDSKKVNVQFLRSNIGIVSQEPVLFACSIMDNIKYGDNTKEIPMERVIAAAKQAQLHDFVMSLPEKYETNVGSQGSQLSRGEKQRIAIARAIVRDPKILLLDEATSALDTESEKTVQVALDKAREGRTCIVIAHRLSTIQNADIIAVMAQGVVIEKGTHEELMAQKGAYYKLVTTGSPIS

SEQ ID NO: 669 - DNA, 2939 bp, Homo sapiens
atctgaaaaattaataattccttaattatcaaatatccattatttaaatttataattgtgtcataaatattgtcataaatagatttgctgttttaaagcttgttccttcattttctctgttttgttttagataaacattgtcataaatagatttgttgttttaaagcttgttccttcattttctctgattgttttgttttagattcagaggttacttatgcttgtttgttacatggatgttacatgtgtaatgggggatattggacttctagtgtactcatcacccatatactgaacactgtactcaaaagggattgaaagaaactaggaaacttggcaggaagatcattcttaagccaggaaaaaaatttttaatgctcacatgtgaacatgtgatggtcataccagaaggagcacccacctccctccctctgtgacagacacattttcttagccttcacctttccttctttcaagttgctgaaaatccacagtgtttctgttcatttgttactttcattctcacctatcttctctcttgctccatctaccagaacaataattccccatataatacttctcacttcacttttcaacgcaggacctcttgttggtctgatctgtttgtctgtccgctttatcaatattatcagatgtaagtttacatgaatacacacacatattcactaaactgaggggaaaaaatgccttgtaggtcataaaaaagcagggaaattcccaacaattcatatttgatccctggatccaggggtggcagcaataagcctgctttagatatttactccccattttatgatccggtggtttggtttttcaaatgatgatatggctcctttcgcaatgacttgatgtttaggaggtgtgcttcaataaatacattttaaaatcaacaatcaagttagagttgtacaaatggctctgaaatgtcccactacactgttagaccaagggcacagattgtgcttctgtactatttatcctagtatccctcggcatatattaactgctctaaaaatctccttggctacacgctgcatcaaatcaaagttaaatgttataccacctttctattctatttttaatattcaaagagggtgctcagattttagaacaaatttcaatgtttaagtacacacaaaaaaatcattaactcatatatttcaagagtaggaaatgggaactggtgttaaaactcttataacaaatgtcactgtcttaagggacagtgtttaaaaacgcatacctggccgggcgcggtggctcatgcctgtaatcccagcactttgggaggccgaggccggcggatcacaaggaaaacaaactcaggaagaaaaaggaaagcagaagtgatcaaggagagcgctcgagttgcaatattttcctttggctgctgacaggcagttactataaagcattgtgcatggacaccatcttcttgtattatacaagaaaggagtgtacctatcacacacagggggaaaaatgctcttttgggtgctaggcctcctaatcctctgtggttttctgtggactcgtaaaggaaaactaaagattgaagacatcactgataagtacatttttatcactggatgtgactcgggctttggaaacttggcagccagaacttttgataaaaagggatttcatgtaatcgctgcctgtctgactgaatcaggatcaacagctttaaaggcagaaacctcagagagacttcgtactgtgcttctggatgtgaccgacccagagaatgtcaagaggactgcccagtgggtgaagaaccaagttggggagaaaggtctctggggtctgatcaataatgctggtgttcccggcgtgctggctcccactgactggctgacactagaggactacagagaacctattgaagtgaacctgtttggactcatcagtgtgacactaaatatgcttcctttggtcaagaaagctcaagggagagttattaatgtctccagtgttggaggtcgccttgcaatcgttggagggggctatactccatccaaatatgcagtggaaggtttcaatgacagcttaagacgggacatgaaagcttttggtgtgcacgtctcatgcattgaaccaggattgttcaaaacaaacttggcagatccagtaaaggtaattgaaaaaaaactcgccatttgggagcagctgtctccagacatcaaacaacaatatggagaaggttacattgaaaaaagtctagacaaactgaaaggcaataaatcctatgtgaacatggacctctctccggtggtagagtgcatggaccacgctctaacaagtctcttccctaagactcattatgccgctggaaaagatgccaaaattttctggatacctctgtctcacatgccagcagctttgcaagactttttattgttgaaacagaaagcagagctggctaatcccaaggcagtgtgactcagctaaccacaaatgtctcctccaggctatgaaattggccgatttcaagaacacatctccttttcaaccccattccttatctgctccaacctggactcatttagatcgtgcttatttggattgcaaaagggagtcccaccatcgctggtggtatcccagggtccctgctcaagttttctttgaaaaggagggctggaatggtacatcacataggcaagtcctgccctgtatttaggctttgcctgcttggtgtgatgtaagggaaattgaaagacttgcccattcaaaatgatctttaccgtggcctgccccatgcttatggtccccagcatttacagtaacttgtgaatgttaagtatcatctcttatctaaatattaaaagataagtcaaacattaaaaaaaaaaaaaaaaaaaaaaaaaaaaaaaaaaaaaaaaaaaaaaaaaaaaaaaaaaaaaaaaaaaaaaaaaaaa

SEQ ID NO: 670 - protein, 319 aa, Homo sapiens
MLFWVLGLLILCGFLWTRKGKLKIEDITDKYIFITGCDSGFGNLAARTFDKKGFHVIAACLTESGSTALKAETSERLRTVLLDVTDPENVKRTAQWVKNQVGEKGLWGLINNAGVPGVLAPTDWLTLEDYREPIEVNLFGLISVTLNMLPLVKKAQGRVINVSSVGGRLAIVGGGYTPSKYAVEGFNDSLRRDMKAFGVHVSCIEPGLFKTNLADPVKVIEKKLAIWEQLSPDIKQQYGEGYIEKSLDKLKGNKSYVNMDLSPVVECMDHALTSLFPKTHYAAGKDAKIFWIPLSHMPAALQDFLLLKQKAELANPKAV

SEQ ID NO: 671 - DNA, 1993 bp, Homo sapiens
aggaagaaaatataaagtacacttttaaaacatgaagtcttcatagcagcttatagtcgttcagagaaacatgttccactgagaatgacttgagagagaggattacatcattatgccagaaggaagaagccactgtgcatgctctatcaccagcctcaccctcctggtcagccttacaagagtgacactggatatactccagaagttggacccaccacagcctgcacactggacttcttggcttttatgagctattcaagagatatttagtcatcacgttgtgtcacaatgggagtgactcacagagcaaggagagaacctgaggattcctcacacatgtagtactcagagctctacggaaacccaggcacctcgacctcaagaggatcagcctggccagggtggcacaactcttccttccccgtgcacagcaggaaagctgccatcagctgagcaagtccaccaacagtttctgtgtcccacttcatctttaataaggacaccatcttcttgtattatacaagaaaggagtgtacctatcacacacagggggaaaaatgctcttttgggtgctaggcctcctaatcctctgtggttttctgtggactcgtaaaggaaaactaaagattgaagacatcactgataagtacatttttatcactggatgtgactcgggctttggaaacttggcagccagaacttttgataaaaagggatttcatgtaatcgctgcctgtctgactgaatcaggatcaacagctttaaaggcagaaacctcagagagacttcgtactgtgcttctggatgtgaccgacccagagaatgtcaagaggactgcccagtgggtgaagaaccaagttggggagaaaggtctctggggtctgatcaataatgctggtgttcccggcgtgctggctcccactgactggctgacactagaggactacagagaacctattgaagtgaacctgtttggactcatcagtgtgacactaaatatgcttcctttggtcaagaaagctcaagggagagttattaatgtctccagtgttggaggtcgccttgcaatcgttggagggggctatactccatccaaatatgcagtggaaggtttcaatgacagcttaagacgggacatgaaagcttttggtgtgcacgtctcatgcattgaaccaggattgttcaaaacaaacttggcagatccagtaaaggtaattgaaaaaaaactcgccatttgggagcagctgtctccagacatcaaacaacaatatggagaaggttacattgaaaaaagtctagacaaactgaaaggcaataaatcctatgtgaacatggacctctctccggtggtagagtgcatggaccacgctctaacaagtctcttccctaagactcattatgccgctggaaaagatgccaaaattttctggatacctctgtctcacatgccagcagctttgcaagactttttattgttgaaacagaaagcagagctggctaatcccaaggcagtgtgactcagctaaccacaaatgtctcctccaggctatgaaattggccgatttcaagaacacatctccttttcaaccccattccttatctgctccaacctggactcatttagatcgtgcttatttggattgcaaaagggagtcccaccatcgctggtggtatcccagggtccctgctcaagttttctttgaaaaggagggctggaatggtacatcacataggcaagtcctgccctgtatttaggctttgcctgcttggtgtgatgtaagggaaattgaaagacttgcccattcaaaatgatctttaccgtggcctgccccatgcttatggtccccagcatttacagtaacttgtgaatgttaagtatcatctcttatctaaatattaaaagataagtcaaacattaaaaaaaaaaaaaaaaaaaaaaaaaaaaaaaaaaaaaaaaaaaaaaaaaaaaaaaaaaaaaaaaaaaaaaaaaaaa

SEQ ID NO: 672 - protein, 319 aa, Homo sapiens; identical to SEQ ID NO: 670

SEQ ID NO: 673 - DNA, 8192 bp, Homo sapiens
gcagacctaaaggagcgttcgctagcagaggcgctgccggtgcggtgtgctacgcgcgcccacctcccggggaaggaacggcgaggccggggaccgtcgcggagatggatcgcgggccggcagcagtggcgtgcacgctgctcctggctctcgtcgcctgcctagcgccggccagtggccaagaatgtgacagtgcgcattttcgctgtggaagtgggcattgcatccctgcagactggaggtgtgatgggaccaaagactgttcagatgacgcggatgaaattggctgcgctgttgtgacctgccagcagggctatttcaagtgccagagtgagggacaatgcatccccagctcctgggtgtgtgaccaagatcaagactgtgatgatggctcagatgaacgtcaagattgctcacaaagtacatgctcaagtcatcagataacatgctccaatggtcagtgtatcccaagtgaatacaggtgcgaccacgtcagagactgccccgatggagctgatgagaatgactgccagtacccaacatgtgagcagcttacttgtgacaatggggcctgctataacaccagtcagaagtgtgattggaaagttgattgcagggactcctcagatgaaatcaactgcactgagatatgcttgcacaatgagttttcatgtggcaatggagagtgtatccctcgtgcttatgtctgtgaccatgacaatgattgccaagacggcagtgatgaacatgcttgcaactatccgacctgcggtggttaccagttcacttgccccagtggccgatgcatttatcaaaactgggtttgtgatggagaagatgactgtaaagataatggagatgaagatggatgtgaaagcggtcctcatgatgttcataaatgttccccaagagaatggtcttgcccagagtcgggacgatgcatctccatttataaagtttgtgatgggattttagattgcccaggaagagaagatgaaaacaacactagtaccggaaaatactgtagtatgactctgtgctctgccttgaactgccagtaccagtgccatgagacgccgtatggaggagcgtgtttttgtcccccaggttatatcatcaaccacaatgacagccgtacctgtgttgagtttgatgattgccagatatggggaatttgtgaccagaagtgtgaaagccgacctggccgtcacctgtgccactgtgaagaagggtatatcttggagcgtggacagtattgcaaagctaatgattcctttggcgaggcctccattatcttctccaatggtcgggatttgttaattggtgatattcatggaaggagcttccggatcctagtggagtctcagaatcgtggagtggccgtgggtgtggctttccactatcacctgcaaagagttttttggacagacaccgtgcaaaataaggttttttcagttgacattaatggtttaaatatccaagaggttctcaatgtttctgttgaaaccccagagaacctggctgtggactgggttaataataaaatctatctagtggaaaccaaggtcaaccgcatagatatggtaaatttggatggaagctatcgggttacccttataactgaaaacttggggcatcctagaggaattgccgtggacccaactgttggttatttatttttctcagattgggagagcctttctggggaacctaagctggaaagggcattcatggatggcagcaaccgtaaagacttggtgaaaacaaagctgggatggcctgctggggtaactctggatatgatatcgaagcgtgtttactgggttgactctcggtttgattacattgaaactgtaacttatgatggaattcaaaggaagactgtagttcatggaggctccctcattcctcatccctttggagtaagcttatttgaaggtcaggtgttctttacagattggacaaagatggccgtgctgaaggcaaacaagttcacagagaccaacccacaagtgtactaccaggcttccctgaggccctatggagtgactgtttaccattccctcagacagccctatgctaccaatccgtgtaaagataacaatgggggctgtgagcaggtctgtgttctcagccacagaacagataatgatggtttgggtttccgttgcaagtgcacattcggcttccaactggatacagatgagcgccactgcattgctgttcagaatttcctcattttttcatcccaagttgctattcgtgggatcccgttcaccttgtctacccaggaagatgtcatggttccagtttcggggaatccttctttctttgtcgggattgattttgacgcccaggacagcactatctttttttcagatatgtcaaaacacatgatttttaagcaaaagattgatggcacaggaagagaaattctcgcagctaacagggtggaaaatgttgaaagtttggcttttgattggatttcaaagaatctctattggacagactctcattacaagagtatcagtgtcatgaggctagctgataaaacgagacgcacagtagttcagtatttaaataacccacggtcggtggtagttcatccttttgccgggtatctattcttcactgattggttccgtcctgctaaaattatgagagcatggagtgacggatctcacctcttgcctgtaataaacactactcttggatggcccaatggcttggccatcgattgggctgcttcacgattgtactgggtagatgcctattttgataaaattgagcacagcacctttgatggtttagacagaagaagactgggccatatagagcagatgacacatccgtttggacttgccatctttggagagcatttattttttactgactggagactgggtgccattattcgagtcaggaaagcagatggtggagaaatgacagttatccgaagtggcattgcttacatactgcatttgaaatcgtatgatgtcaacatccagactggttctaacgcctgtaatcaacccacgcatcctaacggtgactgcagccacttctgcttcccggtgccaaatttccagcgagtgtgtgggtgcccttatggaatgaggctggcttccaatcacttgacatgcgagggggacccaaccaatgaaccacccacggagcagtgtggcttattttccttcccctgtaaaaatggcagatgtgtgcccaattactatctctgtgatggagtcgatgattgtcatgataacagtgatgagcaactatgtggcacacttaataatacctgttcatcttcggcgttcacctgtggccatggggagtgcattcctgcacactggcgctgtgacaaacgcaacgactgtgtggatggcagtgatgagcacaactgccccacccacgcacctgcttcctgccttgacacccaatacacctgtgataatcaccagtgtatctcaaagaactgggtctgtgacacagacaatgattgtggggatggatctgatgaaaagaactgcaattcgacagagacatgccaacctagtcagtttaattgccccaatcatcgatgtattgacctatcgtttgtctgtgatggtgacaaggattgtgttgatggatctgatgaggttggttgtgtattaaactgtactgcttctcaattcaagtgtgccagtggggataaatgtattggcgtcacaaatcgttgtgatggtgtttttgattgcagtgacaactcggatgaagcgggctgtccaaccaggcctcctggtatgtgccactcagatgaatttcagtgccaagaagatggtatctgcatcccgaacttctgggaatgtgatgggcatccagactgcctctatggatctgatgagcacaatgcctgtgtccccaagacttgcccttcatcatatttccactgtgacaacggaaactgcatccacagggcatggctctgtgatcgggacaatgactgcggggatatgagtgatgagaaggactgccctactcagccctttcgctgtcctagttggcaatggcagtgtcttggccataacatctgtgtgaatctgagtgtagtgtgtgatggcatctttgactgccccaatgggacagatgagtccccactttgcaatgggaacagctgctcagatttcaatggtggttgtactcacgagtgtgttcaagagccctttggggctaaatgcctatgtccattgggattcttacttgccaatgattctaagacctgtgaagacatagatgaatgtgatattctaggctcttgtagccagcactgttacaatatgagaggttctttccggtgctcgtgtgatacaggctacatgttagaaagtgatgggaggacttgcaaagttacagcatctgagagtctgctgttacttgtggcaagtcagaacaaaattattgccgacagtgtcacctcccaggtccacaatatctattcattggtcgagaatggttcttacattgtagctgttgattttgattcaattagtggtcgtatcttttggtctgatgcaactcagggtaaaacctggagtgcgtttcaaaatggaacggacagaagagtggtatttgacagtagcatcatcttgactgaaactattgcaatagattgggtaggtcgtaatctttactggacagactatgctctggaaacaattgaagtctccaaaattgatgggagccacaggactgtgctgattagtaaaaacctaacaaatccaagaggactagcattagatcccagaatgaatgagcatctactgttctggtctgactggggccaccaccctcgcatcgagcgagccagcatggacggcagcatgcgcactgtcattgtccaggacaagatcttctggccctgcggcttaactattgactaccccaacagactgctctacttcatggactcctatcttgattacatggacttttgcgattataatggacaccatcggagacaggtgatagccagtgatttgattatacggcacccctatgccctaactctctttgaagactctgtgtactggactgaccgtgctactcgtcgggttatgcgagccaacaagtggcatggagggaaccagtcagttgtaatgtataatattcaatggccccttgggattgttgcggttcatccttcgaaacaaccaaattccgtgaatccatgtgccttttcccgctgcagccatctctgcctgctttcctcacaggggcctcatttttactcctgtgtttgtccttcaggatggagtctgtctcctgatctcctgaattgcttgagagatgatcaacctttcttaataactgtaaggcaacatataatttttggaatctcccttaatcctgaggtgaagagcaatgatgctatggtccccatagcagggatacagaatggtttagatgttgaatttgatgatgctgagcaatacatctattgggttgaaaatccaggtgaaattcacagagtgaagacagatggcaccaacaggacagtatttgcttctatatctatggtggggccttctatgaacctggccttagattggatttcaagaaacctttattctaccaatcctagaactcagtcaatcgaggttttgacactccacggagatatcagatacagaaaaacattgattgccaatgatgggacagctcttggagttggctttccaattggcataactgttgatcctgctcgtgggaagctgtactggtcagaccaaggaactgacagtggggttcctgccaagatcgccagtgctaacatggatggcacatctgtgaaaactctctttactgggaacctcgaacacctggagtgtgtcactcttgacatcgaagagcagaaactctactgggcagtcactggaagaggagtgattgaaagaggaaacgtggatggaacagatcggatgatcctggtacaccagctttcccacccctggggaattgcagtccatgattctttcctttattatactgatgaacagtatgaggtcattgaaagagttgataaggccactggggccaacaaaatagtcttgagagataatgttccaaatctgaggggtcttcaagtttatcacagacgcaatgccgccgaatcctcaaatggctgtagcaacaacatgaatgcctgtcagcagatttgcctgcctgtaccaggaggattgttttcctgcgcctgtgccactggatttaaactcaatcctgataatcggtcctgctctccatataactctttcattgttgtttcaatgctgtctgcaatcagaggctttagcttggaattgtcagatcattcagaaaccatggtgccggtggcaggccaaggacgaaacgcactgcatgtggatgtggatgtgtcctctggctttatttattggtgtgattttagcagctcagtggcatctgataatgcgatccgtagaattaaaccagatggatcttctctgatgaacattgtgacacatggaataggagaaaatggagtccggggtattgcagtggattgggtagcaggaaatctttatttcaccaatgcctttgtttctgaaacactgatagaagttctgcggatcaatactacttaccgccgtgttcttcttaaagtcacagtggacatgcctaggcatattgttgtagatcccaagaacagatacctcttctgggctgactatgggcagagaccaaagattgagcgttctttccttgactgtaccaatcgaacagtgcttgtgtcagagggcattgtcacaccacggggcttggcagtggaccgaagtgatggctacgtttattgggttgatgattctttagatataattgcaaggattcgtatcaatggagagaactctgaagtgattcgttatggcagtcgttacccaactccttatggcatcactgtttttgaaaattctatcatatgggtagataggaatttgaaaaagatcttccaagccagcaaggaaccagagaacacagagccacccacagtgataagagacaatatcaactggctaagagatgtgaccatctttgacaagcaagtccagccccggtcaccagcagaggtcaacaacaacccttgcttggaaaacaatggtgggtgctctcatctctgctttgctctgcctggattgcacaccccaaaatgtgactgtgcctttgggaccctgcaaagtgatggcaagaattgtgccatttcaacagaaaatttcctcatctttgccttgtctaattccttgagaagcttacacttggaccctgaaaaccatagcccacctttccaaacaataaatgtggaaagaactgtcatgtctctagactatgacagtgtaagtgatagaatctacttcacacaaaatttagcctctggagttggacagatttcctatgccaccctgtcttcagggatccatactccaactgtcattgcttcaggtatagggactgctgatggcattgcctttgactggattactagaagaatttattacagtgactacctcaaccagatgattaattccatggctgaagatgggtctaaccgcactgtgatagcccgcgttccaaaaccaagagcaattgtgttagatccctgccaagggtacctgtactgggctgactgggatacacatgccaaaatcgagagagccacattgggaggaaacttccgggtacccattgtgaacagcagtctggtcatgcccagtgggctgactctggactatgaagaggaccttctctactgggtggatgctagtctgcagaggattgaacgcagcactctgacgggcgtggatcgtgaagtcattgtcaatgcagccgttcatgcttttggcttgactctctatggccagtatatttactggactgacttgtacacacaaagaatttaccgagctaacaaatatgacgggtcaggtcagattgcaatgaccacaaatttgctctcccagcccaggggaatcaacactgttgtgaagaaccagaaacaacagtgtaacaatccttgtgaacagtttaatgggggctgcagccatatctgtgcaccaggtccaaatggtgccgagtgccagtgtccacatgagggcaactggtatttggccaacaacaggaagcactgcattgtggacaat

SEQ ID NO: 674 - protein, 4655 aa, Homo sapiens
MDRGPAAVACTLLLALVACLAPASGQECDSAHFRCGSGHCIPADWRCDGTKDCSDDADEIGCAVVTCQQGYFKCQSEGQCIPSSWVCDQDQDCDDGSDERQDCSQSTCSSHQITCSNGQCIPSEYRCDHVRDCPDGADENDCQYPTCEQLTCDNGACYNTSQKCDWKVDCRDSSDEINCTEICLHNEFSCGNGECIPRAYVCDHDNDCQDGSDEHACNYPTCGGYQFTCPSGRCIYQNWVCDGEDDCKDNGDEDGCESGPHDVHKCSPREWSCPESGRCISIYKVCDGILDCPGREDENNTSTGKYCSMTLCSALNCQYQCHETPYGGACFCPPGYIINHNDSRTCVEFDDCQIWGICDQKCESRPGRHLCHCEEGYILERGQYCKANDSFGEASIIFSNGRDLLIGDIHGRSFRILVESQNRGVAVGVAFHYHLQRVFWTDTVQNKVFSVDINGLNIQEVLNVSVETPENLAVDWVNNKIYLVETKVNRIDMVNLDGSYRVTLITENLGHPRGIAVDPTVGYLFFSDWESLSGEPKLERAFMDGSNRKDLVKTKLGWPAGVTLDMISKRVYWVDSRFDYIETVTYDGIQRKTVVHGGSLIPHPFGVSLFEGQVFFTDWTKMAVLKANKFTETNPQVYYQASLRPYGVTVYHSLRQPYATNPCKDNNGGCEQVCVLSHRTDNDGLGFRCKCTFGFQLDTDERHCIAVQNFLIFSSQVAIRGIPFTLSTQEDVMVPVSGNPSFFVGIDFDAQDSTIFFSDMSKHMIFKQKIDGTGREILAANRVENVESLAFDWISKNLYWTDSHYKSISVMRLADKTRRTVVQYLNNPRSVVVHPFAGYLFFTDWFRPAKIMRAWSDGSHLLPVINTTLGWPNGLAIDWAASRLYWVDAYFDKIEHSTFDGLDRRRLGHIEQMTHPFGLAIFGEHLFFTDWRLGAIIRVRKADGGEMTVIRSGIAYILHLKSYDVNIQTGSNACNQPTHPNGDCSHFCFPVPNFQRVCGCPYGMRLASNHLTCEGDPTNEPPTEQCGLFSFPCKNGRCVPNYYLCDGVDDCHDNSDEQLCGTLNNTCSSSAFTCGHGECIPAHWRCDKRNDCVDGSDEHNCPTHAPASCLDTQYTCDNHQCISKNWVCDTDNDCGDGSDEKNCNSTETCQPSQFNCPNHRCIDLSFVCDGDKDCVDGSDEVGCVLNCTASQFKCASGDKCIGVTNRCDGVFDCSDNSDEAGCPTRPPGMCHSDEFQCQEDGICIPNFWECDGHPDCLYGSDEHNACVPKTCPSSYFHCDNGNCIHRAWLCDRDNDCGDMSDEKDCPTQPFRCPSWQWQCLGHNICVNLSVVCDGIFDCPNGTDESPLCNGNSCSDFNGGCTHECVQEPFGAKCLCPLGFLLANDSKTCEDIDECDILGSCSQHCYNMRGSFRCSCDTGYMLESDGRTCKVTASESLLLLVASQNKIIADSVTSQVHNIYSLVENGSYIVAVDFDSISGRIFWSDATQGKTWSAFQNGTDRRVVFDSSIILTETIAIDWVGRNLYWTDYALETIEVSKIDGSHRTVLISKNLTNPRGLALDPRMNEHLLFWSDWGHHPRIERASMDGSMRTVIVQDKIFWPCGLTIDYPNRLLYFMDSYLDYMDFCDYNGHHRRQVIASDLIIRHPYALTLFEDSVYWTDRATRRVMRANKWHGGNQSVVMYNIQWPLGIVAVHPSKQPNSVNPCAFSRCSHLCLLSSQGPHFYSCVCPSGWSLSPDLLNCLRDDQPFLITVRQHIIFGISLNPEVKSNDAMVPIAGIQNGLDVEFDDAEQYIYWVENPGEIHRVKTDGTNRTVFASISMVGPSMNLALDWISRNLYSTNPRTQSIEVLTLHGDIRYRKTLIANDGTALGVGFPIGITVDPARGKLYWSDQGTDSGVPAKIASANMDGTSVKTLFTGNLEHLECVTLDIEEQKLYWAVTGRGVIERGNVDGTDRMILVHQLSHPWGIAVHDSFLYYTDEQYEVIERVDKATGANKIVLRDNVPNLRGLQVYHRRNAAESSNGCSNNMNACQQICLPVPGGLFSCACATGFKLNPDNRSCSPYNSFIVVSMLSAIRGFSLELSDHSETMVPVAGQGRNALHVDVDVSSGFIYWCDFSSSVASDNAIRRIKPDGSSLMNIVTHGIGENGVRGIAVDWVAGNLYFTNAFVSETLIEVLRINTTYRRVLLKVTVDMPRHIVVDPKNRYLFWADYGQRPKIERSFLDCTNRTVLVSEGIVTPRGLAVDRSDGYVYWVDDSLDIIARIRINGENSEVIRYGSRYPTPYGITVFENSIIWVDRNLKKIFQASKEPENTEPPTVIRDNINWLRDVTIFDKQVQPRSPAEVNNNPCLENNGGCSHLCFALPGLHTPKCDCAFGTLQSDGKNCAISTENFLIFALSNSLRSLHLDPENHSPPFQTINVERTVMSLDYDSVSDRIYFTQNLASGVGQISYATLSSGIHTPTVIASGIGTADGIAFDWITRRIYYSDYLNQMINSMAEDGSNRTVIARVPKPRAIVLDPCQGYLYWADWDTHAKIERATLGGNFRVPIVNSSLVMPSGLTLDYEEDLLYWVDASLQRIERSTLTGVDREVIVNAAVHAFGLTLYGQYIYWTDLYTQRIYRANKYDGSGQIAMTTNLLSQPRGINTVVKNQKQQCNNPCEQFNGGCSHICAPGPNGAECQCPHEGNWYLANNRKHCIVDNGERCGASSFTCSNGRCISEEWKCDNDNDCGDGSDEMESVCALHTCSPTAFTCANGRCVQYSYRCDYYNDCGDGSDEAGCLFRDCNATTEFMCNNRRCIPREFICNGVDNCHDNNTSDEKNCPDRTCQSGYTKCHNSNICIPRVYLCDGDNDCGDNSDENPTYCTTHTCSSSEFQCASGRCIPQHWYCDQETDCFDASDEPASCGHSERTCLADEFKCDGGRCIPSEWICDGDNDCGDMSDEDKRHQCQNQNCSDSEFLCVNDRPPDRRCIPQSWVCDGDVDCTDGYDENQNCTRRTCSENEFTCGYGLCIPKIFRCDRHNDCGDYSDERGCLYQTCQQNQFTCQNGRCISKTFVCDEDNDCGDGSDELMHLCHTPEPTCPPHEFKCDNGRCIEMMKLCNHLDDCLDNSDEKGCGINECHDPSISGCDHNCTDTLTSFYCSCRPGYKLMSDKRTCVDIDECTEMPFVCSQKCENVIGSYICKCAPGYLREPDGKTCRQNSNIEPYLIFSNRYYLRNLTIDGYFYSLILEGLDNVVALDFDRVEKRLYWIDTQRQVIERMFLNKTNKETIINHRLPAAESLAVDWVSRKLYWLDARLDGLFVSDLNGGHRRMLAQHCVDANNTFCFDNPRGLALHPQYGYLYWADWGHRAYIGRVGMDGTNKSVIISTKLEWPNGITIDYTNDLLYWADAHLGYIEYSDLEGHHRHTVYDGALPHPFAITIFEDTIYWTDWNTRTVEKGNKYDGSNRQTLVNTTHRPFDIHVYHPYRQPIVSNPCGTNNGGCSHLCLIKPGGKGFTCECPDDFRTLQLSGSTYCMPMCSSTQFLCANNEKCIPIWWKCDGQKDCSDGSDELALCPQRFCRLGQFQCSDGNCTSPQTLCNAHQNCPDGSDEDRLLCENHHCDSNEWQCANKRCIPESWQCDTFNDCEDNSDEDSSHCASRTCRPGQFRCANGRCIPQAWKCDVDNDCGDHSDEPIEECMSSAHLCDNFTEFSCKTNYRCIPKWAVCNGVDDCRDNSDEQGCEERTCHPVGDFRCKNHHCIPLRWQCDGQNDCGDNSDEENCAPRECTESEFRCVNQQCIPSRWICDHYNDCGDNSDERDCEMRTCHPEYFQCTSGHCVHSELKCDGSADCLDASDEADCPTRFPDGAYCQATMFECKNHVCIPPYWKCDGDDDCGDGSDEELHLCLDVPCNSPNRFRCDNNRCIYSHEVCNGVDDCGDGTDETEEHCRKPTPKPCTEYEYKCGNGHCIPHDNVCDDADDCGDWSDELGCNKGKERTCAENICEQNCTQLNEGGFICSCTAGFETNVFDRTSCLDINECEQFGTCPQHCRNTKGSYECVCADGFTSMSDRPGKRCAAEGSSPLLLLPDNVRIRKYNLSSERFSEYLQDEEYIQAVDYDWDPKDIGLSVVYYTVRGEGSRFGAIKRAYIPNFESGRNNLVQEVDLKLKYVMQPDGIAVDWVGRHIYWSDVKNKRIEVAKLDGRYRKWLISTDLDQPAAIAVNPKLGLMFWTDWGKEPKIESAWMNGEDRNILVFEDLGWPTGLSIDYLNNDRIYWSDFKEDVIETIKYDGTDRRVIAKEAMNPYSLDIFEDQLYWISKEKGEVWKQNKFGQGKKEKTLVVNPWLTQVRIFHQLRYNKSVPNLCKQICSHLCLLRPGGYSCACPQGSSFIEGSTTECDAAIELPINLPPPCRCMHGGNCYFDETDLPKCKCPSGYTGKYCEMAFSKGISPGTTAVAVLLTILLIVVIGALAIAGFFHYRRTGSLLPALPKLPSLSSLVKPSENGNGVTFRSGADLNMDIGVSGFGPETAIDRSMAMSEDFVMEMGKQPIIFENPMYSARDSAVKVVQPIQVTVSENVDNKNYGSPINPSEIVPETNPTSPAADGTQVTKWNLFKRKSKQTTNFENPIYAQMENEQKESVAATPPPSPSLPAKPKPPSRRDPTPTYSATEDTFKDTANLVKEDSEV

SEQ ID NO: 675 - DNA, 5560 bp, Homo sapiens
ctagatcgaaagtcctttggtaatgatgtgtcatacattctagtcatcaaagacaccattttctgggcctgaagtgttctgctggtttttggaggaatgagaatccaatctctcataagccggattcagaaaataggtcatcgatgaaacatctgtatggattatttcactataatcctatgatgcttggacttgaatcacttccagatcccacagacacctgggaaattatagagaccattggtaaaggcacctatggcaaagtctacaaggtaactaacaagagagatgggagcctggctgcagtgaaaattctggatccagtcagtgatatggatgaagaaattgaggcagaatacaacattttgcagttccttcctaatcatcccaatgttgtaaagttttatgggatgttttacaaagcggatcactgtgtagggggacagctgtggctggtcctggagctgtgtaatgggggctcagtcactgagcttgtcaaaggtctactcagatgtggccagcggttggatgaagcaatgatctcatacatcttgtacggggccctcttgggccttcagcatttgcacaacaaccgaatcatccaccgtgatgtgaaggggaataacattcttctgacaacagaaggaggagttaagctcgttgactttggtgtttcagctcaactcaccagtacacgtctgcggagaaacacatctgttggcaccccattctggatggcccctgaggtcattgcctgtgagcagcagtatgactcttcctatgacgctcgctgtgacgtctggtccttggggatcacagctattgaactgggggatggagaccctcccctctttgacatgcatcctgtgaaaacactctttaagattccaagaaatcctccacctactttacttcatccagaaaaatggtgtgaagaattcaaccactttatttcacagtgtcttattaaggattttgaaaggcgaccttccgtcacacatctccttgaccacccatttattaaaggagtacatggaaaagttctgtttctgcaaaaacagctggccaaggttctccaagaccagaagcatcaaaatcctgttgctaaaaccaggcatgagaggatgcataccagaagaccttatcatgtggaagatgctgaaaaatactgccttgaggatgatttggtcaacctagaggttctggatgaggatacaattatccatcagttgcagaaacgttatgcagacttgctaatttacacatatgttggagacatcttaattgccttaaaccccttccagaatctaagcatatactctccacagttttccagactttatcatggggtgaaacgcgcctccaatcccccccacatatttgcatcagcagatgctgcttaccagtgcatggttactctcagcaaagaccagtgcattgtcatcagcggagagagtggctctgggaagacagaaagcgcccacctgattgttcaacatttgactttcttgggaaaggccaataatcagaccttgagagagaaaattctacaagtcaactccctggtggaagcctttgggaactcatgcactgccatcaatgacaactcgagccgttttggaaaatatctggaaatgatgtttacaccaactggagttgtgatgggggcaagaatctctgaatatctcctggaaaaatccagagttataaaacaggcagcgagagagaaaaattttcatatattttactatatttatgctggtcttcatcaccaaaagaagctttctgatttcagacttcctgaggaaaaacctcctaggtacatagctgatgaaactggaagggtgatgcacgacataacttccaaggagtcttacagaagacaattcgaagcaattcagcattgcttcaggattatagggttcacggacaaagaggtgcactcagtgtacagaattttggctgggattttgaatattgggaacattgagttcgcagctatttcctctcaacatcagactgataaaagtgaggtgcccaatgctgaagctttgcaaaatgctgcctctgttctgtgcattagccctgaagagctccaggaggccctcacctcccactgtgtggtcacccggggcgagaccatcatccgtgccaacactgtagacagggctgcggacgttcgagacgccatgtccaaagccctgtatgggaggctcttcagctggattgtgaatcgcattaatacactcctgcagccagacgaaaacatatgtagtgcaggaggtggaatgaatgtggggatcttggatatctttggattcgagaattttcagagaaattcatttgagcagctctgcataaacatcgccaatgagcaaatccagtactatttcaatcagcatgtttttgctcttgagcagatggaatatcagaatgaaggcattgatgctgtacccgtggaatatgaggacaaccgcccgctcttggacatgttcctccagaaacccctgggactgcttgcacttttggatgaggaaagtcggtttccccaagcaactgaccagaccctggttgataaatttgaagataatctacgatgcaaatacttctggaggcccaaaggagtggaactgtgctttggcattcagcattatgctggaaaggtattatatgatgcttctggggttcttgagaaaaatagagacactctccctgccgatgtggttgtggtcctgagaacgtcagaaaacatgcttcttcagcagctcttctcaatccctctgaccaaaacaggtaatttggcccagacaagagctaggataacagtggcctcaagttctttgcctccacatttcagtgctgggaaagccaaggtggacactctggaggtgatacggcatccggaagaaaccaccaacatgaagaggcaaactgtggcttcttacttccggtattctctgatggacctgctctccaaaatggtggttggacagccccactttgtgcgctgcattaaacccaatgatgaccgagaggccctgcagttctctcgagagagggtgctggcccagctccgctccacagggattctggagacagtcagcatccgccgccagggctattcccaccgcatcctttttgaagaatttgtgaaaaggtattattacttggcattcacagcacatcaaacacctcttgctagcaaagagagctgtgtggctatcttggaaaagtccagattagatcactgggtgctgggaaaaacaaaggtttttctcaaatattaccatgttgagcaattaaatttgctgcttcgagaagtcataggcagagtggttgtgctgcaggcatataccaaggggtggcttggagccaggagatacaaaaaggtcagagagaagagagagaagggagccattgccatccagtcagcctggagaggatatgatgctcggaggaaatttaagaaaataagcaacagaaggaatgagtctgctgctcataatcaagcaggggacacttcaaaccaaagcagtgggccacattcccccgtcgcagcaggtacgaggggaagtgccgaggttcaagactgcagcgagcctggtgaccataaagttctcaggggctctgtacatcgtaggagccattcacaagcagaatccaacaatggccgtacacagacttcaagcaactctcctgctgtcacagagaaaaatgggcattcacaagcccagagttctccaaaagggtgcgatatcttcgcaggacatgcaaacaagcactcggtttctgggactgatttgctgtcttctcggatatgccatcctgctccagatcagcaaggattgagtctctggggagcccctcaaaagcctgcctttccacattacggatgtaacttttatgggttcagaaaatggtcttgcacagaagcatcgaacacctcgccgacgatgtcagcagcccaaaatgctgagtagccctgaggacaccatgtactataaccagttaaatggaactctagaatatcaagggagcaagaggaagccaagaaaacttggccaaatcaaagtacttgatggggaagatgaatattacaaatctctgtcaccagtggactgtatccctgaggagaacaactcagcccacccttcctttttttcttcatcctcaaaaggagactcttttgctcaacattaaattgtgcttcctaaccctaaatctgtccagagtaggaacattcatggtaatcgactgtctgtcattgcgtaagaaagcactgatatggggtcagcttctttggacatatggtccatgcctgaaccttactgaaccacttgcagattccaaaacatcttatcctatcctctaccactctcccacatgtgttgtgcagcctgagctgggcgctgccttcctttctcatcccatggggccctgtgggacactgagaacacctttacaatagtttaaacagtcattcatgcccccagtgtctaggaagataacagccagtctcaccccagtctaatcatggaccctgataatattgcttgatttttcctatcaagttacttttcaatccattcagaatctgccccagtggagacccaggagttcctttcctgcactcttctccatcctcccacctttgctgggcttttctatcactcccacctcccccagagtcagggctccattgctgagtgccccatcctggaggattggccccaagatctcctagaacaggataattgcctgtgtttaggcagataggcctaaatctttcagattctttctacaaggcaaataacccctctcttgttaattatgatgctgagaaagcctctgtctctttatttcaccttgccaagacacccacactactttggtgatgaaaagaaaggaatgagagggaaagtttggacctgtcactttggtgacagggaaagtccaggtcactttattctgtaactctccattcactggtcaaataactccatgaggctatcagtggctacagtggaaggacctgatcttgtccatctttgtgtgcacagagcctagcacagggcttggtagagggtatatctagtgaatggagaatacatggagaaacttaactaagttacacaagcatatctgacaggaatgttaccttcaattgtatgttacatatgattagtcacttttcatacactataacctctgatttttcactcaagtttgggctgattatattgtaatgatgttagataatactcaacatgattcagtatgacaaacttttttgagcacctactttatataaaacatgacaaattgcagtgtgatgtaatcaaaaacaaagaagccctataagaccatttctctagaacagatgttcttaatatttttcttactctaaaatatgtggtagatagtatgcaagaaaagccgggtgcggtggctcaggcctgtaatcccagcactttgggaggccaagatgggcggatcatgaagtcaggagttcgagaccagcctgaccaacatggtgaaaccccgtctctactaaaaaaaa

SEQ ID NO: 676 - protein, 1278 aa, Homo sapiens
MKHLYGLFHYNPMMLGLESLPDPTDTWEIIETIGKGTYGKVYKVTNKRDGSLAAVKILDPVSDMDEEIEAEYNILQFLPNHPNVVKFYGMFYKADHCVGGQLWLVLELCNGGSVTELVKGLLRCGQRLDEAMISYILYGALLGLQHLHNNRIIHRDVKGNNILLTTEGGVKLVDFGVSAQLTSTRLRRNTSVGTPFWMAPEVIACEQQYDSSYDARCDVWSLGITAIELGDGDPPLFDMHPVKTLFKIPRNPPPTLLHPEKWCEEFNHFISQCLIKDFERRPSVTHLLDHPFIKGVHGKVLFLQKQLAKVLQDQKHQNPVAKTRHERMHTRRPYHVEDAEKYCLEDDLVNLEVLDEDTIIHQLQKRYADLLIYTYVGDILIALNPFQNLSIYSPQFSRLYHGVKRASNPPHIFASADAAYQCMVTLSKDQCIVISGESGSGKTESAHLIVQHLTFLGKANNQTLREKILQVNSLVEAFGNSCTAINDNSSRFGKYLEMMFTPTGVVMGARISEYLLEKSRVIKQAAREKNFHIFYYIYAGLHHQKKLSDFRLPEEKPPRYIADETGRVMHDITSKESYRRQFEAIQHCFRIIGFTDKEVHSVYRILAGILNIGNIEFAAISSQHQTDKSEVPNAEALQNAASVLCISPEELQEALTSHCVVTRGETIIRANTVDRAADVRDAMSKALYGRLFSWIVNRINTLLQPDENICSAGGGMNVGILDIFGFENFQRNSFEQLCINIANEQIQYYFNQHVFALEQMEYQNEGIDAVPVEYEDNRPLLDMFLQKPLGLLALLDEESRFPQATDQTLVDKFEDNLRCKYFWRPKGVELCFGIQHYAGKVLYDASGVLEKNRDTLPADVVVVLRTSENMLLQQLFSIPLTKTGNLAQTRARITVASSSLPPHFSAGKAKVDTLEVIRHPEETTNMKRQTVASYFRYSLMDLLSKMVVGQPHFVRCIKPNDDREALQFSRERVLAQLRSTGILETVSIRRQGYSHRILFEEFVKRYYYLAFTAHQTPLASKESCVAILEKSRLDHWVLGKTKVFLKYYHVEQLNLLLREVIGRVVVLQAYTKGWLGARRYKKVREKREKGAIAIQSAWRGYDARRKFKKISNRRNESAAHNQAGDTSNQSSGPHSPVAAGTRGSAEVQDCSEPGDHKVLRGSVHRRSHSQAESNNGRTQTSSNSPAVTEKNGHSQAQSSPKGCDIFAGHANKHSVSGTDLLSSRICHPAPDQQGLSLWGAPQKPAFPHYGCNFYGFRKWSCTEASNTSPTMSAAQNAE

SEQ ID NO: 677 - DNA, 4278 bp, Homo sapiens
cgggaggagcggggtccgcgcggcggacgaggcgggggcaggaggcgcaggcagagcgagcgcgggaggtcgccgcagcacagaggacaccgcgcgccgccgctcaacatggtcgctgcgcacgctgcccattcttcctcctctgccgagtggatcgcctgcctggataaaagaccactggagcgatccagcgaagatgtggatataatcttcactcgactgaaagaagttaaagcttttgagaaatttcacccaaatctccttcatcagatttgcttatgtggttattatgagaatctggaaaagggaataacattatttcgccagggtgatattggaacaaactggtatgctgtcctggcagggtctttggatgttaaagtatctgagaccagcagtcaccaggatgctgtgaccatctgtaccctgggaattgggacggcctttggagagtccattctggacaacacaccccgccatgcaaccatcgttaccagggagagcagtgaactgctccgcatcgagcagaaggacttcaaggcactatgggagaaatatcgacagtatatggcaggacttctggctcctccttatggtgttatggaaacgggctctaacaatgacaggattcctgacaaggagaacacacctctcattgaacctcacgttcctcttcgtcctgctaacaccattaccaaggtcccttcagagaagatcctcagagctggaaaaattttacgaaatgccattctctctcgagcacctcacatgataagagatagaaaataccacctaaagacatacagacaatgctgtgtgggaactgaactggtggactggatgatgcagcagacaccatgtgttcactcccggactcaagctgttggcatgtggcaagtcctgttagaagatggtgttctcaaccacgtggaccaggagcaccatttccaagacaaatatttattctatcgatttctggatgatgagcacgaggatgcccctttgcctactgaggaggagaagaaggagtgtgatgaggagctccaggacaccatgctgctgctgtcacagatgggccccgacgcccacatgaggatgatccttcgcaaaccacctggccagaggactgtggatgacctagagattatctatgaggagcttcttcatattaaagccttatcccatctttctaccacagtgaaacgagagttagcaggtgttctcatttttgagtctcacgccaaaggagggactgtgttgtttaaccagggggaagaaggtacctcctggtacattattctaaaaggatcagtgaatgtagtcatttacggcaagggtgtggtctgcaccctgcatgaaggagatgacttcggcaagttagcactagtgaatgatgccccacgagctgcctctatcgtcttacgagaagataactgccatttcttaagagtagacaaggaggatttcaaccggatcctaagggacgtggaggcgaatacagtcagacttaaagaacatgaccaagatgtcttggtgctggagaaggtcccagcagggaacagagcttctaatcaaggaaactcacagcctcagcaaaagtatactgtgatgtcaggaacacctgaaaaaattttagagcattttctagaaacaatacgccttgaggcaactttaaatgaagcaacagattctgttttaaatgactttattatgatgcactgtgtttttatgccaaatacccagctttgcccggcactggtggcccactaccacgcacagccttcacaaggtacagaacaggagaaaatggattatgccctcaacaataagaggcgagtcatccgcctggttctacagtgggctgccatgtatggagacctcctgcaagaggatgacgtatctatggccttcctggaggagttttatgtatctgtatcagatgatgcccggatgattgctgccctcaaggagcaactgccagagttggagaagattgtcaagcaaatctcagaagatgcaaaggcaccacaaaagaagcacaaggttcttttgcaacagttcaatacgggcgatgagagagcccagaagcgccagcctatccgcggctctgatgaagttctgtttaaggtctattgcatggaccacacctacacaaccattcgggtgccagtggccacttcggtgaaggaagtcatcagtgcagttgccgacaagctgggctccggggagggcctgatcatagtcaagatgagttccggaggagaaaaggtggtgctcaaacctaatgatgtttcagtatttacgacgctcaccattaatggacgcctgtttgcttgcccgcgagagcaattcgattcactgactcccttaccagaacaggaaggcccaactgttggaacagtgggaacttttgaactgatgagctccaaagatttagcataccagatgacaatttatgattgggaactcttcaactgcgtgcatgagctggagctaatctatcacacatttggaaggcataattttaaaaagaccacagcaaacttggatttgttcctgaggagatttaatgaaattcagttttgggtcgtcactgagatctgcctttgttctcagctcagcaagcgtgttcagctattaaaaaaatttattaagatagcagcccactgtaaggagtataaaaatctgaattccttttttgccatcgtcatgggactaagtaacattgctgtgagccgcttggcactaacgtgggagaaactgccaagcaagttcaagaagttctatgcggagtttgaaagtttaatggacccttcaaggaaccacagggcctacaggctgacagtagctaagctggaacctcctctcatccccttcatgcctttgctcattaaagatatgacatttactcatgaggggaacaagacgttcattgacaatctagtaaactttgaaaaaatgcgcatgattgcaaatacggccagaacagtgagatactacaggagccaacccttcaatcctgatgcagctcaagctaataagaaccatcaggatgtccggagttatgtacggcaattaaatgtgattgacaaccagagaactttatcacagatgtcacacagattagagcctcgtcgaccatagacatttcaaatgcccaaagcaacagtttgtctccagtccacaatctttcaaaaatgccatttatgctactactgactgtattgccactagagaattctacaaaacaagcaaaaacacatcctgagacacctcagggctgcattcagcttaccagctacctagcaagagaaggaattatttgacatgcctaaagcttacacactctagcttaggaatccccagtttgtggctaccctgtttcatttccacttgtgccatcttctttgctgaagtgttgaataaggcccacgtgaagagtttggtagaaatagccttgtcaagagaactagcaagcccctgacatttttttctaagagtgtttatgggatgagatgtgctacaaatgggatagatttggataaaattttaactcaacatcttgatttggagcctggggtttcgggaaggtgttgaggaatctatagaagtccaaattataggttgtattcttccatcttcattgtcttacctctgaaggaatagaacctgaccacattattatgaaacattatggctgtttatgtaatttagggaggactggtctgtaatttctgaatgtatatagaataatatttatgtttacaatgtaacttttcaaaatttacaaatcaggattatatacataagaattccactaagaaatgccaagattcttaaatttgccagcgttaaagtagaaaataacatttcagaagagcacaatatgcataaaacatttttcaaaattgaaatattttcctgggcattaaaaacctttactattggctacaaatttattgtacctgatgaaaacatattttctggacttaaatgttattacaaatatcttaattttcagtaattgttttgcactttcaaagattgtaaatagttcattcaatcaatggtatagagttatttatttgctacataatagatactgtgccaaataattactttttatttattttatttagtacgtaattttgaagtacattttttcctgttttcacaattagactacatttaatgtgtaggaattgtatgtatgtatatcttctgtaaataacatctagtatcttcactaaatataattgtcgaccgggaaaaaaaaaa

SEQ ID NO: 678 - protein, 1011 aa, Homo sapiens
MVAAHAAHSSSSAEWIACLDKRPLERSSEDVDIIFTRLKEVKAFEKFHPNLLHQICLCGYYENLEKGITLFRQGDIGTNWYAVLAGSLDVKVSETSSHQDAVTICTLGIGTAFGESILDNTPRHATIVTRESSELLRIEQKDFKALWEKYRQYMAGLLAPPYGVMETGSNNDRIPDKENTPLIEPHVPLRPANTITKVPSEKILRAGKILRNAILSRAPHMIRDRKYHLKTYRQCCVGTELVDWMMQQTPCVHSRTQAVGMWQVLLEDGVLNHVDQEHHFQDKYLFYRFLDDEHEDAPLPTEEEKKECDEELQDTMLLLSQMGPDAHMRMILRKPPGQRTVDDLEIIYEELLHIKALSHLSTTVKRELAGVLIFESHAKGGTVLFNQGEEGTSWYIILKGSVNVVIYGKGVVCTLHEGDDFGKLALVNDAPRAASIVLREDNCHFLRVDKEDFNRILRDVEANTVRLKEHDQDVLVLEKVPAGNRASNQGNSQPQQKYTVMSGTPEKILEHFLETIRLEATLNEATDSVLNDFIMMHCVFMPNTQLCPALVAHYHAQPSQGTEQEKMDYALNNKRRVIRLVLQWAAMYGDLLQEDDVSMAFLEEFYVSVSDDARMIAALKEQLPELEKIVKQISEDAKAPQKKHKVLLQQFNTGDERAQKRQPIRGSDEVLFKVYCMDHTYTTIRVPVATSVKEVISAVADKLGSGEGLIIVKMSSGGEKVVLKPNDVSVFTTLTINGRLFACPREQFDSLTPLPEQEGPTVGTVGTFELMSSKDLAYQMTIYDWELFNCVHELELIYHTFGRHNFKKTTANLDLFLRRFNEIQFWVVTEICLCSQLSKRVQLLKKFIKIAAHCKEYKNLNSFFAIVMGLSNIAVSRLALTWEKLPSKFKKFYAEFESLMDPSRNHRAYRLTVAKLEPPLIPFMPLLIKDMTFTHEGNKTFIDNLVNFEKMRMIANTARTVRYYRSQPFNPDAAQANKNHQDVRSYVRQLNVIDNQRTLSQMSHRLEPRRP

SEQ ID NO: 679 - DNA, 3867 bp, Homo sapiens
actgtcttcctcattggcgccgtgcagagaggcggaatgttcaactcctaactgcggcggaaacgtgggagccgcgcgggccgctgtcgtcccaacccccgccgccctcgtcgcgcgcggggcctccgcgcccccggctgctgctcacgccccgcccgggagccagattttgtggaagtataatactttgtcattatgagatgtcgtctctcggtgcctcctttgtgcaaattaaatttgatgacttgcagttttttgaaaactgcggtggaggaagttttgggagtgtttatcgagccaaatggatatcacaggacaaggaggtggctgtaaagaagctcctcaaaatagagaaagaggcagaaatactcagtgtcctcagtcacagaaacatcatccagttttatggagtaattcttgaacctcccaactatggcattgtcacagaatatgcttctctgggatcactctatgattacattaacagtaacagaagtgaggagatggatatggatcacattatgacctgggccactgatgtagccaaaggaatgcattatttacatatggaggctcctgtcaaggtgattcacagagacctcaagtcaagaaacgttgttatagctgctgatggagtattgaagatctgtgactttggtgcctctcggttccataaccatacaacacacatgtccttggttggaactttcccatggatggctccagaagttatccagagtctccctgtgtcagaaacttgtgacacatattcctatggtgtggttctctgggagatgctaacaagggaggtcccctttaaaggtttggaaggattacaagtagcttggcttgtagtggaaaaaaacgagagattaaccattccaagcagttgccccagaagttttgctgaactgttacatcagtgttgggaagctgatgccaagaaacggccatcattcaagcaaatcatttcaatcctggagtccatgtcaaatgacacgagccttcctgacaagtgtaactcattcctacacaacaaggcggagtggaggtgcgaaattgaggcaactcttgagaggctaaagaaactagagcgtgatctcagctttaaggagcaggagcttaaagaacgagaaagacgtttaaagatgtgggagcaaaagctgacagagcagtccaacaccccgctgctgccttcctttgagattggtgcatggacggaagacgatgtgtattgttgggttcagcagctcgtcagaaaaggtgactcttcagcagagatgagtgtatatgcaagcttgtttaaagaaaacaacattacagggaagcggctgctgctgctggaggaagaagacctgaaagacatgggcattgtctccaaggggcatatcattcacttcaagtcagccattgagaaattaacccatgattacataaatttgtttcacttcccaccactaattaaggactcaggaggtgaacctgaagaaaatgaggaaaaaatagtgaacctggaactggtttttggttttcacttgaaaccaggaactggcccacaggattgtaagtggaaaatgtatatggagatggatggggatgaaattgcaataacctacataaaagatgtgacattcaacactaacctacctgatgcggagattttaaagatgacaaagccaccatttgtaatggagaagtggattgtaggaatagcaaaaagtcagactgtggagtgcactgtcacatatgagagtgatgttagaactccaaaaagcactaaacatgtccattcgattcagtggagtagaacaaaacctcaggatgaagtgaaagcagtccaacttgccattcagacattattcaccaattcagatggcaaccctggaagcaggtccgactcaagtgctgattgccagtggttagatactctgaggatgcggcagattgcatccaacacttctttacagcgttcccagagcaatcctattctggggtcaccgttcttctcacactttgatggccaggattcctacgctgctgctgtgagacggccccaggtgcccattaagtatcaacagattacacctgtgaaccagtccagaagctcgtctcctactcagtatggactgaccaaaaacttctcttccctacatctcaactctagggacagtggcttttccagtggcaatactgacacctcttcagagaggggtcgatactcagacagaagcaggaacaaatatggacgtggtagtatatcactcaattcttctcctagaggaagatacagtggaaagagtcagcattccactccttcaagaggaagataccctggaaagttctacagggtttctcagtcagcactcaatcctcaccagtcgcctgacttcaagagaagccccagggacctccaccaacccaacaccataccagggatgcctttgcaccctgagactgactcaagagccagtgaagaggacagcaaagtcagcgaagggggctggacaaaagtggaataccggaaaaagccccacaggccatctcccgccaaaaccaataaagagagagccagaggggaccaccgtggatggagaaacttttgatgaattgaactacatagcttttctaagcaggttaaaaaaaaaaaaaaaaagaaatgtaatggtttttgataatatgatcccttcagattgaattaacgaaaagacaacacttccagtttttggattgggaaataccttctaattgagactatagccaaaccagggccaaaattatggatattggtcacccagtgatcataactaggcttgaaaatcactacacatattttctgccttgagtgaacatttttagaggaaaggttatgccatctttttaccctaaccactgatattctggttagcagggccaggacaaggggaaggaaaatgaggtcaacaaaaaaatcaaatttttaggaaaagataagatgaatgttactgatttttccttttggctgaggctgcaatatggcctggcaaggcactgttactgatcttgtctttaacattttgatattttgttcatcataatttttgcatttatttttttaaatattgcattaaaatatcatttagcttgattatcgagttttttggtttgaggttttttgttgcttcttttttcttttctttctttccccctcttttttttggatgtccccttaaattttgtgcccaaggcaggtacctcactcatctcatccttggctcagccctgctggttagtatttagtatttattttagtaagatatttgtgtctgtatgatggtcagagttgaactgatctggcttgtcatttttcagtaataaaaaaagttactgaatttaatgttgaatatgatgcatatctcattcattacgatttatcagaaaccaaagatttaaattgcctagatttgtggttctttctcttcctaagttcccagcgactgctttcaaatactattttctaaatttcaccaaaggagcaaagaggataaaacaacactccataaaggcctcttgggatgtcagaaatctaaaatctaaaagaaaacagacacagagcaagacaataacatcacaagctaaaagccagagaaatttaaaattaccaacatccttgttggagtaagacagtaaatatcagccttgcagcaagacagctctgagcagctgtgggcaaagaggtaaaccagtgggggtgcaaggagactgtctgcagcttagggcagaaatggtgggatccaacttgtgaaatgcttcatgttttacaaaccaaaaagtcaggtagcaacaaacttattgtatgtcaaatcaataaatgttactttcaataaaaaa

SEQ ID NO: 680 - protein, 800 aa, Homo sapiens
MSSLGASFVQIKFDDLQFFENCGGGSFGSVYRAKWISQDKEVAVKKLLKIEKEAEILSVLSHRNIIQFYGVILEPPNYGIVTEYASLGSLYDYINSNRSEEMDMDHIMTWATDVAKGMHYLHMEAPVKVIHRDLKSRNVVIAADGVLKICDFGASRFHNHTTHMSLVGTFPWMAPEVIQSLPVSETCDTYSYGVVLWEMLTREVPFKGLEGLQVAWLVVEKNERLTIPSSCPRSFAELLHQCWEADAKKRPSFKQIISILESMSNDTSLPDKCNSFLHNKAEWRCEIEATLERLKKLERDLSFKEQELKERERRLKMWEQKLTEQSNTPLLPSFEIGAWTEDDVYCWVQQLVRKGDSSAEMSVYASLFKENNITGKRLLLLEEEDLKDMGIVSKGHIIHFKSAIEKLTHDYINLFHFPPLIKDSGGEPEENEEKIVNLELVFGFHLKPGTGPQDCKWKMYMEMDGDEIAITYIKDVTFNTNLPDAEILKMTKPPFVMEKWIVGIAKSQTVECTVTYESDVRTPKSTKHVHSIQWSRTKPQDEVKAVQLAIQTLFTNSDGNPGSRSDSSADCQWLDTLRMRQIASNTSLQRSQSNPILGSPFFSHFDGQDSYAAAVRRPQVPIKYQQITPVNQSRSSSPTQYGLTKNFSSLHLNSRDSGFSSGNTDTSSERGRYSDRSRNKYGRGSISLNSSPRGRYSGKSQHSTPSRGRYPGKFYRVSQSALNPHQSPDFKRSPRDLHQPNTIPGMPLHPETDSRASEEDSKVSEGGWTKVEYRKKPHRPSPAKTNKERARGDHRGWRNF

SEQ ID NO: 681 - DNA, 7194 bp, Homo sapiens
actgtcttcctcattggcgccgtgcagagaggcggaatgttcaactcctaactgcggcggaaacgtgggagccgcgcgggccgctgtcgtcccaacccccgccgccctcgtcgcgcgcggggcctccgcgcccccggctgctgctcacgccccgcccgggagccagattttgtggaagtataatactttgtcattatgagatgtcgtctctcggtgcctcctttgtgcaaattaaatttgatgacttgcagttttttgaaaactgcggtggaggaagttttgggagtgtttatcgagccaaatggatatcacaggacaaggaggtggctgtaaagaagctcctcaaaatagagaaagaggcagaaatactcagtgtcctcagtcacagaaacatcatccagttttatggagtaattcttgaacctcccaactatggcattgtcacagaatatgcttctctgggatcactctatgattacattaacagtaacagaagtgaggagatggatatggatcacattatgacctgggccactgatgtagccaaaggaatgcattatttacatatggaggctcctgtcaaggtgattcacagagacctcaagtcaagaaacgttgttatagctgctgatggagtattgaagatctgtgactttggtgcctctcggttccataaccatacaacacacatgtccttggttggaactttcccatggatggctccagaagttatccagagtctccctgtgtcagaaacttgtgacacatattcctatggtgtggttctctgggagatgctaacaagggaggtcccctttaaaggtttggaaggattacaagtagcttggcttgtagtggaaaaaaacgagagattaaccattccaagcagttgccccagaagttttgctgaactgttacatcagtgttgggaagctgatgccaagaaacggccatcattcaagcaaatcatttcaatcctggagtccatgtcaaatgacacgagccttcctgacaagtgtaactcattcctacacaacaaggcggagtggaggtgcgaaattgaggcaactcttgagaggctaaagaaactagagcgtgatctcagctttaaggagcaggagcttaaagaacgagaaagacgtttaaagatgtgggagcaaaagctgacagagcagtccaacaccccgcttctcttgcctcttgctgcaagaatgtctgaggagtcttactttgaatctaaaacagaggagtcaaacagtgcagagatgtcatgtcagatcacagcaacaagtaacggggagggccatggcatgaacccaagtctgcaggccatgatgctgatgggctttggggatatcttctcaatgaacaaagcaggagctgtgatgcattctgggatgcagataaacatgcaagccaagcagaattcttccaaaaccacatctaagagaagggggaagaaagtcaacatggctctggggttcagtgattttgacttgtcagaaggtgacgatgatgatgatgatgacggtgaggaggaggataatgacatggataatagtgaatgaaagcagaaagcaaagtaataaaatcacaaatgtttggaaaacacaaaagtaacttgtttatctcagtctgtacaaaaacagtaaggaggcagaaagccaagcactgcatttttaggccaatcacatttacatgaccgtaatttcttatcaattctacttttatttttgcttacagaaaaacggggggagaattaagccaaagaagtatatttatgaatcagcaaatgtggtgcctgattatagaaatttgtgatcctatatacaatataggacttttaaagttgtgacattctggctttttcttttaatgaatactttttagtttgtatttgactttatttcctttattcaaatcatttttaaaaacttacattttgaacaaacactcttaactcctaattgttctttgacacgtagtaattctgtgacatactttttttttcttatagcaatacactgtaatatcagaaatggttggcctgagcaacctagtaagacctcgtctctactaataattaaaaaactagctggcatggtagcacacacctgtagtcccagatacttgggaggccaaggcaggaggattgcttgagacctagcaatcagtcagggctgcagtgagccatgatggcaccactgcactctagcctgggcaagagaacaagatcctgtctcaaaaaacaaaaaaaagaaagaattgatagtacaaaatccaacaacaatactgagatgatctaagaaggttataacaaaatgctcttcagaaatacctaagtgctgagaatttttagtactaaagagcacagctgctcaaagtaaagcctgagcagtgttctcagtaatgtatttgaaggaaaaataccctgatttgaaaccaacagcagatgttgcaaactttcataccactgctggccatggaagcctcttaacaacacactgtcatttaaggctgtgcttgtgctttatacaaagagaaagaggtggtcttaaggggatgcttccaggggggtgagttcatgcctctcctgtattttccagcaagtggggtatgtgtggtggtttgttttttagaggggcataataatccaggattctaagcatatgctcagctattttaaagaggaaattaaatattataaaagaaatagtaaagataagttatcctcacttaggcaaaagcacaggtcctttccatatcaagtttagcctaccagggttgttttttgttttaaccctgcttaataatgttggtgttttagaagtagatacaggcactgctctgaaaacctggctagccaaggatattctcagaatgttatcacctgtttgtcaaagcttgtttaaattataaaacacttttaattatatatatgaggcaaaagaactaagacttttttcaaactaaattagaaaggagtgtcattatttgactgttaaaccaaaatatttttggtgggtctttttatggaagtttaaagaaaggacatcatcatagatatgatctaacagtatttctaactatatttgatcattaaaagcctcttggaatttgaagcgtgacgtgtttctaatgccccttgagaggtgaaaaataccacataatgatcagtatgctgtgccagcttcatttggggagaaataactagtagaaagttctgggtgtgaggtgtacagcagtctaggtggcatagtgatgaagaaagggatcagagtctgactgtcactcagaatcctgggctcagttgcttgacaaccttgggaaaattgttttatctttgtgcgtctgtttgctgatcttcagcgtgggaataataacagtacctacttgaaaggatcattgtgcggattaaaagaaataatatatgtaaagcactttaacacagcaccaggcccacggaaagtggctaatgttagctactatgaatggtgccagtgaagacactgaaaaataagtgatttcagtaaccttctggaaagctatcagtttcaaataatattttctctgtagtatgagatgaaattaaaagtggatagctttcaggaaagataaagagaacatgcttagaatgtaagctaaacagattttttctgttgctctttgaaaactatgagccctggccagcttaacctggtctgaggtgagactaaacacaaaaacagtagataaatctctccctaaaagatggattcccccacatacccatgctactagtttctctgtctattcacacatatgtacaaatacatgaacacagcctgtctgtgctcagacatagagaagtactacctgacttgagtcaatgcacccaagaagaaaagcttggagtagagcagaagggagggcttgggactcctgtctttccagcatgccctggggtgcagtggtcagccacctgaagagagagccaatagcatggggtttacaaggcaaagatagtcattcattcaacacatattcatagagctccttctctgtgccagacactgttctggaagatagctagatgaaaatctttgcactcacagagcttacatgccagtgagtgaagatcgatgataaataaagcaaatgcatcatatgttcacatttgataagtatatgccaaaaaatgaagccgggaaggaggacaaggcccatgggtgggtgttgaggtttttaaagtgtggtcaggaaaggccccactgataaggtaacatttgagcaagtctgaaaaaggcaaggggatctttggggctaacttcgggatccctgcactttatgtaagaatgtaaacctggagtctcatttaagaatgatcagcaatacgtttagaacatatgaactgaatgaaatggacattttttcttaatttatgtataaatccatatgattatacataaagttctgatgcattaataaaagcagccaaatagggccaaagagaaaaataacaggactctgtactggacctaactttatcattaattaggtaatattttcctcatttctttactgctgccattttcctcaccagtattccagagatggtcatagctcattactctaccaccaagaacctaaaaggaattagaatacagcagaattggcctcagtgaagagcttaaaattgttctcctcgtagaactggactattgatcattaccacgtgacgttggctctattactttctgttcccaatgtccttctagtggtttgaaaatgttaaaacatccctaaaatctaaatcatataatcagaattctatagtgtcccactctatctgtaaagatcatttggaagactttagactctattaattttaaaaggaatatttattagccatatgcagaatttctaatgatgatattgtacagcttctaattcacttttcagatcagtgtttgaaatggcaattatcagtgttggatttagttccaactacttgatttacaaaaatgtacatttagaggttaaaagaaacagtgagaaatgtaaacattcaaaatgataattgaatctctcagttgtgggaataattatcagagacatgcaactgaaaatgtctcacctttcatctttttttcttaattcataaagttatcttgtagaatttgatgagaccctccctagtcattctcaactggggcggtgctgtcaccgaatggtgtttgagagtgttggggctagggcacatttttggttgtcacagcaactggggtggcatttgctgcccagtgccaggaatagtaacattatgaatgccagggacagtgtgctcagtaaagtcttccatccaaaaggggcagggcacggtggctcacgcctgtaatcccagcactttgggaggccaaggtgggcggatcacctgatgtcaggggttcgagaccagcctggccaacatggtgaaaccctgttgctactaaaaatacaaaaattggctgggtgtggtgtcacatgccagtaaccccagctactagggaggctgaggcaggagaatcacttgaacccgggaggcagaggttgcagtgagctgagattgcaccactacactccagcctggatgacagagtgagacttcatctcaaaaaaaaaaaaaaacaaaaaaaaacaacccggtagcattgtcccttccccactgacaaacttatcaaatccagaagctttagagtttcgtctctaattatttttctcctgaacaaaattacccaagtcaaaacaaaatgtatttttagaattacggcagcatacgacctgaattttgtgagtttcgtggctttatcttaaatcaccatttccctaaaaatggtttctttctccttagaaatgctggtggcaacttgatgaaacagccaaatgcaccagggcaggtcactttcccattacactgattccacaattaaaaaaaaaaaagaaaaaaaactcattgagatagctacagttctataggttaatttaaagcctcctttttctactcatttttgaaagcaaaattacattttactattttacataaccagtgaaaagacgttgaaagcctacagctcactgtttttggtgctctggaaatgttgagggtgggtttttaaccagtgatttttaacgtgcagtgaatttgttagacttttaaacaccagctaaggtagtcaaacttgatccccattaaaaatcaaggaattaggggtcgggggagggtttaggagtgatccagaatgacctcccagaattactgtgcgtacaactttatttttcagagttttcattggaatggtaagagttttatgaaagacagttttaaaacttattctgagttaaatattaatactttaaaaaattattgtactagacttattgcagccttttgaaagtagcagagtttcatcataccacatatataacagagcataaattttctataatcaggcaccttttgctgcttttgagtaagactgttttcctgtttaagtgttaagcatcgccagacataaaaatctattctctcctctcgattgtagcatagcctgacagctctagatacagcatttctatgatgaaaaatgagtatccatcaggaaatctagaagactagccgtgttttctcagactccacctttgtttgcactctgttgcctgtgaggagctttctggcatgtgattatttacttcaaaactagagttccaagcacctacattaattattttatattgtgtgcagaatagtatatcttttaatgtcagatatgatacactgcacatattgcttttgcactcttaaaatttttgtactaaataatagaaaatatttatattctttgagtgtgagctttgaatagatggcattatcactttattgtttttttaacaaaaactttttctcaattattctattgcaatgttattctgagcaagtcctatgccaaatatcttgtataatgtttgtatggaagattaaattttactcttgtgtggtaagactatttcagttactgattttatagttggaatttgatattccagcacaaagtccacagtgtattcagaaatccaagttggtgtcatacatttcattttgatgtgaacttttctttgctttcctttgttctaagactccattttgcaataaacgttttgacagtaaaaaaaaaaaaa

SEQ ID NO: 682 - protein, 455 aa, Homo sapiens
MSSLGASFVQIKFDDLQFFENCGGGSFGSVYRAKWISQDKEVAVKKLLKIEKEAEILSVLSHRNIIQFYGVILEPPNYGIVTEYASLGSLYDYINSNRSEEMDMDHIMTWATDVAKGMHYLHMEAPVKVIHRDLKSRNVVIAADGVLKICDFGASRFHNHTTHMSLVGTFPWMAPEVIQSLPVSETCDTYSYGVVLWEMLTREVPFKGLEGLQVAWLVVEKNERLTIPSSCPRSFAELLHQCWEADAKKRPSFKQIISILESMSNDTSLPDKCNSFLHNKAEWRCEIEATLERLKKLERDLSFKEQELKERERRLKMWEQKLTEQSNTPLLLPLAARMSEESYFESKTEESNSAEMSCQITATSNGEGHGMNPSLQAMMLMGFGDIFSMNKAGAVMHSGMQINMQAKQNSSKTTSKRRGKKVNMALGFSDFDLSEGDDDDDDDGEEEDNDMDNSE

SEQ ID NO: 683 - DNA, 570 bp, Homo sapiens
atgtccaaagttgtctctcactgtttttatttaaaggaactagacacaaacctggctgctttaaccacggcctctgggagggctacagctgagaaaatccgctgtcaggaagaagtgaatagaactaacaagactattgagcgcgccaacagattagtgaaaggtctggagaaggaaaatgatttgaaaatcgagttgaaaattcagctaggagatgagttcttcatctgcctttcctctgtgcaaggcacccaaagtgagagcagcagggcgcagcagtgcccagagctgactgatggcatcaggaaatctagctcatcccaaccacaggcagtttttaaaattggggttgtggctccccctgctaaagcgacattacccacggaccttgttaccaaccttggcgaccagagaacgctgatctccaaaggtctagacccggtgaaacagcgttcggtggccactgaccggtttccagagtcagagctccccctgctggaatccaaagcacgtcgtaaccctgtctggacgtattttattccacaagaccgtgcagccctgattgagtga

SEQ ID NO: 684 - protein, 189 aa, Homo sapiens
MSKVVSHCFYLKELDTNLAALTTASGRATAEKIRCQEEVNRTNKTIERANRLVKGLEKENDLKIELKIQLGDEFFICLSSVQGTQSESSRAQQCPELTDGIRKSSSSQPQAVFKIGVVAPPAKATLPTDLVTNLGDQRTLISKGLDPVKQRSVATDRFPESELPLLESKARRNPVWTYFIPQDRAALIE

SEQ ID NO: 685 - DNA, 4255 bp, Homo sapiens
ggtctgcgcgcaggtgccgctcggcgcccggcccgcccgttccgccgctgtcgccgccgtcgtgcgtgccgctcggcggaggggacgggcctgcgttctctcctccttcctccccgcctccagctgccggcaggacctttctctcgctgccgctgggaccccgtgtcatcgcccaggccgagcacggaaatctactttcttcaatgtgttaaccaatagtcaggcttcagcagaaaacttcccgttctgcactattgatcctaatgagagcagagtacctgtgccagatgaaaggtttgactttctttgtcaataccacaaaccagcaagcaaaattcctgcctttctaaatgtggtggatattgctggccttgtgaaaggagctcacaatgggcagggcctggggaatgcttttttatctcatattagtgcctgtgatggcatctttcatctaacacgtgcttttgaagatgatgatatcacgcacgttgaaggaagtgtagatcctattcgagatatagaaataatacatgaagagcttcagcttaaagatgaggaaatgattgggcccattatagataaactagaaaaggtggctgtgagaggaggagataaaaaactaaaacctgaatatgatataatgtgcaaagtaaaatcctgggttatagatcaaaagaaacctgttcgcttctatcatgattggaatgacaaagagattgaagtgttgaataaacacttatttttgacttcaaaaccaatggtctacttggttaatctttctgaaaaagactacattagaaagaaaaacaaatggttgataaaaattaaagagtgggtggacaagtatgacccaggtgctttggtcattccttttagtggggccttggaactcaagttgcaagaattgagtgctgaggagagacagaagtatctggaagcgaacatgacacaaagtgctttgccaaagatcattaaggctgggtttgcagcactccaactagaatactttttcactgcaggcccagatgaagtgcgtgcatggaccatcaggaaagggactaaggctcctcaggctgcaggaaagattcacacagattttgaaaagggattcattatggctgaagtaatgaaatacgaagattttaaagaggaaggttctgaaaatgcagtcaaggctgctggaaagtacagacaacaaggcagaaattatattgttgaagatggagatattatcttcttcaaatttaacacacctcaacaaccgaagaagaaataaaatttagttattgctcagataaacatacaacttccaaaaggcatctgatttttaaaaaattaaaatttctgaaaaccaatgcgacaaataaagttggggagatgggaatctttgacaaacaaattatttttatttgttttaaaattaaaatactgtgtacccccccccccccatgaaatgcaggttcactaaatgtgaacagctttgcttttcacgtgattaagaccctactccaaattgtagaagcttttcaggaaccatattactctcatgatacttcattaatctccatcatgtatgccaagcctgacacatttgacagtgaggacaatgtggcttgctcctttttgaatctacagataatgcatgttttacagtactccagatgtctacactcaataaaacatttgacaaaaccagccttggtgtgtttggggatgtctgtattgactgactgtggtgtgctgaatgcgatacggcacctggtggttgctgattacagaattttaaggcgtgtgtatgacacagtaactggcagtgtggggcagctgcaattgtatcttaaaagtgagtctttcatgggaatcagaagaatagtataccagggatttgtctcaaaaaagttaattaatttatagatcaacatttattgaaagatgatagcaatgatattatgagggatatgagataggtgactgaccacaaagaagaaaattctgtctcaaaaattaaagaattttgtttgttattgttgttctgaccatattgaaaagaggttcacttttaatctttcctttgaaattattaaattgtaaaaactgacccattgatgtctggtgggttatgttttgcttcaattcagcaatgtgtataaaagttcctacactgattttgaaatactaagatcagactttgaaaattttaaaaattctttcattcttacttttcagatatttgagagcagtcgaagtggtagtatgggtaagttaagcacttcttaacattgtagcagaaaattccaaaagaaagactagaacaaattggtaatttggagaccctttgccacttagccttctcttgtgatgatggcctgaaagctctctcggccctgagcctccctttctctcccatgtttccattcctgtgagacctcccttccttgtccttgtcctctgcccttttgtgctcttctgtgatcacaggaccatttccatggaatgcagattcatacccagccagcctttgcctctactgtatcgctttgggactttaaagatgcagaagtattagaacacacacaaacttaaaatggaaagttaccaaatgtagcactagaggcaagaaaaggggtgattttttaaagatttggctatacttaagatatttaaagaggatgaggttgagtcgtgagtataatttagaagctctccagtgagtatttttttagtatcaaatagtgatcttcttttgctaacataaaaatgagtaaactacagcagagaaataagaataaaactaatgaagggttttttaaaagaactaaataaaacaaataaaactaggctacaggtatagctgaccaagtttgctgtgaaaaatccttgttatatctatttctgtattggagtaatgtgtagattagtggattgttagggatttcagcagtataagaaagaatcaaatatcttgcttttgggtcttctccaaagtaaattgcatggacttcttaaagaagtttgaaatcagtaaaaagacattaggatcatgcaattttactttgtctagcttctaatgtggtaaattgcacattgtgcaacagaaccattaataaaagaaaggagttagttttgaggtaactgcattcattaggggctgaaaataaatgttaaaaatgtttaatttggttagaagttctacaacattgtatgtacatatacaaaatttcattttctctgaaagtcgagaattccaagaactgttacatataatcatatatatgcctatatctaaacgttttccctcctttaatattgataaagttaatatattttaggatgttatgtaaatatttttgcatgtatctgtagctccatcttaatcaaatttatggttaaaagagatttgaggccaggcgtggaggctcacacctataatcccaacactttgggaggccgaggtgggaggatcacttgagcacaggagtttgagaccagcctgtgcaacatcatgaaacatcatctctacataaaaaaatacatatatacaaaaattagctgggcatcatggcacacacctgtagtcccagctacttaggaggctgagatgggaggattgatcgatcgcttgagcctgggaggtggaggctactgtgagccatgatcatgccactgcactccagcctgggcaacagagtgagaccctgtctccaaagagaaagagaaacttgagaaggcttgtgcccaaagcttgaagaaagattgtaatagcatttagttgtgttttatcatgttatcttcataacatgcattttgcatatggctcagagcagagccggatctcccaaggaagcacaaatagtttttgtcgctaacttagttatgagtgaagcctctgttcacttataacttgccagtttcattggtggaataagtccccttactcatgattcatcaatattcctatattaaaattccagtttgatgtttgtctctagttgtctgtgtataatatttccaaagctcctttgtaaaccccgtctcctttcattcagagagtcagagacggtatctcctcctcctgcctcttctattgttctgattagtctacttaaattcacttgatgctctttttattttacaagagacttgagaaatgtcggttgttcctaatggcaaactactttagctgggaaaattcatttcaacttattttaagcttgtaaaatacactgtggtgataaaataaaagagctgggtttga

SEQ ID NO: 686 - protein, 238 aa, Homo sapiens
MIGPIIDKLEKVAVRGGDKKLKPEYDIMCKVKSWVIDQKKPVRFYHDWNDKEIEVLNKHLFLTSKPMVYLVNLSEKDYIRKKNKWLIKIKEWVDKYDPGALVIPFSGALELKLQELSAEERQKYLEANMTQSALPKIIKAGFAALQLEYFFTAGPDEVRAWTIRKGTKAPQAAGKIHTDFEKGFIMAEVMKYEDFKEEGSENAVKAAGKYRQQGRNYIVEDGDIIFFKFNTPQQPKKK

SEQ ID NO: 687 - DNA, 4356 bp, Homo sapiens
ggtctgcgcgcaggtgccgctcggcgcccggcccgcccgttccgccgctgtcgccgccgtcgtgcgtgccgctcggcggaggggacgggcctgcgttctctcctccttcctccccgcctccagctgccggcaggacctttctctcgctgccgctgggaccccgtgtcatcgcccaggccgagcacgatgccccctaaaaagggaggtgatggaattaaaccacccccaatcattggaagatttggaacctcactgaaaattggtattgttggattgccaaatgttgggaaatctactttcttcaatgtgttaaccaatagtcaggcttcagcagaaaacttcccgttctgcactattgatcctaatgagagcagagtacctgtgccagatgaaaggtttgactttctttgtcaataccacaaaccagcaagcaaaattcctgcctttctaaatgtggtggatattgctggccttgtgaaaggagctcacaatgggcagggcctggggaatgcttttttatctcatattagtgcctgtgatggcatctttcatctaacacgtgcttttgaagatgatgatatcacgcacgttgaaggaagtgtagatcctattcgagatatagaaataatacatgaagagcttcagcttaaagatgaggaaatgattgggcccattatagataaactagaaaaggtggctgtgagaggaggagataaaaaactaaaacctgaatatgatataatgtgcaaagtaaaatcctgggttatagatcaaaagaaacctgttcgcttctatcatgattggaatgacaaagagattgaagtgttgaataaacacttatttttgacttcaaaaccaatggtctacttggttaatctttctgaaaaagactacattagaaagaaaaacaaatggttgataaaaattaaagagtgggtggacaagtatgacccaggtgctttggtcattccttttagtggggccttggaactcaagttgcaagaattgagtgctgaggagagacagaagtatctggaagcgaacatgacacaaagtgctttgccaaagatcattaaggctgggtttgcagcactccaactagaatactttttcactgcaggcccagatgaagtgcgtgcatggaccatcaggaaagggactaaggctcctcaggctgcaggaaagattcacacagattttgaaaagggattcattatggctgaagtaatgaaatacgaagattttaaagaggaaggttctgaaaatgcagtcaaggctgctggaaagtacagacaacaaggcagaaattatattgttgaagatggagatattatcttcttcaaatttaacacacctcaacaaccgaagaagaaataaaatttagttattgctcagataaacatacaacttccaaaaggcatctgatttttaaaaaattaaaatttctgaaaaccaatgcgacaaataaagttggggagatgggaatctttgacaaacaaattatttttatttgttttaaaattaaaatactgtgtacccccccccccccatgaaatgcaggttcactaaatgtgaacagctttgcttttcacgtgattaagaccctactccaaattgtagaagcttttcaggaaccatattactctcatgatacttcattaatctccatcatgtatgccaagcctgacacatttgacagtgaggacaatgtggcttgctcctttttgaatctacagataatgcatgttttacagtactccagatgtctacactcaataaaacatttgacaaaaccagccttggtgtgtttggggatgtctgtattgactgactgtggtgtgctgaatgcgatacggcacctggtggttgctgattacagaattttaaggcgtgtgtatgacacagtaactggcagtgtggggcagctgcaattgtatcttaaaagtgagtctttcatgggaatcagaagaatagtataccagggatttgtctcaaaaaagttaattaatttatagatcaacatttattgaaagatgatagcaatgatattatgagggatatgagataggtgactgaccacaaagaagaaaattctgtctcaaaaattaaagaattttgtttgttattgttgttctgaccatattgaaaagaggttcacttttaatctttcctttgaaattattaaattgtaaaaactgacccattgatgtctggtgggttatgttttgcttcaattcagcaatgtgtataaaagttcctacactgattttgaaatactaagatcagactttgaaaattttaaaaattctttcattcttacttttcagatatttgagagcagtcgaagtggtagtatgggtaagttaagcacttcttaacattgtagcagaaaattccaaaagaaagactagaacaaattggtaatttggagaccctttgccacttagccttctcttgtgatgatggcctgaaagctctctcggccctgagcctccctttctctcccatgtttccattcctgtgagacctcccttccttgtccttgtcctctgcccttttgtgctcttctgtgatcacaggaccatttccatggaatgcagattcatacccagccagcctttgcctctactgtatcgctttgggactttaaagatgcagaagtattagaacacacacaaacttaaaatggaaagttaccaaatgtagcactagaggcaagaaaaggggtgattttttaaagatttggctatacttaagatatttaaagaggatgaggttgagtcgtgagtataatttagaagctctccagtgagtatttttttagtatcaaatagtgatcttcttttgctaacataaaaatgagtaaactacagcagagaaataagaataaaactaatgaagggttttttaaaagaactaaataaaacaaataaaactaggctacaggtatagctgaccaagtttgctgtgaaaaatccttgttatatctatttctgtattggagtaatgtgtagattagtggattgttagggatttcagcagtataagaaagaatcaaatatcttgcttttgggtcttctccaaagtaaattgcatggacttcttaaagaagtttgaaatcagtaaaaagacattaggatcatgcaattttactttgtctagcttctaatgtggtaaattgcacattgtgcaacagaaccattaataaaagaaaggagttagttttgaggtaactgcattcattaggggctgaaaataaatgttaaaaatgtttaatttggttagaagttctacaacattgtatgtacatatacaaaatttcattttctctgaaagtcgagaattccaagaactgttacatataatcatatatatgcctatatctaaacgttttccctcctttaatattgataaagttaatatattttaggatgttatgtaaatatttttgcatgtatctgtagctccatcttaatcaaatttatggttaaaagagatttgaggccaggcgtggaggctcacacctataatcccaacactttgggaggccgaggtgggaggatcacttgagcacaggagtttgagaccagcctgtgcaacatcatgaaacatcatctctacataaaaaaatacatatatacaaaaattagctgggcatcatggcacacacctgtagtcccagctacttaggaggctgagatgggaggattgatcgatcgcttgagcctgggaggtggaggctactgtgagccatgatcatgccactgcactccagcctgggcaacagagtgagaccctgtctccaaagagaaagagaaacttgagaaggcttgtgcccaaagcttgaagaaagattgtaatagcatttagttgtgttttatcatgttatcttcataacatgcattttgcatatggctcagagcagagccggatctcccaaggaagcacaaatagtttttgtcgctaacttagttatgagtgaagcctctgttcacttataacttgccagtttcattggtggaataagtccccttactcatgattcatcaatattcctatattaaaattccagtttgatgtttgtctctagttgtctgtgtataatatttccaaagctcctttgtaaaccccgtctcctttcattcagagagtcagagacggtatctcctcctcctgcctcttctattgttctgattagtctacttaaattcacttgatgctctttttattttacaagagacttgagaaatgtcggttgttcctaatggcaaactactttagctgggaaaattcatttcaacttattttaagcttgtaaaatacactgtggtgataaaataaaagagctgggtttga

SEQ ID NO: 688 - protein, 396 aa, Homo sapiens
MPPKKGGDGIKPPPIIGRFGTSLKIGIVGLPNVGKSTFFNVLTNSQASAENFPFCTIDPNESRVPVPDERFDFLCQYHKPASKIPAFLNVVDIAGLVKGAHNGQGLGNAFLSHISACDGIFHLTRAFEDDDITHVEGSVDPIRDIEIIHEELQLKDEEMIGPIIDKLEKVAVRGGDKKLKPEYDIMCKVKSWVIDQKKPVRFYHDWNDKEIEVLNKHLFLTSKPMVYLVNLSEKDYIRKKNKWLIKIKEWVDKYDPGALVIPFSGALELKLQELSAEERQKYLEANMTQSALPKIIKAGFAALQLEYFFTAGPDEVRAWTIRKGTKAPQAAGKIHTDFEKGFIMAEVMKYEDFKEEGSENAVKAAGKYRQQGRNYIVEDGDIIFFKFNTPQQPKKK

SEQ ID NO: 689 - DNA, 3128 bp, Homo sapiens
gtgtgctcgcgcctctcgcccggcctctaagagtcgttggggccagacgctgcttccttgcctcccgcggaggccgccgccgccgccgccgccgctgccgccgccgccgctgccgccgcccgggcggcactgacgccggagtcatgcaggatgaggtcgggggattcggaacggggcgtctccaggttgctggcgtccgtgtcactgtcgctgccctttttgcccccgccgcccccgttgtgcgtcttaatgtgtttgctcaggtggtcgctgcgcatgaagcgcttgttgcacaccggacaggcgaagcgcttctcgcccgtgtgagtccgcagatgccgctgcagctcgtccgagcgcgtgaagcgcttgccgcagaagagccagttgcacacgaagggccgctcgcccgtgtgccagcgcaggtgcgccttcaggtgcgacgtcttcccgtacaccttgccgcagcccggaatgtggcagctgtgcaggcccttgcgccgcaggctcgccccggccgggcccagccgctccgcctcctggcagttggggcagtcgcaggtggcgcggcccgagtagcggcgggcagagcgtgccgagctccccccggcggcggcagccgcggcgcccgatatcatggcgctggcggcggcggctgccacggcggcgctggagtccgaataggagggcaacaccggcttgaagccgtcctgggccagcaggtgctggctggtggagagcaggtgggaggcggcggcggcggaggagccgaggcccgtggagctgaaggcggagtgcgtgagcgagctgaagtcggggttgtaggtgcccagctgcgagtgcagcgaggcctggggggcgcccgagtgcagcgagctctggagccccccagcggggttctgcacttccagccacgagcccgggctgctgtgcacgtcccaccacgacgacgccgcgccgttggtcacctcgccggccgccagcgtcgaatggaagcccgacttgtaccaggactcgtacgggtgcgccatgcccacgcgcgggtacagcccgtcggctgccgtcgtgtgcaccttggaaatgaaggccgactggccacccgcctcctgcggggacaccccggccgctgccgccgcggcagccgccgagttggagaagaggccgccgtagtcgctgctgaaggcggacgacgtgggcgacgtggaggccaggcagaaggcgctgttggcggcgcccgagccgcccgccaggccgcccgagccacggcccccggtggccaccgcgaagcccgagaggctggagccgaggttgcagctggacgaggagcgcttccaggggtgaaagccgcctttggcgaaggcgctcgactctggcagcgtcgtcagcgggctcgtgttgccgatcttgttgcaggtcgccgccagcatggccaacggggtcgttccgaagcgcggctcttcctagagtgggtgggatgggggagggagcaagaaggaggagggcaagaggaagtgggggaagaaacaaagtgcacccgtgagcagcctcgtcccctgcggctgctcccggggggtcctggctccccgcctcgcgcctcctccccacgcgcccgcggaggagtcgccgcaccgggcgcggagcaggggcgatcacccgggcgaaggtccaggcgccggaaagttgcacttcgctgaggctataaatcaaagatgcctccgtgttccccgctgcaaccctgcctacaaccggacttgggttgtcgccgtaaaccggctcatctcccagaagaccccaagtcgcccttcggggtgaagcgcgaaggtaaacacagagaccagagacaacaaacaccgggtgagggcggaggcggccgaaacagcagccagggacgggcgaaacttgcagctctcccagggtggctacgacttgacttttcttttttaatagaaaacgtttggttttaaagtttacatacacacaaaaacagcgattatgaaaacaataatccgaggataagcggccagagacagatttcaaagtcatgggcgaattggggagccgcggaaatgtaaatgtttattagcgtgactagatggactgcaaaacgattaagactgttttctggaaacaccattgtcgcataattgcaacaaaatccccaaagcaaggcgggggatggggtataaatcacgaggggaagaaaagaaacctctagcttttttttgaaaccaaatgaaaaaggacttgattaagaaggccttttcttgcaaaggcatctttctgggttccaaaaacttggggaaaaatcagtcccagaaatgtggaaagtgctaatagaagctgaagctgcagtctagcagcaacagtttctccggagccgcagaccccagaagccataacgaaaaattactccggttaaaacaagcaaatgcgttgccgcgcttgcgacttaccccgagtatagacgtggccatagcaggtctctggctgcgcagcgaggctgggagcggggctgagcctggcggctgctcggaaaaactgcttgggtcccgcgcggctcccgcgtccccgcgctcgtgccgagcggactccaggctcccgccggctaaactcagcctaagtgcgaggagcacccgctttgaagtgccgctggctgcgcctctcgcccaatgagggcgcaggcagagcagaccggagctgccccgcagccaatcagacgctccgaggggcccgagcccgggctcccggcgcgtgccagtcaagtcagctagctagggccgcgggggtgggggggagtagtgggggatacttgcggtgggggacgagggcgggctggggactgaagaaattacagtgcaattaaaaatttacactcacgcaccaagccaggtttaagtaccaatgaaaccgagccacaagcacccccccacacacaaaccaccccgagatgttgcaagttagggctgacagtcctactcgactccccacttgtaggaaaggaggcaggaggggaggagacacccagacacagcccgcaccagcagggcccaagtggagacggaaatgtgagccctcactttgtgtgtccaggcttttgcctacagaacacaacttcagcttgtatctat

SEQ ID NO: 690 - protein, 516 aa, Homo sapiens
MQDEVGGFGTGRLQVAGVRVTVAALFAPAAPVVRLNVFAQVVAAHEALVAHRTGEALLARVSPQMPLQLVRAREALAAEEPVAHEGPLARVPAQVRLQVRRLPVHLAAARNVAAVQALAPQARPGRAQPLRLLAVGAVAGGAARVAAGRACRAPPGGGSRGARYHGAGGGGCHGGAGVRIGGQHRLEAVLGQQVLAGGEQVGGGGGGGAEARGAEGGVRERAEVGVVGAQLRVQRGLGGARVQRALEPPSGVLHFQPRARAAVHVPPRRRRAVGHLAGRQRRMEARLVPGLVRVRHAHARVQPVGCRRVHLGNEGRLATRLLRGHPGRCRRGSRRVGEEAAVVAAEGGRRGRRGGQAEGAVGGARAARQAARATAPGGHREAREAGAEVAAGRGALPGVKAAFGEGARLWQRRQRARVADLVAGRRQHGQRGRSEARLFLEWVGWGREQEGGGQEEVGEETKCTREQPRPLRLLPGGPGSPPRASSPRARGGVAAPGAEQGRSPGRRSRRRKVALR

SEQ ID NO: 691 - DNA, 1809 bp, Homo sapiens
cttgctgctggaaacgcagttccggttaggcggctgagtttgtttacgttgctaacagatctagcccctgctttccctagttccagttccaagatggggaaatccttcgccaacttcatgtgcaagaaagactttcatcctgcctccaaatccaatatcaaaaaagtatggatggcagaacagaaaatatcatatgataagaagaaacaagaagaattgatgcagcaatatcttaaagaacaagaatcatatgataatagattgcttatgggagatgaacgtgtaaagaatggccttaatttcatgtatgaagccccaccaggagctaaaaaagaaaacaaagagaaagaagaaacagaaggagagaccgaatacaaatttgaatggcagaaaggagccccacgagaaaaatatgccaaagatgacatgaacatcagagatcagccctttggtattcaggttcgaaatgtgaggtgcattaaatgtcacaaatggggtcatgtcaacacagatcgagaatgtcctttgtttggtctttctggaatcaatgcaagttcggttcccactgatggctcagggccatcgatgcacccctcggagctaatagcggagatgagaaacagtgggtttgcactgaaacgaaatgtactggggagaaacttgaccgcaaatgatccatcacaggagtatgttgcaagtgagggtgaagaagatccagaagttgaatttttaaagtcactaacaaccaaacaaaaacagaaacttctcaggaaattagatcgactggagaagaaaaaaaagaaaaaagatagaaaaaagaaaaagtttcagaagagcagaagtaaacacaaaaaacataagtcctcttcttcctcatcttcctcctcctcctcctcttcctctactgagacttcagaaagcagtagtgagagtgagagtaacaataaagaaaaaaaaatacaaaggaagaaaagaaagaaaaacaagtgttcagggcataacaacagtgattctgaagagaaggacaagtctaagaagagaaagcttcatgaagaactttctagcagtcaccataaccgggaaaaagccaaggaaaagcccaggttcttaaaacacgagagttctagggaggacagcaaatggagccattctgattctgacaaaaagtccagaacccataaacatagcccagagaagagaggctctgaaagaaaggaggggagcagcagaagccacggcagggaggaaaggagccggagaagccggagcagaagtcctggtagttacaagcaaagggagacaaggaaacgggcacagcgaaatcctggtgaagagcaaagcagaagaaatgacagcagaagccatggcacagacttgtatagaggagaaaaaatgtacagagagcacccaggaggtacacatactaaagtgacacaaagagaatgaagcagaagtagagaagaaagactgtatgtgacaattacctgggaataaaaatatctccacttttttattgaatacctttagcaaggggtaaattatgtactgttgtctttctaataaaaaagctcaattttaatttttcatctctagactgtcaattcaagtacaaaactacatgagtactataagaatgaattttgcaaatatttgtaagtaagctattttggggctgtggaaatattttctgttggtaactgtttcttgttccccataccagataaaaaccgcatataactctgtgacattttctttgttctgaaacatcattaaaagaatgacagtacattgaaaaaaaaaaaaaaaaaa

SEQ ID NO: 692 - protein, 450 aa, Homo sapiens
MGKSFANFMCKKDFHPASKSNIKKVWMAEQKISYDKKKQEELMQQYLKEQESYDNRLLMGDERVKNGLNFMYEAPPGAKKENKEKEETEGETEYKFEWQKGAPREKYAKDDMNIRDQPFGIQVRNVRCIKCHKWGHVNTDRECPLFGLSGINASSVPTDGSGPSMHPSELIAEMRNSGFALKRNVLGRNLTANDPSQEYVASEGEEDPEVEFLKSLTTKQKQKLLRKLDRLEKKKKKKDRKKKKFQKSRSKHKKHKSSSSSSSSSSSSSSTETSESSSESESNNKEKKIQRKKRKKNKCSGHNNSDSEEKDKSKKRKLHEELSSSHHNREKAKEKPRFLKHESSREDSKWSHSDSDKKSRTHKHSPEKRGSERKEGSSRSHGREERSRRSRSRSPGSYKQRETRKRAQRNPGEEQSRRNDSRSHGTDLYRGEKMYREHPGGTHTKVTQRE

SEQ ID NO: 693 - DNA, 2497 bp, Homo sapiens
gacagcttccggcaactgatgcctccactggccactcctccctccgtccacctgtcacttcgggtagctgggaggccagttaaaaaaaatggaacctttttcctgtgacactttcgtggcattacctccagcaacagtcgataacaggattatttttggaaaaaattcagatagactctatgatgaagtacaagaggtggtttattttcctgctgtagttcatgataacctgggagaacgtcttaagtgtacatatatagaaattgatcaagttcctgaaacatatgctgttgtcctgagtcgcccagcgtggttgtggggggcagaaatgggagccaatgagcatggagtttgcattgggaatgaagctgtatggggaagagaagaagtttgtgatgaagaagcactattaggaatggaccttgtcagacttggccttgaaagagctgatacagctgaaaaagccctcaatgtcattgttgacttactagaaaaatatggccagggtggaaattgcacagagggtagaatggtatttagctatcacaacagtttcctgatagctgataggaatgaagcctggattctggagactgcagggaagtactgggcagcagaaaaagtacaagagggagttcgtaatatttctaatcaactttccataacaaccaagattgcccgggaacacccagacatgagaaactatgctaagcggaaaggttggtgggatggtaaaaaggagtttgattttgctgcagcatattcctatcttgacacagccaagatgatgacttcatcaggcagatactgtgagggctacaagcttctaaataagcacaaaggaaatataacttttgaaacaatgatggaaattcttcgagataaaccaagtggcattaatatggagggagaattcctgaccactgcaagcatggtttctattttacctcaagactccagccttccttgcattcacttctttacagggactcctgatcctgagagatctgtttttaagcctttcatatttgtgccacatatttcacaactattggataccagttcaccaacatttgaacttgaagatctagttaaaaagaaatcacattttaagcctgacagaagacacccactctaccaaaaacatcaacaggcattggaagtagtaaataataatgaggaaaaagccaaaataatgttggacaacatgaggaaactggagaaagaactattcagagagatggaatcaatccttcaaaacaagcatcttgatgtggagaaaattgttaatctctttcctcagtgtacaaaagatgaaattcaaatttatcagtcaaatttatcagtcaaagttagttcttagtgatcatatggtcagctaatattagttcttagtgatcagtggtcagtaatcttcaaagtcagaatctatcaccttggtaaattatataaacctaacttgagcagatctgattattcttggatagtattcaagtggtatcttgactattaaactacgtatagtgttgctgaaatagaaagaaaacagcattggaattggattcatgtatcgtgggatacaggtgttatttcaggtgatgtacttgcattattttctttagccatagtaactttttgtcacaataactaagtattcaattatatataaagagtgaaacattaaaatgacgcatggatttatatttattataattatgtagtaccctcaaatcattttgtcagttacatcaagaaagcagatttttctttagtcatgaaaaatatctcaagtggtaagttgtttgtgctttaggcaaacattaaccagctctaacaagaaaaatgtctagatttacacattgtcaatacagtatattagttctgcaaatgcacttttgttaaactcaaacatgctctttgtcaagacttggctaaccagtgagcttgtagctctgattatctagcatttttagggtcattctccttaataggcttttatgttaataagatatatttttagaagagcttgtttgggagattagagaataagataaaagaaccaaaaccttaggatatactgtttctgggtctgaaatctctctcattgtttacttctgttcactcagtgaaaacagaaacaagaatgaggtagtggcaatgaaatagaattattagtatattatgaacattataacattttgaacactataatgcattatatattatgaacttttatgaactttatacatgagtaatagcttcctaaagtttataaaacattgtttaggttacataaagattaccaagtaagactcaaaattgcaaatataaacaaaagaaaaatccaactgaaaataacactaagtatttttgagttcctagaatgtccattttggtatttggttacattatcatatttactagtcactatcagcacaattaggttaataaagaagtgggtcattataaaaaaaaaaaaaaaaaaaaaaaaaaaaaa

SEQ ID NO: 694 - protein, 424 aa, Homo sapiens
MEPFSCDTFVALPPATVDNRIIFGKNSDRLYDEVQEVVYFPAVVHDNLGERLKCTYIEIDQVPETYAVVLSRPAWLWGAEMGANEHGVCIGNEAVWGREEVCDEEALLGMDLVRLGLERADTAEKALNVIVDLLEKYGQGGNCTEGRMVFSYHNSFLIADRNEAWILETAGKYWAAEKVQEGVRNISNQLSITTKIAREHPDMRNYAKRKGWWDGKKEFDFAAAYSYLDTAKMMTSSGRYCEGYKLLNKHKGNITFETMMEILRDKPSGINMEGEFLTTASMVSILPQDSSLPCIHFFTGTPDPERSVFKPFIFVPHISQLLDTSSPTFELEDLVKKKSHFKPDRRHPLYQKHQQALEVVNNNEEKAKIMLDNMRKLEKELFREMESILQNKHLDVEKIVNLFPQCTKDEIQIYQSNLSVKVSS

SEQ ID NO: 695 - DNA, 7473 bp, Homo sapiens
ctcgcggccggcgaggggctgagctgacagggccgcatcggcttaccccaccttactttatcggaacgtgcctaagctgctgcagctggcacccggttgcgctcggcgaagagggctgggggcgggagatgacggtggtcttctccctgcttggcaccctgcgagcaccagctcccttctcctcgccactccaaggttgcagacgaagcaggtactgtcctagatgttaaggacacaacattgagcaaaaacatgcatagtccctgcttccgtgacacttgagtgaactgaatgtgcaaagtccctgtggcacaaagtccctggggccagtgtgtgtggcgggtgtagaaggagctaaagagatctggttggagttggagggtgagagaaaatgaattctaatttacctgcagagaacttaaccattgcagtcaatatgaccaagactttgcctacagcagtaacgcatggatttaattccactaatgacccaccttcaatgtcaattacaaggctttttccagccttactggaatgctttggcattgtcctttgtggctacatagcaggaagggccaatgtcataacatcaacccaggccaaaggactaggaaattttgtctccagatttgcacttccagctttattattcaaaaacatggttgtacttaatttttccaatgtggactggtccttcctatatagtatcttaattgccaaagcttctgtatttttcattgtatgtgtattaaccttattggttgccagtcctgatagtcgatttagcaaagctggactattccctatttttgctacacaaagtaatgactttgcattgggataccctatagttgaagctttatatcaaactacatacccagaatatctccagtacatttatttggtggcaccaatatctcttatgatgttaaaccctatagggtttattttctgtgaaatccaaaagtggaaagacactcaaaatgcttctcaaaataaaataaaaattgtgggactcggactcctgcgtgtattacagaacccaatagtatttatggtcttcattggcatcgccttcaattttattcttgatcgaaaggtacctgtatatgtcgaaaattttcttgatggacttggaaattctttttctggatcagccctattttatcttggtctcacgatggtgggaaaaataaagagactgaagaagtcggcatttgtagtactaattcttctcatcacagctaaacttctggtgctgccacttctgtgcagagaaatggtggaactcttggacaagggcgacagtgtggtgaaccatacaagtttatcaaattatgcatttctgtatggtgtatttcctgtagcaccaggagtggctatctttgcaacacaattcaacatggaagtagaaattataacctcagggatggtgataagcacatttgtgtctgctcccatcatgtacgtttctgcctggttactgacctttcccactatggaccctaagccattggcatatgccatccagaatgttagttttgatataagtattgtcagcctgatctccttgatctggtctctggctattcttcttttgagtaagaaatataaacagcttcctcatatgcttacaactaatttactcattgctcagtctattgtctgtgctggaatgatgatatggaattttgttaaagaaaaaaattttgttggacaaattttggtgtttgttctattgtacagctccctctatagcacctacctgtggacaggccttctagcaatttctttgtttcttttgaaaaagcgagagagggtacaaattcctgttggaataatcataatatctggctggggaattcctgctctccttgttggtgttcttttgataactggaaaacacaatggagatagcattgactcagccttcttttatggaaaagaacagatgatcaccacagcagtcaccctgttctgcagcatcctgatagctggcatatccctcatgtgcatgaaccagactgcccaagcaggaagctatgaaggtttcgatcagtctcagagccacaaagtggtggagcctggaaatactgcttttgaggagagtccagcaccagtaaatgaaccagaactttttacaagctctattccagaaacaagttgctgctcctgctccatgggaaatggtgaattacactgcccatcaatagagccaatagcaaacacaagcaccagtgagcctgtgattccttcgtttgagaaaaacaatcattgtgtgagtcgctgtaactcccagagctgcatattagcccaggaagaagaacagtatctacagagtggagaccagcaactgacccgacatgtgttgctgtgtttacttctcatcattggcctgttcgctaatctttccagttgtttatggtggctattcaaccaagagcctggaagactttatgttgagttacagtttttctgtgccgtgtttaactttggtcagggatttatttcctttggaatctttggattagataaacatttaatcatcctgcctttcaaaagaagacttgaattcctatggaacaataaagacacagcagaaaacagggattctcctgtttcagaggaaataaaaatgacctgtcaacaatttatccattatcaccgtgacctctgtatccgaaacattgtcaaagaaagaaggtgtggtgcaaagacttctgctggaactttctgtggctgtgacctggtgagctggctaattgaagtcggccttgcctccgaccgtggtgaagctgtgatatacggagacaggctggtacaagggggagtcatccaacatattaccaacgagtatgaattccgggatgagtacttgttttacagatttcttcaaaagagtcctgaacagagtcctcctgctattaatgcaaacactctccaacaggaaagatataaagaaattgagcattcatccccaccctcacattcccctaagacctaaattatgcaggggagaaccctacatggaatcatattctagccgcgtattcattagtttttagctgggtgaccttgggcaagttaacagaggcaacctctctgagcctcagttgtctcttctgtaaaatgtgaaaagatgtgctcccaccacatgcgcagggtctgtgattttacatgtatgtaaaacacataggaagctgacttaggaaaaagagaaaaccaaattaaagttctgataatgaatataatatagtcatcctttagtatccaaggggattggttccaggactcctgaagatcccaaaatctgaggatactcaagtcccttatataaaatggtgtaggccgggcatggtggctcacgcctgtaatcccagtactttgggaggccgagtcaggtggatcacctgaggtcaggagttcaagaccagcctggccaacatggcgaaaccccgtctctactataaaatacaaaaaattagttgggtgtggtggcgggtgcctgtaatcccagctactcaggaggctgaggcaggagaatcgcttgaatctgggaggcagaggttgctgtgagccgagatcgtgccactgcactccagcctgagcaacagagcaagactctatctcaaaaataaaataaaataaaataaaataattaataaaatggtgtagtatttgcatataacctatgcacattctcccatatagtttaatcatctttagatacttataatgcctaatacaatgtaaatgctatgtaaatagttgttgttatactgtattgtttagggaataacaataagaaaaacagtctgtacatgttcactacagatgcaaccattgttaagcctgactacatctttttatctgcggttgattgaatctatggatgtggaacctgtgcatatggagggtcaactgtactataaataatacgaatatgccaacattatataatcattgctttctgcaactgtttactataatttcaaaattaatatcctattaactgttcctataaattatcaaatttggcaagtgtattactagcaggagatggaccttaaattatgacaactttatattttttgatagcatctcttgaaaaagaattttaatgattctaataagaggttctttttcttttttccatttccttgacaaatagtactcatttaaaaactagagggctaggcttagtggctcacgcctgtaatctcagcactttgggaggctgaggcgggcagatcgcttgaggtcaggagttcaagaccagcccgggcaacgtggtgaaacccggtctgtactaaaaaaaaaaaaaaagaaaaagaaaaagaaaaaagaatacccaggtgtggtagtgcatgcctgtagtcccagctactttggagactgaggtgggagtaccccttgagcctgggaggcgcaggttgcagtgaaccaagatcacatcactgcacttcaacctgggtgacagagcaagaccctgtctcaaaaacaaaaaacaagcaaaaaaaacctagaggcactatttttttttaaagtttgtcttttcttttctacccaaattactaatctatgccattaaggaaaggaataagaacctccatatgtattattatctccacagtcctgcagaagtacaatctgatctttaactttcatgctacaaataataatttgagtagattaatttgaattttatcaacaaaattattgccatatgatgtatcatttctgtgtttgaacaaagcatcgtaatgcaggataacttctactttattccctgtagttaaaaaaaaaaaaactatatagttcaagccaatatttaaaaattctaaacctaggctgggcatggtgactcatacctgtaatcccagcactttgggaggccgaggcaggtgaattgcttcagcccaggagttcgagaccagcctggccaatgtggtgaaaccccatctctactaaaaaaaaaaaaaaaaaaaaaaattagccaggtgtggtggtgtgcacctgtaatcccagctacccaggaggctgaggcaggaaaattgcttgaaaccaggaggcagaggttgcagtgagctgagatcgtgccactgcactccagcctgagtgtcagagtgagactctgtctcagaaaaaaaaaaaaaaattctaaagattacatttagaatttagtctttttaaagtgtccatgtataaaaatatataatttttaaaattactaaatgttgccttttctcttagtctaatattttagctactaaaacaaaatataaactggatagcttataaacaacataaacttatttctcacagttttggaggctgtgaagtccaagattaaggcactaacagatctagtgtctggtaaggcaaatttctggctcatagatggtaccttcttgctgtgtccccacatggtagatgggaagaactggtctcattggccccttataaggacattaattccactcaataggctccaccctcatgatctaataacctctcaaaggccctacctcctaatactaacacattgaggatgtgacttcaactttacatttctacaggcagagaagtggggctgtgtaaattcttcccatcagtacttgaatgttcatttaacaaataacttatcgagcatctagcatgttccagacacaatctgaacactgagcacacaacagttggaacaaatatgattcctatcctcatggagcttctattctcctgtgaaaaacagatgttaaacatgattgaggattaggtttcaacataagaattctaggaggacacagacatttagaccatagcatcttcaggtaaactttatcttcagtaaattaaagagatctatttagatgacctttgagcatcttaattattagatgtcagtgctagtttaacttattttaaacgtttcagatatttatttaattatactttaagtgtctcatgtaaaaaagttatttataaaataatttatagggttagagtcattgcccttttaatgcaacaaataaacagttttttaaaaacctgcatgggggccaggcgcggtggttcatacctgcaatcccagcactttgggaggtcgaggctggcggatcacgaggtcaggagatcgagaccaccctgattaatgcggtgaaatcccgtctctactaaaaatacaaaaaattagccagacgtggtggtgggcacctatagtcccagctactcgggaggctgaggcaggagaatggcatgaacccggaaggcggagcttgcagtgaaccaagatcgcgccactgcactccagcctgggcgacagagtgagactccatcgcaaaaaaaaaaaaaaaaaaacctgcatggaagcctagtatatttattaataacaaataaattatactttagtgtactattaacctataccaattttaagttgtgattagggaatggggatgtttttaagctgaattgtcttgctgcggaactttccttttttaataagaccatattatgactctgaatgctcaagggtaagtctaaggcctcattgctgttaccaggagatttttctagttacagtaataaagatgttaattcacatgcatgcagacaactgaaactcaagtggagaatttgtttgtgaacaagtcatactacttctgttatttgcatgaatggaatctgcaatatctttttccatgggagaccctaaaagaaaaccctggatcagaatgatctgcagtttcagataataaaggcttttaagagacatttttagaattaaaaatatgctaattttattaaatgaaaatatttgtaactgttaactttctcactgacaaagcaagtttctcaataaaatacctattttaacttgcattactgacatcttttctttgagtaatctgaataatgcagaagccatcatagaggtcttttctatacattctcaatgttttcttaaatgggtttcctgagttctgttcttcatgactctgggctctgcaaacagggtttcccaattacgcattctataaacacttttatgaatgagtcaatatgacattgagtccttttcatacatttcatcatttccaatatgtagagtgacagctagaaaaatgataaaattttgattaaaacctatctctttttcttcagcatagtcaattgttttcttaactctcaatgagtaactccatgcctagcttgtgcttagctttcaatatttttagactaagacaaagtgtatttggcattttgagaacaacaattaatggtcagtaaatttctaaagcaagaaaaatgtgaaactagtgttttatatgtttgttacgcagcagaatgcggctcttagtgtttgccccttcatatctcatcatgtaaaatattaaattactttaggccactgcacataggtagtcctgtcatgagtgatggctggagaaaagttcaggatcataaatgtta

SEQ ID NO: 696 - protein, 870 aa, Homo sapiens
MNSNLPAENLTIAVNMTKTLPTAVTHGFNSTNDPPSMSITRLFPALLECFGIVLCGYIAGRANVITSTQAKGLGNFVSRFALPALLFKNMVVLNFSNVDWSFLYSILIAKASVFFIVCVLTLLVASPDSRFSKAGLFPIFATQSNDFALGYPIVEALYQTTYPEYLQYIYLVAPISLMMLNPIGFIFCEIQKWKDTQNASQNKIKIVGLGLLRVLQNPIVFMVFIGIAFNFILDRKVPVYVENFLDGLGNSFSGSALFYLGLTMVGKIKRLKKSAFVVLILLITAKLLVLPLLCREMVELLDKGDSVVNHTSLSNYAFLYGVFPVAPGVAIFATQFNMEVEIITSGMVISTFVSAPIMYVSAWLLTFPTMDPKPLAYAIQNVSFDISIVSLISLIWSLAILLLSKKYKQLPHMLTTNLLIAQSIVCAGMMIWNFVKEKNFVGQILVFVLLYSSLYSTYLWTGLLAISLFLLKKRERVQIPVGIIIISGWGIPALLVGVLLITGKHNGDSIDSAFFYGKEQMITTAVTLFCSILIAGISLMCMNQTAQAGSYEGFDQSQSHKVVEPGNTAFEESPAPVNEPELFTSSIPETSCCSCSMGNGELHCPSIEPIANTSTSEPVIPSFEKNNHCVSRCNSQSCILAQEEEQYLQSGDQQLTRHVLLCLLLIIGLFANLSSCLWWLFNQEPGRLYVELQFFCAVFNFGQGFISFGIFGLDKHLIILPFKRRLEFLWNNKDTAENRDSPVSEEIKMTCQQFIHYHRDLCIRNIVKERRCGAKTSAGTFCGCDLVSWLIEVGLASDRGEAVIYGDRLVQGGVIQHITNEYEFRDEYLFYRFLQKSPEQSPPAINANTLQQERYKEIEHSSPPSHSPKT

SEQ ID NO: 697 - DNA, 7324 bp, Homo sapiens
ctcgcggccggcgaggggctgagctgacagggccgcatcggcttaccccaccttactttatcggaacgtgcctaagctgctgcagctggcacccggttgcgctcggcgaagagggctgggggcgggagatgacggtggtcttctccctgcttggcaccctgcgagcaccagctcccttctcctcgccactccaaggttgcagacgaagcagagatctggttggagttggagggtgagagaaaatgaattctaatttacctgcagagaacttaaccattgcagtcaatatgaccaagactttgcctacagcagtaacgcatggatttaattccactaatgacccaccttcaatgtcaattacaaggctttttccagccttactggaatgctttggcattgtcctttgtggctacatagcaggaagggccaatgtcataacatcaacccaggccaaaggactaggaaattttgtctccagatttgcacttccagctttattattcaaaaacatggttgtacttaatttttccaatgtggactggtccttcctatatagtatcttaattgccaaagcttctgtatttttcattgtatgtgtattaaccttattggttgccagtcctgatagtcgatttagcaaagctggactattccctatttttgctacacaaagtaatgactttgcattgggataccctatagttgaagctttatatcaaactacatacccagaatatctccagtacatttatttggtggcaccaatatctcttatgatgttaaaccctatagggtttattttctgtgaaatccaaaagtggaaagacactcaaaatgcttctcaaaataaaataaaaattgtgggactcggactcctgcgtgtattacagaacccaatagtatttatggtcttcattggcatcgccttcaattttattcttgatcgaaaggtacctgtatatgtcgaaaattttcttgatggacttggaaattctttttctggatcagccctattttatcttggtctcacgatggtgggaaaaataaagagactgaagaagtcggcatttgtagtactaattcttctcatcacagctaaacttctggtgctgccacttctgtgcagagaaatggtggaactcttggacaagggcgacagtgtggtgaaccatacaagtttatcaaattatgcatttctgtatggtgtatttcctgtagcaccaggagtggctatctttgcaacacaattcaacatggaagtagaaattataacctcagggatggtgataagcacatttgtgtctgctcccatcatgtacgtttctgcctggttactgacctttcccactatggaccctaagccattggcatatgccatccagaatgttagttttgatataagtattgtcagcctgatctccttgatctggtctctggctattcttcttttgagtaagaaatataaacagcttcctcatatgcttacaactaatttactcattgctcagtctattgtctgtgctggaatgatgatatggaattttgttaaagaaaaaaattttgttggacaaattttggtgtttgttctattgtacagctccctctatagcacctacctgtggacaggccttctagcaatttctttgtttcttttgaaaaagcgagagagggtacaaattcctgttggaataatcataatatctggctggggaattcctgctctccttgttggtgttcttttgataactggaaaacacaatggagatagcattgactcagccttcttttatggaaaagaacagatgatcaccacagcagtcaccctgttctgcagcatcctgatagctggcatatccctcatgtgcatgaaccagactgcccaagcaggaagctatgaaggtttcgatcagtctcagagccacaaagtggtggagcctggaaatactgcttttgaggagagtccagcaccagtaaatgaaccagaactttttacaagctctattccagaaacaagttgctgctcctgctccatgggaaatggtgaattacactgcccatcaatagagccaatagcaaacacaagcaccagtgagcctgtgattccttcgtttgagaaaaacaatcattgtgtgagtcgctgtaactcccagagctgcatattagcccaggaagaagaacagtatctacagagtggagaccagcaactgacccgacatgtgttgctgtgtttacttctcatcattggcctgttcgctaatctttccagttgtttatggtggctattcaaccaagagcctggaagactttatgttgagttacagtttttctgtgccgtgtttaactttggtcagggatttatttcctttggaatctttggattagataaacatttaatcatcctgcctttcaaaagaagacttgaattcctatggaacaataaagacacagcagaaaacagggattctcctgtttcagaggaaataaaaatgacctgtcaacaatttatccattatcaccgtgacctctgtatccgaaacattgtcaaagaaagaaggtgtggtgcaaagacttctgctggaactttctgtggctgtgacctggtgagctggctaattgaagtcggccttgcctccgaccgtggtgaagctgtgatatacggagacaggctggtacaagggggagtcatccaacatattaccaacgagtatgaattccgggatgagtacttgttttacagatttcttcaaaagagtcctgaacagagtcctcctgctattaatgcaaacactctccaacaggaaagatataaagaaattgagcattcatccccaccctcacattcccctaagacctaaattatgcaggggagaaccctacatggaatcatattctagccgcgtattcattagtttttagctgggtgaccttgggcaagttaacagaggcaacctctctgagcctcagttgtctcttctgtaaaatgtgaaaagatgtgctcccaccacatgcgcagggtctgtgattttacatgtatgtaaaacacataggaagctgacttaggaaaaagagaaaaccaaattaaagttctgataatgaatataatatagtcatcctttagtatccaaggggattggttccaggactcctgaagatcccaaaatctgaggatactcaagtcccttatataaaatggtgtaggccgggcatggtggctcacgcctgtaatcccagtactttgggaggccgagtcaggtggatcacctgaggtcaggagttcaagaccagcctggccaacatggcgaaaccccgtctctactataaaatacaaaaaattagttgggtgtggtggcgggtgcctgtaatcccagctactcaggaggctgaggcaggagaatcgcttgaatctgggaggcagaggttgctgtgagccgagatcgtgccactgcactccagcctgagcaacagagcaagactctatctcaaaaataaaataaaataaaataaaataattaataaaatggtgtagtatttgcatataacctatgcacattctcccatatagtttaatcatctttagatacttataatgcctaatacaatgtaaatgctatgtaaatagttgttgttatactgtattgtttagggaataacaataagaaaaacagtctgtacatgttcactacagatgcaaccattgttaagcctgactacatctttttatctgcggttgattgaatctatggatgtggaacctgtgcatatggagggtcaactgtactataaataatacgaatatgccaacattatataatcattgctttctgcaactgtttactataatttcaaaattaatatcctattaactgttcctataaattatcaaatttggcaagtgtattactagcaggagatggaccttaaattatgacaactttatattttttgatagcatctcttgaaaaagaattttaatgattctaataagaggttctttttcttttttccatttccttgacaaatagtactcatttaaaaactagagggctaggcttagtggctcacgcctgtaatctcagcactttgggaggctgaggcgggcagatcgcttgaggtcaggagttcaagaccagcccgggcaacgtggtgaaacccggtctgtactaaaaaaaaaaaaaaagaaaaagaaaaagaaaaaagaatacccaggtgtggtagtgcatgcctgtagtcccagctactttggagactgaggtgggagtaccccttgagcctgggaggcgcaggttgcagtgaaccaagatcacatcactgcacttcaacctgggtgacagagcaagaccctgtctcaaaaacaaaaaacaagcaaaaaaaacctagaggcactatttttttttaaagtttgtcttttcttttctacccaaattactaatctatgccattaaggaaaggaataagaacctccatatgtattattatctccacagtcctgcagaagtacaatctgatctttaactttcatgctacaaataataatttgagtagattaatttgaattttatcaacaaaattattgccatatgatgtatcatttctgtgtttgaacaaagcatcgtaatgcaggataacttctactttattccctgtagttaaaaaaaaaaaaactatatagttcaagccaatatttaaaaattctaaacctaggctgggcatggtgactcatacctgtaatcccagcactttgggaggccgaggcaggtgaattgcttcagcccaggagttcgagaccagcctggccaatgtggtgaaaccccatctctactaaaaaaaaaaaaaaaaaaaaaaattagccaggtgtggtggtgtgcacctgtaatcccagctacccaggaggctgaggcaggaaaattgcttgaaaccaggaggcagaggttgcagtgagctgagatcgtgccactgcactccagcctgagtgtcagagtgagactctgtctcagaaaaaaaaaaaaaaattctaaagattacatttagaatttagtctttttaaagtgtccatgtataaaaatatataatttttaaaattactaaatgttgccttttctcttagtctaatattttagctactaaaacaaaatataaactggatagcttataaacaacataaacttatttctcacagttttggaggctgtgaagtccaagattaaggcactaacagatctagtgtctggtaaggcaaatttctggctcatagatggtaccttcttgctgtgtccccacatggtagatgggaagaactggtctcattggccccttataaggacattaattccactcaataggctccaccctcatgatctaataacctctcaaaggccctacctcctaatactaacacattgaggatgtgacttcaactttacatttctacaggcagagaagtggggctgtgtaaattcttcccatcagtacttgaatgttcatttaacaaataacttatcgagcatctagcatgttccagacacaatctgaacactgagcacacaacagttggaacaaatatgattcctatcctcatggagcttctattctcctgtgaaaaacagatgttaaacatgattgaggattaggtttcaacataagaattctaggaggacacagacatttagaccatagcatcttcaggtaaactttatcttcagtaaattaaagagatctatttagatgacctttgagcatcttaattattagatgtcagtgctagtttaacttattttaaacgtttcagatatttatttaattatactttaagtgtctcatgtaaaaaagttatttataaaataatttatagggttagagtcattgcccttttaatgcaacaaataaacagttttttaaaaacctgcatgggggccaggcgcggtggttcatacctgcaatcccagcactttgggaggtcgaggctggcggatcacgaggtcaggagatcgagaccaccctgattaatgcggtgaaatcccgtctctactaaaaatacaaaaaattagccagacgtggtggtgggcacctatagtcccagctactcgggaggctgaggcaggagaatggcatgaacccggaaggcggagcttgcagtgaaccaagatcgcgccactgcactccagcctgggcgacagagtgagactccatcgcaaaaaaaaaaaaaaaaaaacctgcatggaagcctagtatatttattaataacaaataaattatactttagtgtactattaacctataccaattttaagttgtgattagggaatggggatgtttttaagctgaattgtcttgctgcggaactttccttttttaataagaccatattatgactctgaatgctcaagggtaagtctaaggcctcattgctgttaccaggagatttttctagttacagtaataaagatgttaattcacatgcatgcagacaactgaaactcaagtggagaatttgtttgtgaacaagtcatactacttctgttatttgcatgaatggaatctgcaatatctttttccatgggagaccctaaaagaaaaccctggatcagaatgatctgcagtttcagataataaaggcttttaagagacatttttagaattaaaaatatgctaattttattaaatgaaaatatttgtaactgttaactttctcactgacaaagcaagtttctcaataaaatacctattttaacttgcattactgacatcttttctttgagtaatctgaataatgcagaagccatcatagaggtcttttctatacattctcaatgttttcttaaatgggtttcctgagttctgttcttcatgactctgggctctgcaaacagggtttcccaattacgcattctataaacacttttatgaatgagtcaatatgacattgagtccttttcatacatttcatcatttccaatatgtagagtgacagctagaaaaatgataaaattttgattaaaacctatctctttttcttcagcatagtcaattgttttcttaactctcaatgagtaactccatgcctagcttgtgcttagctttcaatatttttagactaagacaaagtgtatttggcattttgagaacaacaattaatggtcagtaaatttctaaagcaagaaaaatgtgaaactagtgttttatatgtttgttacgcagcagaatgcggctcttagtgtttgccccttcatatctcatcatgtaaaatattaaattactttaggccactgcacataggtagtcctgtcatgagtgatggctggagaaaagttcaggatcataaatgtta

SEQ ID NO: 698 - protein, 870 aa, Homo sapiens; identical to SEQ ID NO: 696

SEQ ID NO: 699 - DNA, 4605 bp, Homo sapiens
tagaagacagcaggggaactcgagaagttggttgttttcagcagattaaaacaatacagatttatcagcaagactgttgaacgcataactgcccaagatgcctgtccctccccctccagcacccccgccgcccccgacgtttgcactggccaatacagagaagcctaccttgaataagacagagcaggctgggagaaatgctctcctttctgatatcagcaaagggaagaaactaaagaagacggtcaccaatgacagaagtgcaccaatactggacaaacctaaaggagctggtgctggaggcggtggtggtggctttggtggaggcggcggatttggcggaggaggtggtggcggaggcggtggaagttttggagggggcggacctccaggtctgggaggattgttccaggctggaatgccgaagctgagatccacggccaacagggataatgattctggaggaagccgaccaccattgttgccaccgggaggaagatccacatctgcgaaacccttttcacccccaagtggcccagggaggtttcctgtgccttctccaggccacagaagtggtcccccagagcctcagaggaaccgaatgccgcccccaaggcccgacgtgggctcaaagcctgatagcattcctcctccagtacctagtactccaagacccattcaatcaagtccgcacaaccgggggtccccaccagtgcccggaggccccaggcagcccagccccgggcccactcctccccctttccctggaaaccgcggcactgctttgggaggaggctcaatacgtcagtcccccttgagctcctcctcgcccttctccaaccggcctcccctgccgcctacccccagcagggccttggatgacaaaccccctccaccacctcctccagtgggcaacaggccctccatccacagggaagcggttccccctcctcctcctcagaacaacaagcctccagtgccttccactccgcggccttcggcctcctcacaggccccacctccgccgccacctcccagcaggcccgggccgcctcctctgcctccaagttccagcggcaatgacgaaaccccaagactcccacagcggaatctgtccctcagttcgtccacgcccccgttaccttcgccaggacgttcaggtcctcttcctcccccgcccagtgagagacccccacctccagtgagggacccgccaggccgatcaggccccctcccaccacctcctccagtaagcagaaacggcagcacatctcgggccctgcctgctacccctcagttgccatccaggagtggagtagacagtcccaggagtggacccaggcctccccttcctcctgataggcccagtgctggggcacctcccccacctccaccatcaacatctattagaaatggcttccaagactctccatgtgaagatgagtgggaaagcagattctacttccatccgatttccgatttgccacctccagagccatatgtacaaacgaccaaaagttatcccagcaaactggcaagaaacgaaagccggagtggatccaaccgaagagaaaggggtgctccaccactccctcccatcccgaggtgatctttgcctgctcttctctacccaagctcaagagctgcttctgttgctatctaagaactgcataccctcctccctgcttcttcccttgtgcctcatgtatgggcaggaggaaaggtgggagggggagtgggaatatgcgtgtgtgggtgggaatcggtaagaaatgcacctagcttttcatattgtgtttattctccaggctattgcttgcttcagctgcagcctgcctgtgctggctgctggggtcgataggcttttgtcgtaataggcagagatgacttgcatcccagctttccaccaaccaaattcaaacattcactgcttatttgttacagactgtaattattaaagtccctgagagctgttttctcccgttcctttttcgcatgcttggcctcctctctgtttctatgaaccacagaccacctaagcaagctgctgagtaagggctcactggaaacttgcagtcacaggatgtccaatctttggcagtccgagcttggctctaggacagagctgtccaatagaaatataatgtgagccccatatacaatttttacatttctaatatattttaaacaagtgaagttaatatgcatccaaaatatttcaacctgtaatcaacataaaattttaatgagatattttatattattttttggtactgaatcttcaaaatccagagtgtattttacacttaccgcacatctccattcagactagtcacatttttaagtgctcagtagccacatgtggctggtggctactggattagacagcacgagtctggaagatggaagctagtgcagaaacctcttgtttaaaaaacaaaaaaggcaagatgggcttgagcgattcaagaggcaactaaaaataaaattaggacccagcaccttgtttgacacacagtttgaccttcgattttcctcccttaacttccctcttcccttaatatctgtatacaagtgttgcttcaaagtaccaaggtcagaaattgattcagtacggtttactaaagtcatgtggaataaagccattggaaacaaatggaaagcctgtcgggacttctgggctcagaaccagctggctcacgcactccacttgtcagctggacttctgccttgtgaaatggaagcagcctttgttcctttctggctgagcaagctcctgaggctgggagagactaggaaggcttggtaggaggggaaaaaagtcaggaaaagatatcaaatcagaaacatggaagaagaagggaaccgatttgagttggtgggcaaaactctaaaaatctaaatctgatgcttatgtaagggttgagcgaattagggagattgctagtggaaattggagggaatttgttttgcatcatttgtctaggatctatgcaaatatagctccactaaaggaccatagggaagagccagccttgccttttcttatatgattttgtttacaaaattttactgggacttttaaatctagctatagagttgggaaaaaatatttccacttagatattttacatggttttgtttaaaattaccattacttgttttttaaaaacacatgaccacatatgtatatgtatatctacctaaacattgtatcatggtttcagtatgttattcatgtattactgggagatgctaccaagaaaccaacccaaagaaaattctgaaaaatacatttctatttatagaataaatgtttcatttatataaaagcaaaagaacttagagttctaataaatgggatgtctaataaattatgaagttactgatttgaatatattatatttttataacttccttgccaaagtcctgatttagtacattagagaacctgtgtttcctctctcctctaccattcatctctcttccatacagtcatttgggctttttactcaaagagaatcaagaaataataaggtataacaagcttggcaaagtgttggctttttaaaaaaaaatttttttaatctctagcagtttggtaatttagcagcatcatttatttgggattcttttatctgatttcaacagtgaaaaacatccctatgataaagcctaatgacccatttcacaaaagatggaatttgcccttcctagaaaatatgacggagaaaagtctgactcagagaaagtgagtctgaattttataaggggtagtaagaattggacaattcctttgcatatctgaacttggcaggtaccgttctaaatctgaaacagggtgatagctcaaagttgccattcatccagaatagattgttttagaatgtagtgtttaagtgactgtttcattaatacacctacaccctttctttgaaagtttgcaacctaattgcatctaaaactatgaataagttctgtggtaaaatcttaaactatggaaaattacaaaaatgaatttttcttccctgaaatcagagcttacatgtgtgtttttttataacattttcagataaatgtattcaacatgtaatacagtattttaacattcacctcttattttatattgaaatgtattacagtattaaaactcagtgttcagtatttatttcactatgcattttatttagtaaaagccaggagaaatgtttaatccaatggtgccttactttgtgatttaaaagaaatcaacttttttttatgtctaagtagtagattatttgcatatttgtaaaaactgttaggtctttatattttaaagtgtaataccagttttgttattttagtagcagaaatgggatgattgttaaagttccccaaaaatgttggcatgaaattaatttttccctccttatagtcaaggaccgtagaggaagaaaaacttttttttcataccatgcactatgtaaacagacacattttgctatctgtgtcatcaggatagtgtaagtggtagggtagagactaccctagacatctgcatctttgtaagttagccagacaataaagaaaagcagaatgaaaaaaaaaaaaaaaaaaaaaaaa

SEQ ID NO: 700 - protein, 503 aa, Homo sapiens
MPVPPPPAPPPPPTFALANTEKPTLNKTEQAGRNALLSDISKGKKLKKTVTNDRSAPILDKPKGAGAGGGGGGFGGGGGFGGGGGGGGGGSFGGGGPPGLGGLFQAGMPKLRSTANRDNDSGGSRPPLLPPGGRSTSAKPFSPPSGPGRFPVPSPGHRSGPPEPQRNRMPPPRPDVGSKPDSIPPPVPSTPRPIQSSPHNRGSPPVPGGPRQPSPGPTPPPFPGNRGTALGGGSIRQSPLSSSSPFSNRPPLPPTPSRALDDKPPPPPPPVGNRPSIHREAVPPPPPQNNKPPVPSTPRPSASSQAPPPPPPPSRPGPPPLPPSSSGNDETPRLPQRNLSLSSSTPPLPSPGRSGPLPPPPSERPPPPVRDPPGRSGPLPPPPPVSRNGSTSRALPATPQLPSRSGVDSPRSGPRPPLPPDRPSAGAPPPPPPSTSIRNGFQDSPCEDEWESRFYFHPISDLPPPEPYVQTTKSYPSKLARNESRSGSNRRERGAPPLPPIPR

SEQ ID NO: 701 - DNA, 4700 bp, Homo sapiens
ggccgcgggtcccggcggcggggtgggcgggggaggcagcgggtgacagatgtactcctctgacagctctcagtatcagcccagtggctccctgccattggctcagtgcaatggaccggcaacgccgctcactataataacactcatgcctgccagcagcagcaactccgagtgcaggcgccgagcgcgggggatgctgccgccgccgccgcttctgctgccgcgcgggcggctcccgcagccccgctccgcccggccaccgcgcgggcactgactcccgctcggttccgtttcgccggcccggccccctcctaggctggaatcctcccgcggggctcgtcgtcccgacgcgaatctgaggagaaacaggagcgagagactgaggggagagcgcggcgagcatgcggaggcgggggagcctcggcgctcaccacagaggggtgcagtgagccagtctccagaggacgtgccgggggtggctgcgtgccctcgtggcgggttcccagcccaccgtcgccggccccggcgcgctgcggctgtgggcgcggggtgcgtggaagcggcggctgcggcggaggaggcggcggctgccccatggagtgttactacattgtcatcagctccacgcatctcagcaacggacactttcgcaacatcaagggagttttccggggccctctcagcaagaacgggaacaaaactctggactatgctgagaaggaaaataccatagcaaaagctctggaagatctgaaggcaaatttttactgtgaactctgtgacaagcagtactataagcaccaggagtttgacaatcacattaattcatatgaccatgctcacaagcagaggctcaaggaactgaaacaaagggaatttgctcgaaatgtagcatctaaatccaggaaagatgaaagaaaacaggaaaaggcactccaacgcctgcacaagctggctgagctaagaaaggaaactgtatgtgctcctggaagtggccccatgttcaaatcaacaactgttactgtgagagaaaactgtaatgaaatttcccaacgagttgttgtggattcagttaataaccagcaagatttcaaatatactttgattcatagtgaagagaatactaaagatgctaccactgttgctgaagatccagaaagtgcaaataattatacagcaaaaaataaccaagttggggatcaagcccaggggattcacagacacaaaatcggcttttcttttgcatttccaaagaaagcgtccgtgaagctagagtcctcagctgcagccttctctgaatacagtgatgatgcctcagtgggaaaaggatttagcagaaaaagtagatttgtccccagtgcttgtcatcttcaacaatcttcaccaacagatgtgcttttgagttctgaggagaaaactaactcttttcatccaccagaggcaatgtgcagagacaaagaaactgttcaaactcaagagataaaagaagtctctagtgaaaaagatgcattattattaccttcattttgcaagtttcaacttcagttatcttctgatgcagataattgtcaaaattcagtcccattagcagatcaaataccactagagagtgttgttattaatgaagacatacctgttagtggtaacagttttgagttgttaggaaataaatccacagttcttgacatgtctaatgattgcatatctgtgcaagctaccacagaggaaaatgttaagcataacgaggcatccacaactgaggttgaaaataaaaatggtcccgagacattggccccttcaaatactgaagaggttaacataactatacataagaaaacaaatttctgcaaaagacaatgtgagccatttgtacctgtccttaacaaacacagatctacagttcttcagtggccatcagaaatgctggtttatacaactacgaaaccatcaatttcctatagctgtaatcctctatgttttgacttcaagtctactaaagtaaataataatctagataaaaataagccagacttaaaagatctttgttctcagcagaagcaggaagacatttgcatgggaccactttcagattacaaggatgtatctacagaaggactcactgattatgaaattggaagtagcaaaaataaatgcagccaagtcactcctcttttggctgatgatattctctccagtagttgtgattctggaaaaaatgagaacacaggtcagaggtataaaaacatttcctgtaagatcagagaaacagaaaagtataattttactaaaagtcaaataaaacaggacactctagatgaaaaatacaacaaaataaggttgaaagagacccatgaatactggttccataaaagtagaagaaagaaaaaaagaaaaaagttatgtcagcatcatcatatggagaaaaccaaagaatcagaaactcgctgcaaaatggaagcagagaatagttacactgaaaatgctgggaaatatctattggaaccaatttcagaaaagcagtatttagctgcagagcaattattagactcacatcagttacttgataaaaggcccaaatcagaatccatatccttaagtgacaatgaagaaatgtgtaaaacatggaatactgaatacaacacttatgatactatcagttctaaaaaccactgtaaaaagaacacaatacttttaaatggacaatcaaatgcaacaatgatacattctgggaaacataatttaacatattctagaacttactgttgttggaaaaccaaaatgtcaagctgtagtcaggatcacagaagcttagttcttcaaaatgatatgaaacacatgagtcagaatcaggctgttaaaagaggttacaattctgtcatgaatgaatcagaaagattctatcgaaaacgtagacaacattcacattcttattcttcagatgaaagtttaaatcgacagaatcatttaccagaagaatttttgaggccaccaagtacttcagttgctccctgcaagcctaaaaagaaacggaggcgaaaaagaggcagattccaccccggatttgaaactttagaactcaaagaaaatacagattatcccgtgaaagacaattcttccttaaatcctctggataggttaataagtgaagacaaaaaagagaaaatgaaaccacaagaagttgcaaaaatcgaaaggaactcagaacaaacaaaccaattaagaaacaaactgtctttccaccctaacaatctccttccttctgaaaccaatggtgaaactgagcatttagaaatggagaccacttctggtgaattgtcagatgtttccaatgatcccaccacatctgtctgtgtagctagtgccccaacaaaagaagcaattgacaataccctgcttgaacacaaagaaagaagtgagaatataaatcttaatgaaaagcaaattccttttcaggtgcctaatattgaaaggaactttagacagtcacagcctaaatcctatctttgccattatgaactggctgaggcccttccacaaggaaagatgaatgagacaccaactgagtggctgcgttataattcaggaatccttaacacacaaccaccattaccattcaaagaagcacatgtcagtggtcatacttttgtaacagctgagcaaatcctggctccattagctttaccagagcaagcattattgatcccactagaaaaccatgacaaattcaaaaatgtaccatgtgaggtctaccagcacattctgcagccaaacatgctggccaacaaggttaaatttacctttcctccagctgccctcccaccccctagcacacctctgcagcctttgcctttgcagcagtccttatgttctacctctgtaaccactatccatcacactgttttgcagcagcacgctgcagctgctgcagctgcagctgcagccgcagctgcaggaacctttaaagtgcttcagccacaccaacagtttctttcccaaatcccagctctcaccagaacctcattacctcagctctcagtaggaccagtaggaccgaggctttgtcctgggaaccagccaacttttgttgctcctcctcagatgccaatcattccagcttccgttcttcatcctagccatctggctttcccatctttaccccatgcactctttccttcactgctttccccacaccctactgtcatccctttgcaacctctcttctagtcatcaccataatgggaaaaaaatactcttgtgaaaactattgctatatgcgttaagtgttcatctatgtgggtacatggctatttaactggtggaaataaactggccgatacatggcgtcattggtttgaaatcatttactgtaagtgcaatgatgcaaataaatccctaagtttctgatatataatattattaaagcactgaatagtttgaaaatcaatacaatatatgctatatattaaaatgatgtcttaagagtatgtataatgtacataaaatatatttatagtactctaatttatgttgtaaagtatgctcccttggtttttcttaatctttgtgtatttgcacctatttaatgtttagacaaagctgatggcactatgttttgtatcatgttccttgaaactgtaaattcagtgaaaaatatctcttgcaataaatttttgttaactatttaaaaaaaaaaaaaaaaa

SEQ ID NO: 702 - protein, 1209 aa, Homo sapiens
MECYYIVISSTHLSNGHFRNIKGVFRGPLSKNGNKTLDYAEKENTIAKALEDLKANFYCELCDKQYYKHQEFDNHINSYDHAHKQRLKELKQREFARNVASKSRKDERKQEKALQRLHKLAELRKETVCAPGSGPMFKSTTVTVRENCNEISQRVVVDSVNNQQDFKYTLIHSEENTKDATTVAEDPESANNYTAKNNQVGDQAQGIHRHKIGFSFAFPKKASVKLESSAAAFSEYSDDASVGKGFSRKSRFVPSACHLQQSSPTDVLLSSEEKTNSFHPPEAMCRDKETVQTQEIKEVSSEKDALLLPSFCKFQLQLSSDADNCQNSVPLADQIPLESVVINEDIPVSGNSFELLGNKSTVLDMSNDCISVQATTEENVKHNEASTTEVENKNGPETLAPSNTEEVNITIHKKTNFCKRQCEPFVPVLNKHRSTVLQWPSEMLVYTTTKPSISYSCNPLCFDFKSTKVNNNLDKNKPDLKDLCSQQKQEDICMGPLSDYKDVSTEGLTDYEIGSSKNKCSQVTPLLADDILSSSCDSGKNENTGQRYKNISCKIRETEKYNFTKSQIKQDTLDEKYNKIRLKETHEYWFHKSRRKKKRKKLCQHHHMEKTKESETRCKMEAENSYTENAGKYLLEPISEKQYLAAEQLLDSHQLLDKRPKSESISLSDNEEMCKTWNTEYNTYDTISSKNHCKKNTILLNGQSNATMIHSGKHNLTYSRTYCCWKTKMSSCSQDHRSLVLQNDMKHMSQNQAVKRGYNSVMNESERFYRKRRQHSHSYSSDESLNRQNHLPEEFLRPPSTSVAPCKPKKKRRRKRGRFHPGFETLELKENTDYPVKDNSSLNPLDRLISEDKKEKMKPQEVAKIERNSEQTNQLRNKLSFHPNNLLPSETNGETEHLEMETTSGELSDVSNDPTTSVCVASAPTKEAIDNTLLEHKERSENINLNEKQIPFQVPNIERNFRQSQPKSYLCHYELAEALPQGKMNETPTEWLRYNSGILNTQPPLPFKEAHVSGHTFVTAEQILAPLALPEQALLIPLENHDKFKNVPCEVYQHILQPNMLANKVKFTFPPAALPPPSTPLQPLPLQQSLCSTSVTTIHHTVLQQHAAAAAAAAAAAAAGTFKVLQPHQQFLSQIPALTRTSLPQLSVGPVGPRLCPGNQPTFVAPPQMPIIPASVLHPSHLAFPSLPHALFPSLLSPHPTVIPLQPLF

SEQ ID NO: 703 - DNA, 3619 bp, Homo sapiens
gcggccgcccctccccgattcccgccacctgccgcctggccaggtggaaggggcgctgccgcgagcctccgggcctcagggtgttccggggagcggcgccccgggtctctgggcccacccgccccgggcgtcctccgagagtgggggctgcgcccgcggggtcagacacctgttcggcccggcccggcgtggtcgccgggggccaggatgaaagtgaccgtgtgcttcggcaggacgggcatcgtggtgccctgcaaggagggccagctgcgcgtcggcgagctcacccagcaggcgctgcagcggtacctgaagacccgggagaagggtcctggttactgggtgaagattcatcacttagaatatacagatggaggaatcctggatccagatgatgtcttggcagatgttgttgaagataaagacaaggtactgattgctgtgtttgaagaacaagaaccactccacaagattgagagccccagtggaaaccctgcagatcggcagagcccagatgcttttgagacagaagtggccgcccaactggccgcatttaagccaattggtggggagattgaagtaaccccttctgctctaaaactaggcactccactgctggtgaggagaagcagtgacccagtgccaggcccacctgctgatacccagccaagcgcttcacaccctggtggccagagtctgaaactggttgttccagattccacgcagaacttggaagacagagaagttttgaatggtgtacagacagaactactaacttcgccaagaactaaggacacattgagtgatatgacaagaacagtggagatttctggggaaggaggcccattgggaatacatgtagtgcccttcttttcatctctgagtggaaggattctaggactcttcatccgaggcattgaagacaacagcaggtccaagcgggagggactatttcacgaaaatgaatgtattgtaaaaatcaacaatgtggatctcgtagacaaaacctttgctcaggctcaagatgtcttccgccaggcaatgaaatctccaagtgtgctcctccacgtgcttcctccacaaaaccgtgaacagtatgaaaagtcagtcattggctctcttaacatttttggtaataatgatggcgttttgaaaaccaaagtgccgcctcctgtccatggaaaatcgggactaaagacagcaaatctcacaggaaccgatagtcctgaaacagatgcatcagcttccctgcaacaaaacaagagtccccgagtaccaaggctgggaggaaaaccatcctctccctcactctcgcctctcatgggatttggcagcaataaaaatgcaaagaaaattaagattgacctaaagaaaggccctgaaggacttggtttcactgtggttaccagagactcttccatacatggtcccggtcccatttttgtaaaaaacattttaccaaagggagcagcaataaaagatggccgcctacaatcaggggacagaattttggaggtaaatgggagagatgtcaccggacgaacccaggaagagcttgtggccatgctcaggagcaccaagcagggggagacagcatcgctggtcattgcccgccaagaaggacattttctgccccgagagttgaaaggagaacctgactgctgtgcactctctctggagacaagcgagcagctcacctttgagatccccctgaatgattcaggttctgctggcctcggggtgagcttaaaagggaacaaatccagagaaactggaacagacttggggatttttatcaaatccatcattcatggaggcgctgcttttaaggatggtcgtctgcgaatgaatgaccagctgattgcagttaatggggaatctcttttgggaaagtccaaccacgaagctatggaaacacttaggcggtcaatgtccatggagggaaacatccgagggatgatccagttggtgattctgaggaggccagagagaccaatggaggatcctgcagagtgtggggcattttccaagccatgctttgagaactgtcaaaatgctgtaaccacctctaggcgaaatgataatagtatcctgcatccacttggcacttgcagtccacaagacaaacagaaaggtctattgctgcccaatgacggatgggccgagagtgaagttccaccttctccaacaccacattctgctctgggattgggcctcgaagattacagccacagctctggggtggattcagcagtatattttccagatcagcacatcaacttcagatctgtgacaccggccaggcagcctgaatcaattaatttgaaagcctcgaagagcatggaccttgtgccagatgaaagcaaggttcactcattggctggacaaaaatcggggtctgtctgataagagctctcactctggccaaggagctctgaattgtgagtctgcccctcaggggaattcggagctagaggacatggaaaataaagccaggaaagtcaaaaaaacgaaagagaaggagaagaaaaaggaaaagggcaaattgaaagtcaaggagaaaaagcgcaaagaggagaatgaagatccagaaaggaaaataaagaagaagggcttcggcgccatgctgagatttggaaagaagaaagaggataagggtggaaaggctgagcagaaaggtactctgaaacatggtggcctgagagaagaagagctggagaaaatgaaagaagagcgtgaaaggattggagcaaaacatcaggagctaagggaaaagcaggcaagaggtcttcttgattatgctactggtgcaattggatcagtgtatgatatggatgatgatgaaatggaccccaattatgccagagtgaaccactttcgggaaccatgcacatcagcaaatgtctttagatctccatctccccctcgagctggaccatttggttaccctcgggatggccatccactgtctccagaaagagaccacttagagggtctctatgccaaggtcaacaagccataccatccactggttccagctgacagtggccgtcctacgggtggaagcactgaccgtatccagaagttgcggaaagagtattatcaggctcggagggaaggtttccctttatatgaagacgacgaaggaagagcaaggccatctgagtatgacctactctgggtgcctggaaggggtccagatgggaatgcacacaacctccgctttgaagggatggagaggcagtacgcatccttacccaggggaggacccgcagatcctgtagactatctgccagcagcacctcgggggctctacaaggaaagggagcttccctattatccaggggctcatcctatgcaccctcccaaagggagctatccccgccccacagagctcagggtggcagatctccggtatcctcagcactacccacccccgccagctccccagcacaaaggaccctttcgacaagacgttccgccttcccctccccagcaccaaagaatgccagcctatcaggaaacaggcagaccagggccccgtgggggcagcccagaccagtacccttaccgaacccaggattcccggcagaagaaccccatgactgcagccgtatag

SEQ ID NO: 704 - protein, 732 aa, Homo sapiens
MKVTVCFGRTGIVVPCKEGQLRVGELTQQALQRYLKTREKGPGYWVKIHHLEYTDGGILDPDDVLADVVEDKDKVLIAVFEEQEPLHKIESPSGNPADRQSPDAFETEVAAQLAAFKPIGGEIEVTPSALKLGTPLLVRRSSDPVPGPPADTQPSASHPGGQSLKLVVPDSTQNLEDREVLNGVQTELLTSPRTKDTLSDMTRTVEISGEGGPLGIHVVPFFSSLSGRILGLFIRGIEDNSRSKREGLFHENECIVKINNVDLVDKTFAQAQDVFRQAMKSPSVLLHVLPPQNREQYEKSVIGSLNIFGNNDGVLKTKVPPPVHGKSGLKTANLTGTDSPETDASASLQQNKSPRVPRLGGKPSSPSLSPLMGFGSNKNAKKIKIDLKKGPEGLGFTVVTRDSSIHGPGPIFVKNILPKGAAIKDGRLQSGDRILEVNGRDVTGRTQEELVAMLRSTKQGETASLVIARQEGHFLPRELKGEPDCCALSLETSEQLTFEIPLNDSGSAGLGVSLKGNKSRETGTDLGIFIKSIIHGGAAFKDGRLRMNDQLIAVNGESLLGKSNHEAMETLRRSMSMEGNIRGMIQLVILRRPERPMEDPAECGAFSKPCFENCQNAVTTSRRNDNSILHPLGTCSPQDKQKGLLLPNDGWAESEVPPSPTPHSALGLGLEDYSHSSGVDSAVYFPDQHINFRSVTPARQPESINLKASKSMDLVPDESKVHSLAGQKSGSV

SEQ ID NO: 705 - DNA, 3642 bp, Homo sapiens
gcggccgcccctccccgattcccgccacctgccgcctggccaggtggaaggggcgctgccgcgagcctccgggcctcagggtgttccggggagcggcgccccgggtctctgggcccacccgccccgggcgtcctccgagagtgggggctgcgcccgcggggtcagacacctgttcggcccggcccggcgtggtcgccgggggccaggatgaaagtgaccgtgtgcttcggcaggacgggcatcgtggtgccctgcaaggagggccagctgcgcgtcggcgagctcacccagcaggcgctgcagcggtacctgaagacccgggagaagggtcctggttactgggtgaagattcatcacttagaatatacagatggaggaatcctggatccagatgatgtcttggcagatgttgttgaagataaagacaaggtactgattgctgtgtttgaagaacaagaaccactccacaagattgagagccccagtggaaaccctgcagatcggcagagcccagatgcttttgagacagaagtggccgcccaactggccgcatttaagccaattggtggggagattgaagtaaccccttctgctctaaaactaggcactccactgctggtgaggagaagcagtgacccagtgccaggcccacctgctgatacccagccaagcgcttcacaccctggtggccagagtctgaaactggttgttccagattccacgcagaacttggaagacagagaagttttgaatggtgtacagacagaactactaacttcgccaagaactaaggacacattgagtgatatgacaagaacagtggagatttctggggaaggaggcccattgggaatacatgtagtgcccttcttttcatctctgagtggaaggattctaggactcttcatccgaggcattgaagacaacagcaggtccaagcgggagggactatttcacgaaaatgaatgtattgtaaaaatcaacaatgtggatctcgtagacaaaacctttgctcaggctcaagatgtcttccgccaggcaatgaaatctccaagtgtgctcctccacgtgcttcctccacaaaaccgtgaacagtatgaaaagtcagtcattggctctcttaacatttttggtaataatgatggcgttttgaaaaccaaagtgccgcctcctgtccatggaaaatcgggactaaagacagcaaatctcacaggaaccgatagtcctgaaacagatgcatcagcttccctgcaacaaaacaagagtccccgagtaccaaggctgggaggaaaaccatcctctccctcactctcgcctctcatgggatttggcagcaataaaaatgcaaagaaaattaagattgacctaaagaaaggccctgaaggacttggtttcactgtggttaccagagactcttccatacatggtcccggtcccatttttgtaaaaaacattttaccaaagggagcagcaataaaagatggccgcctacaatcaggggacagaattttggaggtaaatgggagagatgtcaccggacgaacccaggaagagcttgtggccatgctcaggagcaccaagcagggggagacagcatcgctggtcattgcccgccaagaaggacattttctgccccgagagttggatggtcgtctgcgaatgaatgaccagctgattgcagttaatggggaatctcttttgggaaagtccaaccacgaagctatggaaacacttaggcggtcaatgtccatggagggaaacatccgagggatgatccagttggtgattctgaggaggccagagagaccaatggaggatcctgcagagtgtggggcattttccaagccatgctttgagaactgtcaaaatgctgtaaccacctctaggcgaaatgataatagtatcctgcatccacttggcacttgcagtccacaagacaaacagaaaggtctattgctgcccaatgacggatgggccgagagtgaagttccaccttctccaacaccacattctgctctgggattgggcctcgaagattacagccacagctctggggtggattcagcagtatattttccagatcagcacatcaacttcagatctgtgacaccggccaggcagcctgaatcaattaatttgaaagcctcgaagagcatggaccttgtgccagatgaaagcaaggttcactcattggctggacaaaaatcggaatctccaagcaaagattttggtccaactctgggtttgaaaaagtccagctccttggagagtctgcagactgcagtggccgaggtcaggaagaatgaccttccctttcacaggccccggccgcacatggttcgaggccgaggctgcaatgagagctttagagcagccattgacaaatcctacgatggacctgaagaaatagaagctgacggtctgtctgataagagctctcactctggccaaggagctctgaattgtgagtctgcccctcaggggaattcggagctagaggacatggaaaataaagccaggaaagtcaaaaaaacgaaagagaaggagaagaaaaaggaaaagggcaaattgaaagtcaaggagaaaaagcgcaaagaggagaatgaagatccagaaaggaaaataaagaagaagggcttcggcgccatgctgagatttggaaagaagaaagaggataagggtggaaaggctgagcagaaaggtactctgaaacatggtggcctgagagaagaagagctggagaaaatgaaagaagagcgtgaaaggattggagcaaaacatcaggagctaagggaaaagcaggcaagaggtcttcttgattatgctactggtgcaattggatcagtgtatgatatggatgatgatgaaatggaccccaattatgccagagtgaaccactttcgggaaccatgcacatcagcaaatgtctttagatctccatctccccctcgagctggaccatttggttaccctcgggatggccatccactgtctccagaaagagaccacttagagggtctctatgccaaggtcaacaagccataccatccactggttccagctgacagtggccgtcctacgggtggaagcactgaccgtatccagaagttgcggaaagagtattatcaggctcggagggaaggtttccctttatatgaagacgacgaaggaagagcaaggccatctgagtatgacctactctgggtgcctggaaggggtccagatgggaatgcacacaacctccgctttgaagggatggagaggcagtacgcatccttacccaggggaggacccgcagatcctgtagactatctgccagcagcacctcgggggctctacaaggaaagggagcttccctattatccaggggctcatcctatgcaccctcccaaagggagctatccccgccccacagagctcagggtggcagatctccggtatcctcagcactacccacccccgccagctccccagcacaaaggaccctttcgacaagacgttccgccttcccctccccagcaccaaagaatgccagcctatcaggaaacaggcagaccagggccccgtgggggcagcccagaccagtacccttaccgaacccaggattcccggcagaagaaccccatgactgcagccgtatag

SEQ ID NO: 706 - protein, 1144 aa, Homo sapiens
MKVTVCFGRTGIVVPCKEGQLRVGELTQQALQRYLKTREKGPGYWVKIHHLEYTDGGILDPDDVLADVVEDKDKVLIAVFEEQEPLHKIESPSGNPADRQSPDAFETEVAAQLAAFKPIGGEIEVTPSALKLGTPLLVRRSSDPVPGPPADTQPSASHPGGQSLKLVVPDSTQNLEDREVLNGVQTELLTSPRTKDTLSDMTRTVEISGEGGPLGIHVVPFFSSLSGRILGLFIRGIEDNSRSKREGLFHENECIVKINNVDLVDKTFAQAQDVFRQAMKSPSVLLHVLPPQNREQYEKSVIGSLNIFGNNDGVLKTKVPPPVHGKSGLKTANLTGTDSPETDASASLQQNKSPRVPRLGGKPSSPSLSPLMGFGSNKNAKKIKIDLKKGPEGLGFTVVTRDSSIHGPGPIFVKNILPKGAAIKDGRLQSGDRILEVNGRDVTGRTQEELVAMLRSTKQGETASLVIARQEGHFLPRELDGRLRMNDQLIAVNGESLLGKSNHEAMETLRRSMSMEGNIRGMIQLVILRRPERPMEDPAECGAFSKPCFENCQNAVTTSRRNDNSILHPLGTCSPQDKQKGLLLPNDGWAESEVPPSPTPHSALGLGLEDYSHSSGVDSAVYFPDQHINFRSVTPARQPESINLKASKSMDLVPDESKVHSLAGQKSESPSKDFGPTLGLKKSSSLESLQTAVAEVRKNDLPFHRPRPHMVRGRGCNESFRAAIDKSYDGPEEIEADGLSDKSSHSGQGALNCESAPQGNSELEDMENKARKVKKTKEKEKKKEKGKLKVKEKKRKEENEDPERKIKKKGFGAMLRFGKKKEDKGGKAEQKGTLKHGGLREEELEKMKEERERIGAKHQELREKQARGLLDYATGAIGSVYDMDDDEMDPNYARVNHFREPCTSANVFRSPSPPRAGPFGYPRDGHPLSPERDHLEGLYAKVNKPYHPLVPADSGRPTGGSTDRIQKLRKEYYQARREGFPLYEDDEGRARPSEYDLLWVPGRGPDGNAHNLRFEGMERQYASLPRGGPADPVDYLPAAPRGLYKERELPYYPGAHPMHPPKGSYPRPTELRVADLRYPQHYPPPPAPQHKGPFRQDVPPSPPQHQRMPAYQETGRPGPRGGSPDQYPYRTQDSRQKNPMTAAV

SEQ ID NO: 707 - DNA, 3525 bp, Homo sapiens
gcggccgcccctccccgattcccgccacctgccgcctggccaggtggaaggggcgctgccgcgagcctccgggcctcagggtgttccggggagcggcgccccgggtctctgggcccacccgccccgggcgtcctccgagagtgggggctgcgcccgcggggtcagacacctgttcggcccggcccggcgtggtcgccgggggccaggatgaaagtgaccgtgtgcttcggcaggacgggcatcgtggtgccctgcaaggagggccagctgcgcgtcggcgagctcacccagcaggcgctgcagcggtacctgaagacccgggagaagggtcctggttactgggtgaagattcatcacttagaatatacagatggaggaatcctggatccagatgatgtcttggcagatgttgttgaagataaagacaaggtactgattgctgtgtttgaagaacaagaaccactccacaagattgagagccccagtggaaaccctgcagatcggcagagcccagatgcttttgagacagaagtggccgcccaactggccgcatttaagccaattggtggggagattgaagtaaccccttctgctctaaaactaggcactccactgctggtgaggagaagcagtgacccagtgccaggcccacctgctgatacccagccaagcgcttcacaccctggtggccagagtctgaaactggttgttccagattccacgcagaacttggaagacagagaagttttgaatggtgtacagacagaactactaacttcgccaagaactaaggacacattgagtgatatgacaagaacagtggagatttctggggaaggaggcccattgggaatacatgtagtgcccttcttttcatctctgagtggaaggattctaggactcttcatccgaggcattgaagacaacagcaggtccaagcgggagggactatttcacgaaaatgaatgtattgtaaaaatcaacaatgtggatctcgtagacaaaacctttgctcaggctcaagatgtcttccgccaggcaatgaaatctccaagtgtgctcctccacgtgcttcctccacaaaaccgtgaacagtatgaaaagtcagtcattggctctcttaacatttttggtaataatgatggcgttttgaaaaccaaagtgccgcctcctgtccatggaaaatcgggactaaagacagcaaatctcacaggaaccgatagtcctgaaacagatgcatcagcttccctgcaacaaaacaagagtccccgagtaccaaggctgggaggaaaaccatcctctccctcactctcgcctctcatgggatttggcagcaataaaaatgcaaagaaaattaagattgacctaaagaaaggccctgaaggacttggtttcactgtggttaccagagactcttccatacatggtcccggtcccatttttgtaaaaaacattttaccaaagggagcagcaataaaagatggccgcctacaatcaggggacagaattttggaggtaaatgggagagatgtcaccggacgaacccaggaagagcttgtggccatgctcaggagcaccaagcagggggagacagcatcgctggtcattgcccgccaagaaggacattttctgccccgagagttgaaaggagaacctgactgctgtgcactctctctggagacaagcgagcagctcacctttgagatccccctgaatgattcaggttctgctggcctcggggtgagcttaaaagggaacaaatccagagaaactggaacagacttggggatttttatcaaatccatcattcatggaggcgctgcttttaaggatggtcgtctgcgaatgaatgaccagctgattgcagttaatggggaatctcttttgggaaagtccaaccacgaagctatggaaacacttaggcggtcaatgtccatggagggaaacatccgagggatgatccagttggtgattctgaggaggccagagagaccaatggaggatcctgcagagtgtggggcattttccaagccatgctttgagaactgtcaaaatgctgtaaccacctctaggcgaaatgataatagtatcctgcatccacttggcacttgcagtccacaagacaaacagaaaggtctattgctgcccaatgacggatgggccgagagtgaagttccaccttctccaacaccacattctgctctgggattgggcctcgaagattacagccacagctctggggtggattcagcagtatattttccagatcagcacatcaacttcagatctgtgacaccggccaggcagcctgaatcaattaatttgaaagcctcgaagagcatggaccttgtgccagatgaaagcaaggttcactcattggctggacaaaaatcggaatctccaagcaaagattttggtccaactctgggtttgaaaaagtccagctccttggagagtctgcagactgcagtggccgaggtcaggaagaatgaccttccctttcacaggccccggccgcacatggttcgaggccgaggctgcaatgagagctttagagcagccattgacaaatcctacgatggacctgaagaaatagaagctgacggtctgtctgataagagctctcactctggccaaggagctctgaattgtgagtctgcccctcaggggaattcggagctagaggacatggaaaataaagccaggaaagtcaaaaaaacgaaagagaaggagaagaaaaaggaaaagggcaaattgaaagtcaaggagaaaaagcgcaaagaggagaatgaagatccagaaaggaaaataaagaagaagggcttcggcgccatgctgagatttggaaagaagaaagaggataagggtggaaaggctgagcagaaaggtactctgaaacatggtggcctgagagaagaagagctggagaaaatgaaagaagagcgtgaaagtggccgtcctacgggtggaagcactgaccgtatccagaagttgcggaaagagtattatcaggctcggagggaaggtttccctttatatgaagacgacgaaggaagagcaaggccatctgagtatgacctactctgggtgcctggaaggggtccagatgggaatgcacacaacctccgctttgaagggatggagaggcagtacgcatccttacccaggggaggacccgcagatcctgtagactatctgccagcagcacctcgggggctctacaaggaaagggagcttccctattatccaggggctcatcctatgcaccctcccaaagggagctatccccgccccacagagctcagggtggcagatctccggtatcctcagcactacccacccccgccagctccccagcacaaaggaccctttcgacaagacgttccgccttcccctccccagcaccaaagaatgccagcctatcaggaaacaggcagaccagggccccgtgggggcagcccagaccagtacccttaccgaacccaggattcccggcagaagaaccccatgactgcagccgtatag

SEQ ID NO: 708 - protein, 1105 aa, Homo sapiens
MKVTVCFGRTGIVVPCKEGQLRVGELTQQALQRYLKTREKGPGYWVKIHHLEYTDGGILDPDDVLADVVEDKDKVLIAVFEEQEPLHKIESPSGNPADRQSPDAFETEVAAQLAAFKPIGGEIEVTPSALKLGTPLLVRRSSDPVPGPPADTQPSASHPGGQSLKLVVPDSTQNLEDREVLNGVQTELLTSPRTKDTLSDMTRTVEISGEGGPLGIHVVPFFSSLSGRILGLFIRGIEDNSRSKREGLFHENECIVKINNVDLVDKTFAQAQDVFRQAMKSPSVLLHVLPPQNREQYEKSVIGSLNIFGNNDGVLKTKVPPPVHGKSGLKTANLTGTDSPETDASASLQQNKSPRVPRLGGKPSSPSLSPLMGFGSNKNAKKIKIDLKKGPEGLGFTVVTRDSSIHGPGPIFVKNILPKGAAIKDGRLQSGDRILEVNGRDVTGRTQEELVAMLRSTKQGETASLVIARQEGHFLPRELKGEPDCCALSLETSEQLTFEIPLNDSGSAGLGVSLKGNKSRETGTDLGIFIKSIIHGGAAFKDGRLRMNDQLIAVNGESLLGKSNHEAMETLRRSMSMEGNIRGMIQLVILRRPERPMEDPAECGAFSKPCFENCQNAVTTSRRNDNSILHPLGTCSPQDKQKGLLLPNDGWAESEVPPSPTPHSALGLGLEDYSHSSGVDSAVYFPDQHINFRSVTPARQPESINLKASKSMDLVPDESKVHSLAGQKSESPSKDFGPTLGLKKSSSLESLQTAVAEVRKNDLPFHRPRPHMVRGRGCNESFRAAIDKSYDGPEEIEADGLSDKSSHSGQGALNCESAPQGNSELEDMENKARKVKKTKEKEKKKEKGKLKVKEKKRKEENEDPERKIKKKGFGAMLRFGKKKEDKGGKAEQKGTLKHGGLREEELEKMKEERESGRPTGGSTDRIQKLRKEYYQARREGFPLYEDDEGRARPSEYDLLWVPGRGPDGNAHNLRFEGMERQYASLPRGGPADPVDYLPAAPRGLYKERELPYYPGAHPMHPPKGSYPRPTELRVADLRYPQHYPPPPAPQHKGPFRQDVPPSPPQHQRMPAYQETGRPGPRGGSPDQYPYRTQDSRQKNPMTAAV

SEQ ID NO: 709 - DNA, 2490 bp, Homo sapiens
gggcttggcttggagggggcaagggagggaaagagagaagggggaaacacaaaaaacttctttctttccccctccgtttatcttcagcccgacattgtcacctcctctttgaggggttagaagaagctgagatctcccgacagagctggaaatgcattgcactttgactatggaaacagacgctattgatggctatataacgtgtgacaatgagctttcacccgaaagggagcactccaatatggcaattgacctcacctcaagcacacccaatggacagcatgcctcaccaagtcacatgacaagcacaaattcagtaaagctagaaatgcagagtgatgaagagtgtgacaggaaacccctgagccgtgaaaatgagatcaggggccatgatgagggtagcagcctagaagaacccctaattgagagcagcgaggtggctgacaacaggaaagtccaggagcttcaaggcgagggaggaatccggcttccgaatggtaaactgaaatgtgacgtctgtggcatggtttgcattgggcccaatgtgcttatggtacataaaaggagtcacactggtgaacgccccttccactgtaaccagtgtggagcttcttttactcagaagggcaaccttctgagacacataaagttacactctggagagaagccgttcaaatgtcctttctgtagctacgcctgtagaagaagggacgccctcacaggacacctcaggacccattctgtgggtaaacctcacaagtgcaactactgtggacgaagctacaagcagcgcagttcactggaggagcacaaggaacgctgccacaactatctccagaatgtcagcatggaggctgctgggcaggtcatgagtcaccatgtacctcctatggaagattgtaaggaacaagagcctattatggacaacaatatttctctggtgccttttgagagacctgctgtcatagagaagctcacggggaatatgggaaaacgtaaaagctccactccacaaaagtttgtgggggaaaagctcatgcgattcagctacccagatattcactttgatatgaacttaacatatgagaaggaggctgagctgatgcagtctcatatgatggaccaagccatcaacaatgcaatcacctaccttggagctgaggcccttcaccctctgatgcagcacccgccaagcacaatcgctgaagtggccccagttataagctcagcttattctcaggtctatcatccaaataggatagaaagacccattagcagggaaactgctgatagtcatgaaaacaacatggatggccccatctctctcatcagaccaaagagtcgaccccaggaaagagaggcctctcccagcaatagctgcctggattccactgactcagaaagcagccatgatgaccaccagtcctaccaaggacaccctgccttaaatcccaagaggaaacaaagcccagcttacatgaaggaggatgtcaaagctttggatactaccaaggctcctaagggctctctgaaggacatctacaaggtcttcaatggagaaggagaacagattagggccttcaagtgtgagcactgccgagtccttttcctagaccatgtcatgtacaccattcacatgggttgccatggctaccgggacccactggaatgcaacatctgtggctacagaagccaggaccgttatgagttttcatcacacattgttcgaggggagcacacattccactaggccttttcattccaaaggggacccctatgaagtaaagaactgcacatgaagaaataccgcacttacaatcccacctttcctcaaatgttgacataccttttattttttttaatattattactgttgataattcttattttgtggaggcagtgtcatttgctctgcctaattacgataaggaagaaacagaagagagaaggggcgggaatattgtttctttatcacctggcttgtttattttgtgggaatttaagagcagtccatttctaccaaggcatatcatgctttgaaaaatcacttgattcataaagattcacctaagagattctgatttgccactgatattcagaattatgatggaagacaggaaagtttagagttttctgggcaggactttggtggtttaaaaatggtataagtaactttattcttgaaagaagaatgtgtttcaaactgtaaaccaattttttgttcttcagagatcatggaacacaaacacattgttattttcagtgataactcctaagaggagctgagttgttgtgggttctatgtttacttcccctatggaatttataattcagtatgttttacactgtaccatatagcaaaacttttaaactacaggtagttaagggccacctacaatacatctgaggtcctgtgatcttatttttctaaacgtaagcactgtttttccatagttttgatgactggcattttatagacaccctggcagc

SEQ ID NO: 710 - protein, 526 aa, Homo sapiens
METDAIDGYITCDNELSPEREHSNMAIDLTSSTPNGQHASPSHMTSTNSVKLEMQSDEECDRKPLSRENEIRGHDEGSSLEEPLIESSEVADNRKVQELQGEGGIRLPNGKLKCDVCGMVCIGPNVLMVHKRSHTGERPFHCNQCGASFTQKGNLLRHIKLHSGEKPFKCPFCSYACRRRDALTGHLRTHSVGKPHKCNYCGRSYKQRSSLEEHKERCHNYLQNVSMEAAGQVMSHHVPPMEDCKEQEPIMDNNISLVPFERPAVIEKLTGNMGKRKSSTPQKFVGEKLMRFSYPDIHFDMNLTYEKEAELMQSHMMDQAINNAITYLGAEALHPLMQHPPSTIAEVAPVISSAYSQVYHPNRIERPISRETADSHENNMDGPISLIRPKSRPQEREASPSNSCLDSTDSESSHDDHQSYQGHPALNPKRKQSPAYMKEDVKALDTTKAPKGSLKDIYKVFNGEGEQIRAFKCEHCRVLFLDHVMYTIHMGCHGYRDPLECNICGYRSQDRYEFSSHIVRGEHTFH

SEQ ID NO: 711 - DNA, 1296 bp, Homo sapiens
gagagctcccgggggccgttgggtagcgtcttcgctgttgcccttagggacggctgtgggcctgctgggggtgggggcccgaagcgccagagatggctgctcagcgagggatgcccagctccgccgtgagggtcctggaagaggcgttgggcatgggtttgacggcagccggggacgcgagggacacggcggacgcggtggcggctgagggcgcctactacctggaacaggtcaccataactgaagcatctgaagatgactatgaatatgaagagataccagatgacaattttagcatcccagaaggtgaagaagatctggcaaaagcaattcagatggcccaagaacaggctacagatactgaaattttggaacggaaaacagttcttccttcaaagcatgcagtacctgaagtaatagaagactttctctgcaatttcttgatcaaaatgggaatgaccagaactcttgattgctttcagtctgaatggtatgagttaatacagaaaggagtgactgaacttagaactgttgggaatgttccagatgtctacacccagattatgcttttggaaaatgagaacaaaaatttaaagaaagatttgaagcactacaaacaagcagctgagtatgttattttttaaatgacattttcttctttttcttttggactaaataaaagagttgagtgaagctgatatatgtaatataccagagccttaatttttgaaaactgaatttttctagttgtaaagaatgtgagaggcttcattagcaaattaattaaacagatgatcagaactatcacaattataacttaccaacaagaagggaatgcaggtagttgtttaggagatggtacattttttatataacattcacttccttgtgtatttgatagtcttttcatggtttataacattttctcctgtaaagataggctaatttctgaaataataattaaatttatagaaagccgagaggaaattgctagtttattcctggtagaggaatttctgtatttgaaaattctccagaaggaataatataaactgtggactttgggtgataatgatatgtaggttcgtcagttgttaacaaatgtatccctctgttgggggctattgataatggggaaggctgtgcatgtgtgggagtaggaggtgtatgggacatctctgtaccttctaatcaattttgctatgaacttaaaactgctctaaaaataaagtttattaaaaaaaagttaaaaaaaaaaaaaaaaaaaaaaaaaaaaaaaaagaaaaaaaaaaaaaa

SEQ ID NO: 712 - protein, 183 aa, Homo sapiens
MAAQRGMPSSAVRVLEEALGMGLTAAGDARDTADAVAAEGAYYLEQVTITEASEDDYEYEEIPDDNFSIPEGEEDLAKAIQMAQEQATDTEILERKTVLPSKHAVPEVIEDFLCNFLIKMGMTRTLDCFQSEWYELIQKGVTELRTVGNVPDVYTQIMLLENENKNLKKDLKHYKQAAEYVIF

SEQ ID NO: 713 - DNA, 2189 bp, Homo sapiens
gagagctcccgggggccgttgggtagcgtcttcgctgttgcccttagggacggctgtgggcctgctgggggtgggggcccgaagcgccagagatggctgctcagcgagggatgcccagctccgccgtgagggtcctggaagaggcgttgggcatgggtttgacggcagccggggacgcgagggacacggcggacgcggtggcggctgagggcgcctactacctggaacaggtcaccataactgaagcatctgaagatgactatgaatatgaagagataccagatgacaattttagcatcccagaaggtgaagaagatctggcaaaagcaattcagatggcccaagaacaggctacagatactgaaattttggaacggaaaacagttcttccttcaaagcatgcagtacctgaagtaatagaagactttctctgcaatttcttgatcaaaatgggaatgaccagaactcttgattgctttcagtctgaatggtatgagttaatacagaaaggagtgactgaacttagaactgttgggaatgttccagatgtctacacccagattatgcttttggaaaatgagaacaaaaatttaaagaaagatttgaagcactacaaacaagcagctgacaaagctagagaagatttgctgaaaattcagaaagaacgtgattttcatcgaatgcatcataagcgaatagtccaggaaaaaaacaaattaattaatgacctcaaagggttgaagttacattatgcatcttatgaaccgactataagggtgttacatgagaaacaccacactttactgaaggagaaaatgctgacctccttggaaagagacaaagtagttgggcagatttctggacttcaagaaacattgaagaaactgcaaagaggacatagttaccatggtcctcaaattaaagttgatcatagtcgtgaaaaagaaaatgcaccagaaggtcctactcagaaaggtcttcgtgaagccagggaacaaaacaaatgtaaaacaaagatgaaaggcaatacaaaggattcagaatttcccatagatatgcaaccaaatccaaacctgaatgtttctaaagaaagtctttctccagcaaaatttgactacaagctgaaaaacatttttagactccatgaacttccagtgagctgtgtctccatgcaaccccacaaagacatcctagtctcctgtggcgaggaccgactctggaaggtgttgggccttccaaaatgcaatgtgcttctcacgggatttggccacactgactggctttcagactgctgcttccatcccagtggcgacaaattggctacttcaagtggtgacactacagttaaattatgggatctatgtaaaggcgattgcattttgacctttgaaggacacagccgcgcagtgtggtcctgcacatggcactcctgcggcaattttgtggcttcctcctcactggataaaactagcaaaatttgggatgttaatagtgaaagatgcagatgtactttgtatggacatacagattctgtgaacagcattgagttttttcctttctccaatactcttctcacaagctctgcagacaagaccctgtctatatgggatgcaagaacaggtatatgtgagcagtcactttatggtcacatgcattctatcaatgatgccatttttgatcccaggggtcacatgatagcatcctgtgatgcctgtggggttacaaagctgtgggactttcggaagctgttaccaattgtgtccatcgatataggtccaagtcctggcaatgaggtgaattttgattcatcaggtcgagttttagctcaggcaagtggcaatggtgttatccatttgctagatcttaaatctggggagattcacaaattgatgggccacgaaaacgaggcacacacggttgtgttttctcacgacggggagattctcttttctggaggctctgacggcacagttcgaacgtggtcttgaccgtcagcacatcccgctgcagagggcattccctttaaggcttgaaaatgcctcctgtagtcccaaaccagcaaagaactggttaaatgtgccagcaggtaacatttacagtctgctttaaaacatgctttggacatatattttagtgctcatactgttactaataaaaaaataactttatgctcaaaaaaaaaaaaaaaa

SEQ ID NO: 714 - protein, 631 aa, Homo sapiens
MAAQRGMPSSAVRVLEEALGMGLTAAGDARDTADAVAAEGAYYLEQVTITEASEDDYEYEEIPDDNFSIPEGEEDLAKAIQMAQEQATDTEILERKTVLPSKHAVPEVIEDFLCNFLIKMGMTRTLDCFQSEWYELIQKGVTELRTVGNVPDVYTQIMLLENENKNLKKDLKHYKQAADKAREDLLKIQKERDFHRMHHKRIVQEKNKLINDLKGLKLHYASYEPTIRVLHEKHHTLLKEKMLTSLERDKVVGQISGLQETLKKLQRGHSYHGPQIKVDHSREKENAPEGPTQKGLREAREQNKCKTKMKGNTKDSEFPIDMQPNPNLNVSKESLSPAKFDYKLKNIFRLHELPVSCVSMQPHKDILVSCGEDRLWKVLGLPKCNVLLTGFGHTDWLSDCCFHPSGDKLATSSGDTTVKLWDLCKGDCILTFEGHSRAVWSCTWHSCGNFVASSSLDKTSKIWDVNSERCRCTLYGHTDSVNSIEFFPFSNTLLTSSADKTLSIWDARTGICEQSLYGHMHSINDAIFDPRGHMIASCDACGVTKLWDFRKLLPIVSIDIGPSPGNEVNFDSSGRVLAQASGNGVIHLLDLKSGEIHKLMGHENEAHTVVFSHDGEILFSGGSDGTVRTWS

SEQ ID NO: 715 - DNA, 4530 bp, Homo sapiens
gctcggagcgggctccgcggcttgcaaggcgcctgcgactcggtcccaggtcggcgggcggcgcacggcgggctcgcgcgggggccccggcgcgccgggcggcgcagtacgcagcgcgcggacccacgccacggccaggagcccagagcagcgcggccacactgcccaggggtcggccctcggccccggcgctcggagcgcggcggctgcctgggctttaatggctgctccgcggagcagcgcctagggctggaaggcggctgcggctcaggaagtcacccgagcaagcctccttcggggccggccgcacccgccgcggcgcgctccatgggggcgcgctccccccgggcggcccgctgacccgggacgccggggcccgctcgctcgccggccgcgcgtcccggccatgaactgagcccgcgggccagccccgcgcctgctccgcccgcgcctttcttctcgcgcctcctccgcccgccgccggcgggcccggctccccgggggctgcggcgccccgggctcggcggcccgcgggccccggggcgcggggcggcggcggcggggggcgcgcggctccgggcgcggcgcctgcaccatgaactaccagcagcagctggccaactcggctgccatccgggccgagatccagcgcttcgagtcggtccaccccaacatctactccatctacgagctgctggagcgcgtggaggagccggtgctgcagaaccagatccgggagcacgtcatcgccatcgaagatgccttcgtgaacagccaggaatggacgctgagtcgatctgtcccggagctcaaagtgggaattgtgggtaacttggccagcggcaagtctgccctggtgcaccggtacctgacgggcacatatgtccaggaggagtctccggaaggtggcaggttcaagaaagagattgtcgttgatggacagagctatctgctgctgatcagagatgaagggggccccccggaggcgcagtttgccatgtgggtggacgctgttatatttgtcttcagcttggaggatgaaataagtttccagaccgtttaccactactacagtcgaatggccaactatcggaacacgagcgagattcctctggttctggtgggaacccaggatgccataagttctgctaacccgagggtcatcgatgacgccagggcgaggaagctctccaacgacctgaaacggtgcacgtactacgagacgtgtgctacatacgggctgaatgtggagagggtcttccaggacgttgcccagaagattgttgccacaaggaagaagcagcagctgtccataggaccctgcaagtcgctacctaattctcccagccattcctccgtctgttccgcgcaggtgtctgccgtgcacatcagccagacaagtaatggaggtgggagtttaagcgactattcctcctccgttccatcgactcccagcaccagccagaaggaacttcggatcgatgttcctcccactgccaacacgcccacgcccgttcgcaagcagtctaagcgccggtccaacctgttcacctctcggaaagggagcgacccagacaaagagaagaaaggcctggagagtcgtgcggacagcattgggagcggccgagccatcccaattaaacagggcatgctgttgaagcgaagtggcaaatcgttgaataaagagtggaaaaagaaatatgtcaccctgtgtgacaatggcgtgctgacctatcatcccagtttacatgattacatgcagaatgttcatggtaaggagattgaccttctgagaaccactgtgaaagtcccagggaagaggccaccccgagccacgtcagcctgcgcacccatctccagccctaaaaccaatggcctatccaaggacatgagcagtttacacatctcacccaattcagggaatgtcactagtgcatctgggtctcagatggcaagcggcatcagcctggtctccttcaacagccgacccgacggcatgcaccagcgctcctactcagtctccagtgccgaccagtggagtgaggctacggtcattgcaaactcggccatcagcagtgacacagggctgggtgactccgtatgctccagccccagtatctccagcaccaccagccccaagctcgacccgcccccctcccctcacgccaacagaaagaagcaccgaaggaagaaaagcactagcaacttcaaagccgacggcctgtccggcactgctgaagaacaagaagaaaattttgagtttatcattgtgtccctcactggccaaacatggcactttgaagccacgacgtatgaggagcgggacgcctgggtccaagccatcgagagccagatcctggccagcctgcagtcgtgcgagagcagcaagaacaagtcccggctgacgagccagagcgaggccatggccctgcagtcgatccggaacatgcgcgggaactcccactgtgtggactgcgagacccagaatcccaactgggccagtttgaacttgggagccctcatgtgcatcgaatgctcagggatccaccggaatcttggcacccacctttcccgagtccgatctctggacctggatgactggccagtcgagctcatcaaggtgatgtcatccatcgggaacgagctagccaacagcgtctgggaagagagcagccaggggcggacgaaaccatcggtagactccacaagggaagagaaggaacggtggatccgtgccaagtacgagcagaagctcttcctggccccgctgccctgcacggagctgtccctgggccagcacctgctgcgggccaccgccgacgaggacctgcggacggccatcctgctgctggcacacggctcccgggacgaggtgaacgagacctgcggggagggagacggccgcacggcgctgcatctggcctgccgcaaggggaatgtggtcctggcgcagctcctgatctggtacggagtggacgtcacggcccgagatgcccacgggaacacagctctggcctacgcccggcaggcctccagccaggagtgcatcgacgtgctgctgcagtacggctgccccgacgagcgcttcgtgctcatggccacccctaacctgtccaggagaaacaataaccggaacaacagcagtgggagggtgcccaccatcatctgaggaacagccgtgcccgcctgctcgccgcacctgggacgcggcagcctcgccgcattctcgctcagaagtcgcagcacgtgagtcccgtcgcatcccctccctcttcctggtggccacctccctcccgcccacccactctcaccccaaacaaaatcacaaaacctggacatccctcaaggggcgaagaggcggccgggagactgcagaagtggctccttttcataaactcccctaaaccacacacaggagagagcgacgggcctcggccctttgatgatagcacatggcgcaggacccttgtcctggtggcacaagggatggggacgcgagggggaggggaggcgaggaacaaggagaaggggcaactttccttaactggcagttgagcacatagtacatttcccctctaccaaacggaacacttggattccatctcttctctgaggagctcgacggcataaatcagaagcaagcacagagtttgtcaggtttgaagcccctatgatggtgtgtgtcaaatcagttgtagctaatctgtccagggagaatactggcttcattacacttgtacagccgagttcttcccgcattactgctgtttaatagaacgtgattagtcatcgccgagaagaaagcatattagccgaggaggtagtcacgcggcacgcgccggtgattgccacgatgtgattgcaatactcttagaagcaccatattatcccagacatgttctttcaagcccttggagccctctctaaattcactgtcatcatttagtatctgtttaatttttcagtccaaagagaggaaatcagtcgctgagtattatttgactccggtctccttggtgcaaaaacaaaatgggaaaaataaataagaataactcagaaactcaaaaggaaaccacaaattcagctaataatagcatttcgagtatatttcgtaaactaaggaaatacacaaaaggctgttttttccgactgtaagagatatttgatgtccttttgccgaggtggatgtgttagtctcaggccctcctggaccacgttgcccaagtcacacaggcttctgtgttatgtatttagataagatgtgtgaaaatatatttgaataaaagaagttcataaatatgcattgatttttgtacagacaaatggcacctctcttaatttataaattgaactggatgtgaactaataatgtgcaactagttgagataagagggttacagatcattgtacatggaaaatattcccagcagtaaacacttccattaatgtgatctacggcttttgaaaaggagcatctcagaataagatggtggtacaatttgcttattaaaattgagaaagaaaaaaaaa

SEQ ID NO: 716 - protein, 857 aa, Homo sapiens
MNYQQQLANSAAIRAEIQRFESVHPNIYSIYELLERVEEPVLQNQIREHVIAIEDAFVNSQEWTLSRSVPELKVGIVGNLASGKSALVHRYLTGTYVQEESPEGGRFKKEIVVDGQSYLLLIRDEGGPPEAQFAMWVDAVIFVFSLEDEISFQTVYHYYSRMANYRNTSEIPLVLVGTQDAISSANPRVIDDARARKLSNDLKRCTYYETCATYGLNVERVFQDVAQKIVATRKKQQLSIGPCKSLPNSPSHSSVCSAQVSAVHISQTSNGGGSLSDYSSSVPSTPSTSQKELRIDVPPTANTPTPVRKQSKRRSNLFTSRKGSDPDKEKKGLESRADSIGSGRAIPIKQGMLLKRSGKSLNKEWKKKYVTLCDNGVLTYHPSLHDYMQNVHGKEIDLLRTTVKVPGKRPPRATSACAPISSPKTNGLSKDMSSLHISPNSGNVTSASGSQMASGISLVSFNSRPDGMHQRSYSVSSADQWSEATVIANSAISSDTGLGDSVCSSPSISSTTSPKLDPPPSPHANRKKHRRKKSTSNFKADGLSGTAEEQEENFEFIIVSLTGQTWHFEATTYEERDAWVQAIESQILASLQSCESSKNKSRLTSQSEAMALQSIRNMRGNSHCVDCETQNPNWASLNLGALMCIECSGIHRNLGTHLSRVRSLDLDDWPVELIKVMSSIGNELANSVWEESSQGRTKPSVDSTREEKERWIRAKYEQKLFLAPLPCTELSLGQHLLRATADEDLRTAILLLAHGSRDEVNETCGEGDGRTALHLACRKGNVVLAQLLIWYGVDVTARDAHGNTALAYARQASSQECIDVLLQYGCPDERFVLMATPNLSRRNNNRNNSSGRVPTII

SEQ ID NO: 717 - DNA, 4371 bp, Homo sapiens
gctcggagcgggctccgcggcttgcaaggcgcctgcgactcggtcccaggtcggcgggcggcgcacggcgggctcgcgcgggggccccggcgcgccgggcggcgcagtacgcagcgcgcggacccacgccacggccaggagcccagagcagcgcggccacactgcccaggggtcggccctcggccccggcgctcggagcgcggcggctgcctgggctttaatggctgctccgcggagcagcgcctagggctggaaggcggctgcggctcaggaagtcacccgagcaagcctccttcggggccggccgcacccgccgcggcgcgctccatgggggcgcgctccccccgggcggcccgctgacccgggacgccggggcccgctcgctcgccggccgcgcgtcccggccatgaactgagcccgcgggccagccccgcgcctgctccgcccgcgcctttcttctcgcgcctcctccgcccgccgccggcgggcccggctccccgggggctgcggcgccccgggctcggcggcccgcgggccccggggcgcggggcggcggcggcggggggcgcgcggctccgggcgcggcgcctgcaccatgaactaccagcagcagctggccaactcggctgccatccgggccgagatccagcgcttcgagtcggtccaccccaacatctactccatctacgagctgctggagcgcgtggaggagccggtgctgcagaaccagatccgggagcacgtcatcgccatcgaagatgccttcgtgaacagccaggaatggacgctgagtcgatctgtcccggagctcaaagtgggaattgtgggtaacttggccagcggcaagtctgccctggtgcaccggtacctgacgggcacatatgtccaggaggagtctccggaaggtggcaggttcaagaaagagattgtcgttgatggacagagctatctgctgctgatcagagatgaagggggccccccggaggcgcagtttgccatgtgggtggacgctgttatatttgtcttcagcttggaggatgaaataagtttccagaccgtttaccactactacagtcgaatggccaactatcggaacacgagcgagattcctctggttctggtgggaacccaggatgccataagttctgctaacccgagggtcatcgatgacgccagggcgaggaagctctccaacgacctgaaacggtgcacgtactacgagacgtgtgctacatacgggctgaatgtggagagggtcttccaggacgttgcccagaagattgttgccacaaggaagaagcagcagctgtccataggaccctgcaagtcgctacctaattctcccagccattcctccgtctgttccgcgcaggtgtctgccgtgcacatcagccagacaagtaatggaggtgggagtttaagcgactattcctcctccgttccatcgactcccagcaccagccagaaggaacttcggatcgatgttcctcccactgccaacacgcccacgcccgttcgcaagcagtctaagcgccggtccaacctgttcacctctcggaaagggagcgacccagacaaagagaagaaaggcctggagagtcgtgcggacagcattgggagcggccgagccatcccaattaaacagggcatgctgttgaagcgaagtggcaaatcgttgaataaagagtggaaaaagaaatatgtcaccctgtgtgacaatggcgtgctgacctatcatcccagtttacatgattacatgcagaatgttcatggtaaggagattgaccttctgagaaccactgtgaaagtcccagggaagaggccaccccgagccacgtcagcctgcgcacccatctccagccctaaaaccaatggcctatccaaggacatgagcagtttacacatctcacccaattcagacacagggctgggtgactccgtatgctccagccccagtatctccagcaccaccagccccaagctcgacccgcccccctcccctcacgccaacagaaagaagcaccgaaggaagaaaagcactagcaacttcaaagccgacggcctgtccggcactgctgaagaacaagaagaaaattttgagtttatcattgtgtccctcactggccaaacatggcactttgaagccacgacgtatgaggagcgggacgcctgggtccaagccatcgagagccagatcctggccagcctgcagtcgtgcgagagcagcaagaacaagtcccggctgacgagccagagcgaggccatggccctgcagtcgatccggaacatgcgcgggaactcccactgtgtggactgcgagacccagaatcccaactgggccagtttgaacttgggagccctcatgtgcatcgaatgctcagggatccaccggaatcttggcacccacctttcccgagtccgatctctggacctggatgactggccagtcgagctcatcaaggtgatgtcatccatcgggaacgagctagccaacagcgtctgggaagagagcagccaggggcggacgaaaccatcggtagactccacaagggaagagaaggaacggtggatccgtgccaagtacgagcagaagctcttcctggccccgctgccctgcacggagctgtccctgggccagcacctgctgcgggccaccgccgacgaggacctgcggacggccatcctgctgctggcacacggctcccgggacgaggtgaacgagacctgcggggagggagacggccgcacggcgctgcatctggcctgccgcaaggggaatgtggtcctggcgcagctcctgatctggtacggagtggacgtcacggcccgagatgcccacgggaacacagctctggcctacgcccggcaggcctccagccaggagtgcatcgacgtgctgctgcagtacggctgccccgacgagcgcttcgtgctcatggccacccctaacctgtccaggagaaacaataaccggaacaacagcagtgggagggtgcccaccatcatctgaggaacagccgtgcccgcctgctcgccgcacctgggacgcggcagcctcgccgcattctcgctcagaagtcgcagcacgtgagtcccgtcgcatcccctccctcttcctggtggccacctccctcccgcccacccactctcaccccaaacaaaatcacaaaacctggacatccctcaaggggcgaagaggcggccgggagactgcagaagtggctccttttcataaactcccctaaaccacacacaggagagagcgacgggcctcggccctttgatgatagcacatggcgcaggacccttgtcctggtggcacaagggatggggacgcgagggggaggggaggcgaggaacaaggagaaggggcaactttccttaactggcagttgagcacatagtacatttcccctctaccaaacggaacacttggattccatctcttctctgaggagctcgacggcataaatcagaagcaagcacagagtttgtcaggtttgaagcccctatgatggtgtgtgtcaaatcagttgtagctaatctgtccagggagaatactggcttcattacacttgtacagccgagttcttcccgcattactgctgtttaatagaacgtgattagtcatcgccgagaagaaagcatattagccgaggaggtagtcacgcggcacgcgccggtgattgccacgatgtgattgcaatactcttagaagcaccatattatcccagacatgttctttcaagcccttggagccctctctaaattcactgtcatcatttagtatctgtttaatttttcagtccaaagagaggaaatcagtcgctgagtattatttgactccggtctccttggtgcaaaaacaaaatgggaaaaataaataagaataactcagaaactcaaaaggaaaccacaaattcagctaataatagcatttcgagtatatttcgtaaactaaggaaatacacaaaaggctgttttttccgactgtaagagatatttgatgtccttttgccgaggtggatgtgttagtctcaggccctcctggaccacgttgcccaagtcacacaggcttctgtgttatgtatttagataagatgtgtgaaaatatatttgaataaaagaagttcataaatatgcattgatttttgtacagacaaatggcacctctcttaatttataaattgaactggatgtgaactaataatgtgcaactagttgagataagagggttacagatcattgtacatggaaaatattcccagcagtaaacacttccattaatgtgatctacggcttttgaaaaggagcatctcagaataagatggtggtacaatttgcttattaaaattgagaaagaaaaaaaaa

SEQ ID NO: 718 - protein, 804 aa, Homo sapiens
MNYQQQLANSAAIRAEIQRFESVHPNIYSIYELLERVEEPVLQNQIREHVIAIEDAFVNSQEWTLSRSVPELKVGIVGNLASGKSALVHRYLTGTYVQEESPEGGRFKKEIVVDGQSYLLLIRDEGGPPEAQFAMWVDAVIFVFSLEDEISFQTVYHYYSRMANYRNTSEIPLVLVGTQDAISSANPRVIDDARARKLSNDLKRCTYYETCATYGLNVERVFQDVAQKIVATRKKQQLSIGPCKSLPNSPSHSSVCSAQVSAVHISQTSNGGGSLSDYSSSVPSTPSTSQKELRIDVPPTANTPTPVRKQSKRRSNLFTSRKGSDPDKEKKGLESRADSIGSGRAIPIKQGMLLKRSGKSLNKEWKKKYVTLCDNGVLTYHPSLHDYMQNVHGKEIDLLRTTVKVPGKRPPRATSACAPISSPKTNGLSKDMSSLHISPNSDTGLGDSVCSSPSISSTTSPKLDPPPSPHANRKKHRRKKSTSNFKADGLSGTAEEQEENFEFIIVSLTGQTWHFEATTYEERDAWVQAIESQILASLQSCESSKNKSRLTSQSEAMALQSIRNMRGNSHCVDCETQNPNWASLNLGALMCIECSGIHRNLGTHLSRVRSLDLDDWPVELIKVMSSIGNELANSVWEESSQGRTKPSVDSTREEKERWIRAKYEQKLFLAPLPCTELSLGQHLLRATADEDLRTAILLLAHGSRDEVNETCGEGDGRTALHLACRKGNVVLAQLLIWYGVDVTARDAHGNTALAYARQASSQECIDVLLQYGCPDERFVLMATPNLSRRNNNRNNSSGRVPTII

SEQ ID NO: 719 - DNA, 3700 bp, Homo sapiens
gtcactgtcttgggctgtgtgctgacgggagccagggccttgtaaggcccagaccctcctccttctctcccgtattagtcaaggttctccagagaaatggagttagagatgcattgctataagaaatggaatgggctcgcatgattacagaggctgaggggtcctacaccctgtcgtctgcaagctggaaaggcaggagagtctgtgctgcagccctagccagagcctggaggcccgagaaccaggcacgccgacgacagcacacttccagcctgagagcaagagaaggtcagtgttccagctccagcaggcaggcagagggagggttctctctccacctttgtgttctactcaggtcttcaatgggttggatgaggcccatccacattgcgagggcgtctgcttcactgaatccaccatcgtacctgcttctcttggatgccgtccgattgcagagacgctgttcccttgagggttcctgccccaccgtgtgtgctggtgctaggatgtctgccctggtccagccctgcacccctgagtcagaggctcttactctgggttcaattaagaaggttatttggcccccacacaaagctaagactttcaccttggcatttgttaggaattctttcctgaagttggacagtttggccatgttcaagcctctgaattcttccatagaattgtcttctggaaatcatgccacagtaatttaagtctccccggctgtatgtgtgaggacttcttaccctcttgggcatggaggggttagcatgtttggtagccattctagtcatagtaggttgacagttgagtgtttcctagatctttccaagtagaccagcatgactatggaagaggccctgaaggtcccaccccgacacgccagtccgaagggcccttgcctgggcaccctgcaccttcccctggacctgctgatgcgcctggctgggggaatgcgggccttcgcgttggttccacctccagcttccatgactgtggagttctgcagtgggttcattgagaaagtggtggtgagaccagggtatctgagaggagtggtcggcagggagatgagacaagtgtggagaccaggcagatggaaggcgcatgtctggagggtgtgagagctgccaggtgggtgtctgcagggtcttgcagagtcgctcagccgcaggtggggcggctctggagaccctatcagcacattccagagagtggcagaccccacggccaggcatggactgatgagcaggactgtcctccactgtccagacaacagcacagatgaaacccaggagcgcctgggacggtgctgtgagccctgcacatccacggagtctctcagatgaaaccacacgggtgtcacagtgacgctctctcccctcagaggctgccgacccctcgctgggctgctggactgctcagggccggcccttgaagcctggagggagccatgggtctgtgtgtacacatgtgtgtgcccgtgagtgagtctatgtgtgatctctgaaaatgaagcttccacattaccaatgcctggagaatccagaactgggactcccaggtaactgagggcctgggtcccaaagctggtggctgaagctggctgctccgaggcatgcgtggcaggaaggggtcatcaggagggccacccaaggccccgggcacctctgatgggtttccagagtccctgccctcacgagagggaagtcagttggagaatggggtgctgaagtctcgagagaaaggtgtccttgactcggggtccagagtaagcagcttctgccccccatatcacgtggctagtggcttgtcctgactgtgccccacgtgtcatggcaaagtttcgacacccactttggagatgtcttgacagaggccagcgtcaggctcccgttcttccacacgctggaagctgctgcacagcgggctcagagcctgggctcaggaggcatcccggttactgttgctgtatcctggagggtggcatctcctgggagctgtggtccgagccccttgcaacagcggggccaggagaaggctggttgctgggtgcatcctgttcttggggttccacctgctgtatccatctcccgggggattttccgtcgccgtccttggttccagcacatgccctgagtggtaatgccgattcctgcctgtgctgccgacttggtgcggggagcctgtggctgctctgtcaggtggttggccccgatggctccatgggtggcccccgcccaggcatctcatggagggactctgcctacgtcactggccgccagtcctgggggacaccgtgtgcatttgcacatgaaccatgatgggaacctgggggacgggtctcaggctgagaaaggttcccctgggcttcaaggtaaatcataaagcgaggtaatttcctataagtgtcagaggacactgtaactgtcccttctgagcaggacattgttgtggttgtctgtcttcccttttgtcttctgcctgtgggattatctagattctgagcaggtaaattgtttcaggctctggccttctcagagcctttctgtggctgtaggttgtggggagggcaccatggtagttgcccctgcttcattcactcagagccactgacaggggccccccaacctgctcggagccctccaggggcaggcactgtccctgctgcccccctgctgccctgaacatctccccagccccacagctgacccaccctttcagggtaacagtgcagctgcgggggcagccccctccagcccttccttggtcagcctccctgctgctggcccttcctggagacgtgatttgccctagaagtggcaggtgtgtgtggctcatgccctcactgtaaggctgtgccaaggcagtgccaccttgggaaaaatcaaaaccccataccagctcctcccagtccatgccagcacacaccctggctcctcagaaccccccacagaagcaggcaaggaatcaaaaactcaagtctgcaggaagccaggcagggatggaggaggggtatactgtcacaggtgagagggtcccagaagcctttctggaggaggtgacttcaggctggatttggaggggcaacttaacaagcagacaggtgggtggagacgctccagcagaggaaatggcatggagtgtccaggagcccacgaatcagctggcattgttgaatcatggagaacgcagagacggtctcagaagtcggccggagcctgagtcattgggccacgcggcttcagtccttccttgcagcctgtggggagtctcaggggaattctgaggaggaaagggggatgctcatgataggtatttattgtttttgtttgtttgtttttaatcacttattttcacaagtgtaatcgaagcacctggttgtgagtccaggagagtaaaacatttagccctcgcccctcccatccatcacggattttctgacgcctgcagcagggttcctgccaaaggaaaacccatttatagtcatatacttccgtgaacctttgatataacccagttatgtatctagaaacctgccttttcaaaaatattaacctgtctataaatgtagtaaatgttatataaaatgcaatcatgtttaagaagttaactattgttatattaattcgagttgaacaattcaaattctcaacttcatttataaacatagttaattaaattcctttatgcatat

SEQ ID NO: 720 - protein, 196 aa, Homo sapiens
MEWARMITEAEGSYTLSSASWKGRRVCAAALARAWRPENQARRRQHTSSLRAREGQCSSSSRQAEGGFSLHLCVLLRSSMGWMRPIHIARASASLNPPSYLLLLDAVRLQRRCSLEGSCPTVCAGARMSALVQPCTPESEALTLGSIKKVIWPPHKAKTFTLAFVRNSFLKLDSLAMFKPLNSSIELSSGNHATVI

SEQ ID NO: 721 - DNA, 2367 bp, Homo sapiens
agtacccacggaaaacttgtttaccttgtcaccatgagtaaaagttaattcccactcctgaagagagcaaaccaactctgaaagagagtgaaaatgcagacaagacagttatcagataatggctatctggacgagagattctttcgtttgacagcagtttggttgttgggagttccagttcagctcctgcacagttgctctgtacaaatcctcctccatatttgcttagagaaaacgtgttgccatcccatcatgaaggaagctgcctgagagtttttaaccattacagccgtgatgatgaaagagtgaagaaccgcctctaagttaaaaagtgcacccagagataaggttcgttctcaatgccctgccgctgcttctcatcgcatggccaccgcatttctcaggccaggcacattgagcattggtcctgtgcctgacgctatgctagatgctggggttgcagccacgagcatagacacgacagacacggtcctcgccatcttctgttgagtactggtcggaacaagaggatcgtctgtagacaggctacagattgttttagattgaagtttcctgtcatgttcactcatctttaaatcctcatagtgaaaaggatatgatcatcgtggcgcatgtattactcatccttttgggggccactgagatactgcaagctgacttacttcctgatgaaaagatttcacttctcccacctgtcaatttcaccattaaagttactggtttggctcaagttcttttacaatggaaaccaaatcctgatcaagagcaaaggaatgttaatctagaatatcaagtgaaaataaacgctccaaaagaagatgactatgaaaccagaatcactgaaagcaaatgtgtaaccatcctccacaaaggcttttcagcaagtgtgcggaccatcctgcagaacgaccactcactactggccagcagctgggcttctgctgaacttcatgccccaccagggtctcctggaacctcaattgtgaatttaacttgcaccacaaacactacagaagacaattattcacgtttaaggtcataccaagtttcccttcactgcacctggcttgttggcacagatgcccctgaggacacgcagtattttctctactataggtatggctcttggactgaagaatgccaagaatacagcaaagacacactggggagaaatatcgcatgctggtttcccaggacttttatcctcagcaaagggcgtgactggcttgcggtgcttgttaacggctccagcaagcactctgctatcaggccctttgatcagctgtttgcccttcacgccattgatcaaataaatcctccactgaatgtcacagcagagattgaaggaactcgtctctctatccaatgggagaaaccagtgtctgcttttccaatccattgctttgattatgaagtaaaaatacacaatacaaggaatggatatttgcagatagaaaaattgatgaccaatgcattcatctcaataattgatgatctttctaagtacgatgttcaagtgagagcagcagtgagctccatgtgcagagaggcagggctctggagtgagtggagccaacctatttatgtgggaaatgatgaacacaagcccttgagagagtggtttgtcattgtgattatggcaaccatctgcttcatcttgttaattctctcgcttatctgtaaaatatgtcatttatggatcaagttgtttccaccaattccagcaccaaaaagtaatatcaaagatctctttgtaaccactaactatgagaaagctgggtccagtgagacggaaattgaagtcatctgttatatagagaagcctggagttgagaccctggaggattctgtgttttgactgtcactttggcatcctctgatgaactcacacatgcctcagtgcctcagtgaaaagaacagggatgctggctcttggctaagaggtgttcagaatttaggcaacactcaatttacctgcgaagcaatacacccagacacaccagtcttgtatctcttaaaagtatggatgcttcatccaaatcgcctcacctacagcagggaagttgactcatccaagcattttgccatgttttttctccccatgccgtacagggtagcacctcctcacctgccaatctttgcaatttgcttgactcacctcagacttttcattcacaacagacagcttttaaggctaacgtccagctgtatttacttctggctgtgcccgtttggctgtttaagctgccaattgtagcactcagctaccatctgaggaagaaagcattttgcatcagcctggagtgaaccatgaacttggattcaagactgtcttttctatagcaa

SEQ ID NO: 722 - protein, 420 aa, Homo sapiens
MIIVAHVLLILLGATEILQADLLPDEKISLLPPVNFTIKVTGLAQVLLQWKPNPDQEQRNVNLEYQVKINAPKEDDYETRITESKCVTILHKGFSASVRTILQNDHSLLASSWASAELHAPPGSPGTSIVNLTCTTNTTEDNYSRLRSYQVSLHCTWLVGTDAPEDTQYFLYYRYGSWTEECQEYSKDTLGRNIACWFPRTFILSKGRDWLAVLVNGSSKHSAIRPFDQLFALHAIDQINPPLNVTAEIEGTRLSIQWEKPVSAFPIHCFDYEVKIHNTRNGYLQIEKLMTNAFISIIDDLSKYDVQVRAAVSSMCREAGLWSEWSQPIYVGNDEHKPLREWFVIVIMATICFILLILSLICKICHLWIKLFPPIPAPKSNIKDLFVTTNYEKAGSSETEIEVICYIEKPGVETLEDSVF

SEQ ID NO: 723 - DNA, 2024 bp, Homo sapiens
agtacccacggaaaacttgtttaccttgtcaccatgagtaaaagttaattcccactcctgaagagagcaaaccaactctgaaagagagtgaaaatgcagacaagacagttatcagataatggctatctggacgagagattctttcgtttgacagcagtttggttgttgggagttccagttcagctcctgcacagttgctctgtacaaatcctcctccatatttgcttagagaaaacgtgttgccatcccatcatgaaggaagctgcctgagagtttttaaccattacagccgtgatgatgaaagagtgaagaaccgcctctaagttaaaaagtgcacccagagataaggttcgttctcaatgccctgccgctgcttctcatcgcatggccaccgcatttctcaggccaggcacattgagcattggtcctgtgcctgacgctatgctagatgctggggttgcagccacgagcatagacacgacagacacggtcctcgccatcttctgttgagtactggtcggaacaagaggatcgtctgtagacaggctacagattgttttagattgaagtttcctgtcatgttcactcatctttaaatcctcatagtgaaaaggatatgatcatcgtggcgcatgtattactcatccttttgggggccactgagatactgcaagctgacttacttcctgatgaaaagatttcacttctcccacctgtcaatttcaccattaaagttactggtttggctcaagttcttttacaatggaaaccaaatcctgatcaagagcaaaggaatgttaatctagaatatcaagtgaaaataaacgctccaaaagaagatgactatgaaaccagaatcactgaaagcaaatgtgtaaccatcctccacaaaggcttttcagcaagtgtgcggaccatcctgcagaacgaccactcactactggccagcagctgggcttctgctgaacttcatgccccaccagggtctcctggaacctcaattgtgaatttaacttgcaccacaaacactacagaagacaattattcacgtttaaggtcataccaagtttcccttcactgcacctggcttgttggcacagatgcccctgaggacacgcagtattttctctactataggtatggctcttggactgaagaatgccaagaatacagcaaagacacactggggagaaatatcgcatgctggtttcccaggacttttatcctcagcaaagggcgtgactggcttgcggtgcttgttaacggctccagcaagcactctgctatcaggccctttgatcagctgtttgcccttcacgccattgatcaaataaatcctccactgaatgtcacagcagagattgaaggaactcgtctctctatccaatgggagaaaccagtgtctgcttttccaatccattgctttgattatgaagtaaaaatacacaatacaaggaatggatatttgcagatagaaaaattgatgaccaatgcattcatctcaataattgatgatctttctaagtacgatgttcaagtgagagcagcagtgagctccatgtgcagagaggcagggctctggagtgagtggagccaacctatttatgtgggtaagtagcttatgtttattttacattggcagccttccttgtgatcaaaaaaggtaatcccagaaacgtacccgttcactcgtgggtcttaaaatggtttcatatctctattgtgactaattttctctcggtctactgccttttcaatcaggaatagatttgccatgaagccagtgaagtttttaagtgtctaggcttctcattagcgccaactctcctagacctggtgcctgttttttttccaagttttgtttctacttctatccattttttaaattaaactttttattttgaaataattatcacactcacaagctgtgggaagaaataatagagatcctgtgtctctttcatccagttttcctcaagggtaacatcttacaaaactatagtacaatagtggaatagaatatt

SEQ ID NO: 724 - protein, 333 aa, Homo sapiens
MIIVAHVLLILLGATEILQADLLPDEKISLLPPVNFTIKVTGLAQVLLQWKPNPDQEQRNVNLEYQVKINAPKEDDYETRITESKCVTILHKGFSASVRTILQNDHSLLASSWASAELHAPPGSPGTSIVNLTCTTNTTEDNYSRLRSYQVSLHCTWLVGTDAPEDTQYFLYYRYGSWTEECQEYSKDTLGRNIACWFPRTFILSKGRDWLAVLVNGSSKHSAIRPFDQLFALHAIDQINPPLNVTAEIEGTRLSIQWEKPVSAFPIHCFDYEVKIHNTRNGYLQIEKLMTNAFISIIDDLSKYDVQVRAAVSSMCREAGLWSEWSQPIYVGK

SEQ ID NO: 725 - DNA, 1694 bp, Homo sapiens
agtacccacggaaaacttgtttaccttgtcaccatgagtaaaagttaattcccactcctgaagagagcaaaccaactctgaaagagagtgaaaatgcagacaagacagttatcagataatggctatctggacgagagattctttcgtttgacagcagtttggttgttgggagttccagttcagctcctgcacagttgctctgtacaaatcctcctccatatttgcttagagaaaacgtgttgccatcccatcatgaaggaagctgcctgagagtttttaaccattacagccgtgatgatgaaagagtgaagaaccgcctctaagttaaaaagtgcacccagagataaggttcgttctcaatgccctgccgctgcttctcatcgcatggccaccgcatttctcaggccaggcacattgagcattggtcctgtgcctgacgctatgctagatgctggggttgcagccacgagcatagacacgacagacacggtcctcgccatcttctgttgagtactggtcggaacaagaggatcgtctgtagacaggctacagattgttttagattgaagtttcctgtcatgttcactcatctttaaatcctcatagtgaaaaggatatgatcatcgtggcgcatgtattactcatccttttgggggccactgagatactgcaagctgacttacttcctgatgaaaagatttcacttctcccacctgtcaatttcaccattaaagttactggtttggctcaagttcttttacaatggaaaccaaatcctgatcaagagcaaaggaatgttaatctagaatatcaagtgaaaataaacgctccaaaagaagatgactatgaaaccagaatcactgaaagcaaatgtgtaaccatcctccacaaaggcttttcagcaagtgtgcggaccatcctgcagaacgaccactcactactggccagcagctgggcttctgctgaacttcatgccccaccagggtctcctggaacctcaattgtgaatttaacttgcaccacaaacactacagaagacaattattcacgtttaaggtcataccaagtttcccttcactgcacctggcttgttggcacagatgcccctgaggacacgcagtattttctctactataggtatggctcttggactgaagaatgccaagaatacagcaaagacacactggggagaaatatcgcatgctggtttcccaggacttttatcctcagcaaagggcgtgactggcttgcggtgcttgttaacggctccagcaagcactctgctatcaggccctttgatcagctgtttgcccttcacgccattgatcaaataaatcctccactgaatgtcacagcagagattgaaggaactcgtctctctatccaatgggagaaaccagtgtctgcttttccaatccattgctttgattatgaagtaaaaatacacaatacaaggaatggatatttgcagatagaaaaattgatgaccaatgcattcatctcaataattgatgatctttctaagtacgatgttcaagtgagagcagcagtgagctccatgtgcagagaggcagggctctggagtgagtggagccaacctatttatgtggggttctcaagataaaggagataacatccagctttcctgccccacaccgtatctgaaataaaaacaacagcagggatagcagatt

SEQ ID NO: 726 - protein, 335 aa, Homo sapiens
MIIVAHVLLILLGATEILQADLLPDEKISLLPPVNFTIKVTGLAQVLLQWKPNPDQEQRNVNLEYQVKINAPKEDDYETRITESKCVTILHKGFSASVRTILQNDHSLLASSWASAELHAPPGSPGTSIVNLTCTTNTTEDNYSRLRSYQVSLHCTWLVGTDAPEDTQYFLYYRYGSWTEECQEYSKDTLGRNIACWFPRTFILSKGRDWLAVLVNGSSKHSAIRPFDQLFALHAIDQINPPLNVTAEIEGTRLSIQWEKPVSAFPIHCFDYEVKIHNTRNGYLQIEKLMTNAFISIIDDLSKYDVQVRAAVSSMCREAGLWSEWSQPIYVGFSR

SEQ ID NO: 727 - DNA, 2299 bp, Homo sapiens
agtacccacggaaaacttgtttaccttgtcaccatgagtaaaagttaattcccactcctgaagagagcaaaccaactctgaaagagagtgaaaatgcagacaagacagttatcagataatggctatctggacgagagattctttcgtttgacagcagtttggttgttgggagttccagttcagctcctgcacagttgctctgtacaaatcctcctccatatttgcttagagaaaacgtgttgccatcccatcatgaaggaagctgcctgagagtttttaaccattacagccgtgatgatgaaagagtgaagaaccgcctctaagttaaaaagtgcacccagagataaggttcgttctcaatgccctgccgctgcttctcatcgcatggccaccgcatttctcaggccaggcacattgagcattggtcctgtgcctgacgctatgctagatgctggggttgcagccacgagcatagacacgacagacacggtcctcgccatcttctgttgagtactggtcggaacaagaggatcgtctgtagacaggatatgatcatcgtggcgcatgtattactcatccttttgggggccactgagatactgcaagctgacttacttcctgatgaaaagatttcacttctcccacctgtcaatttcaccattaaagttactggtttggctcaagttcttttacaatggaaaccaaatcctgatcaagagcaaaggaatgttaatctagaatatcaagtgaaaataaacgctccaaaagaagatgactatgaaaccagaatcactgaaagcaaatgtgtaaccatcctccacaaaggcttttcagcaagtgtgcggaccatcctgcagaacgaccactcactactggccagcagctgggcttctgctgaacttcatgccccaccagggtctcctggaacctcaattgtgaatttaacttgcaccacaaacactacagaagacaattattcacgtttaaggtcataccaagtttcccttcactgcacctggcttgttggcacagatgcccctgaggacacgcagtattttctctactataggtatggctcttggactgaagaatgccaagaatacagcaaagacacactggggagaaatatcgcatgctggtttcccaggacttttatcctcagcaaagggcgtgactggcttgcggtgcttgttaacggctccagcaagcactctgctatcaggccctttgatcagctgtttgcccttcacgccattgatcaaataaatcctccactgaatgtcacagcagagattgaaggaactcgtctctctatccaatgggagaaaccagtgtctgcttttccaatccattgctttgattatgaagtaaaaatacacaatacaaggaatggatatttgcagatagaaaaattgatgaccaatgcattcatctcaataattgatgatctttctaagtacgatgttcaagtgagagcagcagtgagctccatgtgcagagaggcagggctctggagtgagtggagccaacctatttatgtgggaaatgatgaacacaagcccttgagagagtggtttgtcattgtgattatggcaaccatctgcttcatcttgttaattctctcgcttatctgtaaaatatgtcatttatggatcaagttgtttccaccaattccagcaccaaaaagtaatatcaaagatctctttgtaaccactaactatgagaaagctgggtccagtgagacggaaattgaagtcatctgttatatagagaagcctggagttgagaccctggaggattctgtgttttgactgtcactttggcatcctctgatgaactcacacatgcctcagtgcctcagtgaaaagaacagggatgctggctcttggctaagaggtgttcagaatttaggcaacactcaatttacctgcgaagcaatacacccagacacaccagtcttgtatctcttaaaagtatggatgcttcatccaaatcgcctcacctacagcagggaagttgactcatccaagcattttgccatgttttttctccccatgccgtacagggtagcacctcctcacctgccaatctttgcaatttgcttgactcacctcagacttttcattcacaacagacagcttttaaggctaacgtccagctgtatttacttctggctgtgcccgtttggctgtttaagctgccaattgtagcactcagctaccatctgaggaagaaagcattttgcatcagcctggagtgaaccatgaacttggattcaagactgtcttttctatagcaa

SEQ ID NO: 728 - protein, 420 aa, Homo sapiens; identical to SEQ ID NO: 722

SEQ ID NO: 729 - DNA, 1956 bp, Homo sapiens
agtacccacggaaaacttgtttaccttgtcaccatgagtaaaagttaattcccactcctgaagagagcaaaccaactctgaaagagagtgaaaatgcagacaagacagttatcagataatggctatctggacgagagattctttcgtttgacagcagtttggttgttgggagttccagttcagctcctgcacagttgctctgtacaaatcctcctccatatttgcttagagaaaacgtgttgccatcccatcatgaaggaagctgcctgagagtttttaaccattacagccgtgatgatgaaagagtgaagaaccgcctctaagttaaaaagtgcacccagagataaggttcgttctcaatgccctgccgctgcttctcatcgcatggccaccgcatttctcaggccaggcacattgagcattggtcctgtgcctgacgctatgctagatgctggggttgcagccacgagcatagacacgacagacacggtcctcgccatcttctgttgagtactggtcggaacaagaggatcgtctgtagacaggatatgatcatcgtggcgcatgtattactcatccttttgggggccactgagatactgcaagctgacttacttcctgatgaaaagatttcacttctcccacctgtcaatttcaccattaaagttactggtttggctcaagttcttttacaatggaaaccaaatcctgatcaagagcaaaggaatgttaatctagaatatcaagtgaaaataaacgctccaaaagaagatgactatgaaaccagaatcactgaaagcaaatgtgtaaccatcctccacaaaggcttttcagcaagtgtgcggaccatcctgcagaacgaccactcactactggccagcagctgggcttctgctgaacttcatgccccaccagggtctcctggaacctcaattgtgaatttaacttgcaccacaaacactacagaagacaattattcacgtttaaggtcataccaagtttcccttcactgcacctggcttgttggcacagatgcccctgaggacacgcagtattttctctactataggtatggctcttggactgaagaatgccaagaatacagcaaagacacactggggagaaatatcgcatgctggtttcccaggacttttatcctcagcaaagggcgtgactggcttgcggtgcttgttaacggctccagcaagcactctgctatcaggccctttgatcagctgtttgcccttcacgccattgatcaaataaatcctccactgaatgtcacagcagagattgaaggaactcgtctctctatccaatgggagaaaccagtgtctgcttttccaatccattgctttgattatgaagtaaaaatacacaatacaaggaatggatatttgcagatagaaaaattgatgaccaatgcattcatctcaataattgatgatctttctaagtacgatgttcaagtgagagcagcagtgagctccatgtgcagagaggcagggctctggagtgagtggagccaacctatttatgtgggtaagtagcttatgtttattttacattggcagccttccttgtgatcaaaaaaggtaatcccagaaacgtacccgttcactcgtgggtcttaaaatggtttcatatctctattgtgactaattttctctcggtctactgccttttcaatcaggaatagatttgccatgaagccagtgaagtttttaagtgtctaggcttctcattagcgccaactctcctagacctggtgcctgttttttttccaagttttgtttctacttctatccattttttaaattaaactttttattttgaaataattatcacactcacaagctgtgggaagaaataatagagatcctgtgtctctttcatccagttttcctcaagggtaacatcttacaaaactatagtacaatagtggaatagaatatt

SEQ ID NO: 730 - protein, 333 aa, Homo sapiens; identical to SEQ ID NO: 724

SEQ ID NO: 731 - DNA, 1626 bp, Homo sapiens
agtacccacggaaaacttgtttaccttgtcaccatgagtaaaagttaattcccactcctgaagagagcaaaccaactctgaaagagagtgaaaatgcagacaagacagttatcagataatggctatctggacgagagattctttcgtttgacagcagtttggttgttgggagttccagttcagctcctgcacagttgctctgtacaaatcctcctccatatttgcttagagaaaacgtgttgccatcccatcatgaaggaagctgcctgagagtttttaaccattacagccgtgatgatgaaagagtgaagaaccgcctctaagttaaaaagtgcacccagagataaggttcgttctcaatgccctgccgctgcttctcatcgcatggccaccgcatttctcaggccaggcacattgagcattggtcctgtgcctgacgctatgctagatgctggggttgcagccacgagcatagacacgacagacacggtcctcgccatcttctgttgagtactggtcggaacaagaggatcgtctgtagacaggatatgatcatcgtggcgcatgtattactcatccttttgggggccactgagatactgcaagctgacttacttcctgatgaaaagatttcacttctcccacctgtcaatttcaccattaaagttactggtttggctcaagttcttttacaatggaaaccaaatcctgatcaagagcaaaggaatgttaatctagaatatcaagtgaaaataaacgctccaaaagaagatgactatgaaaccagaatcactgaaagcaaatgtgtaaccatcctccacaaaggcttttcagcaagtgtgcggaccatcctgcagaacgaccactcactactggccagcagctgggcttctgctgaacttcatgccccaccagggtctcctggaacctcaattgtgaatttaacttgcaccacaaacactacagaagacaattattcacgtttaaggtcataccaagtttcccttcactgcacctggcttgttggcacagatgcccctgaggacacgcagtattttctctactataggtatggctcttggactgaagaatgccaagaatacagcaaagacacactggggagaaatatcgcatgctggtttcccaggacttttatcctcagcaaagggcgtgactggcttgcggtgcttgttaacggctccagcaagcactctgctatcaggccctttgatcagctgtttgcccttcacgccattgatcaaataaatcctccactgaatgtcacagcagagattgaaggaactcgtctctctatccaatgggagaaaccagtgtctgcttttccaatccattgctttgattatgaagtaaaaatacacaatacaaggaatggatatttgcagatagaaaaattgatgaccaatgcattcatctcaataattgatgatctttctaagtacgatgttcaagtgagagcagcagtgagctccatgtgcagagaggcagggctctggagtgagtggagccaacctatttatgtggggttctcaagataaaggagataacatccagctttcctgccccacaccgtatctgaaataaaaacaacagcagggatagcagatt

SEQ ID NO: 732 - protein, 335 aa, Homo sapiens; identical to SEQ ID NO: 726

SEQ ID NO: 733 - DNA, 1865 bp, Homo sapiens
ggggggctgcggcaacagcggggccgatgtgtagttggtgactgcctctccagatgctgaggtgcctgtatcattggcacaggccagtgctgaaccgtaggtggagtaggctgtgccttctgaagcagtatctattcacaatgaagttgcagtctcccgaattccagtcacttttcacagaaggactgaagagtctgacagaattatttgtcaaagagaatcacgaattaagaatagcaggaggagcagtgagggatttattaaatggagtaaagcctcaggatatagattttgccaccactgctacccctactcaaatgaaggagatgtttcagtcggctgggattcggatgataaacaacagaggagaaaagcacggaacaattactgccaggcttcatgaagaaaattttgagattactacactacggattgatgtcaccactgatggaagacatgctgaggtagaatttacaactgactggcagaaagatgcggaacgcagagatctcactataaattctatgtttttaggttttgatggcactttatttgactactttaatggttatgaagatttaaaaaataagaaagttagatttgttggacatgctaaacagagaatacaagaggattatcttagaattttaagatacttcaggttttatgggagaattgtagacaaacctggtgaccatgatcctgagactttggaagcaattgcagaaaatgcaaaaggcttggctggaatatcaggagaaaggatttgggtggaactgaaaaaaattcttgttggtaaccatgtaaatcatttgattcaccttatctatgatcttgatgtggctccttatataggtttacctgctaatgcaagtttagaagaatttgacaaagtcagtaaaaatgttgatggtttttcaccaaagccagtgactcttttggcctcattattcaaagtacaagatgatgtcacaaaattggatttgaggttgaagatcgcgaaagaggagaaaaaccttggcttatttatagttaaaaataggaaagatttaattaaagcaacagatagttcagacccattgaaaccctatcaagacttcattatagattctagggaacctgatgcaactactcgtgtatgtgaactactgaagtaccaaggagagcactgtctcctaaaggaaatgcagcagtggtccattcctccatttcctgtaagtggccatgacatcagaaaagtgggcatttcttcaggaaaagaaattggggctctattacaacagttgcgagaacagtggaaaaaaagtggttaccaaatggaaaaagatgaacttctgagttacataaagaagacctaaaactgatggctactaaaaagcagagcatttctgccagtcataacatctttgtactctatgagcaaatagtaattttggaccttgataaaacaattttgtagagtgtaatatttctaagaggaaatgtcacaggggctatgatgcaagaaagcctcagaaatgactgcatacaggaaataatctcatcatttccaaagatgtcttcatgtcccatcaatgacatgctaccagacatatcagattccacaggataatggcaccaagctacccaagtagatgtttctggtattctagactgccgttcatgcttgtttcctaaagtatacttaaaagtttcaaatacagtttcacttagaaactgcaaccctccaagtaatgttatgtttacttaggtattaatgttatgtttacttaggtatgtatcagaggcaataatttccaaagcagatcttagaatataaccaatttgttagataacaaaaaaaaaaaaaaaaaaaaaaaaaaaaa

SEQ ID NO: 734 - protein, 405 aa, Homo sapiens
MKLQSPEFQSLFTEGLKSLTELFVKENHELRIAGGAVRDLLNGVKPQDIDFATTATPTQMKEMFQSAGIRMINNRGEKHGTITARLHEENFEITTLRIDVTTDGRHAEVEFTTDWQKDAERRDLTINSMFLGFDGTLFDYFNGYEDLKNKKVRFVGHAKQRIQEDYLRILRYFRFYGRIVDKPGDHDPETLEAIAENAKGLAGISGERIWVELKKILVGNHVNHLIHLIYDLDVAPYIGLPANASLEEFDKVSKNVDGFSPKPVTLLASLFKVQDDVTKLDLRLKIAKEEKNLGLFIVKNRKDLIKATDSSDPLKPYQDFIIDSREPDATTRVCELLKYQGEHCLLKEMQQWSIPPFPVSGHDIRKVGISSGKEIGALLQQLREQWKKSGYQMEKDELLSYIKKT

SEQ ID NO: 735 - DNA, 2264 bp, Homo sapiens
cgcgtggcggcggtggcggctgcggcaacagcggggccgatgtgtagttggtgactgcctctccagatgctgaggtgcctgtatcattggcacaggccagtgctgaaccgtaggtggagtaggctgtgccttctgaagcagtatctattcacaatgaagttgcagtctcccgaattccagtcacttttcacagaaggactgaagagtctgacagaattatttgtcaaagagaatcacgaattaagaatagcaggaggagcagtgagggatttattaaatggagtaaagcctcaggatatagattttgccaccactgctacccctactcaaatgaaggagatgtttcagtcggctgggattcggatgataaacaacagaggagaaaagcacggaacaattactgccaggcttcatgaagaaaattttgagattactacactacggattgatgtcaccactgatggaagacatgctgaggtagaatttacaactgactggcagaaagatgcggaacgcagagatctcactataaattctatgtttttaggttttgatggcactttatttgactactttaatggttatgaagatttaaaaaataagaaagttagatttgttggacatgctaaacagagaatacaagaggattatcttagaattttaagatacttcaggttttatgggagaattgtagacaaacctggtgaccatgatcctgagactttggaagcaattgcagaaaatgcaaaaggcttggctggaatatcaggagaaaggatttgggtggaactgaaaaaaattcttgttggtttacctgctaatgcaagtttagaagaatttgacaaagtcagtaaaaatgttgatggtttttcaccaaagccagtgactcttttggcctcattattcaaagtacaagatgatgtcacaaaattggatttgaggttgaagatcgcgaaagaggagaaaaaccttggcttatttatagttaaaaataggaaagatttaattaaagcaacagatagttcagacccattgaaaccctatcaagacttcattatagattctagggaacctgatgcaactactcgtgtatgtgaactactgaagtaccaaggagagcactgtctcctaaaggaaatgcagcagtggtccattcctccatttcctgtaagtggccatgacatcagaaaagtgggcatttcttcaggaaaagaaattggggctctattacaacagttgcgagaacagtggaaaaaaagtggttaccaaatggaaaaagatgaacttctgagttacataaagaagacctaaaactgatggctactaaaaagcagagcatttctggtaagactaaattttctcccctccctcttaatgaggttttagagactacaccagaataaaagacagtttaggggacctctgtagaacaacaagggtcttattttgtgaattatatatttcaagaactaaacagagatccacctttctggatctgatttatatcactgaaatgtacagttcttttggaatagtttcacctgagaaaacatagttggctattatctatcttaacctgttcaggcttttaaaaaaaactgtttttgcatagggtagtactaagatcttaaaaagtggtaactgtcttgaagaaaaaacgtttattgtttgtttgcaattgaaataacagggttaccttaacaatgactgtctatgatgtgtcagttcttatctgaattccaaaataaacctgtgcttaaaaaagaaataattgaccaagtaagtttgcataaaatgtgaatactaaatgtgtccccagttgctggcattcatatgtacaggatttgttctagcaagctatgcttcagtatgtggttgatatttttctgtcacaatgatttctttatgcatgcagagcctgggaaagtcatgggattaacttgagggtcactattgagcctattaattaattaattattgttttaataaaacaaacattggtattggaagataaatatgtttatgtggtatctgacaatgtgtattaggtgtcatatacaatggtaatatgcctgtctttaaagtgttattttattaattaaaaggatatggctattattatatattctctaaagatttattctctaaagatttgagtcctaaatgctttcatcaggtaaataaaatgtataatacaaaaaaaaaaaaaaaaaaaaaaaaaaaaaaaaaaaaaaaaaaaaaaaaaaaaaaaaaaaaaaaaaaaa

SEQ ID NO: 736 - protein, 414 aa, Homo sapiens
MLRCLYHWHRPVLNRRWSRLCLLKQYLFTMKLQSPEFQSLFTEGLKSLTELFVKENHELRIAGGAVRDLLNGVKPQDIDFATTATPTQMKEMFQSAGIRMINNRGEKHGTITARLHEENFEITTLRIDVTTDGRHAEVEFTTDWQKDAERRDLTINSMFLGFDGTLFDYFNGYEDLKNKKVRFVGHAKQRIQEDYLRILRYFRFYGRIVDKPGDHDPETLEAIAENAKGLAGISGERIWVELKKILVGLPANASLEEFDKVSKNVDGFSPKPVTLLASLFKVQDDVTKLDLRLKIAKEEKNLGLFIVKNRKDLIKATDSSDPLKPYQDFIIDSREPDATTRVCELLKYQGEHCLLKEMQQWSIPPFPVSGHDIRKVGISSGKEIGALLQQLREQWKKSGYQMEKDELLSYIKKT

SEQ ID NO: 737 - DNA, 2231 bp, Homo sapiens
cctttgcgggtaaacagacatggccggcgaaggagatcagcaggacgctgcgcacaacatgggcaaccacctgccgctcctgcctgcagagagtgaggaagaagatgaaatggaagttgaagaccaggatagtaaagaagccaaaaaaccaaacatcataaattttgacaccagtctgccgacatcacatacatacctaggtgctgatatggaagaatttcatggcaggactttgcacgatgacgacagctgtcaggtgattccagttcttccacaagtgatgatgatcctgattcccggacagacattacctcttcagctttttcaccctcaagaagtcagtatggtgcggaatttaattcagaaagatagaacctttgctgttcttgcatacagcaatgtacaggaaagggaagcacagtttggaacaacagcagagatatatgcctatcgagaagaacaggattttggaattgagatagtgaaagtgaaagcaattggaagacaaaggttcaaagtccttgagctaagaacacagtcagatggaatccagcaagctaaagtgcaaattcttcccgaatgtgtgttgccttcaaccatgtctgcagttcaattagaatccctcaataagtgccagatatttccttcaaaacctgtctcaagagaagaccaatgttcatataaatggtggcagaaataccagaagagaaagtttcattgtgcaaatctaacttcatggcctcgctggctgtattccttatatgatgctgagaccttaatggacagaatcaagaaacagctacgtgaatgggatgaaaatctaaaagatgattctcttccttcaaatccaatagatttttcttacagagtagctgcttgtcttcctattgatgatgtattgagaattcagctccttaaaattggcagtgctatccagcgacttcgctgtgaattagacattatgaataaatgtacttccctttgctgtaaacaatgtcaagaaacagaaataacaaccaaaaatgaaatattcagtttatccttatgtgggccgatggcagcttatgtgaatcctcatggatatgtgcatgagacacttactgtgtataaggcttgcaacttgaatctgataggccggccttctacagaacacagctggtttcctgggtatgcctggactgttgcccagtgtaagatctgtgcaagccatattggatggaagtttacggccaccaaaaaagacatgtcacctcaaaaattttggggcttaacgcgatctgctctgttgcccacgatcccagacactgaagatgaaataagtccagacaaagtaatactttgcttgtaaacagatgtgatagagataaagttatctaacaaattggttatattctaagatctgctttggaaattattgcctctgatacatacctaagtaaacataacattaatacctaagtaaacataacattacttggagggttgcagtttctaagtgaaactgtatttgaaacttttaagtatactttaggaaacaagcatgaacggcagtctagaataccagaaacatctacttgggtagcttggtgccattatcctgtggaatctgatatgtctggtagcatgtcattgatgggacatgaagacatctttggaaatgatgagattatttcctgtgttaaaaaaaaaaaaaatcttaaattcctacaatgtgaaactgaaactaataatttgatcctgatgtatgggacagcgtatctgtaccagtgctctaaataacaaaagctagggtgacaagtacatgttccttttggaaagaagcaaggcaatgtatattaattattctaaaagggctttgttcctttccattttctttaacttctctgagatactgatttgtaaattttgaaaattagttaaaatatgcagttttttgagcccacgaatagttgtcatttcctttatgtgcctgttagtaaaaagtagtattgtgtatttgctcagtatctgaactataagcccatttatactgttccatacaaaagctatttttcaaaaattaatttgaaccaaaactactactatagggaaaagatgccaaaacatgtcccctcacccaggctaaacttgatactgtattattttgttcaatgtaaattgaagaaaatctgtaagtaagtaaaccttaagtgtgaaactaaaaaaaaaaaaaaaaaaaaaaaaaaaaaaaa

SEQ ID NO: 738 - protein, 442 aa, Homo sapiens [sequence omitted]

SEQ ID NO: 739 - DNA, 2063 bp, Homo sapiens
caaagacgacacggccttgtgggatggcggagtttaaggagaagcctgaggccccgactgagcagctggatgtcgcgtgcggccaggaaaacttgccggtgggcgcgtggcccccgggggccgcgccggcgcccttccagtacactcctgatcatgtagttggacctggagcagacattgatcccactcaaataacctttcccggatgcatttgtgtcaaaactccctgcctccctggcacttgctcctgtctccgccatggagagaactatgatgataactcatgccttagagatataggatctggaggaaagtatgcagagcctgtttttgaatgcaatgtcctgtgccgatgcagtgaccactgcagaaacagagtggtccagaaaggtctacagttccacttccaagtgttcaagacgcataaaaaaggctggggacttcgtaccttggaatttataccgaaaggaaggtttgtctgtgaatatgctggtgaggttttaggattctctgaagttcagagaagaattcacttacaaacaaaatccgactccaattacattatagccatcagggaacatgtttataatgggcaggtaatggaaacatttgttgaccctacttatataggaaatattggaagattccttaatcattcttgtgagccaaaccttttgatgattcctgtccgaattgactcaatggtacctaagttggcactttttgcagccaaagatattgtgccagaagaagaactctcttatgattattcaggaagatatcttaatctaacagtcagtgcctccaaagaaaggctagatcatgggaaactaaggaaaccttgttactgtggtgccaaatcatgtactgctttcctgccttttgacagttctctgtactgccccgtagaaaagtcgaacatcagttgtggaaatgagaaggaacccagcatgtgtggctcagccccttctgtgttcccctcctgcaagcgattgacccttgagactatgaaaatgatgttagacaaaaagcaaattcgagcaattttcttattcgagttcaaaatgggtcgtaaagcagcagaaacaactcgcaacatcaacaatgcatttggcccaggaactgctaacgaacgtacagtgcagtggtggttcaagaagttttgcaaaggagatgagagccttgaagatgaggagcgtagtggccggccatcagaagttgacaacgaccagttgagagcaatcatcgaagctgatccccttacaactacacgagaagttgctgaagaactcaatgtcaaccattctacggtcgttcggcatttgaagcaaattgaaaaggtgaaaaagctcgataagtgggtgcctcatgagctgactgaaaatcaaaaaaatcgtcgttttgaagtgtcatcttctcttattctacgcaaccacaacgaaccatttctcgatcggattgtgacgtgtgatgaaaagtggattttatatgacaaccggcgacgatcagctcagtggttggatcaagaagaagctccaaagcacttcccaaagccaatcttgcacccaaaaaaggtcatggtcactatttggtggtctgctgctggtctgatccactacagctttctgaatcccggtgaaaccattacatctgagaagtatgctcaggaaatcgatgagatgaaccaaaaactgcaacgcctgcagctggcattggtcaacagaaagggcccaattcttctccacgacaatgcccgaccgcatgttgcacaacccacacttcaaaagttgaatgaattgggctatgaagttttgcctcatccaccgtattcacctgacctcttgccaaccaactaccacgtctttaagcatctcaacaactttttgcagggaaaacgcttccacaaccagcaggatgcagaaaatgctttccaagagttcgtcgaatcccaaagcacggatttttacgctacaggaataaaccaacttatttctcgttggcaaaaatgtgttgattgtaatggttcctattttgattaataaaaatgcgttgagcctaaaaaa

SEQ ID NO: 740 - protein, 671 aa, Homo sapiens
MAEFKEKPEAPTEQLDVACGQENLPVGAWPPGAAPAPFQYTPDHVVGPGADIDPTQITFPGCICVKTPCLPGTCSCLRHGENYDDNSCLRDIGSGGKYAEPVFECNVLCRCSDHCRNRVVQKGLQFHFQVFKTHKKGWGLRTLEFIPKGRFVCEYAGEVLGFSEVQRRIHLQTKSDSNYIIAIREHVYNGQVMETFVDPTYIGNIGRFLNHSCEPNLLMIPVRIDSMVPKLALFAAKDIVPEEELSYDYSGRYLNLTVSASKERLDHGKLRKPCYCGAKSCTAFLPFDSSLYCPVEKSNISCGNEKEPSMCGSAPSVFPSCKRLTLETMKMMLDKKQIRAIFLFEFKMGRKAAETTRNINNAFGPGTANERTVQWWFKKFCKGDESLEDEERSGRPSEVDNDQLRAIIEADPLTTTREVAEELNVNHSTVVRHLKQIEKVKKLDKWVPHELTENQKNRRFEVSSSLILRNHNEPFLDRIVTCDEKWILYDNRRRSAQWLDQEEAPKHFPKPILHPKKVMVTIWWSAAGLIHYSFLNPGETITSEKYAQEIDEMNQKLQRLQLALVNRKGPILLHDNARPHVAQPTLQKLNELGYEVLPHPPYSPDLLPTNYHVFKHLNNFLQGKRFHNQQDAENAFQEFVESQSTDFYATGINQLISRWQKCVDCNGSYFD

SEQ ID NO: 741 - DNA, 2148 bp, Homo sapiens
cgggtcacatggcccgcgggacaacatggctgcgcccgcactagggctggtgtgtggacgttgccctgagctgggtctcgtcctcttgctgctgctgctctcgctgctgtgtggagcggcagggagccaggaggccgggaccggtgcgggcgcggggtcccttgcgggttcttgcggctgcggcacgccccagcggcctggcgcccatggcagttcggcagccgctcaccgatactcgcgggaggctaacgctccgggccccgtacccggagagcggcaactcgcgcactcaaagatggtccccatccctgctggagtatttacaatgggcacagatgatcctcagataaagcaggatggggaagcacctgcgaggagagttactattgatgccttttacatggatgcctatgaagtcagtaatactgaatttgagaagtttgtgaactcaactggctatttgacagaggctgagaagtttggcgactcctttgtctttgaaggcatgttgagtgagcaagtgaagaccaatattcaacaggcagttgcagctgctccctggtggttacctgtgaaaggcgctaactggagacacccagaagggcctgactctactattctgcacaggccggatcatccagttctccatgtgtcctggaatgatgcggttgcctactgcacttgggcagggaagcggctgcccacggaagctgagtgggaatacagctgtcgaggaggcctgcataatagacttttcccctggggcaacaaactgcagcccaaaggccagcattatgccaacatttggcagggcgagtttccggtgaccaacactggtgaggatggcttccaaggaactgcgcctgttgatgccttccctcccaatggttatggcttatacaacatagtggggaacgcatgggaatggacttcagactggtggactgttcatcattctgttgaagaaacgcttaacccaaaaggtcccccttctgggaaagaccgagtgaagaaaggtggatcctacatgtgccataggtcttattgttacaggtatcgctgtgctgctcggagccagaacacacctgatagctctgcttcgaatctgggattccgctgtgcagccgaccgcctgcccactatggactgacaaccaaggaaagtcttccccagtccaaggagcagtcgtgtctgacctacattgggcttttctcagaactttgaacgatcccatgcaaagaattcccaccctgaggtgggttacatacctgcccaatggccaaaggaaccgccttgtgagaccaaattgctgacctgggtcagtgcatgtgctttatggtgtggtgcatctttggagatcatcaccatattttacttttgagagtctttaaagaggaaggggagtggagggaaccctgagctaggcttcaggaggcccgcgtcctacgcaggctctgccacaggggttagaccccaggtccgacgcttgaccttcctgggcctcaagtgccctcccctatcaaatgaagggatggacagcatgacctctgggtgtctctccaactcaccagttctaaaaagggtatcagattctattgtgacttcatagtgagaatttattatagattattttttagctattttttccatgtgtgaaccttgagtgatactaatcatgtaaagtaagagttctcttatgtattattttcggaagaggggtgtggtgactcctttatattcgtactgcactttgtttttccaaggaaatcagtgtcttttacgttgttatgatgaatcccacatggggccggtgatggtatgctgaagttcagccgttgaacacataggaatgtctgtggggtgactctactgtgctttatcttttaacattaagtgcctttggttcagaggggcagtcataagctctgtttccccctctccccaaagccttcagcgaacgtgaaatgtgcgctaaacggggaaacctgtttaattctagatatagggaaaaaggaacgaggaccttgaatgagctatattcagggtatccggtattttgtaatagggaataggaaaccttgttggctgtggaatatccgatgctttgaatcatgcactgtgttgaataaacgtatctgctaaatcagg

SEQ ID NO: 742 - protein, 374 aa, Homo sapiens
MAAPALGLVCGRCPELGLVLLLLLLSLLCGAAGSQEAGTGAGAGSLAGSCGCGTPQRPGAHGSSAAAHRYSREANAPGPVPGERQLAHSKMVPIPAGVFTMGTDDPQIKQDGEAPARRVTIDAFYMDAYEVSNTEFEKFVNSTGYLTEAEKFGDSFVFEGMLSEQVKTNIQQAVAAAPWWLPVKGANWRHPEGPDSTILHRPDHPVLHVSWNDAVAYCTWAGKRLPTEAEWEYSCRGGLHNRLFPWGNKLQPKGQHYANIWQGEFPVTNTGEDGFQGTAPVDAFPPNGYGLYNIVGNAWEWTSDWWTVHHSVEETLNPKGPPSGKDRVKKGGSYMCHRSYCYRYRCAARSQNTPDSSASNLGFRCAADRLPTMD

SEQ ID NO: 743 - DNA, 8192 bp, Homo sapiens
gttgctgtcggagagagaaagccgcacccgagaggaggtgtgggtgttccgcttccatcctaacggaacgagctccctcttcgcggacatgggattacccagcggctgctaacccctctcctcgccctgctcccccaaaccggcgtggctccccgggcaccaaggagctgactacagaggagcaggatttgcacccctcgctgggcttgctttggcaacagagtgcctgacccaggtcaggattttcaagaaagacatgtctgacaaaatgtctagcttcctacatattggagacatttgttctctgtacgcggagggatcgacaaatggatttattagcaccttgggcctggttgatgatcgttgtgttgtacagccagaaaccggggaccttaacaatccacctaagaaattcagagactgcctctttaagctatgtcccatgaaccgctactctgcccaaaagcagttctggaaagccgctaagcctggggccaacagcaccacagacgcagtgctactcaacaaactgcaccacgctgcagacttggaaaagaagcagaatgagacagaaaacaggaaattgctggggaccgtaatccagtatggcaatgtgatccagctcctgcatttgaaaagtaataaatacctaacagtgaataagaggcttcctgctctgttggagaagaatgccatgagagtcacattggacgaggctggaaatgaagggtcctggttttatattcagccattctacaagctgcgatccattggagacagcgtggtcataggtgacaaggtggttctgaaccccgtcaatgctggtcagcccctacatgctagcagccatcaactggtagataacccaggctgcaatgaggtcaattccgtcaactgcaatacaagctggaaaatagtccttttcatgaaatggagtgataacaaagacgacatattaaaggggggtgacgtggtgaggctgtttcatgctgagcaggagaagtttctcacctgtgacgaacacaggaagaagcagcacgtcttcctgagaaccacgggccggcagtcggccacatctgccaccagttcaaaagccctgtgggaggtggaggtggtccagcatgacccatgtcggggcggagcagggtattggaacagccttttccgtttcaagcatctggccacggggcattacttggcagcagaggtggaccctgatcaggacgcctctcgaagtaggttgcggaatgcccaagaaaagatggtatactccctggtctctgtgcctgaaggcaatgacatctcctccattttcgagctagatcccaccactctgcgtggaggtgacagccttgtcccaaggaactcttatgttcggctcagacacctatgtactaatacctgggttcacagcacaaatattcctattgacaaggaagaagaaaagcccgtgatgctgaaaattggcacctctcctgtgaaggaggataaggaagcatttgccatagttccggtttctcctgctgaagttcgggacctggactttgccaatgatgccagcaaggtgctgggctccattgctgggaagctagagaagggcaccatcacccagaatgaaaggaggtctgtaaccaagctgctagaagatttggtttacttcgtcactggtggaactaattctggtcaagatgttctcgaagttgtcttctccaagcccaacagagaacggcagaaactgatgagagaacagaatattctcaagcagatcttcaagttgttacaagccccattcacagactgcggtgatggcccaatgcttcggctggaagagctcggggaccagcggcacgctcctttcagacacatctgccggctctgctacagggtgctgagacactcgcagcaagactacaggaagaaccaggagtatatagccaagcagtttggcttcatgcagaagcagattggctatgatgtgttggctgaagacactatcactgccctgctccacaataatcggaaactcctggaaaaacacattaccgcggcagagattgacacatttgtcagcctggtgcgaaagaacagggagcccagattcttagattacctctccgacctctgtgtctccatgaacaaatcaattccagtgacccaggaactgatatgtaaagctgtgctgaaccccaccaacgctgacatcctgattgagaccaaattggttctttctcgttttgaatttgaaggtgtctcttccactggagagaatgctctggaggcaggagaagacgaggaagaggtgtggctgttttggagggacagcaacaaagagattcgcagcaagagtgtgagggaattggctcaggatgctaaagaagggcagaaggaggaccgagacgttctcagctactacagatatcagctgaacctctttgcgaggatgtgtctggaccgccaatacctggccatcaacgaaatctcaggccagctggatgtcgatctcattctccgctgcatgtctgacgagaacctgccctatgacctcagggcgtccttctgccgcctcatgcttcacatgcatgtggaccgagatccccaggaacaagtcacccccgtgaaatatgcccgcctctggtcggagattccctcggagatcgccattgacgactatgatagtagtggagcttccaaagatgaaattaaggagagatttgctcagaccatggagtttgtggaggagtatttaagagatgtggtttgtcagaggttccctttctctgataaagagaagaataagcttacgtttgaggttgtaaatttagctaggaatctcatatactttggtttctacaacttctctgaccttctccgattaactaagatccttctggccatattggactgtgtacatgtgacaacaatcttccccattagcaagatggcgaaaggagaagagaataaaggcagtaacgtgatgagatctattcatggcgtgggagagctgatgacccaggtggtgctccggggaggaggctttttgcccatgactcccatggctgctgcccctgaaggcaatgtgaagcaggcagagcctgagaaggaggacatcatggtcatggacaccaagctgaagatcattgagatactccagtttattttgaatgtgaggttggattataggatctcctgcctcctgtgtatatttaagcgagagtttgatgaaagcaattcccagacttcagaaacatcctccggaaacagcagccaagaagggccaagtaatgtaccaggtgctcttgactttgaacacattgaagaacaagcagaaggcatctttggaggaagtgaggagaacaccccactggacttggatgaccacggcggcagaacctttctccgtgtcctgctccacttgacgatgcatgactacccacccctggtgtcaggggccctgcagctcctcttccggcacttcagccagaggcaggaggtgctccaggccttcaaacaggttcaactgctggttaccagccaagatgtggacaactacaaacagatcaaacaagacttggatcaactgaggtccatcgtggaaaagtcagagctttgggtgtacaaagggcagggccccgatgagactatggatggtgcatctggagaaaatgaacataagaaaacggaggagggaaataacaagccacaaaagcatgaaagcaccagcagctacaactacagagtggtcaaagagattttgattcggcttagcaaactctgtgttcaagagagtgcctcagtgagaaagagcaggaagcagcaacagcgtctgctccggaacatgggcgcgcacgccgtggtgctggagctgctgcagattccctatgagaaggccgaagataccaagatgcaagagataatgaggttggctcatgaatttttgcagaatttctgcgcaggcaaccagcagaatcaagctttgctacataaacacataaacctgtttctcaacccagggatcctggaggcagtaaccatgcagcacatcttcatgaacaatttccagctttgcagtgagatcaacgagagagttgttcagcacttcgttcactgcatagagactcacggtcggaatgtccagtatataaagttcttacagacaattgtcaaggcagaagggaaatttattaaaaaatgccaagacatggttatggccgagctggtcaattcgggagaggatgtcctcgtgttctacaacgacagagcctctttccagactctgatccagatgatgcggtcagaacgggatcggatggatgagaacagccctctcatgtaccacatccacttggtcgagctcctggctgtgtgcacggagggtaagaatgtctacacagagatcaagtgcaactccctgctcccgctggatgacatcgttcgcgtggtgacccacgaggactgcatccctgaggttaaaattgcatacattaacttcctgaatcactgctatgtggatacagaggtggaaatgaaggagatttataccagcaatcacatgtggaaattgtttgagaatttccttgtagacatctgcagggcctgtaacaacactagtgacaggaaacatgcagactcgattttggagaagtatgtcaccgaaatcgtcatgagtattgttactactttcttcagctctcccttctcagaccagagtacgactttgcagactcgccagcctgtctttgtgcaactgctgcaaggcgtgttcagggtttaccactgcaactggttaatgccaagccaaaaagcctccgtggagagctgtattcgggtgctgtctgatgtagccaagagccgggccattgccattcccgtggacctggacagccaagtcaacaacctctttctcaagtcccacagcattgtgcagaaaacagccatgaactggcggctctcagcccgcaatgccgcacgcagggactctgttctggcagcttccagagactaccggaatatcattgagagattgcaggacatcgtctccgcgctggaggaccgtctcaggcccctggtgcaggcagagttatctgtgctcgtggatgttctccacagacccgagctgcttttcccagagaacacagacgccagaaggaaatgtgaaagtggcggtttcatttgcaagttaataaagcatacaaaacagctgctagaagaaaatgaagagaagctctgcattaaggtcctacagaccctgagggaaatgatgaccaaagatagaggctatggagaaaagggtgaggcgctcaggcaagttctggtcaaccgttactatggaaacgtcagaccttcgggacgaagagagagccttaccagctttggcaatggcccactgtcagcaggaggacccggcaagcccgggggaggagggggaggttccggatccagctctatgagcaggggtgagatgagtctggccgaggttcagtgtcaccttgacaaggagggggcttccaatctagttatcgacctcatcatgaacgcatccagtgaccgagtgttccatgaaagcattctcctggccattgcccttctggaaggaggcaacaccaccatccagcactcctttttctgtcgcttgacagaagataagaagtcagagaaattctttaaggtgttttatgaccggatgaaggtggcccagcaagaaatcaaagcaacagtgacagtgaacaccagtgacttgggaaataaaaagaaagacgatgaggtagacagggatgccccatcacggaaaaaagctaaagagcccacaacacagataacagaagaggtccgggatcagctcctggaggcctccgctgccaccaggaaagccttcaccactttcaggagggaggctgatcccgacgaccactaccagcctggagagggcacccaggccactgccgacaaggccaaggacgacctggagatgagcgcggtcatcaccatcatgcagcccatcctccgcttccttcagctcctgtgtgaaaaccacaaccgagacctgcagaacttcctccgttgccaaaataacaagaccaactacaatttggtatgtgagaccctgcagtttctggactgtatttgtggaagcacaactggaggccttggtcttctgggcttgtatataaatgaaaagaacgtagcgcttatcaaccaaaccctggaaagtctgaccgaatactgtcaaggaccttgccatgagaaccagaactgcatagccacccatgaatccaatggcattgacatcatcacagccctgatcctcaatgatatcaatcctttgggaaagaagaggatggaccttgtgttagaactgaagaacaatgcctcgaagttgctcctggccatcatggaaagcaggcacgacagtgaaaacgcagagaggatactttataacatgaggcccaaggaactggtggaagtgatcaagaaagcctacatgcaaggtgaagtggaatttgaggatggagaaaacggtgaggatggggcggcgtcccccaggaacgtggggcacaacatctacatattagcccatcagttggctcggcataacaaagaacttcagagcatgctgaaacctggtggccaagtggacggagatgaagccctggagttttatgccaagcacacggcgcagatagagattgtcagattagaccgaacaatggaacagatagtctttcccgtgcccagcatatgtgaattcctaaccaaggagtcaaaactacgaatttactatactacagagagagacgaacaaggcagcaaaatcaatgatttctttctgcggtctgaagacctcttcaatgaaatgaattggcagaagaaactgagagcccagcccgtgttgtactggtgtgcccgcaacatgtctttctggagcagcatttcgtttaacctggccgtcctgatgaacctgctggtggcgtttttctacccgtttaagggagtccgaggaggaaccctggagccccactggtcgggactcctgtggacagccatgctcatctctctggccatcgtcattgccctccccaagccccatggcatccgggccttaattgcctccacaattctacgactgatattttcagtcgggttacaacccacgttgtttcttctgggcgctttcaatgtatgcaataaaatcatctttctaatgagctttgtgggcaactgtgggacattcacaagaggctaccgagccatggttctggatgttgagttcctctatcatttgttgtatctggtgatctgtgccatggggctctttgtccatgaattcttctacagtctgctgctttttgatttagtgtacagagaagagactttgcttaatgtcattaaaagtgtcactcgcaatggacggtccatcatcctgacagcagttctggctctgatcctcgtttacctgttctcaatagtgggctatcttttcttcaaggatgactttatcttggaagtagataggctgcccaatgaaacagctgttccagaaaccggcgagagtttggcaagcgagttcctgttctccgatgtgtgtagggtggagagtggggagaactgctcctctcctgcacccagagaagagctggtccctgcagaagagacggaacaggataaagagcacacatgtgagacgctgctgatgtgcattgtcaccgtgctgagtcacgggctgcggagcgggggtggagtaggagatgtactcaggaaaccgtccaaagaggaacccctgtttgctgctagagttatttatgacctcttgttcttcttcatggtcatcatcattgttcttaacctgatttttggggttatcattgacacttttgctgacctgaggagtgagaagcagaagaaggaagagatcttgaagaccacgtgctttatctgtggcttggaaagagacaagtttgacaacaagactgtcacctttgaagagcacatcaaggaagaacacaacatgtggcactatctgtgcttcatcgtcctggtgaaagtaaaggactccaccgaatatactgggcctgagagttacgtggcagaaatgatcaaggaaagaaaccttgactggttccccaggatgagagccatgtcattggtcagcagtgattctgaaggagaacagaatgagctgagaaacctgcaggaga

SEQ ID NO: 744 - protein, 2695 aa, Homo sapiens
MSDKMSSFLHIGDICSLYAEGSTNGFISTLGLVDDRCVVQPETGDLNNPPKKFRDCLFKLCPMNRYSAQKQFWKAAKPGANSTTDAVLLNKLHHAADLEKKQNETENRKLLGTVIQYGNVIQLLHLKSNKYLTVNKRLPALLEKNAMRVTLDEAGNEGSWFYIQPFYKLRSIGDSVVIGDKVVLNPVNAGQPLHASSHQLVDNPGCNEVNSVNCNTSWKIVLFMKWSDNKDDILKGGDVVRLFHAEQEKFLTCDEHRKKQHVFLRTTGRQSATSATSSKALWEVEVVQHDPCRGGAGYWNSLFRFKHLATGHYLAAEVDPDQDASRSRLRNAQEKMVYSLVSVPEGNDISSIFELDPTTLRGGDSLVPRNSYVRLRHLCTNTWVHSTNIPIDKEEEKPVMLKIGTSPVKEDKEAFAIVPVSPAEVRDLDFANDASKVLGSIAGKLEKGTITQNERRSVTKLLEDLVYFVTGGTNSGQDVLEVVFSKPNRERQKLMREQNILKQIFKLLQAPFTDCGDGPMLRLEELGDQRHAPFRHICRLCYRVLRHSQQDYRKNQEYIAKQFGFMQKQIGYDVLAEDTITALLHNNRKLLEKHITAAEIDTFVSLVRKNREPRFLDYLSDLCVSMNKSIPVTQELICKAVLNPTNADILIETKLVLSRFEFEGVSSTGENALEAGEDEEEVWLFWRDSNKEIRSKSVRELAQDAKEGQKEDRDVLSYYRYQLNLFARMCLDRQYLAINEISGQLDVDLILRCMSDENLPYDLRASFCRLMLHMHVDRDPQEQVTPVKYARLWSEIPSEIAIDDYDSSGASKDEIKERFAQTMEFVEEYLRDVVCQRFPFSDKEKNKLTFEVVNLARNLIYFGFYNFSDLLRLTKILLAILDCVHVTTIFPISKMAKGEENKGSNVMRSIHGVGELMTQVVLRGGGFLPMTPMAAAPEGNVKQAEPEKEDIMVMDTKLKIIEILQFILNVRLDYRISCLLCIFKREFDESNSQTSETSSGNSSQEGPSNVPGALDFEHIEEQAEGIFGGSEENTPLDLDDHGGRTFLRVLLHLTMHDYPPLVSGALQLLFRHFSQRQEVLQAFKQVQLLVTSQDVDNYKQIKQDLDQLRSIVEKSELWVYKGQGPDETMDGASGENEHKKTEEGNNKPQKHESTSSYNYRVVKEILIRLSKLCVQESASVRKSRKQQQRLLRNMGAHAVVLELLQIPYEKAEDTKMQEIMRLAHEFLQNFCAGNQQNQALLHKHINLFLNPGILEAVTMQHIFMNNFQLCSEINERVVQHFVHCIETHGRNVQYIKFLQTIVKAEGKFIKKCQDMVMAELVNSGEDVLVFYNDRASFQTLIQMMRSERDRMDENSPLMYHIHLVELLAVCTEGKNVYTEIKCNSLLPLDDIVRVVTHEDCIPEVKIAYINFLNHCYVDTEVEMKEIYTSNHMWKLFENFLVDICRACNNTSDRKHADSILEKYVTEIVMSIVTTFFSSPFSDQSTTLQTRQPVFVQLLQGVFRVYHCNWLMPSQKASVESCIRVLSDVAKSRAIAIPVDLDSQVNNLFLKSHSIVQKTAMNWRLSARNAARRDSVLAASRDYRNIIERLQDIVSALEDRLRPLVQAELSVLVDVLHRPELLFPENTDARRKCESGGFICKLIKHTKQLLEENEEKLCIKVLQTLREMMTKDRGYGEKGEALRQVLVNRYYGNVRPSGRRESLTSFGNGPLSAGGPGKPGGGGGGSGSSSMSRGEMSLAEVQCHLDKEGASNLVIDLIMNASSDRVFHESILLAIALLEGGNTTIQHSFFCRLTEDKKSEKFFKVFYDRMKVAQQEIKATVTVNTSDLGNKKKDDEVDRDAPSRKKAKEPTTQITEEVRDQLLEASAATRKAFTTFRREADPDDHYQPGEGTQATADKAKDDLEMSAVITIMQPILRFLQLLCENHNRDLQNFLRCQNNKTNYNLVCETLQFLDCICGSTTGGLGLLGLYINEKNVALINQTLESLTEYCQGPCHENQNCIATHESNGIDIITALILNDINPLGKKRMDLVLELKNNASKLLLAIMESRHDSENAERILYNMRPKELVEVIKKAYMQGEVEFEDGENGEDGAASPRNVGHNIYILAHQLARHNKELQSMLKPGGQVDGDEALEFYAKHTAQIEIVRLDRTMEQIVFPVPSICEFLTKESKLRIYYTTERDEQGSKINDFFLRSEDLFNEMNWQKKLRAQPVLYWCARNMSFWSSISFNLAVLMNLLVAFFYPFKGVRGGTLEPHWSGLLWTAMLISLAIVIALPKPHGIRALIASTILRLIFSVGLQPTLFLLGAFNVCNKIIFLMSFVGNCGTFTRGYRAMVLDVEFLYHLLYLVICAMGLFVHEFFYSLLLFDLVYREETLLNVIKSVTRNGRSIILTAVLALILVYLFSIVGYLFFKDDFILEVDRLPNETAVPETGESLASEFLFSDVCRVESGENCSSPAPREELVPAEETEQDKEHTCETLLMCIVTVLSHGLRSGGGVGDVLRKPSKEEPLFAARVIYDLLFFFMVIIIVLNLIFGVIIDTFADLRSEKQKKEEILKTTCFICGLERDKFDNKTVTFEEHIKEEHNMWHYLCFIVLVKVKDSTEYTGPESYVAEMIKERNLDWFPRMRAMSLVSSDSEGEQNELRNLQEKLESTMKLVTNLSGQLSELKDQMTEQRKQKQRIGLLGHPPHMNVNPQQPA

SEQ ID NO: 745 - DNA, 3008 bp, Homo sapiens
gggtgccgacggcggcgccgggacgggcgtggggggtagggcgagtcatatgatccgctcggcttcctgggtctggctgctgccgcccgccggtgtccgcccgtgtcgcgccggggcaccaaggagccgttggagggtccgggcggaggcccgctcgtgtggaagtcgtcgacgccgccgctcgtccgtcctcccgtccgttctcgctcccggccgccatcatgctggcgctcatctcccgcctgctggactggttccgttcgctcttctggaaggaagagatggagctgacgctcgtggggctgcagtactcgggcaagaccaccttcgtcaatgtcatcgcgtcaggtcaattcagtgaagatatgatacccacagtgggcttcaacatgaggaaggtaactaaaggtaacgtcacaataaagatctgggacataggaggacaaccccgatttcgaagcatgtgggagcggtattgcagaggagtcaatgctattgtttacatgatagatgctgcagatcgtgaaaagatagaagcttcccgaaatgagctacataatcttctagataaaccacagttacaaggaattccagtgctagtgcttggaaacaagagagatcttcctaatgccttggatgagaaacagctaattgaaaaaatgaatctgtctgctattcaggatagagaaatttgctgctattcaatttcttgcaaagaaaaggataatatagatatcacacttcagtggcttattcagcattcaaaatctagaagaagctgaagcatctcctgaagtcttccagtccttcttggctataatcctagaattattgtccgttcctctgaagtaattcccagaatacggtccttcctaaaccccagaaattgcctttttcagagtttatttctcatgtgcactgctgaagatgaatatccctaatccttcataaagaatcagctagagttgtcatgataaagtcagcacacacaaaaaggcttcttacacatacctgtcttaaaccatgtgtagagctttaaaaacagaaaaaaaaccccatatacttatgaccatcttaaatcaagaaaattgcatatttccattctggtctttctgggccagatttttatattggttttcagtaaatgtctatctataatatttcattatagagtccagtagcttaatactgacactgacttgatacagcatgaagtttctagtgccacacacagtatttagaaaacctttaggcgtgaatgactcatgtgggatatatgtaaacataatgtttattttatctcacaaatgcatgtgaaatgtataattacatcttaggaatccaaaatggtctgcagagagtgagcggaggcaccagatcaatgttggttctttgcactggtgagattctgcctgatgaatattaaagatatcctgctttctgagaactctatcaccagatggcagttgggatatgggaggaactaaagcatcctgttttgtatctgtccagatcattatttctgtctcttgttttttcttcctggttcaggatacttttttaaggggttgagaattgaagattttccaaaagcgttcatgaatttagagcattccacccaatataataaaacctgttaagaatgtcagtctttgttcaaacatctgtttgttctatctccagtcattaaatcagtgctgctgcatgacactcttaactcctgactttttatatccagtcataaagttgactttcagcacaaaagatacttataaacaaataaaaaatttttatttttctctcttactgatgtaagctttggcactcttttgactggtgccattagacatcttgattattgtgacaactctagacctgcctgctttatctaatgtaatcatgctcaatgtctacaggttgtttaataatcagtcacacagagaactgaggaactgatgctgtttgtttgcttctatgatacagagatgtctaaaaacttcaaatggacatgttttgtagtttagcgacttccgtatacataaagggacatattaatactggttcatttgtaaattattattcatatagaccactgtagtagataaaactctatggtacacctgcttatgtgttgcctcacactgtgtgtgattttgtttcttttgttaagcagcacttatgtagactgcatttccaaatgtgttgagcactcagagtgtagtcaacagtaagttcttttaatgaatatcagttttaatttatagactgccatggccttaaaaatattctgtacaatatactgcactgtgttgcacagacactacttgcttttctccattcatatttttatgagtagaatctgggcttttaaatttctcttcttattctttgaagcatgttgcatactaccctggtgggatggatggttctgtaaatgaagggatatttaaacttgctactgttgttcaacaccattaatggtcagtgtgaaccattacaaagaatgtggcaacttgcttgtgcctaaaaggaggaattggaactagaatgtgtgactctgtggggactgcataggtttgttaattgacctatagctaaaccttaatgtgtttgtgtgtctatacattgctttccgcatttcaagacatccagacgctattaccaacattttcctgtgcattaacctctgcatgtgaaaacttttaacagttactgaactatgtaaatatgtgaatttttttatttaggtggatgcattttttgtctgtttactgctcttctcagctttattcaataaacttgcattttaagggttgtattggcaattttaacttaaaatgtgcatcatgatggaaggtgcagacttttttggaagtttccgagaggagggtctatagaccatttgtcagaaatcagatcagccctcaaagaatggggtctgtgggctagttaaaatagaaataaacttttaaaatatccacagaaaaaaaaaaaaaaaaaaaaaaaaa

SEQ ID NO: 746 - protein, 186 aa, Homo sapiens
MLALISRLLDWFRSLFWKEEMELTLVGLQYSGKTTFVNVIASGQFSEDMIPTVGFNMRKVTKGNVTIKIWDIGGQPRFRSMWERYCRGVNAIVYMIDAADREKIEASRNELHNLLDKPQLQGIPVLVLGNKRDLPNALDEKQLIEKMNLSAIQDREICCYSISCKEKDNIDITLQWLIQHSKSRRS

SEQ ID NO: 747 - DNA, 6072 bp, Homo sapiens
ggtggtcggcggggaggcccccgcgctttaaaataatgcccgcggcgcccgcgcgaccatgcaatggcgagcgctcgtcctggggctggtgctcctccggcttggcctccatggagtattgtggctcgtcttcgggctggggcccagcatgggcttctaccagcgctttccgctcagcttcggcttccagcgtctgaggagccccgacggccccgcgtcgcccacctcggggcccgtgggccggcctgggggggtatccgggccgtcgtggctgcagccgccggggaccggggcagcgcagagcccgcgcaaggctccgcggcgtcctgggccggggatgtgcggcccagccaactggggctacgtgctgggcggccggggccgcggcccggacgagtacgagaagcgctacagcggcgccttccctccgcagctgcgtgcccagatgcgcgacctggcacggggcatgttcgtctttggctacgacaactacatggctcacgccttcccccaggacgagctcaaccccatccactgccgcggccgtgggcccgaccgcggggacccttcaaatctgaacatcaatgatgtactagggaactactcattgactcttgttgatgcattggatacacttgcaataatgggaaattcatccgagttccagaaagcagtcaagttagtgatcaacacagtttcatttgacaaagattccaccgtccaagtctttgaggccacgataagggtcctgggaagcctcctttctgctcacagaataataactgactccaagcagccctttggtgacatgacaattaaggactatgataatgagttgttatacatggcccatgacctggcggtgcggctcctccctgcttttgaaaacaccaagacagggattccatatcctcgggtgaatctaaagacaggagttcctcctgacaccaataatgagacatgcacagcgggagccggttccctcctggtggaatttgggattctgagtcgactcctgggggactccacatttgagtgggtggccagacgagcagtgaaagccctttggaacctccggagcaatgatacaggattactaggcaatgtcgtgaacattcagacgggccactgggttggaaagcagagtggcctgggtgccgggctggactccttctatgaatacctcttgaaatcttacattctctttggagaaaaagaagacctagaaatgtttaatgctgcatatcagagtattcagaactacttaagaagagggcgggaagcctgcaatgaaggagaaggagaccctccactctatgtcaacgtgaacatgttcagtgggcagctgatgaacacctggattgactctctgcaggcctttttccctggactgcaggtgctgataggagatgtggaagatgccatctgccttcatgccttctactatgccatatggaaacgatatggtgccctccctgagagatataactggcagctgcaggcccctgacgttctcttctacccactgagaccagagttagtggaatccacatatctcctctaccaggcaaccaagaatcccttctacctccatgtaggaatggatattctgcagagtctggaaaagtacacaaaagtcaagtgtgggtacgccacgctgcatcacgtcattgacaagtccacagaagaccggatggagagcttctttctcagtgagacctgtaaatatttgtatctgctgtttgatgaagacaatccagtacacaagtctggaaccagatacatgttcacaacagagggacacattgtatctgtggatgagcatcttcgggaattgccatggaaggaattcttctctgaagagggagggcaggaccaagggggaaagtctgtgcacaggccgaaacctcatgagttaaaagtcatcaactccagctccaactgcaatcgtgtacctgatgagaggaggtactccctgcccttaaagagcatctacatgcgacagattgaccagatggttggtttgatttgatctgctctctgtgaggcctcatcttgaaccagaccttaacgaccaaacccagaccatgccaaagtccagtctgaaatgaaaggggacagaagtcttgctgtccatggtggtgtaggaatttctgtgcaacacctcaccacgtctggttaatccttgcacacttcagtgtttctctcctgttcaataaaatgccctgttaaggatataatttgaagtgagaagatacatggaaattgccctcttatgacatgttgatgttataagcacaatagatggggcatctttggattgatgttcacagctttatacttcagaacctaagtctcttcactttgctggcacctgctatactggagtattgctatgtctttaaaaaatttttttttattatattttatttttttgagacagggtcttgatatttttttgggacagggttacctgggctcaagtgatccttctgcctcagcctcccgagtagctgggattacaggtgagcaccactgtacctggctagctacttctttgttagaggattgagaatgaaatttctgcaaaagggcccatggttcatttggtatccctatttaattgcattgaaaatgtcatcctttctgttgttagataattggggtcttcccctgatatccaaccgtgattttggatcacatgggagaaaaagtcatccagtttttcatgtttgcctcaagtaatctttacagtgttacaaattatttgcttaagaagaatggtcttaaccagaattcttaacagatagtctcttaggttattatgttatggtctaagaggttaactgacatcttttggatggtattttgcattttgaatatgaacttacctgaggaactcccatagttccagaatcaggtgccttttagggagagaacaatacctaagattgtctgagcttccatctttctcatatttcctaagcaaggattctcacttatgaccatatttgggttagagttctgttttgtttctgttttctgtgtctagtgccaattagctaaatcagggagaaagaaatgatcacatgacttttagcatccttgagccatttctctgtgtaatacaggctttagattagtgccttatattggttttggtttggggcactggatgtcgcagctactgctatggtttcaggaggcctgtttagccacatggtgagaccgtggtgaaagggggatggaaattgcttggccagtctttgcctttcatcctgtaaaagtaagcatgtagaaggaggaagttgtgctaaaatgcctttgtttttttgttattattttcttagccagaacatctctctttgaactcacactgatacacacctgctactcttacacagtgcagcagggctgactcttagtctggcttccatgaagcgtcatgggtggaaacgcattctagtaaaaaaggtaggaaatccctaaaacttccagcctcacatagcacggttctcacctgtcactgttttcccacctctaaggatttcatgtacatcttttcaaagctagaaataagcactgtctaagtttatgttgcatttttagtcaaaagggagaaatcttattccttcttgaaaattttaagtgttatggttttatatagttcagttctttgagatttttgaaaagagtattttcagtaataaacgtgccatctctatctcttaaacatttattacaacaattgttttaaaatagaaaaaataaaatgcttctattttaccttttttcatttcagaagcattattctgtttattaacagtgtcccatctactgaatagaaaactttgagaataatatatatatatattttaaatgttttcactgactcattgaaaatgttaattacacacacatgcatgcatgcacacacgagcatacttgtacctttgtctctgggcaaacaggtgggactgttagtgacccatttgggaaaatagagcatctcagagaaggaggtgagttcttcctgcctgtgatttctcttggcgctcccctcctctcccgctctggcttctgtggcggcagtggtgggtaagcactccagtgttctcttaatgaggcactttgcctgtcactcgagcaagcctgggtgttccttcctcctcatgctcctggaatagggaatagggatctcatgcttgcaaactacacaatgctgcaggtgcttcccaggggccacaggctgtcaggaaacgtgttttatgttaagtcacaaacccacttgacttctgggtactggaattaataccagtgggtgagactgagggtgagtgagttagtacatattaatcctggttgttgagcttccagactaccccgtccaaagtttgatgctatgtagtcagtggtttgtggggctggatgccagaaggttctttgagccagtttcaaaggttacttgtttttttttttttttttttaagtcagaatgttaacagctgtgatatatcctgcagggcttttgcagtttcttctgttctgtgttctgaaatcctgggtagagaatggctgaggaggagattaccagagaagttgctttgctcagtgctttgccccaggattgcctcaaatctgagtggacttcatcctttgcggcggctctgagcctggcccatcttcctattcccacgtgtagctagtgtctagtgtcagctttgctcaatgtggtggaaacattttgcagaactgttgtagaaagctgccttatagttggcttgacaaagcataattctctcataacaaactttcaaatcattacagtagcttagctactttagttgatgtgaccgaggaatcccttctagaatcataggtggcaagggagggtttgctagctctccatttgcactggccattgtgaaaaaccagcttctgtattcaaatctttccttcatttttttaaattttttttttggcagcgcttgtgctggaacttactcattgtaactgaatcctcagggcttttcttgttttagatcatggactgtgcacgtgacacttaaataattttctatgtatttaaagaaaaatgcaccaggatggtgtctgtgcacgtgactattagaggagcgtctgtagaagtacctggtttggtcagtgcagttgtgcaatctgagggccttgtttcctcctcccctttccccttctccccaccaaaggaaaatatccctcttaatgatttcgtagttcagtttactgaatgattaccacctgtaattcctctttggattgtgtagactcaacatgagacattcctttctgctttctggagggcaccaggggcctttctctttgataaattttttttgtctgttgacaaaaacaaaaatcttttttcaaatgtagtgctggtgaaaaggtagggctgagtgattaccttagccacagggtggctgagcaggaactttagaagaaaatcctgagctttcctgtccattcccagcatccagctcctattctagtgcctcttccctgcagggcagggaccccttgggaaatcgaggaggtgggacgggctgggccctgtgtcccaggtttcacagggctcagggttatgctcccgcttgaatctggacgtgaatctggtaaaaatatcaagtacctgtggaactccctgattctataccctcttccttctttctgcaaggcagaggaataatatttttaaaggttattttgttttagttttaaatagcaaaacacaagctgcatttttatttattttgcataagaaaggtaaatctttttacaaaaaaaagtatagagttggaaactctgggaaaacttacggaaatacacaaatgcttctctgtaatgtgcaatatgctttgcaactgtagatgatattttatgtttaatctgtaaataagaaatgtatttaaattaaaagggatctttttgtaaaaggaccaaatgttcttttataaatgtaataaggaatatcttgctctttaaaatttattaggatttttatgagtaatttttattaaaagatttctttttttg

SEQ ID NO: 748 - protein, 657 aa, Homo sapiens
MQWRALVLGLVLLRLGLHGVLWLVFGLGPSMGFYQRFPLSFGFQRLRSPDGPASPTSGPVGRPGGVSGPSWLQPPGTGAAQSPRKAPRRPGPGMCGPANWGYVLGGRGRGPDEYEKRYSGAFPPQLRAQMRDLARGMFVFGYDNYMAHAFPQDELNPIHCRGRGPDRGDPSNLNINDVLGNYSLTLVDALDTLAIMGNSSEFQKAVKLVINTVSFDKDSTVQVFEATIRVLGSLLSAHRIITDSKQPFGDMTIKDYDNELLYMAHDLAVRLLPAFENTKTGIPYPRVNLKTGVPPDTNNETCTAGAGSLLVEFGILSRLLGDSTFEWVARRAVKALWNLRSNDTGLLGNVVNIQTGHWVGKQSGLGAGLDSFYEYLLKSYILFGEKEDLEMFNAAYQSIQNYLRRGREACNEGEGDPPLYVNVNMFSGQLMNTWIDSLQAFFPGLQVLIGDVEDAICLHAFYYAIWKRYGALPERYNWQLQAPDVLFYPLRPELVESTYLLYQATKNPFYLHVGMDILQSLEKYTKVKCGYATLHHVIDKSTEDRMESFFLSETCKYLYLLFDEDNPVHKSGTRYMFTTEGHIVSVDEHLRELPWKEFFSEEGGQDQGGKSVHRPKPHELKVINSSSNCNRVPDERRYSLPLKSIYMRQIDQMVGLI

SEQ ID NO: 749 - DNA, 1270 bp, Homo sapiens
ctctgcctgtgcgaccgccgcccacccgagcctatctgggctgcgtcttctcgccgctgctcttcgtggcccaacgccccaatccttgcgtgtgcttgcagtcccaccccacactcagccttgtgtccctcgatccagtctccgacttccatttcccaccctaaaccgcctacccggtgtctgttccccgcccggttgtcctcgccctgctgcgctgagtgtcccctgttagcctcgaccccatggcgctgcagacgctgcagagctcgtgggtgaccttccgcaagatcctgtctcacttccccgaggagctgagtctggctttcgtctacggctccggggtgtaccgccaggcagggccgagttcagaccagaagaatgctatgctggactttgtgttcacagtagatgaccctgtcgcatggcattcaaagaacctgaagaaaaattggagtcactactctttcctaaaagttttagggcccaagattatcacgtccatccagaataactatggcgctggagtttactacaattcattgatcatgtgtaatggtaggcttatcaaatatggagttattagcactaacgttctgattgaagatctcctcaactggaataacttatacattgctggacgactccaaaaaccggtgaaaattatctcagtgaacgaggatgtcactcttagatcagccctcgatagaaatctgaagagtgctgtgaccgctgctttcctcatgctccccgaaagcttttctgaagaagacctcttcatagagattgccggtctctcctattcaggtgactttcggatggtggttggagaagataaaacaaaagtgttgaatattgtgaagcccaatatagcccactttcgagagctctatggcagcatactacaggaaaatcctcaagtggtgtataaaagccagcaaggctggctggagatagataaaagcccagaaggacagttcactcagctgatgacattgcccaaaaccttacagcaacagataaatcatattatggaccctcctggaaaaaacagagatgtggaagaaactttattccaagtggctcatgatcccgactgtggagatgtggtgcgactaggcctgaagaagtcagtgatttatagttcactaaaactgcacaaaatgtggaaagggtggctgaggaaaacatcctgattttgcttgcttttatatatgttatgtgtagatgaataaagtgtttgatcctttttgacaaaaaaaaaaaaaaaaaa

SEQ ID NO: 750 - protein, 316 aa, Homo sapiens
MALQTLQSSWVTFRKILSHFPEELSLAFVYGSGVYRQAGPSSDQKNAMLDFVFTVDDPVAWHSKNLKKNWSHYSFLKVLGPKIITSIQNNYGAGVYYNSLIMCNGRLIKYGVISTNVLIEDLLNWNNLYIAGRLQKPVKIISVNEDVTLRSALDRNLKSAVTAAFLMLPESFSEEDLFIEIAGLSYSGDFRMVVGEDKTKVLNIVKPNIAHFRELYGSILQENPQVVYKSQQGWLEIDKSPEGQFTQLMTLPKTLQQQINHIMDPPGKNRDVEETLFQVAHDPDCGDVVRLGLKKSVIYSSLKLHKMWKGWLRKTS

SEQ ID NO: 751 - DNA, 3899 bp, Homo sapiens
tccgccgctgctgtctgcggggtctggcgccggggtctgagtctctgctggctaagccgccgcctcagccgcctcagtcgcctcaatctcgccttccgccctcgctctccctccgcgccaccagaccccgtagccccgcgcgcccccagccctttaagccagatgatgaacttcctgcggcgccggctgtcggacagcagcttcatcgccaacctgcccaacggctacatgaccgacctgcagcggcccgagccccagcagccgccgccgccgccgccccccggtccgggcgccgcctcggcctcggcggcgcccccgaccgcctcgccgggcccggagcggaggccgccgcccgcctcggcgcccgcgccgcagcccgcgccgacgccgtcggtgggcagcagcttcttcagctcgctgtcccaagccgtgaagcagacggccgcctcggctggcctggtggacgcgcccgctcccgcgcccgcagccgccaggaaggccaaggtgctgctggtggtcgacgagccgcacgccgactgggccaagtgctttcggggcaaaaaagtccttggagattatgatatcaaggtggaacaggcagaattttcagagctcaacctggtggcccatgcagatggcacctatgctgtggatatgcaggttctccggaatggcacaaaggttgtccggtccttccggccagacttcgtgctcatccggcagcatgcatttggcatggcggagaatgaggacttccgccacctgatcattggtatgcagtatgcaggcctccccagcatcaactcactggaatccatatacaacttctgtgacaagccatgggtgtttgcccagctggtcgctatctataagacactgggaggagaaaagttccctctcattgaacagacatactaccccaaccacaaagagatgctgacactgcccacgttccctgtggtggtgaagattggccacgctcactcaggcatgggcaaggtcaaagtggaaaaccactacgacttccaggacattgccagcgtggtggctctcacccagacctatgccactgcagagcctttcattgactccaagtatgacatccgggtccagaagattggcaacaactacaaggcttacatgaggacatcgatctcagggaactggaagacgaacactggctctgcgatgctggagcagattgccatgtcagacaggtacaaactgtgggtggacacctgctctgagatgtttggcggcctggacatctgtgctgtcaaagctgtacatggcaaagatgggaaagactacatttttgaggtcatggactgtagcatgccactgattggggaacatcaggtggaggacaggcaactcatcaccgaactagtcatcagcaagatgaaccagctgctgtccaggactcctgccctgtctcctcagagacccctaacaacccagcagccacagagcggaacacttaaggatccggactcaagcaagaccccacctcagcggccaccccctcaaggttgtttacagtatattctcgactgtaatggcattgcagtagggccaaaacaagtccaagcttcttaaaatgattggtggttaatttttcaaagcagaaattttaagccaaaaacaaacgaaaggaaagcggggaggggaaaacagaccctcccactggtgccgttgctgcgttctttcaatgctgactggactgtgtttttcctatgcagtgtcagctcctctgtctggttgtttacctgttcctgttcgtgcttgtaatgctcacttatgttttctctgtataacttgtgattccagggctgtttgtcaacagtatacaaaagaattgtgcctctcccaagtccagtgtgactttatcttctgggtggtttgatagtgtttttaaaagtaatatataatgtggggtgaaatgggagtaggggggtggacaggggagaaacgaaaaccacaaaaagaaaacccaactcctctcctccccccaagctcagttaaatcccccacctccaactttccctccaccagtgtgcttgggatcttcaatgaactgtgcttttcgctttctttctgcatgactattgtaactagatagaacattaagagattttcaagatcaaacttccatagcttcatccactgaatttgaaggcatccacctttttctccatttgctaaaatttggtgcagtttgagtttatgtgaataggctggctgtgcctgtagagctcttgtgtttttagtgatgacatgaaatacaaagaacaagctatttccaggaatgtgttctgtattttacatcccagtgtaccctttattttattattaactaattaactatgagatttttaaaaaatggggccgctgatgtgcaatatcaaagtgaacttgtgagtattttgtgtgtgttgatctcagttgtttcttcattgttgctgtttctggatccagccatgtgtgcgcttgtgtggacctgaggctgctttctgttcccaaagcttgacctgtgtacagagataattccttggcaatgttggacatagaatgcagggagctactgaaggtctgtcagggatttgtccattctgctcttggcctctcctgaggcctcataatgggagaccaaatcaaaaatgtcccatgtcacttgagtgggtacactgcctacagaaccttgaggttgactcctgcttcagttctcagctgtttaccacagccctccagggtccaaagattgaggagctttctctttcctgggaggaactgtctcagatttagcttgtgtgtgttttggacagaggctccacagcggtggctcttgaggaatcctcaccagtttgttctcttccctctgacaagcagcacctgagcagatgctgaggcagttcattaaaccaggcctcagcttcagtgcctcatcttgccatctcccggccaggctgggaacgggcaccaagcagccgcctctaacaaacaccatggtccgtggaagttcatgccagcagcttgcctttgagaagaaatgctgctggctctatttttacattcccttccacctctatactgtcatgtcaccgttctgaactcccagatctgagaaggaactagtgttggtggtatgtaacaagagttacgtatccaggggcttgtgccttggtttctcctttgattgctggtaaattctgaggccacagagaaatgcattgagtgtgaatgttgtcatctgtaatccctccctcagctgataatggtagttgatctgttgtaaatatatacatatatgcatatttgcacttccagatgggttgcataagaatcaggtccttaaatacctcccaatctgatgaaacgatagaataaagtaacatttcccagaatggaggaatacattattttatcgtatatttttgtccaagcgataagctgacggtggtattgcttctctgcatgttatcagtgtgtacatctggtgcttttcatgtgtcatttgtgagccacaaatgcaaagttgccatttgaattcagtcaggctacagggtggtgtcagtcaaggtctttcaggtgggggagaaattggttagggctcccactgccaaatgcaagcagatagcataacctgactgttatgtgccctcaggcagcatgcttagggacaactctgtggcctgggggacatctgtgtcacagtataggattgccattcaggtgttttgtacctatttctttcctgacgttgtcccctttttttgtactgatccaactgggagaacctcagccaatgctggaagtatgattgaagtacctctcttttgtgactcttgtacagcttaatgtgcaataaaggaaaagttatatctgaaaaaaaaaaaaaa

SEQ ID NO: 752 - protein, 478 aa, Homo sapiens
MMNFLRRRLSDSSFIANLPNGYMTDLQRPEPQQPPPPPPPGPGAASASAAPPTASPGPERRPPPASAPAPQPAPTPSVGSSFFSSLSQAVKQTAASAGLVDAPAPAPAAARKAKVLLVVDEPHADWAKCFRGKKVLGDYDIKVEQAEFSELNLVAHADGTYAVDMQVLRNGTKVVRSFRPDFVLIRQHAFGMAENEDFRHLIIGMQYAGLPSINSLESIYNFCDKPWVFAQLVAIYKTLGGEKFPLIEQTYYPNHKEMLTLPTFPVVVKIGHAHSGMGKVKVENHYDFQDIASVVALTQTYATAEPFIDSKYDIRVQKIGNNYKAYMRTSISGNWKTNTGSAMLEQIAMSDRYKLWVDTCSEMFGGLDICAVKAVHGKDGKDYIFEVMDCSMPLIGEHQVEDRQLITELVISKMNQLLSRTPALSPQRPLTTQQPQSGTLKDPDSSKTPPQRPPPQGCLQYILDCNGIAVGPKQVQAS

SEQ ID NO: 753 - DNA, 2694 bp, Homo sapiens
tccgccgctgctgtctgcggggtctggcgccggggtctgagtctctgctggctaagccgccgcctcagccgcctcagtcgcctcaatctcgccttccgccctcgctctccctccgcgccaccagaccccgtagccccgcgcgcccccagccctttaagccagatgatgaacttcctgcggcgccggctgtcggacagcagcttcatcgccaacctgcccaacggctacatgaccgacctgcagcggcccgagccccagcagccgccgccgccgccgccccccggtccgggcgccgcctcggcctcggcggcgcccccgaccgcctcgccgggcccggagcggaggccgccgcccgcctcggcgcccgcgccgcagcccgcgccgacgccgtcggtgggcagcagcttcttcagctcgctgtcccaagccgtgaagcagacggccgcctcggctggcctggtggacgcgcccgctcccgcgcccgcagccgccaggaaggccaaggtgctgctggtggtcgacgagccgcacgccgactgggccaagtgctttcggggcaaaaaagtccttggagattatgatatcaaggtggaacaggcagaattttcagagctcaacctggtggcccatgcagatggcacctatgctgtggatatgcaggttctccggaatggcacaaaggttgtccggtccttccggccagacttcgtgctcatccggcagcatgcatttggcatggcggagaatgaggacttccgccacctgatcattggtatgcagtatgcaggcctccccagcatcaactcactggaatccatatacaacttctgtgacaagccatgggtgtttgcccagctggtcgctatctataagacactgggaggagaaaagttccctctcattgaacagacatactaccccaaccacaaagagatgctgacactgcccacgttccctgtggtggtgaagattggccacgctcactcaggcatgggcaaggtcaaagtggaaaaccactacgacttccaggacattgccagcgtggtggctctcacccagacctatgccactgcagagcctttcattgactccaagtatgacatccgggtccagaagattggcaacaactacaaggcttacatgaggacatcgatctcagggaactggaagacgaacactggctctgcgatgctggagcagattgccatgtcagacaggtacaaactgtgggtggacacctgctctgagatgtttggcggcctggacatctgtgctgtcaaagctgtacatggcaaagatgggaaagactacatttttgaggtcatggactgtagcatgccactgattggggaacatcaggtggaggacaggcaactcatcaccgaactagtcatcagcaagatgaaccagctgctgtccaggactcctgccctgtctcctcagagacccctaacaacccagcagccacagagcggaacacttaaggatccggactcaagcaagaccccacctcagcggccaccccctcaagggggccctgggcaaccccaaggaatgcagcccccaggcaaggtgctgcctccacgccggctcccccctggaccatcactgccaccttcctcctcttcctcctcttcttcctcctcctcggctcctcagcggccgggcggccccaccacccacggagatgcaccctccagcagcagctccctggcagaggcccagccacccctggctgctccaccacagaagccccagcctcacccacagctcaacaagtcgcagtccctgacaaatgccttcagcttctctgagtcctccttcttccggtcttcagccaatgaggatgaagccaaagcagagaccatccggagcttgaggaagtcctttgccagcctcttttcagattagctcttcagacacacggggcacccagcccaaccgggaaaggcatctaagacattcaccaacaacagtcagccagcttggtggttatgtcccatgaccttgacgtgtgtggtcccttcctctgctctgttgtactaagtgatgttgtgcagcccagaaaggaccatttgacagtctcagggcaggtgcctacccagcaaggggtacctggcatcagagaggaaagagctgcttccctgtagtcatgagagcttccttctgaagtcatcgttcgctgtgagtttagtggccttattgtgacagtgccatcatgtcttattcttccctgtgaaaccaggattaatcgtggactcctggcagcttaacctagctcagttgcagtgctaagcatgccccgcccccattcagtgatacctgtttgggaagtatatacttccccaaaagtactcttggccctaagttttaggaactttccccgacctggatcccttgtcatacctgtgttactgtttaaagcacacccacccaacttacaagatcttaggctgctgtggtggtgaagcaccttgagtctgctgatattcgggagaacaaggatctgcagtttccccttttctcccctctgaagagtggttcttatgtgcaatctgcagtaaccttgaactccagagctgcactatagaggagaatgcatgccactatgacagcagtatgccaagctttgtgttcatctcctaataaacgttaagacctttggtgtaataaaaaaaaaaaaaaaaaaaaaaa

SEQ ID NO: 754 - protein, 582 aa, Homo sapiens
MMNFLRRRLSDSSFIANLPNGYMTDLQRPEPQQPPPPPPPGPGAASASAAPPTASPGPERRPPPASAPAPQPAPTPSVGSSFFSSLSQAVKQTAASAGLVDAPAPAPAAARKAKVLLVVDEPHADWAKCFRGKKVLGDYDIKVEQAEFSELNLVAHADGTYAVDMQVLRNGTKVVRSFRPDFVLIRQHAFGMAENEDFRHLIIGMQYAGLPSINSLESIYNFCDKPWVFAQLVAIYKTLGGEKFPLIEQTYYPNHKEMLTLPTFPVVVKIGHAHSGMGKVKVENHYDFQDIASVVALTQTYATAEPFIDSKYDIRVQKIGNNYKAYMRTSISGNWKTNTGSAMLEQIAMSDRYKLWVDTCSEMFGGLDICAVKAVHGKDGKDYIFEVMDCSMPLIGEHQVEDRQLITELVISKMNQLLSRTPALSPQRPLTTQQPQSGTLKDPDSSKTPPQRPPPQGGPGQPQGMQPPGKVLPPRRLPPGPSLPPSSSSSSSSSSSAPQRPGGPTTHGDAPSSSSSLAEAQPPLAAPPQKPQPHPQLNKSQSLTNAFSFSESSFFRSSANEDEAKAETIRSLRKSFASLFSD

SEQ ID NO: 755 - DNA, 2082 bp, Homo sapiens
agattgctgcctatgcaaagcaggtaagaagccgaactctgaggcctctcgccattgtctccgagtcggccagctggagcgttttcggggctgtaaagggagaatggcgcatgcgcatattcagggcggaaggcgcgctaagagcagatttgtggtctgcattatgtctggagccagaagtaagcttgctcttttcctctgcggctgttacgtggttgccctgggagcccacaccggggaggagagcgtggctgaccatcacgaggctgaatattatgtggctgccgtgtatgagcatccatccatcctgagtctgaaccctctggctctcatcagccgccaagaggccttggagctcatgaaccagaaccttgacatctatgaacagcaagtgatgactgcagcccaaaaggatgtacagattatagtgtttccagaagatggcattcatggattcaactttacaagaacatccatttatccatttttggacttcatgccgtctccccaggtggtcaggtggaacccatgcctggagcctcaccgcttcaatgacacagaggtgctccagcgcctgagttgtatggccatcaggggagatatgttcttggtggccaatcttgggacaaaggagccttgtcatagcagtgacccaaggtgcccaaaagatgggagataccagttcaacacaaatgtcgtgttcagcaataatggaacccttgttgaccgctaccgtaaacacaacctctactttgaggcagcattcgatgttcctcttaaagtggatctcatcacctttgataccccctttgctggcaggtttggcatcttcacatgctttgatatattgttctttgaccctgccatcagagtcctcagagactacaaggtgaagcatgttgtgtacccaactgcctggatgaaccagctcccactcttggcagcaattgagattcagaaagcttttgctgttgcctttggcatcaacgttctggcagctaatgtccaccacccagttctggggatgacaggaagtggcatacacacccctctggagtccttttggtaccatgacatggaaaatcccaaaagtcaccttataattgcccaggtggccaaaaatccagtgggtctcattggtgcagagaatgcaacaggtgaaacggacccatcccatagtaagtttttaaaaattttgtcaggcgatccgtactgtgagaaggatgctcaggaagtccactgtgatgaggccaccaagtggaacgtgaatgctcctcccacatttcactctgagatgatgtatgacaatttcaccctggtccctgtctggggaaaggaaggctatctccacgtctgttccaatggcctctgctgttatttactttacgagaggcccaccttatccaaagagctgtatgccctgggggtctttgatgggcttcacacagtacatggcacttactacatccaagtgtgtgccctggtcaggtgtgggggtcttggcttcgacacctgtggacaggaaatcacagaggccacggggatatttgagtttcacctgtggggcaacttcagtacttcctatatctttcctttgtttctgacctcagggatgaccctagaagtccctgaccagcttggctgggagaatgaccactatttcctgaggaaaagtaggctgtcctctgggctggtgacggcggctctctatgggcgcttgtatgagagggactaggaaaagtgtgtggtctgtggggcggactctggccatcatgttgacagccttgcacttccacaggctacaagccctgggaccatctttctgccttaagggcaggagcccacttctgtggcaccagattccaccctgggaactgtggaaaaagtaggagaggcagattccctcagtgtcttcctcttaaacctcaatcatcgagacattagggggtattttctgttcacatttatctttttcaagccacatcttcctctaacaaatctctcagtatgcgattggtctcaagctaaaacaaaaataaatgtcagtttatattttacacatccaaaaaaaaaaaaaaaaaa

SEQ ID NO: 756 - protein, 543 aa, Homo sapiens
MAHAHIQGGRRAKSRFVVCIMSGARSKLALFLCGCYVVALGAHTGEESVADHHEAEYYVAAVYEHPSILSLNPLALISRQEALELMNQNLDIYEQQVMTAAQKDVQIIVFPEDGIHGFNFTRTSIYPFLDFMPSPQVVRWNPCLEPHRFNDTEVLQRLSCMAIRGDMFLVANLGTKEPCHSSDPRCPKDGRYQFNTNVVFSNNGTLVDRYRKHNLYFEAAFDVPLKVDLITFDTPFAGRFGIFTCFDILFFDPAIRVLRDYKVKHVVYPTAWMNQLPLLAAIEIQKAFAVAFGINVLAANVHHPVLGMTGSGIHTPLESFWYHDMENPKSHLIIAQVAKNPVGLIGAENATGETDPSHSKFLKILSGDPYCEKDAQEVHCDEATKWNVNAPPTFHSEMMYDNFTLVPVWGKEGYLHVCSNGLCCYLLYERPTLSKELYALGVFDGLHTVHGTYYIQVCALVRCGGLGFDTCGQEITEATGIFEFHLWGNFSTSYIFPLFLTSGMTLEVPDQLGWENDHYFLRKSRLSSGLVTAALYGRLYERD

SEQ ID NO: 757 - DNA, 6339 bp, Homo sapiens
ggtcttctcagcgcagtcgggcgcggacccgctggtcccgggcagcggccaaggctactggggcgggagcagtgggccggtcggcggcggcagcggcagcggcggaggaggaggaggctggagtgggcgcggaggcgaccgccatggcgttcctcaaactccgtgaccagccatcactggtgcaagctatatttaacggagatcctgatgaagttcgagcactaatatttaagaaagaagatgttaactttcaggacaatgaaaagcgaaccccattgcacgccgcagcttaccttggagatgcagaaatcattgaacttcttattttatctggagctagagttaatgccaaagacagcaaatggttgacacctttacacagagcagttgcatcttgtagtgaggaagcagttcaggtacttttgaagcattctgcagatgttaatgctcgagacaaaaattggcaaacccctttacatatagctgctgctaataaagctgtaaagtgtgctgaagctttggtacctcttctgagtaatgtaaacgtatctgatcgagcagggaggactgcattacatcatgcagctttcagtggacatggtgagatggtcaaactactcttgtctagaggtgccaatattaatgcttttgacaagaaagataggcgtgctatccattgggcagcatatatgggtcacattgaagtagtgaaattgcttgtgtcgcatggagctgaagtgacatgcaaggataaaaagtcttatacacctcttcatgcagcagcctctagtggaatgatcagcgtagtcaagtaccttctagatcttggagttgatatgaatgaaccaaatgcctatggaaatacacctcttcatgtagcctgctataatggacaagatgttgtagtgaatgaacttatagactgtggtgctattgtgaatcaaaagaatgaaaaaggatttactcctttgcactttgctgctgcatcaacacatggagcattgtgtttagagcttctagttggcaatggggccgatgtcaatatgaagagtaaagatgggaaaaccccactacacatgactgctctccacggtagattctcccgatcacaaaccattatccagagtggagctgtaatcgactgtgaggataagaatggaaatacccctttgcacatagcagcacggtatggccatgagctgctgatcaacactcttattacaagtggtgctgacactgcaaagcgtggcatacatggaatgttccccctccatttggcagccttaagcggcttttcagattgctgcagaaaacttctttcttcaggatttgatatagataccccagatgattttggcaggacttgtctacatgcagctgcagctggagggaatttggagtgcctaaaccttctgctgaatactggtgcagactttaataaaaaggacaaatttgggagatctccactgcactacgctgctgccaactgcaattaccagtgcctgtttgctcttgtgggatcaggagcaagtgtgaatgaccttgatgaaagaggctgcacacccctgcactatgcagctacatcagacacagatggcaagtgcctggaatacttattaagaaacgatgcaaatccagggatccgtgataagcaaggatacaacgcagttcattattcagctgcttatggtcaccgtctatgtcttcagctgattgcaagtgaaactcctctagatgttttaatggaaacctcaggaacagacatgctgagtgattcagataatagagcaacaataagccctttacacttggctgcctatcatggtcaccatcaagcactggaagtgttggtacagtctttgttagatcttgatgtcagaaatagtagtggaagaacacccctagatcttgcagcttttaagggccatgttgaatgtgtggatgtactcattaatcagggagcctcaatcttagtaaaagattacattttgaagaggacacctattcatgcagcagcaacaaatggtcattcagaatgcttacggctattaataggaaatgcagaaccacagaatgcagtggatattcaagatggaaatggacagacgcctctgatgctatctgttctcaacgggcacacagactgtgtttactcattgctgaacaaaggagcaaatgtagatgccaaagataagtggggaaggacagcgttgcatagaggggcagttacaggccatgaagaatgtgtagatgcattacttcaacatggtgctaagtgcttacttcgggatagcaggggccggacgcctatacacctgtctgctgcctgtggacacattggtgttcttggagcccttttgcagtcagcagcatctatggatgcaaatccagccacagcagacaatcatggatatacggcacttcactgggcttgctacaatggtcacgagacatgtgtagaactgcttttagaacaggaagttttccagaaaacggaaggaaatgcttttagtccattgcattgtgccgtgataaatgacaacgaaggtgctgctgagatgttaattgatacattaggtgccagcattgtgaacgccacagattcaaaaggaagaactcctctccatgcagccgccttcacagaccatgtagagtgtttacagctgctgctcagccataatgctcaagtcaattctgtggactctacagggaaaacacctcttatgatggctgcagaaaatggacaaacaaatacagttgagatgctggttagcagtgctagtgcagaactgactttacaagataacagtaaaaatactgccctccatttggcttgtagcaagggtcatgaaactagtgccttgttaatactggaaaagataacagatagaaacctcatcaatgcaaccaacgcagccttgcaaacacctctgcatgttgctgcccgaaatgggctaacaatggtggttcaggaacttttgggaaaaggagcaagtgtgcttgcagtagatgaaaatggctataccccagctttggcctgtgctcccaataaggatgtggctgattgcctggctctcattttggccaccatgatgcctgtctcatcaagtagtcctttatcatccttaacattcaatgccattaaccgttataccaacacctcaaaaacagtcagctttgaagctttgcccatcatgaggaatgaacctagctcctattgcagtttcaataacattggaggggaacaggagtacttatacactgacgtggatgagctcaacgactccgattctgagacctactgagaggctgaggaggagggagttctcacagtaaagcttcaaactgtgctttttcaggaaaaaggcactttgatattcacgtagaaattcaacctaagaggaaagatcccacagtgagccaatgttaagagatctgatggcattaggaggaagagttttaaaggcaagttttacaaaaggaacttctagaatcttgaaatagacctgactgaggaaaacacattgatgtcagaattctttgtggaattgtttaatttggttttgcagtgccaggaacaattggggacactgtgcactctaacctgcttacacaagcaacactattgtaacagaagaaataaagacactagatttaaattttatcaataaaattacaactaaatttaaaggcaataaaagtttggtacagtaggcattatgtgcacagcaaattgcaaaaggaccaaataactgaaaggtttttttaataaaatgccattttgtggaaactggagtagattaaatgaaacattacctaaaccaaactgcaatatttctggaaatgaagctgagatttggttttaaatgttgagtttttttgggttttgttttttttttaagaaaacatctgaaagccttccaatgctgtattaaaccatgagagaaagcagatgtatttttacatttttttcttttacagaactatttcaaatttccaatttttatactattagaattaaaaaccagctgactgggtgcaatacgggtgaaaatacttgtgacatagacattgagatggattggggtcaggctgttgccctgttttgaatggtttgggtttaaaatagtactatttttgtttgaaaatgtaaagaatttcctagaaaaaaattcatgaaatcaaaaagtagactatttcaccctattgcagctaagtggtcctggggcatggagtcttcaacctctctatgaatggcacaccttagtcacttatgttacttttgtgtccccaccatgggttgggggattttttgtttattctgatctatgagttttgaaaaagtgaataatcaaaaggaaaataattccttgttgttcataaattaagcatcactaaagtctcttgaaaggcatttctgtattgggcaagatttaaaatactaaagccttaggtcctattcatatttaaagtagcatgtttgtaacctgttactatttggagagagaagcagttgcctgccaaattgaagactacctttcaaatagcaaaagagagagagaaggctgatatttcggcttttaaataaagatttgtgtggttctgcttttactgtaactgtcactttcccagtgaaaatgatttcatatacattgagggtcttacaggtatgggtaaagttctataaattgcaacaaaatgatacccaatttcattttatcctttttgtattgtgaaactggaaactttatgacattgtaaattatcagctggtttttctgaatataaagtgtgaaaacacagaacagtattttgatctatttgataattttgtgggttttttgaagaattaatgagcatgtacatagaaatagtgactgcttgaatactgtatttacttgcactctttcagtacatcaagattcctgtatattttagagtataataaaacacagatgtgagttgtatttaatgaataatgtatttgtatctgtgcatattatctacaaatctataaagtttctagggcattgactactagattttaagcattttttctaaaatatttacagaaattataaatctaatcccccatcttttctttataatataaagaagtcataatgaacccttcctaattattagtagtaggaaggtgaatatgcattttaatgacagtggactacattttctattgtaccttttgaaaaaaaaaaaaatcaagcagattctaaaagtatacatatgtgtgctttctctttccttttaggaattctcttctgaattccctgagggaattttctagaatctcagaattgaaagagacctgaggttcatccagtctctaacctcttaacaaatgcaggagtcccttctacaagggtgatctttccaccttgaacacttccaagtgactctacctcaccaagcagtccattcagttgttgagcagctctaactgttagaaaggtcttccttagatggagttgaagcctccctcccggtaacttctgtctttgggcctgggtctgtcctccaagagaaccctgagaatgttggaaggatgaatctcgcacattctgccatgtcttctcttttacaggctgtttgacttctctgctgaagtgatttccagaaggactcatttgacacactattagatttaccacatctaatgaaatccaaggtgtagctataaagtgacaagctgtttttaatttatcacatacaccagaacttctatcctgcatcacttatatgtaaatgatgctgttaccaaaaacattaaggtagttcttgcgaatgccaccccactaagaaaactatttcattacttttgtaatccatctgtgagagtctgccccccagcttaaccacttcctttggtctgcacccaatgaagggaaaccccaaagtactgtctcaaatggtatttgaactacgccagtattgttggaataagtacattaattacttgaatgaatgaacacagcaccgtagaaatttcctttatggttacaccttgtatgtctaaagcattcaggccctgttctgtagtgtttcttatcctcacacagagtagaaaagcctgtttgctttatttaacttatacataaaagatgacatctgaaatatctgatgtgtattataataccagcttctgctctagaactactttgggtgaaatggtggtaatagcaaatgacctcctttaacaagacactcatctcaaacaatgccatttagttcaggagatctctaagtgtagctgtaaattttggggttaatttggcttatattggaccttttaaaagaaataaagttttttaatgcaataaa

SEQ ID NO: 758 - protein, 1053 aa, Homo sapiens
MAFLKLRDQPSLVQAIFNGDPDEVRALIFKKEDVNFQDNEKRTPLHAAAYLGDAEIIELLILSGARVNAKDSKWLTPLHRAVASCSEEAVQVLLKHSADVNARDKNWQTPLHIAAANKAVKCAEALVPLLSNVNVSDRAGRTALHHAAFSGHGEMVKLLLSRGANINAFDKKDRRAIHWAAYMGHIEVVKLLVSHGAEVTCKDKKSYTPLHAAASSGMISVVKYLLDLGVDMNEPNAYGNTPLHVACYNGQDVVVNELIDCGAIVNQKNEKGFTPLHFAAASTHGALCLELLVGNGADVNMKSKDGKTPLHMTALHGRFSRSQTIIQSGAVIDCEDKNGNTPLHIAARYGHELLINTLITSGADTAKRGIHGMFPLHLAALSGFSDCCRKLLSSGFDIDTPDDFGRTCLHAAAAGGNLECLNLLLNTGADFNKKDKFGRSPLHYAAANCNYQCLFALVGSGASVNDLDERGCTPLHYAATSDTDGKCLEYLLRNDANPGIRDKQGYNAVHYSAAYGHRLCLQLIASETPLDVLMETSGTDMLSDSDNRATISPLHLAAYHGHHQALEVLVQSLLDLDVRNSSGRTPLDLAAFKGHVECVDVLINQGASILVKDYILKRTPIHAAATNGHSECLRLLIGNAEPQNAVDIQDGNGQTPLMLSVLNGHTDCVYSLLNKGANVDAKDKWGRTALHRGAVTGHEECVDALLQHGAKCLLRDSRGRTPIHLSAACGHIGVLGALLQSAASMDANPATADNHGYTALHWACYNGHETCVELLLEQEVFQKTEGNAFSPLHCAVINDNEGAAEMLIDTLGASIVNATDSKGRTPLHAAAFTDHVECLQLLLSHNAQVNSVDSTGKTPLMMAAENGQTNTVEMLVSSASAELTLQDNSKNTALHLACSKGHETSALLILEKITDRNLINATNAALQTPLHVAARNGLTMVVQELLGKGASVLAVDENGYTPALACAPNKDVADCLALILATMMPVSSSSPLSSLTFNAINRYTNTSKTVSFEALPIMRNEPSSYCSFNNIGGEQEYLYTDVDELNDSDSETY

SEQ ID NO: 759 - DNA, 4739 bp, Homo sapiens
gcacaggcagtcccggcgcggggcaaccacagcgctcaggaggccctgagtccggcacctggccatgtgcaaccctgaggaggcagctctgctgcggctggaggaggtcttctcagccaccctcgcccatgtcaacagccttgtcctccagcccctgctcccagccgccccagatccctcggatccctggggcagagagtgcctgcggctcttgcaacagctgcacaagagctcccagcaactctgggaggtgacggaggaaagcctgcactcactgcaggagaggctgcgttacccggactccaccggtctggagtccctgctgctgctgcgaggtgctgaccgtgtactgcaggcccacatagagtacattgagtcctacacaagctgcatggtggtgcaggccttccagaaggcagcaaagaggagaagcgagtactggcggggccagcggaaggcgctgcggcagctgctttcaggtgtgagctcagagggctcggtgggcgcatcgctgggccaggccctccaccagccactcgcccatcacgtgcaacagtacgtgctcctcctgctgagcctcggggacaccattggggagcatcacccaacccgggagctggtggtgaacgcagtcaccctctttgggaacctgcagtccttcatgaagcaggagttggaccaggctgtggccacacaggctctctggcacaccctgagaggccggctgagggatgtgctctgcacccctgctcacagactccttcaggacagccaggacgtacccgtgacggtcgcaccgttgcgggctgagcgtgtgctgctctttgatgatgccctcgtcctgctgcagggccacaatgtccacacctttgatctgaagctggtgtgggtggatcctgggcaggacgggtgcacgtttcacctcctcacgcccgaagaagagttctccttttgtgccaaggactcccagggccaggcagtctggcagtggaaggtgacctgggctgttcaccaggccctgcatgggaagaaggacttccccgtgctgggggctggcctggagccctcccagcctcccgactgccgctgcgcagaatataccttccaggcagagggccggctctgccaggccacctacgagggcgagtggtgcaggggccggccccacggcaagggaaccctgaaatggccggatgggcggaatcacgtggggaatttctgccagggcctggagcatggcttcggcatccgcctgctgccccaggcctctgaggacaagttcgactgttacaagtgtcactggcgagaaggcagcatgtgtggctacggcatctgtgagtacagcaccgacgaggtgtacaagggctacttccaggagggcctgcggcacggatttggggtccttgagagtggtccgcaggccccccagcccttcaggtacacgggccactgggagaggggccagaggagcggctatggcattgaggaggatggtgacagaggtgagcgctacattggcatgtggcaggctggtcagcgccacggcccaggggtcatggtcacccaggcaggtgtctgctaccagggcaccttccaggcggacaagacggtgggcccgggcatcctcctctctgaagacgactccctgtatgagggcaccttcaccagggacctgaccctcatggggaagggcaaggtcaccttccccaatggcttcaccctggagggctcgttcggcagtggggcagggagaggactgcacacacagggtgtgctggacacggctgccctcccaccagacccgagcagtacctgcaagaggcagctgggcgtgggtgccttccccgtggaaagccgctggcagggagtctacagccccttccgggactttgtgtgtgctggctgccccagggacctgcaggaggccctgctgggcttcgacgtgcagagctccagggagctgcgtaggtctcaggattacctgtcctgcgagaggacccaccctgaggacagtgtgggcagtatggaagacatcctggaggagctgctgcagcaccgggagcccaaggccctgcagctgtacctcaggaaggctctgagcaactcactgcaccccctgggaaagctgctccggacactgatgctgaccttccaggctacctacgcaggtgtcggggccaacaagcacctgcaggagctggcccaggaggaggtgaagcagcatgcccaggaactctgggctgcctacaggggtctgctgcgagttgccttagagcgcaagggccaggccctggaggaggatgaagacacagagacaagggacctccaggtgcatggattggtgctgcccctcatgctgcccagcttctactcagagctcttcacgctctacctgctgcttcatgagcgggaggacagcttctacagccagggcattgccaacttgagcctctttcctgatacccaactgctcgagttcctggatgtgcagaagcacttgtggcccctcaaggacctcacgctgacgagcaatcagaggtactccctggtcagggacaagtgtttcctgtcagccaccgagtgcctgcagaagatcatgaccacggtggacccacgggagaagctggaggtgctggagaggacatacggggaaattgagggcacggtgtcgagggtattgggccgggagtacaagctgcccatggacgacctgctgccacttctcatctacgtggtgtcgcgcgcccgaattcagcacctgggagccgagatccacctgatccgtgacatgatggaccccaaccacacaggaggcctgtatgacttcctgctcacagccctggagtcctgttacgagcacatccagaaagaagacatgaggctgcaccgcttacctggccactggcactccagggagctctggtagcctggcctttcctggacagactgaagagctgagcagggcactgccagcctgtccctcattacccaaggcaaggggcaggacaggccctcagaagcagctcttggaggagatgagcattttgttttgcacaggaagatgctgctgctgccctgactgggatgagggtgaggggtgacgggtgtggccctggatgtggtggttttcccttggccactagcccatcttcaatgaccccttaatctgcagcagctcacaggctgggggtgaggagtccctggcttctcttagcctgagcctttctcccaagttccagagcctctccgggcctcagtgctgccatctgtacaatggtggagtgagtacgctgtaaaggaccttccattcattttgctgaattccagagtccttttggaaaactgactttagtctgctgggctgtattgacctctggcaggctcgaagcctcactgggtatgcagtcaacaggatgggcctggagatccgtgaactgcaggccacgtacccatgacgtaaacggcggcactggagcaagctggggcggggggtgggtaaaccctcactgccagcaggccccaagtggcttgtaaatcattctcctgtgatgtctgtgggcctgcgtggggacaacaggggcacatgacatctgcctgggccctgaccaataaaccctcagacccaggacccaggaccctgctgtagttggggagcaggagtacctttgggaggggaggactttatttaaacagtggttctagtgtgggaccaagagaggcaggagctgggtcttggggcagctttattcctgttgggcctcagtttctcttccccacacagtttatcttccgtcacattgtgccgggtgacgtgcacggtctccctctgccctagccggagatgcatgatgacaggcagtgtgatgtgttctgaaagtgtccagggcaaagcgtagggagagggtggatttgtgcagggtgcagctctggagaagaagctggatcactcttggtcccattccctaggccctgagcaagtcaggctcctggctctgggtgtggctcccccaaacgaagtactgacttcagcctgtgaggggagggttgagggaggctctggaaagcccagccacacctgagtccctggcagtagccttggggcagagggcacccgcagagtcccagagatgatgtgggcagtgggcagagagagccttggcgcctctgtttgccaccacttccccaggaaggagggacagcatttctctggctggttccactaaatgtgccagcccaaatgcagggcatgggctctggttctgccaggagcctgtgacacccccaggaagggggtggaactgaggaagagcgaggatatgcaggcactcatgcttaccgggactggggcagctcactaggattctatcctttccaatcggcatcagccagctcttgtcccctgataagtgaggacagcctgaccctggcctcaaatgcagccatccctgagttcatgcgatgctgacgggaccccagcacacttccctgcctcctttgagatctgcgagcccttgctgcagttcagattcaacaaggccctctgcccaccctctcactaggcctcacccaacaccagtggaactggagcctctggctgggcacagtggctcactttgggaggctgaggcaggaaggctgctggaaactgagagttcaagaccagcctgggcaacatagtgagaccctgtctctacaaatacaaaataaaataattagctgggaaaaaaaaaaaaaaaaaa

SEQ ID NO: 760 - protein, 953 aa, Homo sapiens
MCNPEEAALLRLEEVFSATLAHVNSLVLQPLLPAAPDPSDPWGRECLRLLQQLHKSSQQLWEVTEESLHSLQERLRYPDSTGLESLLLLRGADRVLQAHIEYIESYTSCMVVQAFQKAAKRRSEYWRGQRKALRQLLSGVSSEGSVGASLGQALHQPLAHHVQQYVLLLLSLGDTIGEHHPTRELVVNAVTLFGNLQSFMKQELDQAVATQALWHTLRGRLRDVLCTPAHRLLQDSQDVPVTVAPLRAERVLLFDDALVLLQGHNVHTFDLKLVWVDPGQDGCTFHLLTPEEEFSFCAKDSQGQAVWQWKVTWAVHQALHGKKDFPVLGAGLEPSQPPDCRCAEYTFQAEGRLCQATYEGEWCRGRPHGKGTLKWPDGRNHVGNFCQGLEHGFGIRLLPQASEDKFDCYKCHWREGSMCGYGICEYSTDEVYKGYFQEGLRHGFGVLESGPQAPQPFRYTGHWERGQRSGYGIEEDGDRGERYIGMWQAGQRHGPGVMVTQAGVCYQGTFQADKTVGPGILLSEDDSLYEGTFTRDLTLMGKGKVTFPNGFTLEGSFGSGAGRGLHTQGVLDTAALPPDPSSTCKRQLGVGAFPVESRWQGVYSPFRDFVCAGCPRDLQEALLGFDVQSSRELRRSQDYLSCERTHPEDSVGSMEDILEELLQHREPKALQLYLRKALSNSLHPLGKLLRTLMLTFQATYAGVGANKHLQELAQEEVKQHAQELWAAYRGLLRVALERKGQALEEDEDTETRDLQVHGLVLPLMLPSFYSELFTLYLLLHEREDSFYSQGIANLSLFPDTQLLEFLDVQKHLWPLKDLTLTSNQRYSLVRDKCFLSATECLQKIMTTVDPREKLEVLERTYGEIEGTVSRVLGREYKLPMDDLLPLLIYVVSRARIQHLGAEIHLIRDMMDPNHTGGLYDFLLTALESCYEHIQKEDMRLHRLPGHWHSRELW

SEQ ID NO: 761 - DNA, 3148 bp, Homo sapiens
aggaaggaaccagctgtaagggagggcagagggggatgtcttggaggggaatcccagactttggacactggtctctcttggaccaagaccccctctctggcttggcctccagatctgcccacctttctgtctccgtctttccaggattccatatgcttctgtctgtcttctcgtcgcagggtagattctctgtccctttctctgctgctcttcctcctggagccgtggaggcagctgggcgtgggtgccttccccgtggaaagccgctggcagggagtctacagccccttccgggactttgtgtgtgctggctgccccagggacctgcaggaggccctgctgggcttcgacgtgcagagctccagggagctgcgtaggtctcaggattacctgtcctgcgagaggacccaccctgaggacagtgtgggcagtatggaagacatcctggaggagctgctgcagcaccgggagcccaaggccctgcagctgtacctcaggaaggctctgagcaactcactgcaccccctgggaaagctgctccggacactgatgctgaccttccaggctacctacgcaggtgtcggggccaacaagcacctgcaggagctggcccaggaggaggtgaagcagcatgcccaggaactctgggctgcctacaggggtctgctgcgagttgccttagagcgcaagggccaggccctggaggaggatgaagacacagagacaagggacctccaggtgcatggattggtgctgcccctcatgctgcccagcttctactcagagctcttcacgctctacctgctgcttcatgagcgggaggacagcttctacagccagggcattgccaacttgagcctctttcctgatacccaactgctcgagttcctggatgtgcagaagcacttgtggcccctcaaggacctcacgctgacgagcaatcagaggtactccctggtcagggacaagtgtttcctgtcagccaccgagtgcctgcagaagatcatgaccacggtggacccacgggagaagctggaggtgctggagaggacatacggggaaattgagggcacggtgtcgagggtattgggccgggagtacaagctgcccatggacgacctgctgccacttctcatctacgtggtgtcgcgcgcccgaattcagcacctgggagccgagatccacctgatccgtgacatgatggaccccaaccacacaggaggcctgtatgacttcctgctcacagccctggagtcctgttacgagcacatccagaaagaagacatgaggctgcaccgcttacctggccactggcactccagggagctctggtagcctggcctttcctggacagactgaagagctgagcagggcactgccagcctgtccctcattacccaaggcaaggggcaggacaggccctcagaagcagctcttggaggagatgagcattttgttttgcacaggaagatgctgctgctgccctgactgggatgagggtgaggggtgacgggtgtggccctggatgtggtggttttcccttggccactagcccatcttcaatgaccccttaatctgcagcagctcacaggctgggggtgaggagtccctggcttctcttagcctgagcctttctcccaagttccagagcctctccgggcctcagtgctgccatctgtacaatggtggagtgagtacgctgtaaaggaccttccattcattttgctgaattccagagtccttttggaaaactgactttagtctgctgggctgtattgacctctggcaggctcgaagcctcactgggtatgcagtcaacaggatgggcctggagatccgtgaactgcaggccacgtacccatgacgtaaacggcggcactggagcaagctggggcggggggtgggtaaaccctcactgccagcaggccccaagtggcttgtaaatcattctcctgtgatgtctgtgggcctgcgtggggacaacaggggcacatgacatctgcctgggccctgaccaataaaccctcagacccaggacccaggaccctgctgtagttggggagcaggagtacctttgggaggggaggactttatttaaacagtggttctagtgtgggaccaagagaggcaggagctgggtcttggggcagctttattcctgttgggcctcagtttctcttccccacacagtttatcttccgtcacattgtgccgggtgacgtgcacggtctccctctgccctagccggagatgcatgatgacaggcagtgtgatgtgttctgaaagtgtccagggcaaagcgtagggagagggtggatttgtgcagggtgcagctctggagaagaagctggatcactcttggtcccattccctaggccctgagcaagtcaggctcctggctctgggtgtggctcccccaaacgaagtactgacttcagcctgtgaggggagggttgagggaggctctggaaagcccagccacacctgagtccctggcagtagccttggggcagagggcacccgcagagtcccagagatgatgtgggcagtgggcagagagagccttggcgcctctgtttgccaccacttccccaggaaggagggacagcatttctctggctggttccactaaatgtgccagcccaaatgcagggcatgggctctggttctgccaggagcctgtgacacccccaggaagggggtggaactgaggaagagcgaggatatgcaggcactcatgcttaccgggactggggcagctcactaggattctatcctttccaatcggcatcagccagctcttgtcccctgataagtgaggacagcctgaccctggcctcaaatgcagccatccctgagttcatgcgatgctgacgggaccccagcacacttccctgcctcctttgagatctgcgagcccttgctgcagttcagattcaacaaggccctctgcccaccctctcactaggcctcacccaacaccagtggaactggagcctctggctgggcacagtggctcactttgggaggctgaggcaggaaggctgctggaaactgagagttcaagaccagcctgggcaacatagtgagaccctgtctctacaaatacaaaataaaataattagctgggaaaaaaaaaaaaaaaaaa

SEQ ID NO: 762 - protein, 300 aa, Homo sapiens
MEDILEELLQHREPKALQLYLRKALSNSLHPLGKLLRTLMLTFQATYAGVGANKHLQELAQEEVKQHAQELWAAYRGLLRVALERKGQALEEDEDTETRDLQVHGLVLPLMLPSFYSELFTLYLLLHEREDSFYSQGIANLSLFPDTQLLEFLDVQKHLWPLKDLTLTSNQRYSLVRDKCFLSATECLQKIMTTVDPREKLEVLERTYGEIEGTVSRVLGREYKLPMDDLLPLLIYVVSRARIQHLGAEIHLIRDMMDPNHTGGLYDFLLTALESCYEHIQKEDMRLHRLPGHWHSRELW

SEQ ID NO: 763 - DNA, 1646 bp, Homo sapiens
ggcggcgcgggaacctgacaccgaggatgaataaatgatgctcgctgactacccgtggccaaagcccgtggccaccgagcgccggctggcaggggcagtgaccggcggccggcccgttcgtccctgggctccgcaagcggcgcggtggcacgaagatggcggggtggccgggcgcgggtcccctctgcgtgctgggcggcgccgcactcggggtgtgcctcgcgggggttgccgggcagctggtggagcccagcacggccccacccaagcccaagccgcctccgctgaccaaggagacagtggtgttctgggacatgcgcctgtggcacgtggtgggcatcttttcgctcttcgtgttgtccatcatcatcacgctgtgctgtgtcttcaactgtcgtgtgccacggacccggaaggagatcgaagcccggtacctgcagcgaaaggcagccaagatgtacacagacaagctggagactgtgccacccctcaatgagctcacagaagtcccaggagaggataagaagaagaagaagaagaagaaggacagtgtggacacagtggccatcaaagtagaggaggatgagaagaatgaggccaagaagaagaaaggagagaaatgaagacatcctgggcagcttgggctggcgggccctggagctcaagccgtggccggggtccaggcatgttggactctgagctcatttggggaccacagaggctgtggtcagagagggaagctgaggcccatggccacatcctcatggcccatcaggggcaggaaccagacaatctcgtaggtgtcctgccccccagcctaggcttggctcctttcaccccatccacatgggtactgtctcggcagaggtggtctggtgccaccgtccctctgcagatacactgctctccccacccagacctgcctgtctcccaccctttctgccagggatggcagtggctgtgaaggagtaatgggatatggggttacttcagccaccctttctggcacgaaatggctgaagtgcatgggtcagggtgtgaggccacacccagagtagccatgaggaggcagagagggtcactgggggacactgtggcagcaggagggactctgtctggccagggaggagccccagtggtgagaagacttccccaagcctggcaggggatccagctcaagggagtaagtagaggtggcttcagaaatggaacccccagcccagcagacatcaagctcaaggcaatgggctaccctcatttcacacgttgtgatgaagctgaggctgctgccaggcccggcatgaggccccgaggctcgagctcggggctgggggctgcagggctgggtcaggggtacacagagctaaggccaatgggctagagggtgccggaaagagagctggagtctgggctcctcttgggaatcagagtatatttaagaagccaagggggacctcgggctgttctggtggccccttctatgcccagctgtgctgggaggtcccagggccctagaagatcacagcagggccttctgcctgctgaccataacagtgccagcttctttgcagcttcctcttctaccatttcccactacgggcacctaaaagaagcatctctgaccagaagacaaaggcccaaatagc

SEQ ID NO: 764 - protein, 155 aa, Homo sapiens
MAGWPGAGPLCVLGGAALGVCLAGVAGQLVEPSTAPPKPKPPPLTKETVVFWDMRLWHVVGIFSLFVLSIIITLCCVFNCRVPRTRKEIEARYLQRKAAKMYTDKLETVPPLNELTEVPGEDKKKKKKKKDSVDTVAIKVEEDEKNEAKKKKGEK

SEQ ID NO: 765 - DNA, 1354 bp, Homo sapiens
agcggactgggagcgccttccggagagacgcagtcggctgccaccccgggatgggtcgctggtgccagaccgtcgcgcgcgggcagcgcccccggacgtctgccccctcccgcgccggtgccctgctgctgctgcttctgttgctgaggtctgcaggttgctggggcgcaggggaagccccgggggcgctgtccactgctgatcccgccgaccagagcgtccagtgtgtccccaaggccacctgtccttccagccggcctcgccttctctggcagaccccgaccacccagacactgccctcgaccaccatggagacccaattcccagtttctgaaggcaaagtcgacccataccgctcctgtggcttttcctacgagcaggaccccaccctcagggacccagaagccgtggctcggcggtggccctggatggtcagcgtgcgggccaatggcacacacatctgtgccggcaccatcattgcctcccagtgggtgctgactgtggcccactgcctgatctggcgtgatgttatctactcagtgagggtggggagtccgtggattgaccagatgacgcagaccgcctccgatgtcccggtgctccaggtcatcatgcatagcaggtaccgggcccagcggttctggtcctgggtgggccaggccaacgacatcggcctcctcaagctcaagcaggaactcaagtacagcaattacgtgcggcccatctgcctgcctggcacggactatgtgttgaaggaccattcccgctgcactgtgacgggctggggactttccaaggctgacggcatgtggcctcagttccggaccattcaggagaaggaagtcatcatcctgaacaacaaagagtgtgacaatttctaccacaacttcaccaaaatccccactctggttcagatcatcaagtcccagatgatgtgtgcggaggacacccacagggagaagttctgctatgagctaactggagagcccttggtctgctccatggagggcacgtggtacctggtgggattggtgagctggggtgcaggctgccagaagagcgaggccccacccatctacctacaggtctcctcctaccaacactggatctgggactgcctcaacgggcaggccctggccctgccagccccatccaggaccctgctcctggcactcccactgcccctcagcctccttgctgccctctgactctgtgtgccctccctcacttgtgggccccccttgcctccgtgcccaggttgctgtaggtgcagctgtcacagccctgagagtcagggtggagatgaggtgctcaattaaacattactgttttccatgcaaaaaaaaaaaaaaaa

SEQ ID NO: 766 - protein, 385 aa, Homo sapiens
MGRWCQTVARGQRPRTSAPSRAGALLLLLLLLRSAGCWGAGEAPGALSTADPADQSVQCVPKATCPSSRPRLLWQTPTTQTLPSTTMETQFPVSEGKVDPYRSCGFSYEQDPTLRDPEAVARRWPWMVSVRANGTHICAGTIIASQWVLTVAHCLIWRDVIYSVRVGSPWIDQMTQTASDVPVLQVIMHSRYRAQRFWSWVGQANDIGLLKLKQELKYSNYVRPICLPGTDYVLKDHSRCTVTGWGLSKADGMWPQFRTIQEKEVIILNNKECDNFYHNFTKIPTLVQIIKSQMMCAEDTHREKFCYELTGEPLVCSMEGTWYLVGLVSWGAGCQKSEAPPIYLQVSSYQHWIWDCLNGQALALPAPSRTLLLALPLPLSLLAAL

SEQ ID NO: 767 - DNA, 783 bp, Homo sapiens
atgacccgccattggccctgggaggtgagcctccggatggaaaatgagcacgtgtgtggaggggccctcattgaccccagctgggtggtgactgcggcccactgcatccaaggcaccaaagagtactcagtggtgcttggcacctccaagctgcagcccatgaacttcagcagggccctctgggtccctgtgagggacatcattatgcaccccaagtactggggccgggccttcatcatgggtgacgttgcccttgtccaccttcaaacacctgtcaccttcagtgagtacgtgcagcccatctgcctcccggagcccaatttcaacctgaaggttgggacgcagtgttgggtgactggctggagccaggttaagcagcgcttttcagccaactccatgctgaccccagagctgcaggaggctgaggtgtttatcatggacaacaagaggtgtgaccggcattacaagaagtccttcttccccccagttgtcccccttgtcctgggggacatgatctgtgccaccaattatggggaaaacttgtgctatggggattctggagggccattggcttgtgaagttgagggcagatggattctggctggggtgttgtcctgggaaaaggcctgcgtgaaggcacagaatccaggtgtgtacacccgcatcaccaaatacaccaaatggatcaagaagcaaatgagcaatggagccttctcaggtccctgtgcctctgcctgcctcctgttcctgtgctggctgctgcagccccagatgggctcctga

SEQ ID NO: 768 - protein, 260 aa, Homo sapiens
MTRHWPWEVSLRMENEHVCGGALIDPSWVVTAAHCIQGTKEYSVVLGTSKLQPMNFSRALWVPVRDIIMHPKYWGRAFIMGDVALVHLQTPVTFSEYVQPICLPEPNFNLKVGTQCWVTGWSQVKQRFSANSMLTPELQEAEVFIMDNKRCDRHYKKSFFPPVVPLVLGDMICATNYGENLCYGDSGGPLACEVEGRWILAGVLSWEKACVKAQNPGVYTRITKYTKWIKKQMSNGAFSGPCASACLLFLCWLLQPQMGS

SEQ ID NO: 769 - DNA, 882 bp, Homo sapiens
atgtcctctggcggcggctcccggggcctcctggcgtggcttctgctccttcagccctggcccgggcagaactgggcgggcatggcggcgccacgcctcccgtcccctctcctctcagaggagggcggcgagaaccccgaagcgagcccggctccaggacctgaagcgggccccccactcaatctgtttacgtcctttccaggtgactcactgctgtgtggccgaacccctctgagaatcgtgggaggagtggacgcggaggaagggaggtggccctggcaggtgagcgtgaggaccaaaggcaggcacatctgcggcggcaccctggtcaccgccacgtgggtgctgacggcaggccactgcatttccagccgtttccattacagtgtcaagatgggagatcggagtgtctataatgaaaacacaagtgtggtggtctcagtccaaagagcttttgtccaccctaagttctcaacagttacaaccattcgaaatgaccttgcccttctccagctccaacatcctgtgaattttacctcaaacatccagcctatctgcatccctcaggagaatttccaggtggaaggtaggaccaggtgctgggtgaccggatggggcaaaacaccagaacgagagaaacttgcatcagaaattcttcaggatgtggaccaatacatcatgtgctatgaggaatgtaataagataatacagaaggccttgtcatctactaaggatgtaataataaaagggatggtctgtggctataaagaacaaggaaaggattcttgtcaaggagattctgggggccgcttggcctgtgaatataatgacacatgggtccaggtagggattgtgagctggggcatcggctgtggtcgctga

SEQ ID NO: 770 - protein, 293 aa, Homo sapiens
MSSGGGSRGLLAWLLLLQPWPGQNWAGMAAPRLPSPLLSEEGGENPEASPAPGPEAGPPLNLFTSFPGDSLLCGRTPLRIVGGVDAEEGRWPWQVSVRTKGRHICGGTLVTATWVLTAGHCISSRFHYSVKMGDRSVYNENTSVVVSVQRAFVHPKFSTVTTIRNDLALLQLQHPVNFTSNIQPICIPQENFQVEGRTRCWVTGWGKTPEREKLASEILQDVDQYIMCYEECNKIIQKALSSTKDVIIKGMVCGYKEQGKDSCQGDSGGRLACEYNDTWVQVGIVSWGIGCGR

SEQ ID NO: 771 - DNA, 872 bp, Homo sapiens
ctgctttctgcattcttctctccacatgcctctctgtacttacagccccaatggcccccaaaaagccagagcccaagaaggatgatgccaaggcagcccccaaggcagctccagctcccgcacctccccctgagcctgagcgccctaaggaggtcgagtttgatgcttccaagatcaagattgagttcacacctgagcagattgaagagttcaaggaagccttcatgctgttcgaccgcacacccaagtgtgagatgaagatcacctacgggcagtgtggggatgtcctgcgggcgctgggccagaaccccacacaggcagaagtgctccgtgtcctggggaagccaagacaggaagagctcaataccaagatgatggactttgaaactttcctgcctatgctccagcacatttccaagaacaaggacacaggcacctatgaggacttcgtggaggggctgcgggtcttcgacaaggagggcaatggcactgtcatgggtgctgagcttcgccacgtgctggccacgctgggtgagaggctgacagaagacgaagtggagaagttgatggctgggcaagaggactccaatggctgcatcaactatgaagcatttgtgaagcacatcatgtccagctaaacctcgtgcccagaagccaggaaggctgtgcaggacgtctcatctcccatgtgtgatgctgacaccaagcggcctggagtcgtgggaaggaggggagccttaccaagactcctgcaaaaacccttggacctctccacgtggttgccgtctctggcccctctcaggctgtgcttacctgtgacagcagctctgtccccaccccatgggcctcatgaataaaggcttcttgccggc

SEQ ID NO: 772 - protein, 195 aa, Homo sapiens
MAPKKPEPKKDDAKAAPKAAPAPAPPPEPERPKEVEFDASKIKIEFTPEQIEEFKEAFMLFDRTPKCEMKITYGQCGDVLRALGQNPTQAEVLRVLGKPRQEELNTKMMDFETFLPMLQHISKNKDTGTYEDFVEGLRVFDKEGNGTVMGAELRHVLATLGERLTEDEVEKLMAGQEDSNGCINYEAFVKHIMSS

SEQ ID NO: 773 - DNA, 2144 bp, Homo sapiens
ccacagaagctgctcagggactatccatggcctccccgtggccaacttgagtctgctctgcagctttaggcccgacttggaaggcccatgggctgcagatgaggaaactgaggtccagacagccgaagagtggtagtgtccaggacacacaactgggccggcggcggcggctgccccgagggacgcggccctaggcggtggcgatggggaccgcccggatcgcacccggcctggcgctcctgctctgctgccccgtgctcagctccgcgtacgcgctggtggatgcagatgacgtcatgactaaagaggaacagatcttcctgctgcaccgtgctcaggcccagtgcgaaaaacggctcaaggaggtcctgcagaggccagccagcataatggaatcagacaagggatggacatctgcgtccacatcagggaagcccaggaaagataaggcatctgggaagctctaccctgagtctgaggaggacaaggaggcacccactggcagcaggtaccgagggcgcccctgtctgccggaatgggaccacatcctgtgctggccgctgggggcaccaggtgaggtggtggctgtgccctgtccggactacatttatgacttcaatcacaaaggccatgcctaccgacgctgtgaccgcaatggcagctgggagctggtgcctgggcacaacaggacgtgggccaactacagcgagtgtgtcaaatttctcaccaatgagactcgtgaacgggaggtgtttgaccgcctgggcatgatttacaccgtgggctactccgtgtccctggcgtccctcaccgtagctgtgctcatcctggcctactttaggcggctgcactgcacgcgcaactacatccacatgcacctgttcctgtccttcatgctgcgcgccgtgagcatcttcgtcaaggacgctgtgctctactctggcgccacgcttgatgaggctgagcgcctcaccgaggaggagctgcgcgccatcgcccaggcgcccccgccgcctgccaccgccgctgccggctacgcgggctgcagggtggctgtgaccttcttcctttacttcctggccaccaactactactggattctggtggaggggctgtacctgcacagcctcatcttcatggccttcttctcagagaagaagtacctgtggggcttcacagtcttcggctggggtctgcccgctgtcttcgtggctgtgtgggtcagtgtcagagctaccctggccaacaccgggtgctgggacttgagctccgggaacaaaaagtggatcatccaggtgcccatcctggcctccattgtgctcaacttcatcctcttcatcaatatcgtccgggtgctcgccaccaagctgcgggagaccaacgccggccggtgtgacacacggcagcagtaccggaagctgctcaaatccacgctggtgctcatgcccctctttggcgtccactacattgtcttcatggccacaccatacaccgaggtctcagggacgctctggcaagtccagatgcactatgagatgctcttcaactccttccagggattttttgtcgcaatcatatactgtttctgcaatggcgaggtacaagctgagatcaagaaatcttggagccgctggacactggcactggacttcaagcgaaaggcacgcagcgggagcagcagctatagctacggccccatggtgtcccacacaagtgtgaccaatgtcggcccccgtgtgggactcggcctgcccctcagcccccgcctactgcccactgccaccaccaacggccaccctcagctgcctggccatgccaagccagggaccccagccctggagaccctcgagaccacaccacctgccatggctgctcccaaggacgatgggttcctcaacggctcctgctcaggcctggacgaggaggcctctgggcctgagcggccacctgccctgctacaggaagagtgggagacagtcatgtgaccaggcgctgggggctggacctgctgacatagtggatggacagatggaccaaaagatgggtggttgaatgatttcccactcagggctggggccaagaggaaaaacagggaaaaaaagaaaaaaaaaagaaaaaggaaaaggaaaaaaaaaaaaaaaaaa

SEQ ID NO: 774 - protein, 593 aa, Homo sapiens
MGTARIAPGLALLLCCPVLSSAYALVDADDVMTKEEQIFLLHRAQAQCEKRLKEVLQRPASIMESDKGWTSASTSGKPRKDKASGKLYPESEEDKEAPTGSRYRGRPCLPEWDHILCWPLGAPGEVVAVPCPDYIYDFNHKGHAYRRCDRNGSWELVPGHNRTWANYSECVKFLTNETREREVFDRLGMIYTVGYSVSLASLTVAVLILAYFRRLHCTRNYIHMHLFLSFMLRAVSIFVKDAVLYSGATLDEAERLTEEELRAIAQAPPPPATAAAGYAGCRVAVTFFLYFLATNYYWILVEGLYLHSLIFMAFFSEKKYLWGFTVFGWGLPAVFVAVWVSVRATLANTGCWDLSSGNKKWIIQVPILASIVLNFILFINIVRVLATKLRETNAGRCDTRQQYRKLLKSTLVLMPLFGVHYIVFMATPYTEVSGTLWQVQMHYEMLFNSFQGFFVAIIYCFCNGEVQAEIKKSWSRWTLALDFKRKARSGSSSYSYGPMVSHTSVTNVGPRVGLGLPLSPRLLPTATTNGHPQLPGHAKPGTPALETLETTPPAMAAPKDDGFLNGSCSGLDEEASGPERPPALLQEEWETVM

SEQ ID NO: 775 - DNA, 874 bp, Homo sapiens
ggggtacgcgggcaagatggaggcgactacggctggtgtgggccggctagaggaagaggcgttgcggcgaaaggaacggctgaaggccctacgggagaaaaccgggcgcaaggacaaggaagatggggagccaaagaccaagcatctcagagaagaggaggaagaaggcgagaagcacagggaacttaggctgcggaactatgtcccggaggatgaggacctgaagaagaggagggtgccccaggccaaaccggttgcagtggaggagaaggtgaaggagcagctggaggccgccaagcccgagcccgtcatcgaggaggtggacctggccaacctcgctcctcggaagcctgactgggacctcaagagagatgtggccaagaagctggagaaactaaaaaagcggactcagagggctattgccgagctgatccgtgaaaggctgaaaggccaggaagacagcctagcctctgcagtggatgctgccaccgaacaaaagacctgtgactccgactgaggcatgccctgccccaccactcgcccatcaggcctgtcctgcaggggatggtcttgggcagggatgggggctaggcttgccatcacctccagtttggcttctgagcagagactccctgcccatcaagtctgaaacccccatggatgaggtcagctccttgtctgctgggtggcccctgccattctgaatggaggcagaaccagcaacaactctgggcgtgcctgtgtctgcacatgtggatgtacatatgtctgtatatatgtatatattttgaactttctaaaaaaaaatctggaaatagaaacaagtaaacccctgtgtgtggcgaaaaaaaaaaaaaaaaaaaaaaaaaaaaaa

SEQ ID NO: 776 - protein, 166 aa, Homo sapiens
MEATTAGVGRLEEEALRRKERLKALREKTGRKDKEDGEPKTKHLREEEEEGEKHRELRLRNYVPEDEDLKKRRVPQAKPVAVEEKVKEQLEAAKPEPVIEEVDLANLAPRKPDWDLKRDVAKKLEKLKKRTQRAIAELIRERLKGQEDSLASAVDAATEQKTCDSD

SEQ ID NO: 777 - DNA, 8192 bp, Homo sapiens
atgcagtcaggcgagcagcgtcctgggcggattcagaccctggggaagtctggaattcctcaccccgaccctcgtcccggaggctcaggctggcccttccaatggcactggtggcgcgcagcagggccggagccgggccgggccatggccgcctcggagcggctgtacgagttgtggctgctctactacgcgcagaaggacctgggttacctgcagcagtggctgaaggcctttgtaggtgccttcaagaagagcatctcactgtcctctctggagccacgaaggccagaggaggcaggtgcagaggtcccgctgctaccactggatgagctgcatgtgctggccgaacagctgcaccaggctgacctggagcaagccctcctgctgctcaagctcttcatcattctctgcaggaacctggagaacatagaggcaggccggggccaagtgctagtgccccgagtgctggcactgttgaccaagttggtggcggagctgaaaggatgcccaccaccccagggccgaggcacgcagttggagaatgtggccctacatgctctgcttctctgcgagggcctctttgacccttaccaaacctggcggcgccagcgcagtggggaagtcatcagctccaaggagaagagcaaatacaagttccctcctgctgctttgccccaggaattcagcgccttcttccaagagagcctacagaatgcagaccacttgcctcccatactgctgttacgtctcatccacctcttctgcgccgtcctcgctggaggaaaggagaacgggcagatggctgtaagtgatggctctgtgaagggcctgctgagtgtggtgcggggctggagccgtgggccagccccggacccgtgcctagtgccactggctctagaggcactggtaggtgcagtccatgtcttgcatgccagccgcgcacctcctcgtggcccagagcttcgtgccctgcttgagagctacttccatgtccttaatgctgactggccagctggtctgagctcaggccccgaagaggcccttgtcaccctccgggtcagcatgctcgacgccatccccatgatgctggcatgtgaagaccggccagtgctgcaagccaccttcctcagcaacaattgctttgaacacctcactcggctcattcagaacagcaagctgtacctgcagtcccgggcgccccccgagggggacagtgacctggctacccggttactgactgagcccgatgtccaaaaggtcctggaccaagacacagacgccattgcagtccatgtagtcagagtgctgacctgcatcatgagtgactccccctcggccaaggaggtgtttaaggagcgcatcggctaccctcacctgcaggaggttctgcagagccatggtccccccacccatcggctgttgcaagagctgctcaacatggctgtggagggtgaccacagcatgtgcccacctccaccaatccgcaacgagcagccggtactggtgctggcgcagtggctgccgtcattgcccaccgctgagctgcggctcttcctagcgcaacgcctcaggtggctctgtgacagctgccctgccagccgtgccacctgtgtgcaggcaggcctggtgggctgcctgttggagacactcagcacagggctagccctggaggcccgctgccaagagcagctgctggcactgctacaagcactgggccgtgtatcaataaggcccatggagctgcgtcacctgctgcgcccccggccaggattggactcggaaccaggcggagctgaggctggaaaggcccgacacgcaggtgctgtcatccgcacattatcaggcatggccaggcaccagggtcctgcacgtgctctgcgctactttgacctcacgcccagcatggcgggcatcatggtaccccctgtacagcgatggccagggcctggcttcacctttcatgcctggctctgtctgcaccctatggatacagcacctacccctgcccccacccgaccactccagcgaaagcagctgtacagcttctttaccagcagcggctcagggtttgaggccttcttcacggcggccgggaccctggtggtggctgtgtgcacacggaaggagtatttgaccatgagtttgcccgaagtgtcctttgccgactctgcctggcactgcgtggctatcgtccatgtgcctgggcgccggcccttcagccagaacctggtccatgtctacaaagacggccatctggtcaagacagcaccccttcgctgcccctccctcagtgagcctttctcctcctgctgtatcggctccgctggataccgcacaacgaccaccaccacagggctgcccacaccaccagtccccgccaccctggcctacactcaccccgccctcacccgctcccagtcagtcccagcctccacagggcttggctgggggtccgggctggtggcccccctgcaggagggcagcatcgactctaccctcgcaggcacccaggacactcggtggggcagccccacatccctggagggtgagctgggggctgtggccatctttcacgaagccctgcaggcgacggctctgaggaccctgtgcaccctggggcccaatgagacggcacccttcaagcctgagggggagctgcatgagctcagcaccaggctgctcctccattactcacctcaggcttgtaagaacaacatctgcctggacctgtcccccagtcatgggcttgatgggcgcctgacgggccacagagtggagacctgggatgtgaaggatgtggtgaactgcgttgggggtatgggtgccctgctgcccctgctggagcgagtagctgcacagcccaaagaggctgaagcaggtccagctgaaacgcatgacctcgtgggtcctgaactgacctctggtcacaacacccagggcctggttctcccattgggtaaatcttcagaggaacggatggagaggaacgcagtggctgcttttctgctgatgctgcggaacttccttcagggtcacatggtgaaccaagagagcctggtgcagtgccaggggcctgccatcatcggggccctcctgcgaaaggtcccaagctgggccatggacatgaacgtgctcatgtccgcccagctgctgatggagcaggtggcagctgagggcagcgggcccctcctgtacctactctaccagcatttgctcttcaactttcacctctggaccctcagtgacttcgccgtgcgcctcggtcacatccagtacatgtccagcatagttcgggagcacagacagaagctgcggaagaagtacggcgtccagtttatcttggatgctctgcgcacccactacagcccgcagcgggagcgccccctggctgctgacgacctacgcaccgtgcagacctccctcctgggcctggcgagggagttcctggtgcggagtctctcagcagatgacgtgcaggtcacgcagaccatgctgagctttttggcggccacaggcgatgacggtcaggcggtgggtgcgctggacctgctgctggccctgctgcacggttccctggtgcaggagtccttggctgtctttctgttggagccagggaacctcgaagtgctactggccctgctagtgcggccagggtcactgcccctgctgcccgatcgagtctgcaagatcctgcgcagactgcagcagaatgagcggctacctgagcggagccgccagcgcctccggctgcgggagtgtggtctccagggtctggttgcctgcttgcctgaggggactgtttccccccagctctgccagggcctctacaagctgttcctgggggcagattgcctgaacctctcagatctgctggctgtggtacagctgtccctccaggctgacctcagcgttcgcctagacatctgtcgccagcttttccacctcatctacggacagccagatgtagtgcggcttctggcccgacaggctggctggcaagatgtgctgacccggctatatgtcctggaggctgccacagccggcagcccccctccgtcttccccagagtcacctacctcccccaagccagccccacccaagccacccactgagtcacctgctgagccttcagatgtcttcctgccctcagaggccccctgccctgaccctgatggcttttaccatgctctctccccattctgcacgccctttgacctgggcctggaacggtctagtgtaggatcaggcaacactgctggtggtggcggcagcagtgggactcttactccagccagccagcccggcactccttcgccactggatgggccgcggccctttcctgctgctcctggccgccacagctccagtctctccaatgtgctggaggacggcagcctcccggagcccaccattagcggggatgatacctcgaacaccagcaacccacagcaaacctctgaggaagagttgtgcaatctgctcaccaacgtgctgttctcggtgacgtggcgtggcgtggaaggcagcgatgaggctgcctggcgggagcgtggccaggttttctcagtgctcacccagctgggggcctcagccacacttgtgcgcccaccagactgcatcaagcgcagcctcctggagatgatgctggagtcagccctgaccgacatcaaagaggcccccgtgggggtcctggccagcctcacccagcaagcgctttggctgctgcgtctgctgcaggacttcctgtgtgctgaaggccatggtaaccaggaactgtggagtgagaagctctttgaaggtgtatgcagcctacttgatcgcctgggagcctggccccacctggccaacggcacagctgatctccgtgagatggcgcagattggcctacggcttgtacttggctacatcctgctggaagacccacagctgcatgcccaggcctacgtgagattgcacatgctgctacagactgcagtgccagcccgccgcgaggaggcctgctatgtgctctccaagctggaggctgcactggggcgggtgctgaacacctcttccttggagtcagccactgatgaggcagggtccccacttgcagctgcagcagctgcagcagctgcagagcgctgctcctggctggtgccactggtgcgcacgctgctagaccgtgcctatgagccgctggggctgcagtggggactgccctccctgccacccaccaatggcagccccaccttctttgaagacttccaggctttttgtgccacacccgaatggcgccacttcatcgacaaacaggtacagccaaccatgtcccagttcgaaatggacacgtatgctaagagccacgaccttatgtcaggtttctggaatgcctgctatgacatgcttatgagcagtgggcagcggcgccagtgggagcgcgcccagagtcgtcgggccttccaggagctggtgctggaacctgcgcagaggcgggcgcgcctggaggggctacgctacacggcagtgctgaagcagcaggcaacgcagcactccatggccctgctgcactggggggcgctgtggcgccagctcgccagcccatgtggggcctgggcgctgagggacactcccatcccccgctggaaactgtccagcgccgagacatattcacgcatgcgtctgaagctggtgcccaaccatcacttcgaccctcacctggaagccagcgctctccgagacaatctgggtgaggttcccctgacacccaccgaggaggcctcactgcctctggcagtgaccaaagaggccaaagtgagcaccccacccgagttgctgcaggaggaccagctcggcgaggacgagctggctgagctggagaccccgatggaggcagcagaactggatgagcagcgtgagaagctggtgctgtcggccgagtgccagctggtgacggtagtggccgtggtcccagggctgctggaggtcaccacacagaatgtatacttctacgatggcagcactgagcgcgtggaaaccgaggagggcatcggctatgatttccggcgcccactggcccagctgcgtgaggtccacctgcggcgtttcaacctgcgccgttcagcacttgagctcttctttatcgatcaggccaactacttcctcaacttcccatgcaaggtgggcacgaccccagtctcatctcctagccagactcccagaccccagcctggccccatcccaccccatacccaggtacggaaccaggtgtactcgtggctcctgcgcctacggcccccctctcaaggctacctaagcagccgctccccccaggagatgctgcgtgcctcaggccttacccagaaatgggtacagcgtgagatatccaacttcgagtacttgatgcaactcaacaccattgcggggcggacctacaatgacctgtctcagtaccctgtgttcccctgggtcctgcaggactacgtgtccccaaccctggacctcagcaacccagccgtcttccgggacctgtctaagcccatcggtgtggtgaaccccaagcatgcccagctcgtgagggagaagtatgaaagctttgaggacccagcagggaccattgacaagttccactatggcacccactactccaatgcagcaggcgtgatgcactacctcatccgcgtggagcccttcacctccctgcacgtccagctgcaaagtggccgctttgactgctccgaccggcagttccactcggtggcggcagcctggcaggcacgcctggagagccctgccgatgtgaaggagctcatcccggaattcttctactttcctgacttcctggagaaccagaacggttttgacctgggctgtctccagctgaccaacgagaaggtaggcgatgtggtgctacccccgtgggccagctctcctgaggacttcatccagcagcaccgccaggctctggagtcggagtatgtgtctgcacacctacacgagtggatcgacctcatctttggctacaagcagcgggggccagccgccgaggaggccctcaatgtcttctattactgcacctatgagggggctgtagacctggaccatgtgacagatgagcgggaacggaaggctctggagggcattatcagcaactttgggcagactccctgtcagctgctgaaggagccacatccaactcggctctcagctgaggaagcagcccatcgccttgcacgcctggacactaactcacctagcatcttccagcacctggacgaactcaaggcattcttcgcagaggttgtcagtgatggtgtacccctggtgctagccctggtcccccaccggcagccccactccttcatcacccagggttccccagacctgttggtgactgtgagtgccagtgggctgctgggcacccacagctggttgccctatgaccgcaacataagcaactacttcagcttcagcaaagaccccaccatgggcagccacaagacgcagcgactgctgagtggcccgtgggtgccaggcagtggtgtgagtggacaagcactggcagtggccccggatggaaagctgctattcagcggtggccactgggatggcagcctgcgggtgactgcactaccccgtggcaagctgttgagccagctcagctgccaccttgatgtagtaacctgccttgcactggacacctgtggcatctacctcatctcaggctcccgggacaccacgtgcatggtgtggcggctcctgcatcagggtggtctgtcagtaggcctggcaccaaagcctgtgcaggtcctgtatgggcatggggctgcagtgagctgtgtggccatcagcactgaacttgacatggctgtgtctggatctgaggatggaactgtgatcatacacactgtacgccgcggacagtttgtagcggcactacggcctctgggtgccacattccctggacctattttccacctggcattggggtccgaaggccagattgtggtacagagctcagcgtgggaacgtcctggggcccaggtcacctactccttgcacctgtattcagtcaatgggaagttgcgggcttcactgcccctggcagagcagcctacagccctgacggtgacagaggactttgtgttgctgggcaccgcccagtgcgccctgcacatcctccaactaaacacactgctcccggccgcgcctcc

SEQ ID NO: 778 - protein, 2802 aa, Homo sapiens
MQSGEQRPGRIQTLGKSGIPHPDPRPGGSGWPFQWHWWRAAGPEPGRAMAASERLYELWLLYYAQKDLGYLQQWLKAFVGAFKKSISLSSLEPRRPEEAGAEVPLLPLDELHVLAEQLHQADLEQALLLLKLFIILCRNLENIEAGRGQVLVPRVLALLTKLVAELKGCPPPQGRGTQLENVALHALLLCEGLFDPYQTWRRQRSGEVISSKEKSKYKFPPAALPQEFSAFFQESLQNADHLPPILLLRLIHLFCAVLAGGKENGQMAVSDGSVKGLLSVVRGWSRGPAPDPCLVPLALEALVGAVHVLHASRAPPRGPELRALLESYFHVLNADWPAGLSSGPEEALVTLRVSMLDAIPMMLACEDRPVLQATFLSNNCFEHLTRLIQNSKLYLQSRAPPEGDSDLATRLLTEPDVQKVLDQDTDAIAVHVVRVLTCIMSDSPSAKEVFKERIGYPHLQEVLQSHGPPTHRLLQELLNMAVEGDHSMCPPPPIRNEQPVLVLAQWLPSLPTAELRLFLAQRLRWLCDSCPASRATCVQAGLVGCLLETLSTGLALEARCQEQLLALLQALGRVSIRPMELRHLLRPRPGLDSEPGGAEAGKARHAGAVIRTLSGMARHQGPARALRYFDLTPSMAGIMVPPVQRWPGPGFTFHAWLCLHPMDTAPTPAPTRPLQRKQLYSFFTSSGSGFEAFFTAAGTLVVAVCTRKEYLTMSLPEVSFADSAWHCVAIVHVPGRRPFSQNLVHVYKDGHLVKTAPLRCPSLSEPFSSCCIGSAGYRTTTTTTGLPTPPVPATLAYTHPALTRSQSVPASTGLGWGSGLVAPLQEGSIDSTLAGTQDTRWGSPTSLEGELGAVAIFHEALQATALRTLCTLGPNETAPFKPEGELHELSTRLLLHYSPQACKNNICLDLSPSHGLDGRLTGHRVETWDVKDVVNCVGGMGALLPLLERVAAQPKEAEAGPAETHDLVGPELTSGHNTQGLVLPLGKSSEERMERNAVAAFLLMLRNFLQGHMVNQESLVQCQGPAIIGALLRKVPSWAMDMNVLMSAQLLMEQVAAEGSGPLLYLLYQHLLFNFHLWTLSDFAVRLGHIQYMSSIVREHRQKLRKKYGVQFILDALRTHYSPQRERPLAADDLRTVQTSLLGLAREFLVRSLSADDVQVTQTMLSFLAATGDDGQAVGALDLLLALLHGSLVQESLAVFLLEPGNLEVLLALLVRPGSLPLLPDRVCKILRRLQQNERLPERSRQRLRLRECGLQGLVACLPEGTVSPQLCQGLYKLFLGADCLNLSDLLAVVQLSLQADLSVRLDICRQLFHLIYGQPDVVRLLARQAGWQDVLTRLYVLEAATAGSPPPSSPESPTSPKPAPPKPPTESPAEPSDVFLPSEAPCPDPDGFYHALSPFCTPFDLGLERSSVGSGNTAGGGGSSGTLTPASQPGTPSPLDGPRPFPAAPGRHSSSLSNVLEDGSLPEPTISGDDTSNTSNPQQTSEEELCNLLTNVLFSVTWRGVEGSDEAAWRERGQVFSVLTQLGASATLVRPPDCIKRSLLEMMLESALTDIKEAPVGVLASLTQQALWLLRLLQDFLCAEGHGNQELWSEKLFEGVCSLLDRLGAWPHLANGTADLREMAQIGLRLVLGYILLEDPQLHAQAYVRLHMLLQTAVPARREEACYVLSKLEAALGRVLNTSSLESATDEAGSPLAAAAAAAAAERCSWLVPLVRTLLDRAYEPLGLQWGLPSLPPTNGSPTFFEDFQAFCATPEWRHFIDKQVQPTMSQFEMDTYAKSHDLMSGFWNACYDMLMSSGQRRQWERAQSRRAFQELVLEPAQRRARLEGLRYTAVLKQQATQHSMALLHWGALWRQLASPCGAWALRDTPIPRWKLSSAETYSRMRLKLVPNHHFDPHLEASALRDNLGEVPLTPTEEASLPLAVTKEAKVSTPPELLQEDQLGEDELAELETPMEAAELDEQREKLVLSAECQLVTVVAVVPGLLEVTTQNVYFYDGSTERVETEEGIGYDFRRPLAQLREVHLRRFNLRRSALELFFIDQANYFLNFPCKVGTTPVSSPSQTPRPQPGPIPPHTQVRNQVYSWLLRLRPPSQGYLSSRSPQEMLRASGLTQKWVQREISNFEYLMQLNTIAGRTYNDLSQYPVFPWVLQDYVSPTLDLSNPAVFRDLSKPIGVVNPKHAQLVREKYESFEDPAGTIDKFHYGTHYSNAAGVMHYLIRVEPFTSLHVQLQSGRFDCSDRQFHSVAAAWQARLESPADVKELIPEFFYFPDFLENQNGFDLGCLQLTNEKVGDVVLPPWASSPEDFIQQHRQALESEYVSAHLHEWIDLIFGYKQRGPAAEEALNVFYYCTYEGAVDLDHVTDERERKALEGIISNFGQTPCQLLKEPHPTRLSAEEAAHRLARLDTNSPSIFQHLDELKAFFAEVVSDGVPLVLALVPHRQPHSFITQGSPDLLVTVSASGLLGTHSWLPYDRNISNYFSFSKDPTMGSHKTQRLLSGPWVPGSGVSGQALAVAPDGKLLFSGGHWDGSLRVTALPRGKLLSQLSCHLDVVTCLALDTCGIYLISGSRDTTCMVWRLLHQGGLSVGLAPKPVQVLYGHGAAVSCVAISTELDMAVSGSEDGTVIIHTVRRGQFVAALRPLGATFPGPIFHLALGSEGQIVVQSSAWERPGAQVTYSLHLYSVNGKLRASLPLAEQPTALTVTEDFVLLGTAQCALHILQLNTLLPAAPPLPMKVAIRSVAVTKERSHVLVGLEDGKLIVVVAGQPSEVRSSQFARKLWRSSRRISQVSSGETEYNPTEAR

SEQ ID NO: 779 - DNA, 7987 bp, Homo sapiens
aatcttccccaccaaagtcaagggtggaattgggcaaaattcattttaagaaacatctgcttcatgtaacatccaggccactgctggctactaccacagcagtagcatctccacctactcatgcagcaccattaccagcagtgatagcagaatcaacaactgtagactcaccgccctcatctccgcctccaccgcctccacctgcccaagccacaacactctcatcaccagcaccagtaacagagccagtggccttgccacatacaccaataacagttctaatggcagcaccagtacccttaccagtagatgtagcagttagatctctgaaagaaccaccaattataattgtaccagaatctttagaagcagatactaagcaggacactatatctaatagtttagaagaacacgtaactcaaatattgaatgagcaagcagatatttcctcaaaaaaagaagattcccatattgggaaggatgaagaaattccagatagttctaagattagtctgagctgtaaaaaaacaggttctaagaagaaatcctcacaatctgaaggcatctttcttggttcagaatctgatgaagattctgtacggacttcttcaagtcaaagatcacatgatttaaaattttcagcaagcattgaaaaggaaagagattttaaaaagagctcagcacctttaaaaagtgaggatctagggaaaccttcacgatctaaaacagacagagatgataaatattttagctattcaaaacttgaaagagatactcggtatgtatcttcccgatgtagatcagaaagagagcgacggcggagcagatctcactctaggtctgagagaggctctagaactaatttatcctattccaggtcagaacgatctcattattatgactctgatcgtcgctaccataggagctccccttatcgagagaggacgcgctattctcggccatacacagataacagagcacgagagagttctgactcagaagaagagtataagaagacatactcaaggcgtacctcatctcattcctcttcttacagagacctaaggacatcatcctattctaaatctgatcgggactgtaaaactgagacctcttacttagagatggaaagaagaggcaagtattcttcaaaactagaaagagaatctaaaaggacttcagaaaatgaagcaattaaaagatgttgttctccccctaatgaactgggattccgacgagggtcatcatattctaagcatgacagtagtgcttcccgttataaatctaccctttcaaaacctatacccaagtctgataaatttaaaaattctttctgttgtacagaattaaatgaagaaatcaaacagtctcattcttttagtttacagacaccttgttcaaaaggtagtgaattaagaatgattaataaaaatcctgaaagagaaaaggctgggtctccagctccatcaaatcgattaaatgattcacctactttaaaaaagctagatgaattgcctatttttaagtccgaatttataacacatgatagccatgatagtattaaggaattagactctttatctaaagtgaagaatgatcaattaagaagtttttgtcccatagaattaaatataaatggatctcctggggcagaatctgatttggcaacattttgcacttctaaaactgatgctgttttaatgacttctgatgatagtgtgactggatcggaattatcccctttggtcaaagcatgcatgctttcatcaaatggatttcagaatattagtaggtgcaaagaaaaagacttggatgatacctgcatgctgcataagaagtcagaaagcccatttagagaaacagaacctctggtgtcaccacaccaagataaactcatgtctatgccagttatgactgtggattattccaaaacagtagttaaagaaccagttgatacgagggtttcttgctgcaaaaccaaagattcagacatatactgtactttgaacgatagcaacccttctttgtgtaactctgaagctgaaaatattgagccttcagttatgaagatttcttcaaatagctttatgaatgtgcatttggaatcaaaaccagttatatgtgatagtagaaatttgacagatcactcaaaatttgcatgtgaagaatataagcagagcatcggtagcactagttcagcttctgttaatcattttgatgatttatatcaacctattgggagttcaggtattgcttcatctcttcagagtcttccaccaggaataaaggtggacagtctaactctcttgaaatgcggagagaacacatctccagttctggatgcagtgctaaagagtaaaaaaagttcagagtttttaaagcatgcagggaaagaaacaatagtagaagtaggtagtgaccttcctgattcaggaaagggatttgcttccagggagaacaggcgtaataatgggttatctgggaaatgtttgcaagaggctcaagaagaagggaattccatattgcctgaaagaagaggaagaccagaaatctctttagatgaaagaggagaaggaggacatgtgcatacttctgatgactcagaagttgtattttcttcttgtgatttgaatttaaccatggaagacagtgatggtgtaacttatgcattaaagtgtgacagtagtggtcatgccccagaaattgtgtctacagttcatgaagattattctggctcttctgaaagttcaaatgatgaaagtgattcagaagatacagattcggatgatagcagtattccaagaaaccgtctccagtctgttgtggttgtgccaaagaattctactttgcccatggaagaaacaagtccttgttcttctcggagcagtcaaagttatagacactattctgaccattgggaagatgagagattggagtcaaggagacatttgtatgaggaaaaatttgaaagtatagcaagtaaagcctgtcctcaaactgataagtttttccttcataaaggaacagagaagaatccggaaatttcttttacacagtccagtagaaaacaaatagataatcgcctgcctgaactttctcatcctcagagtgatggggttgatagtacaagtcatacagatgtgaaatctgaccctctgggtcacccaaattcagaggaaaccgtgaaagccaaaataccttctaggcagcaagaagagctgccaatttattcttctgattttgaagatgtcccaaataagtcttggcaacagaccactttccaaaacaggccagatagtagactgggaaaaacagaattgagtttttcttcctcttgtgagataccacatgtggatggcttgcactcatcagaagagctcagaaacttaggttgggacttctctcaagaaaagccttctaccacgtatcagcaacctgacagtagctatggagcttgtggtggacacaagtatcagcaaaatgcagaacagtatggtgggacacgtgattactggcaaggcaatggttactgggatccaagatcaggtagacctcctggaactggggttgtgtatgatcgaactcaaggacaagtaccagattccctaacagatgatcgtgaagaagaggagaattgggatcaacaggatggatcccatttttcagaccagtccgataaatttcttctatcccttcagaaagacaaggggtcagtgcaagcacctgaaataagcagcaattccattaaggacactttagctgtgaatgaaaagaaagatttttcaaaaaacttagaaaaaaatgatatcaaagatagagggcctcttaaaaaaaggaggcaggaaatagagagtgattctgaaagtgatggtgagcttcaggacagaaagaaagttagagtggaggtagagcagggagagacatcagtgcccccaggttcagcactggttgggccctcctgtgtcatggatgacttcagggacccacagcgatggaaggaatgtgccaagcaagggaaaatgccatgttactttgatcttattgaagaaaatgtttatttaacagaaagaaagaagaataaatctcatcgagatattaagcgaatgcagtgtgagtgtacacctctttctaaagatgaaagagctcaaggtgaaatagcatgtggggaagattgtcttaatcgtcttctcatgattgaatgttcttctcggtgtccaaatggggattattgttccaatagacggtttcagagaaaacagcatgcagatgtggaagtcatactcacagaaaagaaaggctggggcttgagagctgccaaagaccttccttcgaacacctttgtcctagaatattgtggagaggtactcgatcataaagagtttaaagctcgagtgaaggagtatgcacgaaacaaaaacatccattactatttcatggccctgaagaatgatgagataatagatgccactcaaaaaggaaattgctctcgtttcatgaatcacagctgtgaaccaaattgtgaaacccaaaaatggactgtgaacggacaactgagggttgggttttttaccaccaaactggttccttcaggctcagagttaacgtttgactatcagttccagagatatggaaaagaagcccagaaatgtttctgcggatcagccaattgccggggttacctgggaggagaaaacagagtcagcatcagagcagcaggagggaaaatgaagaaggaacgatctcgtaagaaggattcagtggatggagagctagaagctctgatggaaaatggtgagggtctctctgataaaaaccaggtgctcagcttatcccggctaatggttagaattgaaactttggagcagaaacttacctgtctggaactcatacagaacacacactcacagtcctgcctgaagtcctttctggaacgtcatgggctgtctttgttgtggatctggatggcagagctaggtgacggccgggaaagtaaccagaagcttcaggaagagattataaagactttggaacacttgcccattcctactaaaaatatgttggaggaaagcaaagtacttccaattattcaacgctggtctcagactaagactgctgtccctccgttgagtgaaggagatgggtattctagtgagaatacatcgcgtgctcatacaccactcaacacacctgatccttccaccaagctgagcacagaagctgacacagacactcccaagaaactaatgtttcgcagactgaaaattataagtgaaaatagcatggacagtgcaatctctgatgcaaccagtgagctagaaggcaaggatggcaaagaggatcttgatcaattagaaaatgtccctgtagaggaagaggaagaattgcagtcacaacagctactcccacaacagctgcctgaatgcaaagttgatagtgaaaccaacatagaagctagtaagctacctacatctgaaccagaagctgacgctgaaatagagcccaaagagagcaacggcacaaaactagaagaacctattaatgaagaaacaccatcccaagatgaagaggagggtgtgtctgatgtggagagtgaaaggagccaagaacagccagataaaacagtggatataagtgatttggccaccaaactcctggacagttggaaagacctaaaggaggtatatcgaattccaaagaaaagtcaaactgaaaaggaaaacacaacaactgaacgaggaagggatgctgttggcttcagagatcaaacacctgccccgaagactcctaataggtcaagagagagagacccagacaagcaaactcaaaataaagagaaaaggaaacgaagaagctccctctcaccaccctcttctgcctatgagcggggaacaaaaaggccagatgacagatatgatacaccaacttctaaaaagaaagtacgaattaaagaccgcaataaactttctacagaggaacgccggaagttgtttgagcaagaggtggctcaacgggaggctcagaaacaacagcaacagatgcagaacctgggaatgacatcaccactgccctatgactctcttggttataatgccccgcatcatccctttgctggttacccaccaggttatcccatgcaggcctatgtggatcccagcaaccctaatgctggaaaggtgctcctgcccacacccagcatggacccagtgtgttctcctgctccttatgatcatgctcagcccttggtgggacattctacagaacccctttctgcccctccaccagtaccagtggtgccacatgtggcagctcctgtggaagtttccagttcccagtatgtggcccagagtgatggtgtagtacaccaagactccagcgttgctgtcttgccagtgccggcccccggcccagttcagggacagaattatagtgtttgggattcaaaccaacagtctgtcagtgtacagcagcagtactctcctgcacagtctcaagcaaccatatattatcaaggacagacatgtccaacagtctatggtgtgacatcaccttattcacagacaactccaccaattgtacagagttatgcccagccaagtcttcagtatatccaggggcaacagattttcacagctcatccacaaggagtggtggtacagccagccgcagcagtgactacaatagttgcaccagggcagcctcagcccttgcagccatctgaaatggttgtgacaaataatctcttggatctgccgcccccctctcctcccaaaccaaaaaccattgtcttacctcccaactggaagacagctcgagatccagaagggaagatttattactaccatgtgatcacaaggcagactcagtgggatcctcctacttgggaaagcccaggagatgatgccagccttgagcatgaagctgagatggacctgggaactccaacatatgatgaaaaccccatgaaggcctcgaaaaagcccaagacagcagaagcagacacctccagtgaactagcaaagaaaagcaaagaagtattcagaaaagagatgtcccagttcatcgtccagtgcctgaacccttaccggaaacctgactgcaaagtgggaagaattaccacaactgaagactttaaacatctggctcgcaagctgactcacggtgttatgaataaggagctgaagtactgtaagaatcctgaggacctggagtgcaatgagaatgtgaaacacaaaaccaaggagtacattaagaagtacatgcagaagtttggggctgtttacaaacccaaagaggacactgaattagagtgactgttgggccagggtgggaggatgggtggtcaggtaagacagactctagggagaggaaatcctgtgggcctttctgtcccacccctgtcagcactgtgctactgatgatacatcaccctggggaattcaaccctgcagatgtcaactgaaggccacaaaaatgaactccatctacaagtgattacctagttgtgagctgttggcatgtggttagaagccatcagaggtgcaagggcttagaaaagaccctggccagacctgactccactcttaaacctgggtcttctccttggcggtgctgtcagcgcacagacccatgcgcatccccacccacaaccctttaccctgatgatctgtattatattttaatgtatatgtgaatatattgaaaataatttgttttttcctggtttttgtttggttttcgttttgcttttagcctctacatgctaggatcacaggaagactttgtaaggacagtttaagttctcctgcaaggtttaatttgttatcatgtaaatattctaaagcaggctgccttgtggttttggccagccttgtgctatgttgataagattgatttactgcttaaaatcactttactttatccaatttttactgaactttttatgtaaaaaaataaaatcaattaaagaacttggcatgtgtgttcccta

SEQ ID NO: 780 - protein, 2061 aa, Homo sapiens
MERRGKYSSKLERESKRTSENEAIKRCCSPPNELGFRRGSSYSKHDSSASRYKSTLSKPIPKSDKFKNSFCCTELNEEIKQSHSFSLQTPCSKGSELRMINKNPEREKAGSPAPSNRLNDSPTLKKLDELPIFKSEFITHDSHDSIKELDSLSKVKNDQLRSFCPIELNINGSPGAESDLATFCTSKTDAVLMTSDDSVTGSELSPLVKACMLSSNGFQNISRCKEKDLDDTCMLHKKSESPFRETEPLVSPHQDKLMSMPVMTVDYSKTVVKEPVDTRVSCCKTKDSDIYCTLNDSNPSLCNSEAENIEPSVMKISSNSFMNVHLESKPVICDSRNLTDHSKFACEEYKQSIGSTSSASVNHFDDLYQPIGSSGIASSLQSLPPGIKVDSLTLLKCGENTSPVLDAVLKSKKSSEFLKHAGKETIVEVGSDLPDSGKGFASRENRRNNGLSGKCLQEAQEEGNSILPERRGRPEISLDERGEGGHVHTSDDSEVVFSSCDLNLTMEDSDGVTYALKCDSSGHAPEIVSTVHEDYSGSSESSNDESDSEDTDSDDSSIPRNRLQSVVVVPKNSTLPMEETSPCSSRSSQSYRHYSDHWEDERLESRRHLYEEKFESIASKACPQTDKFFLHKGTEKNPEISFTQSSRKQIDNRLPELSHPQSDGVDSTSHTDVKSDPLGHPNSEETVKAKIPSRQQEELPIYSSDFEDVPNKSWQQTTFQNRPDSRLGKTELSFSSSCEIPHVDGLHSSEELRNLGWDFSQEKPSTTYQQPDSSYGACGGHKYQQNAEQYGGTRDYWQGNGYWDPRSGRPPGTGVVYDRTQGQVPDSLTDDREEEENWDQQDGSHFSDQSDKFLLSLQKDKGSVQAPEISSNSIKDTLAVNEKKDFSKNLEKNDIKDRGPLKKRRQEIESDSESDGELQDRKKVRVEVEQGETSVPPGSALVGPSCVMDDFRDPQRWKECAKQGKMPCYFDLIEENVYLTERKKNKSHRDIKRMQCECTPLSKDERAQGEIACGEDCLNRLLMIECSSRCPNGDYCSNRRFQRKQHADVEVILTEKKGWGLRAAKDLPSNTFVLEYCGEVLDHKEFKARVKEYARNKNIHYYFMALKNDEIIDATQKGNCSRFMNHSCEPNCETQKWTVNGQLRVGFFTTKLVPSGSELTFDYQFQRYGKEAQKCFCGSANCRGYLGGENRVSIRAAGGKMKKERSRKKDSVDGELEALMENGEGLSDKNQVLSLSRLMVRIETLEQKLTCLELIQNTHSQSCLKSFLERHGLSLLWIWMAELGDGRESNQKLQEEIIKTLEHLPIPTKNMLEESKVLPIIQRWSQTKTAVPPLSEGDGYSSENTSRAHTPLNTPDPSTKLSTEADTDTPKKLMFRRLKIISENSMDSAISDATSELEGKDGKEDLDQLENVPVEEEEELQSQQLLPQQLPECKVDSETNIEASKLPTSEPEADAEIEPKESNGTKLEEPINEETPSQDEEEGVSDVESERSQEQPDKTVDISDLATKLLDSWKDLKEVYRIPKKSQTEKENTTTERGRDAVGFRDQTPAPKTPNRSRERDPDKQTQNKEKRKRRSSLSPPSSAYERGTKRPDDRYDTPTSKKKVRIKDRNKLSTEERRKLFEQEVAQREAQKQQQQMQNLGMTSPLPYDSLGYNAPHHPFAGYPPGYPMQAYVDPSNPNAGKVLLPTPSMDPVCSPAPYDHAQPLVGHSTEPLSAPPPVPVVPHVAAPVEVSSSQYVAQSDGVVHQDSSVAVLPVPAPGPVQGQNYSVWDSNQQSVSVQQQYSPAQSQATIYYQGQTCPTVYGVTSPYSQTTPPIVQSYAQPSLQYIQGQQIFTAHPQGVVVQPAAAVTTIVAPGQPQPLQPSEMVVTNNLLDLPPPSPPKPKTIVLPPNWKTARDPEGKIYYYHVITRQTQWDPPTWESPGDDASLEHEAEMDLGTPTYDENPMKASKKPKTAEADTSSELAKKSKEVFRKEMSQFIVQCLNPYRKPDCKVGRITTTEDFKHLARKLTHGVMNKELKYCKNPEDLECNENVKHKTKEYIKKYMQKFGAVYKPKEDTELE

SEQ ID NO: 781 - DNA, 7193 bp, Homo sapiens
agaataagggcagggaccgcggctcctatctcttggtgatccccttccccattccgcccccgcctcaacgcccagcacagtgccctgcacacagtagtcgctcaataaatgttcgtggatgatgatgatgatgatgatgaaaaaaatgcagcatcaacggcagcagcaagcggaccacgcgaacgaggcaaactatgcaagaggcaccagacttcctctttctggtgaaggaccaacttctcagccgaatagctccaagcaaactgtcctgtcttggcaagctgcaatcgatgctgctagacaggccaaggctgcccaaactatgagcacctctgcacccccacctgtaggatctctctcccaaagaaaacgtcagcaatacgccaagagcaaaaaacagggtaactcgtccaacagccgacctgcccgcgcccttttctgtttatcactcaataaccccatccgaagagcctgcattagtatagtggaatggaaaccatttgacatatttatattattggctatttttgccaattgtgtggccttagctatttacatcccattccctgaagatgattctaattcaacaaatcataacttggaaaaagtagaatatgccttcctgattatttttacagtcgagacatttttgaagattatagcgtatggattattgctacatcctaatgcttatgttaggaatggatggaatttactggattttgttatagtaatagtaggattgtttagtgtaattttggaacaattaaccaaagaaacagaaggcgggaaccactcaagcggcaaatctggaggctttgatgtcaaagccctccgtgcctttcgagtgttgcgaccacttcgactagtgtcaggggtgcccagtttacaagttgtcctgaactccattataaaagccatggttcccctccttcacatagcccttttggtattatttgtaatcataatctatgctattataggattggaactttttattggaaaaatgcacaaaacatgtttttttgctgactcagatatcgtagctgaagaggacccagctccatgtgcgttctcagggaatggacgccagtgtactgccaatggcacggaatgtaggagtggctgggttggcccgaacggaggcatcaccaactttgataactttgcctttgccatgcttactgtgtttcagtgcatcaccatggagggctggacagacgtgctctactgggtaaatgatgcgataggatgggaatggccatgggtgtattttgttagtctgatcatccttggctcatttttcgtccttaacctggttcttggtgtccttagtggagaattctcaaaggaaagagagaaggcaaaagcacggggagatttccagaagctccgggagaagcagcagctggaggaggatctaaagggctacttggattggatcacccaagctgaggacatcgatccggagaatgaggaagaaggaggagaggaaggcaaacgaaatactagcatgcccaccagcgagactgagtctgtgaacacagagaacgtcagcggtgaaggcgagaaccgaggctgctgtggaagtctctggtgctggtggagacggagaggcgcggccaaggcggggccctctgggtgtcggcggtggggtcaagccatctcaaaatccaaactcagccgacgctggcgtcgctggaaccgattcaatcgcagaagatgtagggccgccgtgaagtctgtcacgttttactggctggttatcgtcctggtgtttctgaacaccttaaccatttcctctgagcactacaatcagccagattggttgacacagattcaagatattgccaacaaagtcctcttggctctgttcacctgcgagatgctggtaaaaatgtacagcttgggcctccaagcatatttcgtctctcttttcaaccggtttgattgcttcgtggtgtgtggtggaatcactgagacgatcctggtggaactggaaatcatgtctcccctggggatctctgtgtttcggtgtgtgcgcctcttaagaatcttcaaagtgaccaggcactggacttccctgagcaacttagtggcatccttattaaactccatgaagtccatcgcttcgctgttgcttctgctttttctcttcattatcatcttttccttgcttgggatgcagctgtttggcggcaagtttaattttgatgaaacgcaaaccaagcggagcacctttgacaatttccctcaagcacttctcacagtgttccagatcctgacaggcgaagactggaatgctgtgatgtacgatggcatcatggcttacgggggcccatcctcttcaggaatgatcgtctgcatctacttcatcatcctcttcatttgtggtaactatattctactgaatgtcttcttggccatcgctgtagacaatttggctgatgctgaaagtctgaacactgctcagaaagaagaagcggaagaaaaggagaggaaaaagattgccagaaaagagagcctagaaaataaaaagaacaacaaaccagaagtcaaccagatagccaacagtgacaacaaggttacaattgatgactatagagaagaggatgaagacaaggacccctatccgccttgcgatgtgccagtaggggaagaggaagaggaagaggaggaggatgaacctgaggttcctgccggaccccgtcctcgaaggatctcggagttgaacatgaaggaaaaaattgcccccatccctgaagggagcgctttcttcattcttagcaagaccaacccgatccgcgtaggctgccacaagctcatcaaccaccacatcttcaccaacctcatccttgtcttcatcatgctgagcagcgctgccctggccgcagaggaccccatccgcagccactccttccggaacacgatactgggttactttgactatgccttcacagccatctttactgttgagatcctgttgaagatgacaacttttggagctttcctccacaaaggggccttctgcaggaactacttcaatttgctggatatgctggtggttggggtgtctctggtgtcatttgggattcaatccagtgccatctccgttgtgaagattctgagggtcttaagggtcctgcgtcccctcagggccatcaacagagcaaaaggacttaagcacgtggtccagtgcgtcttcgtggccatccggaccatcggcaacatcatgatcgtcactaccctcctgcagttcatgtttgcctgtatcggggtccagttgttcaaggggaagttctatcgctgtacggatgaagccaaaagtaaccctgaagaatgcaggggacttttcatcctctacaaggatggggatgttgacagtcctgtggtccgtgaacggatctggcaaaacagtgatttcaacttcgacaacgtcctctctgctatgatggcgctcttcacagtctccacgtttgagggctggcctgcgttgctgtataaagccatcgactcgaatggagagaacatcggcccaatctacaaccaccgcgtggagatctccatcttcttcatcatctacatcatcattgtagctttcttcatgatgaacatctttgtgggctttgtcatcgttacatttcaggaacaaggagaaaaagagtataagaactgtgagctggacaaaaatcagcgtcagtgtgttgaatacgccttgaaagcacgtcccttgcggagatacatccccaaaaacccctaccagtacaagttctggtacgtggtgaactcttcgcctttcgaatacatgatgtttgtcctcatcatgctcaacacactctgcttggccatgcagcactacgagcagtccaagatgttcaatgatgccatggacattctgaacatggtcttcaccggggtgttcaccgtcgagatggttttgaaagtcatcgcatttaagcctaaggggtattttagtgacgcctggaacacgtttgactccctcatcgtaatcggcagcattatagacgtggccctcagcgaagcggacccaactgaaagtgaaaatgtccctgtcccaactgctacacctgggaactctgaagagagcaatagaatctccatcacctttttccgtcttttccgagtgatgcgattggtgaagcttctcagcaggggggaaggcatccggacattgctgtggacttttattaagtcctttcaggcgctcccgtatgtggccctcctcatagccatgctgttcttcatctatgcggtcattggcatgcagatgtttgggaaagttgccatgagagataacaaccagatcaataggaacaataacttccagacgtttccccaggcggtgctgctgctcttcaggtgtgcaacaggtgaggcctggcaggagatcatgctggcctgtctcccagggaagctctgtgaccctgagtcagattacaaccccggggaggagtatacatgtgggagcaactttgccattgtctatttcatcagtttttacatgctctgtgcatttctgatcatcaatctgtttgtggctgtcatcatggataatttcgactatctgacccgggactggtctattttggggcctcaccatttagatgaattcaaaagaatatggtcagaatatgaccctgaggcaaagggaaggataaaacaccttgatgtggtcactctgcttcgacgcatccagcctcccctggggtttgggaagttatgtccacacagggtagcgtgcaagagattagttgccatgaacatgcctctcaacagtgacgggacagtcatgtttaatgcaaccctgtttgctttggttcgaacggctcttaagatcaagaccgaagggaacctggagcaagctaatgaagaacttcgggctgtgataaagaaaatttggaagaaaaccagcatgaaattacttgaccaagttgtccctccagctggtgatgatgaggtaaccgtggggaagttctatgccactttcctgatacaggactactttaggaaattcaagaaacggaaagaacaaggactggtgggaaagtaccctgcgaagaacaccacaattgccctacaggcgggattaaggacactgcatgacattgggccagaaatccggcgtgctatatcgtgtgatttgcaagatgacgagcctgaggaaacaaaacgagaagaagaagatgatgtgttcaaaagaaatggtgccctgcttggaaaccatgtcaatcatgttaatagtgataggagagattcccttcagcagaccaataccacccaccgtcccctgcatgtccaaaggccttcaattccacctgcaagtgatactgagaaaccgctgtttcctccagcaggaaattcggtgtgtcataaccatcataaccataattccataggaaagcaagttcccacctcaacaaatgccaatctcaataatgccaatatgtccaaagctgcccatggaaagcggcccagcattgggaaccttgagcatgtgtctgaaaatgggcatcattcttcccacaagcatgaccgggagcctcagagaaggtccagtgtgaaaagaacccgctattatgaaacttacattaggtccgactcaggagatgaacagctcccaactatttgccgggaagacccagagatacatggctatttcagggacccccactgcttgggggagcaggagtatttcagtagtgaggaatgctacgaggatgacagctcgcccacctggagcaggcaaaactatggctactacagcagatacccaggcagaaacatcgactctgagaggccccgaggctaccatcatccccaaggattcttggaggacgatgactcgcccgtttgctatgattcacggagatctccaaggagacgcctactacctcccaccccagcatcccaccggagatcctccttcaactttgagtgcctgcgccggcagagcagccaggaagaggtcccgtcgtctcccatcttcccccatcgcacggccctgcctctgcatctaatgcagcaacagatcatggcagttgccggcctagattcaagtaaagcccagaagtactcaccgagtcactcgacccggtcgtgggccacccctccagcaacccctccctaccgggactggacaccgtgctacacccccctgatccaagtggagcagtcagaggccctggaccaggtgaacggcagcctgccgtccctgcaccgcagctcctggtacacagacgagcccgacatctcctaccggactttcacaccagccagcctgactgtccccagcagcttccggaacaaaaacagcgacaagcagaggagtgcggacagcttggtggaggcagtcctgatatccgaaggcttgggacgctatgcaagggacccaaaatttgtgtcagcaacaaaacacgaaatcgctgatgcctgtgacctcaccatcgacgagatggagagtgcagccagcaccctgcttaatgggaacgtgcgtccccgagccaacggggatgtgggccccctctcacaccggcaggactatgagctacaggactttggtcctggctacagcgacgaagagccagaccctgggagggatgaggaggacctggcggatgaaatgatatgcatcaccaccttgtagcccccagcgaggggcagactggctctggcctcaggtggggcgcaggagagccaggggaaaagtgcctcatagttaggaaagtttaggcactagttgggagtaatattcaattaattagacttttgtataagagatgtcatgcctcaagaaagccataaacctggtaggaacaggtcccaagcggttgagcctggcagagtaccatgcgctcggccccagctgcaggaaacagcaggccccgccctctcacagaggatgggtgaggaggccagacctgccctgccccattgtccagatgggcactgctgtggagtctgcttctcccatgtaccagggcaccaggcccacccaactgaaggcatggcggcggggtgcaggggaaagttaaaggtgatgacgatcatcacacctcgtgtcgttacctcagccatcggtctagcatatcagtcactgggcccaacatatccatttttaaaccctttcccccaaatacactgcgtcctggttcctgtttagctgttctgaaata

SEQ ID NO: 782 - protein, 2181 aa, Homo sapiens
MMMMMMMKKMQHQRQQQADHANEANYARGTRLPLSGEGPTSQPNSSKQTVLSWQAAIDAARQAKAAQTMSTSAPPPVGSLSQRKRQQYAKSKKQGNSSNSRPARALFCLSLNNPIRRACISIVEWKPFDIFILLAIFANCVALAIYIPFPEDDSNSTNHNLEKVEYAFLIIFTVETFLKIIAYGLLLHPNAYVRNGWNLLDFVIVIVGLFSVILEQLTKETEGGNHSSGKSGGFDVKALRAFRVLRPLRLVSGVPSLQVVLNSIIKAMVPLLHIALLVLFVIIIYAIIGLELFIGKMHKTCFFADSDIVAEEDPAPCAFSGNGRQCTANGTECRSGWVGPNGGITNFDNFAFAMLTVFQCITMEGWTDVLYWVNDAIGWEWPWVYFVSLIILGSFFVLNLVLGVLSGEFSKEREKAKARGDFQKLREKQQLEEDLKGYLDWITQAEDIDPENEEEGGEEGKRNTSMPTSETESVNTENVSGEGENRGCCGSLWCWWRRRGAAKAGPSGCRRWGQAISKSKLSRRWRRWNRFNRRRCRAAVKSVTFYWLVIVLVFLNTLTISSEHYNQPDWLTQIQDIANKVLLALFTCEMLVKMYSLGLQAYFVSLFNRFDCFVVCGGITETILVELEIMSPLGISVFRCVRLLRIFKVTRHWTSLSNLVASLLNSMKSIASLLLLLFLFIIIFSLLGMQLFGGKFNFDETQTKRSTFDNFPQALLTVFQILTGEDWNAVMYDGIMAYGGPSSSGMIVCIYFIILFICGNYILLNVFLAIAVDNLADAESLNTAQKEEAEEKERKKIARKESLENKKNNKPEVNQIANSDNKVTIDDYREEDEDKDPYPPCDVPVGEEEEEEEEDEPEVPAGPRPRRISELNMKEKIAPIPEGSAFFILSKTNPIRVGCHKLINHHIFTNLILVFIMLSSAALAAEDPIRSHSFRNTILGYFDYAFTAIFTVEILLKMTTFGAFLHKGAFCRNYFNLLDMLVVGVSLVSFGIQSSAISVVKILRVLRVLRPLRAINRAKGLKHVVQCVFVAIRTIGNIMIVTTLLQFMFACIGVQLFKGKFYRCTDEAKSNPEECRGLFILYKDGDVDSPVVRERIWQNSDFNFDNVLSAMMALFTVSTFEGWPALLYKAIDSNGENIGPIYNHRVEISIFFIIYIIIVAFFMMNIFVGFVIVTFQEQGEKEYKNCELDKNQRQCVEYALKARPLRRYIPKNPYQYKFWYVVNSSPFEYMMFVLIMLNTLCLAMQHYEQSKMFNDAMDILNMVFTGVFTVEMVLKVIAFKPKGYFSDAWNTFDSLIVIGSIIDVALSEADPTESENVPVPTATPGNSEESNRISITFFRLFRVMRLVKLLSRGEGIRTLLWTFIKSFQALPYVALLIAMLFFIYAVIGMQMFGKVAMRDNNQINRNNNFQTFPQAVLLLFRCATGEAWQEIMLACLPGKLCDPESDYNPGEEYTCGSNFAIVYFISFYMLCAFLIINLFVAVIMDNFDYLTRDWSILGPHHLDEFKRIWSEYDPEAKGRIKHLDVVTLLRRIQPPLGFGKLCPHRVACKRLVAMNMPLNSDGTVMFNATLFALVRTALKIKTEGNLEQANEELRAVIKKIWKKTSMKLLDQVVPPAGDDEVTVGKFYATFLIQDYFRKFKKRKEQGLVGKYPAKNTTIALQAGLRTLHDIGPEIRRAISCDLQDDEPEETKREEEDDVFKRNGALLGNHVNHVNSDRRDSLQQTNTTHRPLHVQRPSIPPASDTEKPLFPPAGNSVCHNHHNHNSIGKQVPTSTNANLNNANMSKAAHGKRPSIGNLEHVSENGHHSSHKHDREPQRRSSVKRTRYYETYIRSDSGDEQLPTICREDPEIHGYFRDPHCLGEQEYFSSEECYEDDSSPTWSRQNYGYYSRYPGRNIDSERPRGYHHPQGFLEDDDSPVCYDSRRSPRRRLLPPTPASHRRSSFNFECLRRQSSQEEVPSSPIFPHRTALPLHLMQQQIMAVAGLDSSKAQKYSPSHSTRSWATPPATPPYRDWTPCYTPLIQVEQSEALDQVNGSLPSLHRSSWYTDEPDISYRTFTPASLTVPSSFRNKNSDKQRSADSLVEAVLISEGLGRYARDPKFVSATKHEIADACDLTIDEMESAASTLLNGNVRPRANGDVGPLSHRQDYELQDFGPGYSDEEPDPGRDEEDLADEMICITTL

SEQ ID NO: 783 - DNA, 2162 bp, Homo sapiens
agcgggccgcggccacccgctcctcccgctccggtcccgactgtcgggctctcggccgagtcgccccggacaatcacaaagagtgtgtaggccagccccggtcacagagtgcaccgtatcctgtcacttctggatgtgagggagaagtgagtcatctcattcccctccgtggatcagaggacttggactagatagaagcatgtggtgtctcctacgaggcctgggccggcctggagccctggcacggggagccctggggcagcagcaatccctgggtgcccgggccctggccagcgcaggctctgagagccgggacgagtacagctatgtggtggtgggcgcgggctcggcgggctgcgtgctggctgggaggctcacggaggaccccgccgagcgcgtgctgctgctggaggccgggcccaaggacgtgcgcgcggggagcaagcggctctcgtggaagatccacatgcccgcggccctggtggccaacctgtgcgacgacaggtacaactggtgctaccacacagaggtgcagcggggcctggacggccgcgtgctgtactggccacgcggccgcgtctggggtggctcctcatccctcaatgccatggtctacgtccgtgggcacgccgaggactacgagcgctggcagcgccagggcgcccgcggctgggactacgcgcactgcctgccctacttccgcaaggcgcagggccacgagctgggcgccagccggtaccggggcgccgatggcccgctgcgggtgtcccggggcaagaccaaccacccgctgcactgcgcattcctggaggccacgcagcaggccggctacccgctcaccgaggacatgaatggcttccagcaggagggcttcggctggatggacatgaccatccatgaaggcaaacggtggagcgcagcctgtgcctacctgcacccagcactgagccgcaccaacctcaaggccgaggccgagacgcttgtgagcagggtgctatttgagggcacccgtgcagtgggcgtggagtatgtcaagaatggccagagccacagggcttatgccagcaaggaggtgattctgagtggaggtgccatcaactctccacagctgctcatgctctctggcatcgggaatgctgatgacctcaagaaactgggcatccctgtggtgtgccacctacctggggttggccagaacctgcaagaccacctggagatctacattcagcaggcatgcacccgccctatcaccctccattcagcacagaagcccctgcggaaggtctgcattggtctggagtggctctggaaattcacaggggagggagccactgcccatctggaaacaggtgggttcatccgcagccagcctggggtcccccacccggacatccagttccatttcctgccatcccaagtgattgaccacgggcgggtccccacccagcaggaggcttaccaggtacatgtggggcccatgcggggcacgagtgtgggctggctcaaactgagaagtgccaatccccaagaccaccctgtgatccagcccaactacttgtcaacagaaactgatattgaggatttccgtctgtgtgtgaagctcaccagagaaatttttgcacaggaagccctggctccgttccgagggaaagagctccagccaggaagccacattcagtcagataaagagatagatgcctttgtgcgggcaaaagccgacagcgcctaccacccctcgtgcacctgtaagatgggccagccctccgatcccactgccgtggtggatccgcagacaagggtcctcggggtggaaaacctcagggtcgtcgatgcctccatcatgcctagcatggtcagcggcaacctgaacgcccccacaatcatgatcgcagagaaggcagctgacattatcaaggggcagcctgcactctgggacaaagatgtccctgtctacaagcccaggacgctggccacccagcgctaagacagttgctgctggaggatgaccagggaagccccctgataagccaagagggccagcacagcccttgctcccaggctcctgcctgaaactatctagcacactaggacccaggtggtaccctactcagtggctgagaattggataaagtcttgggaaatgagacaaaaaaaaaaaaaaa

SEQ ID NO: 784 - protein, 594 aa, Homo sapiens
MWCLLRGLGRPGALARGALGQQQSLGARALASAGSESRDEYSYVVVGAGSAGCVLAGRLTEDPAERVLLLEAGPKDVRAGSKRLSWKIHMPAALVANLCDDRYNWCYHTEVQRGLDGRVLYWPRGRVWGGSSSLNAMVYVRGHAEDYERWQRQGARGWDYAHCLPYFRKAQGHELGASRYRGADGPLRVSRGKTNHPLHCAFLEATQQAGYPLTEDMNGFQQEGFGWMDMTIHEGKRWSAACAYLHPALSRTNLKAEAETLVSRVLFEGTRAVGVEYVKNGQSHRAYASKEVILSGGAINSPQLLMLSGIGNADDLKKLGIPVVCHLPGVGQNLQDHLEIYIQQACTRPITLHSAQKPLRKVCIGLEWLWKFTGEGATAHLETGGFIRSQPGVPHPDIQFHFLPSQVIDHGRVPTQQEAYQVHVGPMRGTSVGWLKLRSANPQDHPVIQPNYLSTETDIEDFRLCVKLTREIFAQEALAPFRGKELQPGSHIQSDKEIDAFVRAKADSAYHPSCTCKMGQPSDPTAVVDPQTRVLGVENLRVVDASIMPSMVSGNLNAPTIMIAEKAADIIKGQPALWDKDVPVYKPRTLATQR

SEQ ID NO: 785 - DNA, 2077 bp, Homo sapiens
agcgcagcgtgcgggtggcctggatcccgcgcagtggcccggcgatgtcgctcgtgctgctaagcctggccgcgctgtgcaggagcgccgtaccccgagagccgaccgttcaatgtggctctgaaactgggccatctccagagtggatgctacaacatgatctaatccccggagacttgagggacctccgagtagaacctgttacaactagtgttgcaacaggggactattcaattttgatgaatgtaagctgggtactccgggcagatgccagcatccgcttgttgaaggccaccaagatttgtgtgacgggcaaaagcaacttccagtcctacagctgtgtgaggtgcaattacacagaggccttccagactcagaccagaccctctggtggtaaatggacattttcctacatcggcttccctgtagagctgaacacagtctatttcattggggcccataatattcctaatgcaaatatgaatgaagatggcccttccatgtctgtgaatttcacctcaccaggctgcctagaccacataatgaaatataaaaaaaagtgtgtcaaggccggaagcctgtgggatccgaacatcactgcttgtaagaagaatgaggagacagtagaagtgaacttcacaaccactcccctgggaaacagatacatggctcttatccaacacagcactatcatcgggttttctcaggtgtttgagccacaccagaagaaacaaacgcgagcttcagtggtgattccagtgactggggatagtgaaggtgctacggtgcagctgactccatattttcctacttgtggcagcgactgcatccgacataaaggaacagttgtgctctgcccacaaacaggcgtccctttccctctggataacaacaaaagcaagccgggaggctggctgcctctcctcctgctgtctctgctggtggccacatgggtgctggtggcagggatctatctaatgtggaggcacgaaaggatcaagaagacttccttttctaccaccacactactgccccccattaaggttcttgtggtttacccatctgaaatatgtttccatcacacaatttgttacttcactgaatttcttcaaaaccattgcagaagtgaggtcatccttgaaaagtggcagaaaaagaaaatagcagagatgggtccagtgcagtggcttgccactcaaaagaaggcagcagacaaagtcgtcttccttctttccaatgacgtcaacagtgtgtgcgatggtacctgtggcaagagcgagggcagtcccagtgagaactctcaagacctcttcccccttgcctttaaccttttctgcagtgatctaagaagccagattcatctgcacaaatacgtggtggtctactttagagagattgatacaaaagacgattacaatgctctcagtgtctgccccaagtaccacctcatgaaggatgccactgctttctgtgcagaacttctccatgtcaagcagcaggtgtcagcaggaaaaagatcacaagcctgccacgatggctgctgctccttgtagcccacccatgagaagcaagagaccttaaaggcttcctatcccaccaattacagggaaaaaacgtgtgatgatcctgaagcttactatgcagcctacaaacagccttagtaattaaaacattttataccaataaaattttcaaatattgctaactaatgtagcattaactaacgattggaaactacatttacaacttcaaagctgttttatacatagaaatcaattacagttttaattgaaaactataaccattttgataatgcaacaataaagcatcttcagccaaacatctagtcttccatagaccatgcattgcagtgtacccagaactgtttagctaatattctatgtttaattaatgaatactaactctaagaacccctcactgattcactcaatagcatcttaagtgaaaaaccttctattacatgcaaaaaatcattgtttttaagataacaaaagtagggaataaacaagctgaacccacttttaaaaaaaaaaaaaaaaaaaaaaaaaaaaaaaaa

SEQ ID NO: 786 - protein, 502 aa, Homo sapiens
MSLVLLSLAALCRSAVPREPTVQCGSETGPSPEWMLQHDLIPGDLRDLRVEPVTTSVATGDYSILMNVSWVLRADASIRLLKATKICVTGKSNFQSYSCVRCNYTEAFQTQTRPSGGKWTFSYIGFPVELNTVYFIGAHNIPNANMNEDGPSMSVNFTSPGCLDHIMKYKKKCVKAGSLWDPNITACKKNEETVEVNFTTTPLGNRYMALIQHSTIIGFSQVFEPHQKKQTRASVVIPVTGDSEGATVQLTPYFPTCGSDCIRHKGTVVLCPQTGVPFPLDNNKSKPGGWLPLLLLSLLVATWVLVAGIYLMWRHERIKKTSFSTTTLLPPIKVLVVYPSEICFHHTICYFTEFLQNHCRSEVILEKWQKKKIAEMGPVQWLATQKKAADKVVFLLSNDVNSVCDGTCGKSEGSPSENSQDLFPLAFNLFCSDLRSQIHLHKYVVVYFREIDTKDDYNALSVCPKYHLMKDATAFCAELLHVKQQVSAGKRSQACHDGCCSL

SEQ ID NO: 787 - DNA, 3105 bp, Homo sapiens
agcgcagcgtgcgggtggcctggatcccgcgcagtggcccggcgatgtcgctcgtgctgctaagcctggccgcgctgtgcaggagcgccgtaccccgagagccgaccgttcaatgtggctctgaaactgggccatctccagagtggatgctacaacatgatctaatccccggagacttgagggacctccgagtagaacctgttacaactagtgttgcaacaggggactattcaattttgatgaatgtaagctgggtactccgggcagatgccagcatccgcttgttgaaggccaccaagatttgtgtgacgggcaaaagcaacttccagtcctacagctgtgtgaggtgcaattacacagaggccttccagactcagaccagaccctctggtggtaaatggacattttcctacatcggcttccctgtagagctgaacacagtctatttcattggggcccataatattcctaatgcaaatatgaatgaagatggcccttccatgtctgtgaatttcacctcaccaggctgcctagaccacataatgaaatataaaaaaaagtgtgtcaaggccggaagcctgtgggatccgaacatcactgcttgtaagaagaatgaggagacagtagaagtgaacttcacaaccactcccctgggaaacagatacatggctcttatccaacacagcactatcatcgggttttctcaggtgtttgagccacaccagaagaaacaaacgcgagcttcagtggtgattccagtgactggggatagtgaaggtgctacggtgcaggtaaagttcagtgagctgctctggggagggaagggacatagaagactgttccatcattcattgcttttaaggatgagttctctcttgtcaaatgcacttctgccagcagacaccagttaagtggcgttcatgggggctctttcgctgcagcctccaccgtgctgaggtcaggaggccgacgtggcagttgtggtcccttttgcttgtattaatggctgctgaccttccaaagcactttttattttcattttctgtcacagacactcagggatagcagtaccattttacttccgcaagcctttaactgcaagatgaagctgcaaagggtttgaaatgggaaggtttgagttccaggcagcgtatgaactctggagaggggctgccagtcctctctgggccgcagcggacccagctggaacacaggaagttggagcagtaggtgctccttcacctctcagtatgtctctttcaactctagtttttgaggtggggacacaggaggtccagtgggacacagccactccccaaagagtaaggagcttccatgcttcattccctggcataaaaagtgctcaaacacaccagagggggcaggcaccagccagggtatgatggctactacccttttctggagaaccatagacttcccttactacagggacttgcatgtcctaaagcactggctgaaggaagccaagaggatcactgctgctccttttttctagaggaaatgtttgtctacgtggtaagatatgacctagcccttttaggtaagcgaactggtatgttagtaacgtgtacaaagtttaggttcagaccccgggagtcttgggcacgtgggtctcgggtcactggttttgactttagggctttgttacagatgtgtgaccaaggggaaaatgtgcatgacaacactagaggtatgggcgaagccagaaagaagggaagttttggctgaagtaggagtcttggtgagattttgctctgatgcatggtgtgaactttctgagcctcttgtttttcctcagctgactccatattttcctacttgtggcagcgactgcatccgacataaaggaacagttgtgctctgcccacaaacaggcgtccctttccctctggataacaacaaaagcaagccgggaggctggctgcctctcctcctgctgtctctgctggtggccacatgggtgctggtggcagggatctatctaatgtggaggcacgaaaggatcaagaagacttccttttctaccaccacactactgccccccattaaggttcttgtggtttacccatctgaaatatgtttccatcacacaatttgttacttcactgaatttcttcaaaaccattgcagaagtgaggtcatccttgaaaagtggcagaaaaagaaaatagcagagatgggtccagtgcagtggcttgccactcaaaagaaggcagcagacaaagtcgtcttccttctttccaatgacgtcaacagtgtgtgcgatggtacctgtggcaagagcgagggcagtcccagtgagaactctcaagacctcttcccccttgcctttaaccttttctgcagtgatctaagaagccagattcatctgcacaaatacgtggtggtctactttagagagattgatacaaaagacgattacaatgctctcagtgtctgccccaagtaccacctcatgaaggatgccactgctttctgtgcagaacttctccatgtcaagcagcaggtgtcagcaggaaaaagatcacaagcctgccacgatggctgctgctccttgtagcccacccatgagaagcaagagaccttaaaggcttcctatcccaccaattacagggaaaaaacgtgtgatgatcctgaagcttactatgcagcctacaaacagccttagtaattaaaacattttataccaataaaattttcaaatattgctaactaatgtagcattaactaacgattggaaactacatttacaacttcaaagctgttttatacatagaaatcaattacagttttaattgaaaactataaccattttgataatgcaacaataaagcatcttcagccaaacatctagtcttccatagaccatgcattgcagtgtacccagaactgtttagctaatattctatgtttaattaatgaatactaactctaagaacccctcactgattcactcaatagcatcttaagtgaaaaaccttctattacatgcaaaaaatcattgtttttaagataacaaaagtagggaataaacaagctgaacccacttttaaaaaaaaaaaaaaaaaaaaaaaaaaaaaaaaa

SEQ ID NO: 788 - protein, 288 aa, Homo sapiens
MSLVLLSLAALCRSAVPREPTVQCGSETGPSPEWMLQHDLIPGDLRDLRVEPVTTSVATGDYSILMNVSWVLRADASIRLLKATKICVTGKSNFQSYSCVRCNYTEAFQTQTRPSGGKWTFSYIGFPVELNTVYFIGAHNIPNANMNEDGPSMSVNFTSPGCLDHIMKYKKKCVKAGSLWDPNITACKKNEETVEVNFTTTPLGNRYMALIQHSTIIGFSQVFEPHQKKQTRASVVIPVTGDSEGATVQVKFSELLWGGKGHRRLFHHSLLLRMSSLLSNALLPADTS

SEQ ID NO: 789 - DNA, 3525 bp, Homo sapiens
atcccggcagtcgtggctgcagcgctgaggcgagaggttggtgggtgtctccggccataatgacccaggctgagaagggtgatacggagaacggaaaggagaagggcggcgagaaggagaaggagcagcgcggcgtgaagcggcccatcgtgcccgcgctggtgccggagtcgctgcaagagcaaatccagagcaacttcatcattgtcatacatccaggttcaacaactttaaggattggtcgagccacagacactcttcctgccagcattcctcacgtcattgcccgaagacacaaacaacaagggcagcccctatacaaggacagttggctcctaagggagggactaaataaaccagaaagtaatgaacaaagacaaaatggccttaaaatggtggatcaagcaatatggtctaaaaagatgtccaatggtacaagacgcattcctgtgtcccctgaacaggcacgctcctacaataagcagatgcgacctgcaattttagatcactgttcgggaaataagtggacaaacacatctcatcaccctgagtatttagtaggagaagaggccttgtatgttaatccactggactgttacaatattcactggcctatcagaagaggtcagttaaatattcacccaggccctgggggctctcttacagctgttctggcagatattgaagtaatatggtctcatgcgatacaaaaatacttggaaatcccactgaaagatttaaagtattatagatgtatcttgttaattcctgatatctataataagcagcatgtgaaagaactagtgaatatgatactaatgaagatgggtttttcagggattgtggtccatcaggagtctgtgtgtgccacctatggaagtggcttaagcagcacgtgtattgtagacgttggggaccagaagacaagtgtatgctgtgtggaggatggggtgtctcatcggaatactcggctttgtctggcatacggaggatctgatgtgtcaagatgtttttactggctaatgcagcgagctgggttcccttacagagaatgccagttaacaaataaaatggattgtcttcttctgcaacaccttaaagaaactttttgtcatttagatcaggacatctctgggcttcaggaccatgagtttcagattcgacatcctgattctcctgccctgctttaccagtttcgattaggagatgaaaaactgcaggctccaatggctttgttttaccccgcaacttttggaatcgttggacagaaaatgacgactttgcagcacagatctcagggcgatcctgaggatcctcacgatgaacattacctgctggccacacagagcaaacaagaacagtctgcaaaagctactgctgaccgaaagtctgcatccaaacctattggatttgaaggggatcttcgtggccagtcctctgatcttccagaaagactccattcccaggaggtagatttggggtctgcacagggagatggcctgatggccggcaacgattccgaggaggccctcactgcactgatgtccaggaagactgccatctcgctgtttgaaggaaaagccctgggcctggataaagccatcctccatagcatagactgctgttcatctgacgacaccaaaaagaagatgtacagctccatcctagtggtgggaggtggtttgatgtttcataaagctcaagaatttctgcagcacagaattctcaacaaaatgccaccatccttcaggcgaattattgaaaatgtggatgtgatcacaaggcctaaggacatggacccccggctgattgcatggaaaggaggggcagtgttggcttgtttggatacaacacaggaactgtggatttatcagcgagagtggcagcgctttggtgtccgcatgttacgagagcgggctgcgtttgtgtggtgaatggggaggaaatgtcactgccgaagaccaaaaacaagcttcttggtataaaagactcttacagaatatgtgtattgtaatttattgatctggatgcttaagtgtcatggacagtaaatgaatttgaactttatgttgaggacatgacattggtttgaaaatataaactgcttttgagcagtttagtcagggcatttgagaataaataggaactttctcttcagttgtaaactctcttgccctctctcagggtctcataaactccccagtgatgtaaacgttgctattgaaggttctcatgtggtgaagcccttcatttaagttggcttgaatctcatcagcaggcagcctcatgcaaccatgagggatagtatgtgacgagggagaactgtccactcatgccattttctctcttgtctagtatttcattaggatctaaagttgtctgagttaaatgcacttatgtgactcatgtgtcctcttagaatcccaaatagggggaaaaagttttggtggtttttgttttttttttcattttctgttggattacagaaaaagaatgggacccattcaggtctcgatttccaaaggtaaagatggaaggctgggcagactggcttttgttacctgacatgccgtagggtgagcttagaggaagaaagaaaacaatttttatttggccaaaacagaacaaatgctgaaaaggaaatcttgtttttttcctaaagccaaatagaaatgatttgggtataatttaagagtccttgtgttgtacagatatggtgactgatgtagttattaatactaccaacttagtcatcaagcctcaattttcctttacctgaaggattaagtgaaagcttttggagttcatgatgttcagtatgatcagttaaccttaacctctgagcatcctgaagcaaaatctaaataatgcagctattaccactggtggtccaggctctggtgaagccctctgagcccaggaggaagagaaagcattgtccagaggtaggaacacagtctgggagcccagagctctgggaggagtgggaaaatgctgcttcctgctgcttgcttctaggcacctgcttccgccatctcacttaccatggctagagatgggggtgagactggggaaggacaaaagcagggaacagataagggatggaaatcagaagggaatatagaaagaactctggatgtggagaaatgccggtacctgagcattttgtatcaatgggagtaccctctgtaactgctcagtaggttacaaatgaagagtccaccagtattagaaacaatttaaacttgccagtaccaactgggatgtgtgccttcaatttgaaaattgtatgttttattttttaaatttgttaacagcattaatttatagagtattgatgtcatttatgtttctgaggtgtttcaacacaattttggatcagctgcctgtttgcaaaaacataatatatttctgttaaacagttcttcacctaacagcatattgctcttataactggtagagctgtttcaaaggaagttggtttctggtccaagttttgacctaaaccatgtccatcttctatta

SEQ ID NO: 790 - protein, 624 aa, Homo sapiens
MTQAEKGDTENGKEKGGEKEKEQRGVKRPIVPALVPESLQEQIQSNFIIVIHPGSTTLRIGRATDTLPASIPHVIARRHKQQGQPLYKDSWLLREGLNKPESNEQRQNGLKMVDQAIWSKKMSNGTRRIPVSPEQARSYNKQMRPAILDHCSGNKWTNTSHHPEYLVGEEALYVNPLDCYNIHWPIRRGQLNIHPGPGGSLTAVLADIEVIWSHAIQKYLEIPLKDLKYYRCILLIPDIYNKQHVKELVNMILMKMGFSGIVVHQESVCATYGSGLSSTCIVDVGDQKTSVCCVEDGVSHRNTRLCLAYGGSDVSRCFYWLMQRAGFPYRECQLTNKMDCLLLQHLKETFCHLDQDISGLQDHEFQIRHPDSPALLYQFRLGDEKLQAPMALFYPATFGIVGQKMTTLQHRSQGDPEDPHDEHYLLATQSKQEQSAKATADRKSASKPIGFEGDLRGQSSDLPERLHSQEVDLGSAQGDGLMAGNDSEEALTALMSRKTAISLFEGKALGLDKAILHSIDCCSSDDTKKKMYSSILVVGGGLMFHKAQEFLQHRILNKMPPSFRRIIENVDVITRPKDMDPRLIAWKGGAVLACLDTTQELWIYQREWQRFGVRMLRERAAFVW

SEQ ID NO: 791 - DNA, 832 bp, Homo sapiens
cgcccgtcgggggcgcgtctctttcagcagccaatgggctctgcccaccttcgtcctcgtcagcattttgtctaatcgcggcctgtgacgctcgaagggcggggagcagagggagatacagaaaccgacaggggccaggcgcccggtggctccgaagcggggaagtgggacaagatggtttacatctcgaacggacaagtgttggacagccggagtcagtctccatggagattatctttgataacagatttcttctggggaatagctgagtttgtggttttgtttttcaaaactctgcttcagcaagatgtgaaaaaaagaagaagctatggaaactcatctgattccagatatgatgatggaagagggccaccaggaaaccctccccgaagaatgggtagaatcaatcatctgcgtggccctagtccccctccaatggctggtggatgaggaaggtaaatgtctgctctaagaagcagacaaccggacatgcgcattcatagcagaaggaaaccatcaagaagtggaaggctgaccatgatgagcagtagatgaatgtgtatgtctaaacaaggactgctctgtgtcctcacagatgaatgaggtcatgctgggaattccctctgcagggaactggcctgactgacatgcagttccataaatgcagatgtttgtctcattacctttttgtatagtttattaaagtattaatatagttttaataagtaaatatttttaggttgcagaatggactcctcatctttatattcacgaaaaagcaatctgaagaaaacaaataaaagcctgtgtatttagcaaaaaaaaaaaaaaa

SEQ ID NO: 792 - protein, 93 aa, Homo sapiens
MVYISNGQVLDSRSQSPWRLSLITDFFWGIAEFVVLFFKTLLQQDVKKRRSYGNSSDSRYDDGRGPPGNPPRRMGRINHLRGPSPPPMAGGGR

SEQ ID NO: 793 - DNA, 3689 bp, Homo sapiens
cggccgctctcgtcgccgccgcagcgggcgcgtcggagggagcccagcatggccgggccgggctcgccgcgccgcgcgtcccggggggcctcggcgcttctcgctgccgcgcttctctacgccgcgctgggggacgtggtgcgctcggagcagcagataccgctctccgtggtgaagctctgggcctcggcttttggtggggagataaaatccattgctgctaagtactccggttcccagcttctgcaaaagaaatacaaagagtatgagaaagacgttgccatagaagaaatcgatggcctccaactggtaaagaagctggcaaagaacatggaagagatgtttcacaagaagtctgaggccgtcaggcgtctggtggaggctgcagaagaagcacacctgaaacatgaatttgatgcagacttacagtatgaatacttcaatgctgtgctgataaatgaaagggacaaagacgggaattttttggagctgggaaaggaattcatcttagccccaaatgaccattttaataatttgcctgtgaacatcagtctaagtgacgtccaagtaccaacgaacatgtacaacaaagaccctgcaattgtcaatggggtttattggtctgaatctctaaacaaagtttttgtagataactttgaccgtgacccatctctcatatggcagtactttggaagtgcaaagggcttttttaggcagtatccggggattaaatgggaaccagatgagaatggagtcattgccttcgactgcaggaaccgaaaatggtacatccaggcagcaacttctccgaaagacgtggtcattttagttgacgtcagtggcagcatgaaaggactccgtctgactatcgcgaagcaaacagtctcatccattttggatacacttggggatgatgacttcttcaacataattgcttataatgaggagcttcactatgtggaaccttgcctgaatggaactttggtgcaagccgacaggacaaacaaagagcacttcagggagcatctggacaaacttttcgccaaaggaattggaatgttggatatagctctgaatgaggccttcaacattctgagtgatttcaaccacacgggacaaggaagtatctgcagtcaggccatcatgctcataactgatggggcggtggacacctatgatacaatctttgcaaaatacaattggccagatcgaaaggttcgcatcttcacatacctcattggacgagaggctgcgtttgcagacaatctaaagtggatggcctgtgccaacaaaggattttttacccagatctccaccttggctgatgtgcaggagaatgtcatggaataccttcacgtgcttagccggcccaaagtcatcgaccaggagcatgatgtggtgtggaccgaagcttacattgacagcactctccctcaggcacaaaagctgactgatgatcagggccccgtcctgatgaccactgtagccatgcctgtgtttagtaagcagaacgaaaccagatcgaagggcattcttctgggagtggttggcacagatgtcccagtgaaagaacttctgaagaccatccccaaatacaagttagggattcacggttatgcctttgcaatcacaaataatggatatatcctgacgcatccggaactcaggctgctgtacgaagaaggaaaaaagcgaaggaaacctaactatagtagcgttgacctctctgaggtggagtgggaagaccgagatgacgtgttgagaaatgctatggtgaatcgaaagacggggaagttttccatggaggtgaagaagacagtggacaaagggaaacgggttttggtgatgacaaatgactactattatacagacatcaagggtactcctttcagtttaggtgtggcgctttccagaggtcatgggaaatatttcttccgagggaatgtaaccatcgaagaaggcctgcatgacttagaacatcccgatgtgtccttggcagatgaatggtcctactgcaacactgacctacaccctgagcaccgccatctgtctcagttagaagcgattaagctctacctaaaaggcaaagaacctctgctccagtgtgataaagaattgatccaagaagtcctttttgacgcggtggtgagtgcccccattgaagcgtattggaccagcctggccctcaacaaatctgaaaattctgacaagggcgtggaggttgccttcctcggcactcgcacgggcctctccagaatcaacctgtttgtcggggctgagcagctcaccaatcaggacttcctgaaagctggcgacaaggagaacatttttaacgcagaccatttccctctctggtaccgaagagccgctgagcagattccagggagcttcgtctactcgatcccattcagcactggaccagtcaataaaagcaatgtggtgacagcaagtacatccatccagctcctggatgaacggaaatctcctgtggtggcagctgtaggcattcagatgaaacttgaatttttccaaaggaagttctggactgccagcagacagtgtgcttccctggatggcaaatgctccatcagctgtgatgatgagactgtgaattgttacctcatagacaataatggatttattttggtgtctgaagactacacacagactggagacttttttggtgagatcgagggagctgtgatgaacaaattgctaacaatgggctcctttaaaagaattaccctttatgactaccaagccatgtgtagagccaacaaggaaagcagcgatggcgcccatggcctcctggatccttataatgccttcctctctgcagtaaaatggatcatgacagaacttgtcttgttcctggtggaatttaacctctgcagttggtggcactccgatatgacagctaaagcccagaaattgaaacagaccctggagccttgtgatactgaatatccagcattcgtctctgagcgcaccatcaaggagactacagggaatattgcttgtgaagactgctccaagtcctttgtcatccagcaaatcccaagcagcaacctgttcatggtggtggtggacagcagctgcctctgtgaatctgtggcccccatcaccatggcacccattgaaatcaggtataatgaatcccttaagtgtgaacgtctaaaggcccagaagatcagaaggcgcccagaatcttgtcatggcttccatcctgaggagaatgcaagggagtgtgggggtgcgccgagtctccaagcccagacagtcctccttctgctccctctgcttttgatgctcttctcaaggtgacactgactgagatgttctcttactgactgagatgttctcttggcatgctaaatcatggataaactgtgaaccaaaatatggtgcaacatacgagacatgaatatagtccaaccatcagcatctcatcatgattttaaactgtgcgtgatataaactcttaaagatatgttgacaaaaagttatctatcatctttttactttgccagtcatgcaaatgtgagtttgccacatgataatcacccttcatcagaaatgggaccgcaagtggtaggcagtgtcccttctgcttgaaacctattgaaaccaatttaaaactgtgtactttttaaataaagtatattaaaatcataaaaaaaaaaaaaaaa

SEQ ID NO: 794 - protein, 1091 aa, Homo sapiens
MAGPGSPRRASRGASALLAAALLYAALGDVVRSEQQIPLSVVKLWASAFGGEIKSIAAKYSGSQLLQKKYKEYEKDVAIEEIDGLQLVKKLAKNMEEMFHKKSEAVRRLVEAAEEAHLKHEFDADLQYEYFNAVLINERDKDGNFLELGKEFILAPNDHFNNLPVNISLSDVQVPTNMYNKDPAIVNGVYWSESLNKVFVDNFDRDPSLIWQYFGSAKGFFRQYPGIKWEPDENGVIAFDCRNRKWYIQAATSPKDVVILVDVSGSMKGLRLTIAKQTVSSILDTLGDDDFFNIIAYNEELHYVEPCLNGTLVQADRTNKEHFREHLDKLFAKGIGMLDIALNEAFNILSDFNHTGQGSICSQAIMLITDGAVDTYDTIFAKYNWPDRKVRIFTYLIGREAAFADNLKWMACANKGFFTQISTLADVQENVMEYLHVLSRPKVIDQEHDVVWTEAYIDSTLPQAQKLTDDQGPVLMTTVAMPVFSKQNETRSKGILLGVVGTDVPVKELLKTIPKYKLGIHGYAFAITNNGYILTHPELRLLYEEGKKRRKPNYSSVDLSEVEWEDRDDVLRNAMVNRKTGKFSMEVKKTVDKGKRVLVMTNDYYYTDIKGTPFSLGVALSRGHGKYFFRGNVTIEEGLHDLEHPDVSLADEWSYCNTDLHPEHRHLSQLEAIKLYLKGKEPLLQCDKELIQEVLFDAVVSAPIEAYWTSLALNKSENSDKGVEVAFLGTRTGLSRINLFVGAEQLTNQDFLKAGDKENIFNADHFPLWYRRAAEQIPGSFVYSIPFSTGPVNKSNVVTASTSIQLLDERKSPVVAAVGIQMKLEFFQRKFWTASRQCASLDGKCSISCDDETVNCYLIDNNGFILVSEDYTQTGDFFGEIEGAVMNKLLTMGSFKRITLYDYQAMCRANKESSDGAHGLLDPYNAFLSAVKWIMTELVLFLVEFNLCSWWHSDMTAKAQKLKQTLEPCDTEYPAFVSERTIKETTGNIACEDCSKSFVIQQIPSSNLFMVVVDSSCLCESVAPITMAPIEIRYNESLKCERLKAQKIRRRPESCHGFHPEENARECGGAPSLQAQTVLLLLPLLLMLFSR

SEQ ID NO: 795 - DNA, 3561 bp, Homo sapiens
ccggctgtcggtctccgtgtcgccgccgccgcccggcatcgtggagctggggcccccttttgcctgggagttttgtagtcgcctagggtcagcggtgacatcccaaagggcaggcccggcagccgccatggtggccaaggattaccccttctacctcacggtcaagagagcgaactgcagcctggagctacctccggccagcggtccggccaaggacgctgaggagcctagtaataaacgggtcaaacccctttcccgagtcacgtcgctagcaaacctcatcccgcccgtgaaggccacgccattaaagcgcttcagtcaaaccctgcagcgctccattagcttccgcagtgagagccgccctgacatcctcgccccccgaccctggtccagaaatgccgccccctcgagcacgaaacggagagatagcaagctgtggagtgagaccttcgatgtgtgcgtcaatcagatgcttacatccaaggaaatcaaacgtcaggaggcgatctttgagctttcccaaggagaagaagacttgatagaagacttgaaattagcaaaaaaggcctatcatgaccccatgctgaaactctccataatgacagaacaagagttgaatcaaatttttggaacactggactctctaattcctctacatgaagagctccttagtcagcttcgagatgttaggaagcctgatggctcgactgaacatgttggtcccatcctcgtgggctggctcccttgcctcagctcctatgatagctactgcagcaatcaagtagccgccaaagctctgctggaccacaaaaagcaagatcaccgagtccaggatttcctacagcgatgtttagaatccccctttagccgcaaactagatctctggaatttcctcgatattccaagaagccgcctggtaaaataccctctgcttctccgagaaatcttgaggcacacaccaaatgataatccagatcagcagcacttggaagaagctataaatatcattcagggaattgtggcagaaatcaacaccaagactggtgaatctgaatgccgctattataaagagcggcttctttacttggaagaaggccagaaagactccctgatcgacagctctcgagtcttgtgttgtcatggtgaactgaagaacaatcggggcgtgaaactgcatgttttcctgttccaagaagtgcttgtgatcactcgagccgtcacccacaatgagcagctttgctaccagctgtaccgtcagccaatccccgtgaaagacctcctgctggaagacctccaggatggagaagtgaggctgggtggctccctgcgaggggcattcagcaacaatgagagaattaaaaacttcttcagagtcagtttcaaaaatggatcccaaagtcagacccactcgctacaagccaatgacactttcaacaaacagcagtggcttaactgtattcgtcaagccaaagaaacagttttgtgtgctgccgggcaagctggggtgcttgactccgagggatcgttcctaaatcccaccaccgggagcagagagctacagggagaaacaaaacttgagcagatggaccaatcggacagtgagtcagactgtagtatggacacgagtgaggtcagcctcgactgtgagcgcatggaacagacagactcttcctgtggaaacagcaggcacggtgaaagtaacgtctgacagaagcatgtgcacttcgggaagcaggcctgcatcttacctgtacagtatttgcattccacagatggaacggtttggagaagcactttttcatacttttgtgaaagtatacatgttggcccagtctctcgtatctgtacctttgtccctagtactgtaactgccaatctgtctgtgtaagctggaatctgtggcaactattaccctgtgttgtatttcccaagtgtctggatggatggagaggtactcaaacaagttactttcagttgtcctgctggattttaaaaaaatagaaaaagaatctcaaaactactgttttacatagattgtttgaagagtccttcctcttgtgcttctgtaccactttcccagctcttagatgtggtagctaaaggcacggaatttagacggccttgtaaatagggcatgaggaactcatctgtgtattgggatggtattagagagagaatcaggaaagaccaactcatgaagtgaacttggtttgatcttactcaactagaaagcttgaaaacatccctggggattctgaaggcttaattttgcaaaggaggatgcattgtctgaactttgcaacttcatccagtgcaagtttgatgcaagaatgtattaggacataaaatagaggctgaccttaaaagggccaggacagaagcggctgccagctctgaatctttaactgaaatgcacatggcaccaggaggtgtctctcatagttggttgctagcctaaaacatcagaatagaacccaaagggcttaggaaggcctgccaggataacaagaaggccctgtattcattgtgtttcatctgcctaggcctactcattattttagagaatgaatgaagcaacaaggaagagagaacatgactctatcgatgacactgtttatagaaacacaggagaggaagaatttggaatgaaaagcacttcgtcagaaccttctgtgggagccattgagagaaaagcatggtccagtgccttctgagaaaggccagagctttgggctttcctgctctgcttttgggtcgtcaatttgccatctctggttctgtgctataatcagaattgtaattatgttctccagaggccaatttcattaactctgattaattagaatcagctagccagattagtaacctctttgtccagccttgatttacagtgcagggtaaagtgcagaccttaaaaacagctaagtacctagaagagctccctgcaagtgtaaatattaaggatgacctgtgcaaaattatacccacaccagcactagtggtaattattctaaattattgccaaaaagttttttttaatctgtctttcaagtttacagaaaagaaagcagtaaatgcattgatgtcattttattatgtacatatatcatgtgcattcaagctgtgtgacaagatatatcaatataaaaacaaggtatatactttattattttttgaaaacaaggatattgtgatcaattttaccctgtaaaacatatttctgtatttataggtcttaaacatgatgaattttttctattacaagtttatttaaaactgctttctcaagtcgttattgatacagcaagtgaacctgctgcagacagaagcagaggaaagccaagaacagcctttattggtgaagaaaagaatgaatgattctttgtaggcgccatcagccacttttagaagccatcagccagtgtgttgggaaaagaggtttgtcaagtgttggcctatgggaaggtggtcaatgaatgttttgatgaaatgaatgtttttgtataatggccttaaacttttctggaagtatttcaaataaattacattattaagtcatca

SEQ ID NO: 796 - protein, 526 aa, Homo sapiens
MVAKDYPFYLTVKRANCSLELPPASGPAKDAEEPSNKRVKPLSRVTSLANLIPPVKATPLKRFSQTLQRSISFRSESRPDILAPRPWSRNAAPSSTKRRDSKLWSETFDVCVNQMLTSKEIKRQEAIFELSQGEEDLIEDLKLAKKAYHDPMLKLSIMTEQELNQIFGTLDSLIPLHEELLSQLRDVRKPDGSTEHVGPILVGWLPCLSSYDSYCSNQVAAKALLDHKKQDHRVQDFLQRCLESPFSRKLDLWNFLDIPRSRLVKYPLLLREILRHTPNDNPDQQHLEEAINIIQGIVAEINTKTGESECRYYKERLLYLEEGQKDSLIDSSRVLCCHGELKNNRGVKLHVFLFQEVLVITRAVTHNEQLCYQLYRQPIPVKDLLLEDLQDGEVRLGGSLRGAFSNNERIKNFFRVSFKNGSQSQTHSLQANDTFNKQQWLNCIRQAKETVLCAAGQAGVLDSEGSFLNPTTGSRELQGETKLEQMDQSDSESDCSMDTSEVSLDCERMEQTDSSCGNSRHGESNV

SEQ ID NO: 797 - DNA, 8192 bp, Homo sapiens
gcggccaggggcgggcggccgcagagcagcaccggccgtggctccggtagcagcaagttcgaaccccgctcccgctccgcttcggttctcgctccttcggcccttgggcctccaaacaccagtccccggcagctcgttgcgcattgcgctctccccgccaccaggatgccggtaaccgagaaggatctagctgaggacgcgccttggaagaagatccagcagaacacgttcacacgctggtgcaacgagcacctcaagtgcgtgaacaaacgcatcggcaacctgcagaccgacctgagcgacgggctgcggctcatcgcgctgctcgaggtgctcagccagaagcgcatgtaccgcaagtaccatcagcggcccacctttcgccagatgcagctcgagaatgtgtccgtggcgctcgagttcctggaccgtgagagcatcaagctcgtgtccatcgatagcaaagccattgtggatgggaacctgaagctcatcttgggtctggtgtggacgctgatcctccactactccatctccatgcccgtgtgggaggatgaaggggatgatgatgccaagaagcagacgccaaagcagaggctgctggggtggattcagaacaagatcccctacttgcccatcaccaactttaaccagaactggcaagacggcaaagccctgggagccctggtagacagctgtgctccaggtctgtgcccagactgggaatcctgggacccgcagaagcctgtggataatgcacgagaagccatgcagcaggcagatgactggctgggtgtcccacaggtcatcactcctgaagaaatcattcacccggatgtggacgagcactcagttatgacttacctgtcccagttccccaaagccaagctcaagccgggggctcctctcaaacccaaactcaacccgaagaaagccagggcctatggcagaggaatcgagcccactggaaacatggtgaagcagccagccaagttcactgtggacaccatcagcgccgggcaaggagacgtgatggtgtttgttgaggacccagaagggaacaaagaggaggcacaagtgacccctgacagtgacaagaacaagacatactctgtggagtatctgcccaaggtcaccgggctacacaaagtcacagtcctctttgcaggacagcacatctccaagagcccatttgaagtgagtgttgacaaggcccagggagatgccagtaaagtcactgcaaaaggtccagggttggaagctgtagggaacatcgccaataagcccacctactttgacatctatacggcaggagctggtgtgggtgacattggtgtggaggtggaagatccccaggggaagaacaccgtggagttgctcgtggaagacaaaggaaaccaggtgtatcgatgtgtgtacaaacccatgcagcctggccctcacgtggtcaagatcttctttgctggggacactattcctaagagtcccttcgttgtgcaggttggggaagcctgcaatccaaatgcctgccgggccagtggccgaggcctacaacccaaaggcgtccgtatccgggagaccacagatttcaaggttgacaccaaagctgcaggaagtggggagctcggtgtaaccatgaagggtcctaagggtctggaggagctggtgaagcagaaagactttctggatggggtctacgcattcgagtattaccccagcaccccggggagatacagcattgccatcacatgggggggacaccacattccaaagagcccctttgaagttcaagttggccctgaagcgggtatgcagaaagtccgtgcttggggccctgggctccatggtgggattgtcgggcggtcagcggacttcgtggtagaatccattggctctgaagtggggtctctggggtttgccattgaaggcccctctcaggcaaagattgagtacaacgaccagaatgatggatcgtgtgatgtcaaatactggcccaaggagcctggcgaatatgctgttcacatcatgtgtgacgacgaagacatcaaggacagcccgtacatggccttcatccacccagccacgggaggctacaaccctgatctggttcgagcatacgggccaggtttggagaaatctggatgcattgtcaacaacctggccgagttcactgtggatcctaaggatgctggaaaagctcccttaaagatatttgctcaggatggggaaggccaacgcattgacatccagatgaagaaccggatggacggcacatatgcatgctcatacaccccggtgaaggccatcaagcacaccattgctgtggtctggggaggcgtgaacatcccgcacagcccctacagggtcaacatcgggcaaggtagccatcctcagaaggtcaaagtgtttgggccaggtgtggagagaagtggtctgaaggcaaatgaacctacacacttcacggtggactgtactgaggctggggaaggtgatgtcagtgttggcattaagtgtgatgcccgggtgttaagtgaagatgaggaagacgtggattttgacattattcacaatgccaatgatacgttcacagtcaaatatgtgcctcctgctgctgggcgatacactatcaaagttctctttgcatctcaggaaatccccgccagccctttcagagtcaaagttgacccttcccacgatgccagcaaagtgaaggcagaaggcccagggctcagcaaagcaggtgtggaaaatgggaaaccgacccacttcactgtctacaccaagggggctgggaaagccccgctcaacgtgcagttcaacagccctcttcctggcgatgcagtgaaggatttggatatcatcgataattatgactactctcacacggttaaatatacacccacccaacagggcaacatgcaggttctggtgacttacggtggcgatcccatccctaaaagccctttcactgtgggtgttgctgcaccgctggatctgagcaagataaaactcaatgggctggaaaacagggtggaagttgggaaggatcaggagttcaccgttgataccaggggggcaggaggccaggggaagctggacgtgacaatcctcagcccctctcggaaggtcgtgccatgcctagtgacacctgtgacaggccgggagaacagcacggccaagttcatccctcgggaggaggggctgtatgctgtagacgtgacctacgatggacaccctgtgcccgggagcccctacacagtggaggcctcgctgccaccagatcccagcaaggtgaaggcccacggtcccggcctcgaaggtggtctcgtgggcaagcctgccgagttcaccatcgataccaaaggagctggtactggaggtctgggcttaacggtggaaggtccgtgcgaggccaaaatcgagtgctccgacaatggtgatgggacctgctccgtctcttaccttcccacaaaacccggggagtacttcgtcaacatcctctttgaagaagtccacatacctgggtctcccttcaaagctgacattgaaatgccctttgacccctctaaagtcgtggcatcggggccaggtctcgagcacgggaaggtgggtgaagctggcctccttagcgtcgactgctcggaagcgggaccgggggccctgggcctggaagctgtctcggactcgggaacaaaagccgaagtcagtattcagaacaacaaagatggcacctacgcggtgacctacgtgcccctgacggccggcatgtacacgttgaccatgaagtatggtggcgaactcgtgccacacttccccgcccgggtcaaggtggagcccgccgtggacaccagcaggatcaaagtctttggaccaggaatagaagggaaagatgtgttccgggaagctaccaccgactttacagttgactctcggccgctgacccaggttgggggtgaccacatcaaggcccacattgccaacccctcaggggcctccaccgagtgctttgtcacagacaatgcggatgggacctaccaggtggaatacacaccctttgagaaaggtctccatgtagtggaggtgacatatgatgacgtgcctatcccaaacagtcccttcaaggtggctgtcactgaaggctgccagccatctagggtgcaagcccaaggacctggattgaaagaggcctttaccaacaagcccaatgtcttcaccgtggttaccagaggcgcaggaattggtgggcttggcataactgttgagggaccatcagagtcgaagataaattgcagagacaacaaggatggcagctgcagtgctgagtacattcctttcgcaccgggggattacgatgttaatatcacatatggaggagcccacatccccggcagccccttcagggttcctgtgaaggatgttgtggaccccagcaaggtcaagattgccggccccgggctgggctcaggcgtccgagcccgtgtcctgcagtccttcacggtggacagcagcaaggctggcctggctccgctggaagtgagggttctgggcccacgaggcttggtggagccagtgaacgtggtggacaatggagatggcacacacacagtaacctacaccccatctcaggagggaccttacatggtctcagttaaatatgctgatgaagagattcctcgcagtcccttcaaggtcaaggtccttcccacatatgatgccagcaaagtgactgccagtggccccggccttagttcctatggtgtgcctgccagtctacctgtggactttgcaattgatgcccgagatgccggggaaggcctgcttgctgttcaaataacggaccaagaaggaaaacccaaaagagccattgtccatgacaataaagatggcacgtatgctgtcacctacatccccgacaagactgggcgctatatgattggagtcacctacgggggtgacgacatcccactttctccttatcgcatccgagccacacagacgggtgatgccagcaagtgcctggccacgggtcctggaatcgcctccactgtgaaaactggcgaagaagtaggctttgtggttgatgccaagactgccgggaagggtaaagtgacctgcacggttctgaccccagatggcactgaggccgaggccgatgtcattgagaatgaagatggaacctatgacatcttctacacagctgccaagccgggcacatatgtgatctatgtgcgcttcggtggtgttgatattcctaacagccccttcactgtcatggccacagatggggaagtcacagccgtggaggaggcaccggtaaatgcatgtccccctggattcaggccctgggtgaccgaagaggcctatgtcccagtgagtgacatgaacggcctgggatttaagccttttgacctggtcattccgtttgctgtcaggaaaggagaaatcactggagaggtccacatgccttctgggaagacagccacacctgagattgtggacaacaaggacggcacggtcactgttagatatgcccccactgaggtcgggctccatgagatgcacatcaaatacatgggcagccacatccctgagagcccactccagttctacgtgaactaccccaacagtggaagtgtttctgcatacggtccaggcctcgtgtatggagtggccaacaaaactgccaccttcaccatcgtcacagaggatgcaggagaaggtggtctggacttggctattgagggcccctcaaaagcagaaatcagctgcattgacaataaagatgggacatgcacagtgacctacctgccgactctgccaggcgactacagcattctggtcaagtacaatgacaagcacatccctggcagccccttcacagccaagatcacagatgacagcaggcggtgctcccaggtgaagttgggctcagccgctgacttcctgctcgacatcagtgagactgacctcagcagcctgacggccagcattaaggccccatctggccgagacgagccctgtctcctgaagaggctgcccaacaaccacattggcatctccttcatcccccgggaagtgggcgaacatctggtcagcatcaagaaaaatggcaaccatgtggccaacagccccgtgtctatcatggtggtccagtcggagattggtgacgcccgccgagccaaagtctatggccgcggcctgtcagaaggccggactttcgagatgtctgacttcatcgtggacacaagggatgcaggttatggtggcatatccttggcggtggaaggccccagcaaagtggacatccagacggaggacctggaagatggcacctgcaaagtctcctacttccctaccgtgcctggggtttatatcgtctccaccaaattcgctgacgagcacgtgcctgggagcccatttaccgtgaagatcagtggggagggaagagtcaaagagagcatcacccgcaccagtcgggccccgtccgtggccactgtcgggagcatttgtgacctgaacctgaaaatcccagaaatcaacagcagtgatatgtcggcccacgtcaccagcccctctggccgtgtgactgaggcagagattgtgcccatggggaagaactcacactgcgtccggtttgtgccccaggagatgggcgtgcacacggtcagcgtcaagtaccgtgggcagcacgtcaccggcagccccttccagttcaccgtggggccacttggtgaaggaggcgcccacaaggtgcgggcaggaggccctggcctggagagaggagaagcgggagtcccagctgagttcagcatttggacccgggaagcaggcgctggaggcctctccatcgctgttgagggccccagtaaggccgagattacattcgatgaccataaaaatgggtcgtgcggtgtatcttatattgcccaagagcctggtaactacgaggtgtccatcaagttcaatgatgagcacatcccggaaagcccctacctggtgccggtcatcgcaccctccgacgacgcccgccgcctcactgttatgagccttcaggaatcgggattaaaagttaaccagccagcatcctttgctataaggttgaatggcgcaaaaggcaagattgatgcaaaggtgcacagcccctctggagccgtggaggagtgccacgtgtctgagctggagccagataagtatgctgttcgcttcatccctcatgagaatggtgtccacaccatcgatgtcaagttcaatgggagccacgtggttggaagccccttcaaagtgcgcgttggggagcctggacaagcggggaaccctgccctggtgtccgcctatggcacgggactcgaagggggcaccacaggtatccagtcggaattctttattaacaccacccgagcaggtccagggacattatccgtcaccatcgaaggcccatccaaggttaaaatggattgccaggaaacacctgaagggtacaaagtcatgtacacccccatggctcctggtaactacctgatcagcgtcaaatacggtgggcccaaccacatcgtgggcagtcccttcaaggccaaggtgacaggccagcgtctagttagccctggctcagccaacgagacctcatccatcctggtggagtcagtgaccaggtcgtctacagagacctgctatagcgccattcccaaggcatcctcggacgccagcaaggtgacctctaagggggcagggctctcaaaggcctttgtgggccagaagagttccttcctggtggactgcagcaaagctggctccaacatgctgctgatcggggtccatgggcccaccaccccctgcgaggaggtctccatgaagcatgtaggcaaccagcaatacaacgtcacatacgtcgtcaaggagaggggcgattatgtgctggctgtgaagtggggggaggaacacatccctggcagcccttttcatgtcacagtgccttaaaacagttttctcaaatcctggagagagttcttgtggttgcttttgttgcttgtttgtaattcattttatacaaagccctccagcctgtttgtggggctgaaaccccatccctaaaatattgctgttgtaaaatgccttcagaaataagtcctagactggactcttgagggacatattggagaatcttaagaaatgcaagcttgttcagggggctgaga

SEQ ID NO: 798 - protein, 2602 aa, Homo sapiens
MPVTEKDLAEDAPWKKIQQNTFTRWCNEHLKCVNKRIGNLQTDLSDGLRLIALLEVLSQKRMYRKYHQRPTFRQMQLENVSVALEFLDRESIKLVSIDSKAIVDGNLKLILGLVWTLILHYSISMPVWEDEGDDDAKKQTPKQRLLGWIQNKIPYLPITNFNQNWQDGKALGALVDSCAPGLCPDWESWDPQKPVDNAREAMQQADDWLGVPQVITPEEIIHPDVDEHSVMTYLSQFPKAKLKPGAPLKPKLNPKKARAYGRGIEPTGNMVKQPAKFTVDTISAGQGDVMVFVEDPEGNKEEAQVTPDSDKNKTYSVEYLPKVTGLHKVTVLFAGQHISKSPFEVSVDKAQGDASKVTAKGPGLEAVGNIANKPTYFDIYTAGAGVGDIGVEVEDPQGKNTVELLVEDKGNQVYRCVYKPMQPGPHVVKIFFAGDTIPKSPFVVQVGEACNPNACRASGRGLQPKGVRIRETTDFKVDTKAAGSGELGVTMKGPKGLEELVKQKDFLDGVYAFEYYPSTPGRYSIAITWGGHHIPKSPFEVQVGPEAGMQKVRAWGPGLHGGIVGRSADFVVESIGSEVGSLGFAIEGPSQAKIEYNDQNDGSCDVKYWPKEPGEYAVHIMCDDEDIKDSPYMAFIHPATGGYNPDLVRAYGPGLEKSGCIVNNLAEFTVDPKDAGKAPLKIFAQDGEGQRIDIQMKNRMDGTYACSYTPVKAIKHTIAVVWGGVNIPHSPYRVNIGQGSHPQKVKVFGPGVERSGLKANEPTHFTVDCTEAGEGDVSVGIKCDARVLSEDEEDVDFDIIHNANDTFTVKYVPPAAGRYTIKVLFASQEIPASPFRVKVDPSHDASKVKAEGPGLSKAGVENGKPTHFTVYTKGAGKAPLNVQFNSPLPGDAVKDLDIIDNYDYSHTVKYTPTQQGNMQVLVTYGGDPIPKSPFTVGVAAPLDLSKIKLNGLENRVEVGKDQEFTVDTRGAGGQGKLDVTILSPSRKVVPCLVTPVTGRENSTAKFIPREEGLYAVDVTYDGHPVPGSPYTVEASLPPDPSKVKAHGPGLEGGLVGKPAEFTIDTKGAGTGGLGLTVEGPCEAKIECSDNGDGTCSVSYLPTKPGEYFVNILFEEVHIPGSPFKADIEMPFDPSKVVASGPGLEHGKVGEAGLLSVDCSEAGPGALGLEAVSDSGTKAEVSIQNNKDGTYAVTYVPLTAGMYTLTMKYGGELVPHFPARVKVEPAVDTSRIKVFGPGIEGKDVFREATTDFTVDSRPLTQVGGDHIKAHIANPSGASTECFVTDNADGTYQVEYTPFEKGLHVVEVTYDDVPIPNSPFKVAVTEGCQPSRVQAQGPGLKEAFTNKPNVFTVVTRGAGIGGLGITVEGPSESKINCRDNKDGSCSAEYIPFAPGDYDVNITYGGAHIPGSPFRVPVKDVVDPSKVKIAGPGLGSGVRARVLQSFTVDSSKAGLAPLEVRVLGPRGLVEPVNVVDNGDGTHTVTYTPSQEGPYMVSVKYADEEIPRSPFKVKVLPTYDASKVTASGPGLSSYGVPASLPVDFAIDARDAGEGLLAVQITDQEGKPKRAIVHDNKDGTYAVTYIPDKTGRYMIGVTYGGDDIPLSPYRIRATQTGDASKCLATGPGIASTVKTGEEVGFVVDAKTAGKGKVTCTVLTPDGTEAEADVIENEDGTYDIFYTAAKPGTYVIYVRFGGVDIPNSPFTVMATDGEVTAVEEAPVNACPPGFRPWVTEEAYVPVSDMNGLGFKPFDLVIPFAVRKGEITGEVHMPSGKTATPEIVDNKDGTVTVRYAPTEVGLHEMHIKYMGSHIPESPLQFYVNYPNSGSVSAYGPGLVYGVANKTATFTIVTEDAGEGGLDLAIEGPSKAEISCIDNKDGTCTVTYLPTLPGDYSILVKYNDKHIPGSPFTAKITDDSRRCSQVKLGSAADFLLDISETDLSSLTASIKAPSGRDEPCLLKRLPNNHIGISFIPREVGEHLVSIKKNGNHVANSPVSIMVVQSEIGDARRAKVYGRGLSEGRTFEMSDFIVDTRDAGYGGISLAVEGPSKVDIQTEDLEDGTCKVSYFPTVPGVYIVSTKFADEHVPGSPFTVKISGEGRVKESITRTSRAPSVATVGSICDLNLKIPEINSSDMSAHVTSPSGRVTEAEIVPMGKNSHCVRFVPQEMGVHTVSVKYRGQHVTGSPFQFTVGPLGEGGAHKVRAGGPGLERGEAGVPAEFSIWTREAGAGGLSIAVEGPSKAEITFDDHKNGSCGVSYIAQEPGNYEVSIKFNDEHIPESPYLVPVIAPSDDARRLTVMSLQESGLKVNQPASFAIRLNGAKGKIDAKVHSPSGAVEECHVSELEPDKYAVRFIPHENGVHTIDVKFNGSHVVGSPFKVRVGEPGQAGNPALVSAYGTGLEGGTTGIQSEFFINTTRAGPGTLSVTIEGPSKVKMDCQETPEGYKVMYTPMAPGNYLISVKYGGPNHIVGSPFKAKVTGQRLVSPGSANETSSILVESVTRSSTETCYSAIPKASSDASKVTSKGAGLSKAFVGQKSSFLVDCSKAGSNMLLIGVHGPTTPCEEVSMKHVGNQQYNVTYVVKERGDYVLAVKWGEEHIPGSPFHVTVP

SEQ ID NO: 799 - DNA, 1463 bp, Homo sapiens
cagcctatgacacttttgctcctcctgaaatctccatatcttgcctttctcaaattccaaggtagcctttgcgcaacatatcactctccactgactcttgtcccatcagggcccatagtggatggctgtatgggggccatgtgactgaactcctgatcctcgtttcagcccactcatgtgacatgcatggagctcttcagcagggacttactgaccaggacaagagcttgagactttgaggggatctgattgtcactgcacaatcaaggacagtattcccaagagtggatgttgctcaagatagtccaaggaattctatgaagaaaaggactccacagacaataaattttggacaccctgtttcaacacagtgcatcttagagactggtgtttgcaagtatatggagcaggaaacttcatcccgaagatggagaccccggggctgtcagcaggcgttagagtcttgaagccagagcagcgccaggatgtcacgggagctggccccactgctgcttctcctcctctccatccacagcgccctggccatgaggatctgctccttcaacgtcaggtcctttggggaaagcaagcaggaagacaagaatgccatggatgtcattgtgaaggtcatcaaacgctgtgacatcatactcgtgatggaaatcaaggacagcaacaacaggatctgccccatactgatggagaagctgaacagaaattcaaggagaggcataacgtacaactatgtgattagctctcggcttggaagaaacacatataaagaacaatatgcctttctctacaaggaaaagctggtgtctgtgaagaggagttatcactaccatgactatcaggatggagacgcagatgtgttttccagggagccctttgtggtctggttccaatctccccacactgctgtcaaagacttcgtgattatccccctgcacaccaccccagagacatccgttaaggagatcgatgagttggttgaggtctacacggacgtgaaacaccgctggaaggcggagaatttcattttcatgggtgacttcaatgccggctgcagctacgtccccaagaaggcctggaagaacatccgcttgaggactgaccccaggtttgtttggctgatcggggaccaagaggacaccacggtgaagaagagcaccaactgtgcatatgacaggattgtgcttagaggacaagaaatcgtcagttctgttgttcccaagtcaaacagtgtttttgacttccagaaagcttacaagctgactgaagaggaggccctggatgtcagcgaccactttccagttgaatttaaactacagtcttcaagggccttcaccaacagcaaaaaatctgtcactctaaggaagaaaacaaagagcaaacgctcctagacccaagggtctcatcttattaaccatttcttgcctctaaataaaatgtctctaacagat

SEQ ID NO: 800 - protein, 305 aa, Homo sapiens
MSRELAPLLLLLLSIHSALAMRICSFNVRSFGESKQEDKNAMDVIVKVIKRCDIILVMEIKDSNNRICPILMEKLNRNSRRGITYNYVISSRLGRNTYKEQYAFLYKEKLVSVKRSYHYHDYQDGDADVFSREPFVVWFQSPHTAVKDFVIIPLHTTPETSVKEIDELVEVYTDVKHRWKAENFIFMGDFNAGCSYVPKKAWKNIRLRTDPRFVWLIGDQEDTTVKKSTNCAYDRIVLRGQEIVSSVVPKSNSVFDFQKAYKLTEEEALDVSDHFPVEFKLQSSRAFTNSKKSVTLRKKTKSKRS

SEQ ID NO: 801 - DNA, 2364 bp, Homo sapiens
agttgccggcgttgggttgtgcgagacgctaactgtaccctccgggtttaacgctgtgaggcagcagcgcgggggaactggggataagcgccccggagcccccaaacagagcgcggccgctgggggacagcgcgcggcgccgggtcggggcggggcggcttttctgtcggaggacgcgaaccggcacgctgcgcctttaaggagtccagctgggctgggcgccggagctgggagcggcgcgggtaggagcccggcggcaggtcccagcccggggctagagaccgagggccggggtccgggcccggcggcgggacccaggcggttgaggctggtcaggagtcagccagcctgaaagagcaggatggatcttgatgtggttaacatgtttgtgactgcgggcggcacgctggccatcccaatcctggcatttgtggcttcatttcttctgtggccttcagcactgataagaatctattattggtactggcggaggacattgggcatgcaagtccgctatgttcaccatgaagactatcagttctgttattccttccggggcaggcctgggcacaaaccctccatcctcatgctccacggattctctgcccacaaggatatgtggctcagtgtggtcaagttccttccaaagaacctgcacttggtctgcgtggacatgccaggacatgagggcaccacccgctcctccctggatgacctgtccatagatgggcaagttaagaggatacaccagtttgtagaatgcccgaagctgaacaaaaaacctttccacctggtaggcacctccatgggtggccaggtggctggggtgtatgctgcttactacccatcggatgtctccagcctgtgtctcgtgtgtcctgctggcctgcagtactcaactgacaatcaatttgtacaacggctcaaagaactgcagggctctgccgccgtggagaagattcccttgatcccgtctaccccagaagagatgagtgaaatgcttcagctctgctcctatgtccgcttcaaggtgccccagcagatcctgcaaggccttgtcgatgtccgcatccctcataacaacttctaccgaaagttgtttttggaaatcgtcagtgagaagtccagatactctctccatcagaacatggacaagatcaaggttccgacgcagatcatctgggggaaacaagaccaggtgctggatgtgtctggggcagacatgttggccaagtcaattgccaactgccaggtggagcttctggaaaactgtgggcactcagtagtgatggaaagacccaggaagacagccaagctcataatcgactttttagcttctgtgcacaacacagacaacaacaagaagctggactgaggccccgactgcagcctgcattctgcacacagcatctgctcccatcccccaagtctgacgcagccaccactctcagggatcctgccccaaatgcggtcggagcgccagtgaccctgaggaagcccgtcccttatccctggtatccacggttccccagagctttggggaccacgcgaaaacctccaagatatttttcacaaaatagaaactcatatggaacaaaataagaaaccccagccatgaaatctaccatgaagtcttcaagttcatgtcactgagaagcttgtgcaaagcagccaccttggaccataattaaatcaaggacattttctttgagacattccttatagttggagactcaagatatttttgttgcatcaggtgtattcccttgcatgggcagtggcttttataggagcattagtcctcattcgctgaaccctgttgtttaggtctaatttaagttttacatagagacccatgtatgactgcagcccattggctgcaagaccagggaggaaagtggcaagctgtagaaaatgtttacacgcatggaggggcattgctctagccctcagagcgtccggagcagcagggtacatgggtgggaggttcattcagcacccaccagtcaggtatgttctgagtgaacccacagcagtcgcagaatgagcacctggcagggtgggtttcctaggaataatttattatttttaaaaataggcctaataaagcaataatgttctagacatctgtctaagtaatcagactcaggttccacacacaagcaacaactcgtgggcctcttttctatttcaatgtgctactaagaacccttggatgtaacatactagttagttaatgaattctgtgaattctgtgaagagtaatgtgattgaaaataagtctaaacagctgtaaaagtgaccacaatgacatgaaataaatttaataagtctagatcagcaaaaaaaaaaaaaaaaaaaaaa

SEQ ID NO: 802 - protein, 337 aa, Homo sapiens
MDLDVVNMFVTAGGTLAIPILAFVASFLLWPSALIRIYYWYWRRTLGMQVRYVHHEDYQFCYSFRGRPGHKPSILMLHGFSAHKDMWLSVVKFLPKNLHLVCVDMPGHEGTTRSSLDDLSIDGQVKRIHQFVECPKLNKKPFHLVGTSMGGQVAGVYAAYYPSDVSSLCLVCPAGLQYSTDNQFVQRLKELQGSAAVEKIPLIPSTPEEMSEMLQLCSYVRFKVPQQILQGLVDVRIPHNNFYRKLFLEIVSEKSRYSLHQNMDKIKVPTQIIWGKQDQVLDVSGADMLAKSIANCQVELLENCGHSVVMERPRKTAKLIIDFLASVHNTDNNKKLD

SEQ ID NO: 803 - DNA, 1567 bp, Homo sapiens
gaattcggcacgagggagaagccaaacgtaaagacaccaggagtttctcgggcccagctgtggctgctgccggggagccccaagccttggcggtccttgctgcgaataggagtctggtcaggcgtcaggctagtccgacgaagagtgggtgtgatcagcactggaaaagatgcctgcccctgctgccacatatgaaagagtagtttacaaaaacccttccgagtaccactacatgaaagtctgcctagaatttcaagattgtggagttggactgaatgctgcacagttcaaacagctgcttatttcggctgtgaaggacctgtttggggaggttgatgccgccttacctttggacatcctaacctatgaagagaagaccttgtcagccatcttgagaatatgtagcagtggtcttgtcaaattgtggagctctttgaccctgttaggatcctataaaggcaaaaaatgtgctttccgggtgattcaggtttctccatttcttcttgcattatctggtaatagtagggaactagtattggattgaatgaatagtcttccattttggaaacgttcatccactctcatatttattttttcggtgcctgcatgtttgaagactgaagcaggctaaaagctcttgatgaaatttgagggtgctgaagatgttcccactaatttccagccatcacctttggtggggtgggcttcggaggacagtctgtctgaacctgccagtgctgaccctgcagcactttcagcatatgcacatcaaagttggagaccgcgctgaacttaggagggccttcacacagactgatgtggctaccttctcagaattaacaggggatgttaatcctttgcatttgaatgaagactttgcaaaacacaccaagtttggaaatacaattgtacatggagttttgatcaacggacttatctcagctctcctaggaactaaaatgccagggccaggctgtgtatttctttcccaggaaattagctttccagcccctttatatattggagaagttgttttagcttctgcagaagtgaaaaagctgaagcggttcattgctattattgcagtgtcatgttctgtaatagaaagtaaaaagactgttatggaaggctgggttaaagttatggttccagaagcttccaaatcctgaaatagatgttttaaagatgcaacctcaaacaccaatgctgttgttaaagagcctatggggaattgctgctctttaccaaagaatggttgataggcccagaagcccatgttagttaggggaagggagcaggaagagggttgttcaaatgcccactttccagtttggccttatgctttatgcagacttgagtgtatgcaggatttcattatctgcctgggtttttttgtttgttttttgttttttaattcaagaagtaggctgggcccggtggctcatgcctgtaatcctggcactttgggaggctgcggcaggcggatcacttgaggtcaggagtccaagaccagcctggccaacatggtgaaaccccatctctaccaaaaaaaaaaaaaaaaaaaaaa

SEQ ID NO: 804 - protein, 124 aa, Homo sapiens
MPAPAATYERVVYKNPSEYHYMKVCLEFQDCGVGLNAAQFKQLLISAVKDLFGEVDAALPLDILTYEEKTLSAILRICSSGLVKLWSSLTLLGSYKGKKCAFRVIQVSPFLLALSGNSRELVLD

SEQ ID NO: 805 - DNA, 2050 bp, Homo sapiens
gtgttgacagcggcggcggtggaaccgggcgggcggcgggagtcggcgcctcgggttcctacctcgcgtccctaggcggcggcggccgggcgtcccgggatggccttcatggagaagccgccagccggcaaggtgctgctggacgacacggtgccgctgacagcagccatcgaggcgagccagagcctgcagtcccacacggaatatattattcgagtgcaaagaggaatttctgtggaaaacagctggcagattgttagaagatacagtgactttgatttgcttaacaacagcttacagattgcaggcctaagtctacctcttcctcccaaaaaattgattggtaacatggatcgtgaattcatagctgaaaggcagaaaggtcttcagaactatctcaacgtgatcacaacaaatcatatcttgtctaattgtgagctggttaagaagtttttagatccaaacaactattccgcaaactatactgagattgccttgcaacaggtttccatgttcttccgatcagaaccaaagtgggaggtggtggaacctttgaaagacataggttggagaataaggaagaaatatttcttgatgaagattaaaaatcagccaaaggaacggctagtgttaagctgggctgaccttggcccagacaagtatttgtcagataaagattttcagtgtctaatcaaacttctgccttcttgtttgcacccttacatctatcgggttacctttgccacagctaatgaatcctcagcgttgctaattaggatgtttaacgaaaagggaacattgaaggatctgatctacaaggcaaaaccaaaagacccatttctaaagaagtactgcaaccctaagaagattcagggcctggaactccagcaaataaaaacatatggacggcaaatattagaggtactgaagtttcttcatgacaagggattcccttatgggcatcttcacgcctccaatgtgatgctcgatggggacacttgccggctgctggaccttgagaattccttattgggcctgccttccttctaccgatcttatttttcacaattcaggaaaatcaatacattggaaagtgtggatgtccactgctttggccacttactgtatgaaatgacttatggacgaccgccagactcggtgcctgtggactccttccctcctgccccgtccatggctgtggtggccgtgttggagtctacgctgtcttgtgaagcctgtaaaaatggcatgcctaccatctcccggctcttacagatgccattattcagcgatgttttactaaccacttctgaaaaaccacagtttaagatccctacaaagttaaaagaggcattgagaattgccaaagaatgtatagagaagagactaattgaggaacagaaacagattcaccagcatcgaagactgacaagagctcagtcccaccatggatctgaggaggaaagaaaaaaaagaaagattttagctcgaaagaagtcaaaacgatctgctcttgaaaatagtgaagagcattcagcgaagtacagcaactccaataattcagcaggatctggggccagctcacctctcacgtccccgtcatcgccaactccaccctctacatcagggatatctgcattacctccacctcctccacctccaccaccaccagcagctcccttgcctcctgcgagcaccgaggcacctgcccagctctcgtctcaggctgtgaatggcatgagccgaggggccttgctcagctccatccagaatttccaaaaaggaactttgaggaaagccaaaacctgtgatcacagtgctccgaagatcggctgaagcttcctgtttacacttggagggaaaagttcttttttattcctactcacccctaccccccaaactaccctcttcctgggaaagtaattgctgagccagtacagccacaaacagtactattttgcagatgctcatgtaagcagcttttcgagagaaataattctttaagcagaataaagttaggctggcatgcaaaaaaaaaaaaaaaaaaaaa

SEQ ID NO: 806 - protein, 578 aa, Homo sapiens
MAFMEKPPAGKVLLDDTVPLTAAIEASQSLQSHTEYIIRVQRGISVENSWQIVRRYSDFDLLNNSLQIAGLSLPLPPKKLIGNMDREFIAERQKGLQNYLNVITTNHILSNCELVKKFLDPNNYSANYTEIALQQVSMFFRSEPKWEVVEPLKDIGWRIRKKYFLMKIKNQPKERLVLSWADLGPDKYLSDKDFQCLIKLLPSCLHPYIYRVTFATANESSALLIRMFNEKGTLKDLIYKAKPKDPFLKKYCNPKKIQGLELQQIKTYGRQILEVLKFLHDKGFPYGHLHASNVMLDGDTCRLLDLENSLLGLPSFYRSYFSQFRKINTLESVDVHCFGHLLYEMTYGRPPDSVPVDSFPPAPSMAVVAVLESTLSCEACKNGMPTISRLLQMPLFSDVLLTTSEKPQFKIPTKLKEALRIAKECIEKRLIEEQKQIHQHRRLTRAQSHHGSEEERKKRKILARKKSKRSALENSEEHSAKYSNSNNSAGSGASSPLTSPSSPTPPSTSGISALPPPPPPPPPPAAPLPPASTEAPAQLSSQAVNGMSRGALLSSIQNFQKGTLRKAKTCDHSAPKIG

SEQ ID NO: 807 - DNA, 615 bp, Homo sapiens
gcccttggcctgtttctatgaagctccctggtgagaagagtttgtcttttcctttgcaccccgaagcccctgcctgggctaaaaacgtgcaggaatgcggcatttggagaaattacacctctgagctgccaggatatattcaaacagccaagaacagaagttggcccaactgggacgcatccgtggagcagcaaatatgcacactcctggcagtcatgcaagcaagatggtcaacgtcagatacacaaggctggcttgagcagtgttcactggggaaaattcatggacaggggagcagaaacagaagaaaaaccacccaccccaatgtcttgcacactgcaacaactctgtgaacactggtcattattctactgttgttattggtgctctttactggccaaagctcagtgggaggactactatctaacacaagtgccctgcaggacagaaagaacaagagtgctagagcttttgtgcatctgggccattttttcatttgacatatgaagaatctaagaacctgcaaggtggaagtgacctgttcaaatagcagcaaagtcaaaagcagatgtagctctctatctctgagcctctaataaaattaatctaaatagt

SEQ ID NO: 808 - protein, 111 aa, Homo sapiens
MKLPGEKSLSFPLHPEAPAWAKNVQECGIWRNYTSELPGYIQTAKNRSWPNWDASVEQQICTLLAVMQARWSTSDTQGWLEQCSLGKIHGQGSRNRRKTTHPNVLHTATTL

SEQ ID NO: 809 - DNA, 963 bp, Homo sapiens
ctcagcttgcgccgccgccgccgccgccgccgccgcgcacgccatgggagccgtgactgacgacgaagttatacggaagcgtctcctcattgatggagatggtgctggaggtgatcggagaattaatctgctagtgaagagtttcattaaatggtgcaactctgggtcccaggaggagggatatagccagtaccaacgtatgctgagcacgctgtctcaatgtgaattttcaatgggcaaaactttactagtatatgatatgaatctcagagaaatggaaaattatgaaaaaatttacaaggaaatagaatgtagcatagctggagcacatgaaaaaattgctgagtgcaaaaagcaaattcttcaagcaaaacgaatacgaaaaaatcgccaagaatatgatgctttggcaaaagtgattcagcaccatccagacaggcatgagacattaaaggaactagaggctctgggaaaagaattagagcatctttcacacattaaagaaagtgttgaagataagctggaattgagacggaaacagtttcatgttcttcttagtaccatccatgaacttcagcaaacattggaaaatgatgaaaaactctcagaggtagaagaagctcaggaagcaagcatggaatcagatcctaagccatagacaggctaattgcccaccactcccaggaatattgaaatagctacatgaccataatgtgtttaaaatgtggtatgctcttgagatatttaaagttttggcagtaaaatactctgtttttaagtatgaatgtatttcattcatatttcctctcacaaaggaaaatgacttcagtatagatttgtttttattaaaatgcattttttattcttaagtggtaggaagcaacatccaaaaatgcttaataaaatgcttttaagctgcaaaaaaaaaaaaaaaaaaaaaaaaaaaaaaaaaaaaaaaaaaaa

SEQ ID NO: 810 - protein, 204 aa, Homo sapiens
MGAVTDDEVIRKRLLIDGDGAGGDRRINLLVKSFIKWCNSGSQEEGYSQYQRMLSTLSQCEFSMGKTLLVYDMNLREMENYEKIYKEIECSIAGAHEKIAECKKQILQAKRIRKNRQEYDALAKVIQHHPDRHETLKELEALGKELEHLSHIKESVEDKLELRRKQFHVLLSTIHELQQTLENDEKLSEVEEAQEASMESDPKP

SEQ ID NO: 811 - DNA, 4416 bp, Homo sapiens
gaaaaagggtgaaagagaaacttggcgacctcccggaggagttcgcgaagcgaccaggagcgtgttgccatcgtcctcacccggcacccaattccaccacagagtcgggatttcgtcggtgatcgtgatggggtgcttttatttttctctttgattttcaaaaaatgtctatgtgactgtccctatcttaaggggaagttgaaagtgggggcgggggtgctcaatgagaaacgttgccttgtgtgtagttgtttggagcacactgcaaattatattggcatctctttccaaaagtcactttgattcaacttcgatagctttctcgtaaatggcacgtttaggtggtgagaggtggatgaggaaacaggcaccagtgcagctgatttgacctccagtgggatagatacgattagcaccaggatcgtgtctcattttgaacccagatctgaacagaattaagacgaacgagctttcacaattgcagcagatgaagatccattggtaaattgatcaggatttttggcctaccctccaaagaaaaggagcggaaagaatgtcggagcgggccgcggatgacgtcaggggggagccgcgccgcgcggcggcggcggcgggcggagcagcggccgcggccgcccggcagcagcagcagcagcagcagcagcagcagccgccgcctccgcagccccagcggcagcagcacccgccaccgccgccacggcgcacacggccggaggacggcgggcccggcgccgcctccacctcggccgccgcaatggcgacggtcggggagcgcaggcctctgcccagtcctgaagtgatgctgggacagtcgtggaatctgtgggttgaggcttccaaacttcctgggaaggacgggacagaattggacgaaagtttcaaggagtttgggaaaaaccgcgaagtcatggggctctgtcgggaagacatgccaatatttggtttctgtccagcccatgatgatttctacttggtggtgtgtaacgactgtaatcaggttgtcaaaccgcaggcatttcaatcacattatgaaagaagacatagctcatccagcaagccgcctttggccgttcctcccacttcagtattttccttcttcccttctctgtccaaaagcaaaggaggcagtgcaagtggaagcaaccgttcttccagtggaggtgttcttagcgcatcctcatcaagttccaagttgttgaaatcacccaaagagaaactgcagctcagggggaacaccaggccaatgcatcccattcagcaaagtagagttccccatggtagaatcatgacaccctctgtgaaagtggaaaagattcatccgaaaatggatggcacactactgaaatctgcggtggggccaacctgtcctgctactgtgagttccttagtcaagcctggccttaactgcccctcaataccaaagccaaccttgccttcacctggacagattctgaatggcaaagggcttcctgcaccgcccactctggaaaagaaacctgaagacaattccaataataggaaatttttaaataagagattatcagaaagagagtttgatcctgacatccactgtggggttattgatctcgacaccaagaagccctgcacccggtctttgacatgcaagacacattccttaacccagcgcagggctgtccagggtagaagaaaacgatttgatgtgttattagccgagcacaaaaacaaaaccagggaaaaggaattgattcgccatccggactctcagcaaccaccgcagcctctcagggacccgcatcccgcccctcctagaacgtcacaggagccgcaccaaaaccctcacggagtgattccttccgaatcaaagccttttgtagctagtaaacctaaacctcacacccccagtcttccaaggcctccaggctgccctgctcagcaaggtgggagtgcccccattgaccctcctccagtccatgaatctccacaccctcccctgcctgccactgagccagcttctcggttatccagtgaggagggcgaaggcgatgacaaagaagagtctgttgaaaaactggactgtcattattcaggtcatcatcctcagccagcatctttttgcacatttgggagccggcagataggaagaggctattacgtgtttgactccaggtggaatcgacttcgctgcgccctcaacctcatggtggagaagcatctgaatgcacagctatggaagaaaatcccaccagtgcccagtaccacctcacccatctccacacgtattcctcaccggacaaactctgtgccgacatcacaatgtggagtcagctatctggcagcagccaccgtctctacatccccagtcctgctctcatctacctgcatctccccaaatagcaaatcggtaccagctcatggaaccacactaaatgcacagcctgctgcttcaggggcgatggatcctgtgtgcagtatgcaatccagacaagtgtcctcttcatcctcatccccttccacgccctctggcctttcctcggttccttcctcccccatgtccaggaaacctcagaaattgaaatccagcaaatctttgaggcccaaggagtcttctggtaacagcactaactgtcaaaatgccagtagcagtaccagtggcggctcaggaaagaaacgcaaaaacagttccccactgttggttcactcttcctcctcctcttcctcctcctcctcttcttctcattccatggagtcttttaggaaaaactgtgtggctcactctgggcctccctacccctcaacggtaacatcttcccatagcatcggcctcaactgtgtgacgaataaagcaaatgcggtgaacgtccggcatgaccagtcagggaggggcccccccaccgggagccctgctgaatccatcaagaggatgagtgtgatggtgaacagcagtgattctactctttctcttgggccattcattcaccagtccaatgaactgcctgtcaactcccacggcagtttttcccactcacacactcctctagacaaactcataggaaagaaaagaaagtgctcacccagctcgagcagcatcaacaacagcagcagcaaacccacaaaggttgccaaagtgccagccgtgaacaatgtccacatgaaacacacaggcaccatcccaggggcacaaggactgatgaacagttccctccttcatcagccaaaggcacgtccctgacagctgaaaatagcacggggaggaataatgcggacacttttgaggacaagttacacctccactcagcactctggactccacgatgcctttgagtctgttttcccaacctcctgtgggcctcaagggtagaaacctgccgggctgttgttttaacgaggatttccctgaagctatgtctctagcagtgagtactcataaaggacactggatcaagttcagccaccgaattgcttttatcagtgttaaagtggtctgaactgcttgctaccaatctgtgagaagtttttgtttttgttttgttttttaacttgcagtatatcacagagccactcttcaagtagattggctgggcaaaagaatgttttggcaagagcgttactgtagacctttctccctccttccttttactaccatttttttttaacactgtcatctgtaggtcactctccagcagttaggcaccttaactggagaccagaaaccttccagagaacacagggctgcatcccgagcaaccctctgaagaagggaattaggctttagattttgatagcaatgttccaggaatgaaatatagatgttagcccaagacaccatgacaaaatagcccagccttttgagagtaatttgggaaaagaagctgtcagaagtttctaacttacaaactggtttgaaatttttgatgcccagacagcaagtataaatcattttggaggcttacttttcatgatacaaaagcaattctgtgtgatttttttttttaagaagaaagaaaatgcaagctagttttgagaaaggaaggccaaattgggtcgggggagggtgggagtgaggaagttaaaatcactatagggagaaaaaacttttttcaagatttccaaagagatgaaattttcttaatccttttaagttttcatagtaaacagtatggcagattgggttggttgtcctacctggtctatttttaaaagtcaccttttaaagtgacattattagatacacttaaatgtttccaaggcactctctacattacccttgtttttctctttggatactgtcctgggactaagtgtagatttctgcttcaagcacttctggcattgtgtgtttttgtatgcactccccttcatgccacttcagatgtttatttggatgtggttggggacgagagcagacaccaagga

SEQ ID NO: 812 - protein, 892 aa, Homo sapiens
MSERAADDVRGEPRRAAAAAGGAAAAAARQQQQQQQQQQPPPPQPQRQQHPPPPPRRTRPEDGGPGAASTSAAAMATVGERRPLPSPEVMLGQSWNLWVEASKLPGKDGTELDESFKEFGKNREVMGLCREDMPIFGFCPAHDDFYLVVCNDCNQVVKPQAFQSHYERRHSSSSKPPLAVPPTSVFSFFPSLSKSKGGSASGSNRSSSGGVLSASSSSSKLLKSPKEKLQLRGNTRPMHPIQQSRVPHGRIMTPSVKVEKIHPKMDGTLLKSAVGPTCPATVSSLVKPGLNCPSIPKPTLPSPGQILNGKGLPAPPTLEKKPEDNSNNRKFLNKRLSEREFDPDIHCGVIDLDTKKPCTRSLTCKTHSLTQRRAVQGRRKRFDVLLAEHKNKTREKELIRHPDSQQPPQPLRDPHPAPPRTSQEPHQNPHGVIPSESKPFVASKPKPHTPSLPRPPGCPAQQGGSAPIDPPPVHESPHPPLPATEPASRLSSEEGEGDDKEESVEKLDCHYSGHHPQPASFCTFGSRQIGRGYYVFDSRWNRLRCALNLMVEKHLNAQLWKKIPPVPSTTSPISTRIPHRTNSVPTSQCGVSYLAAATVSTSPVLLSSTCISPNSKSVPAHGTTLNAQPAASGAMDPVCSMQSRQVSSSSSSPSTPSGLSSVPSSPMSRKPQKLKSSKSLRPKESSGNSTNCQNASSSTSGGSGKKRKNSSPLLVHSSSSSSSSSSSSHSMESFRKNCVAHSGPPYPSTVTSSHSIGLNCVTNKANAVNVRHDQSGRGPPTGSPAESIKRMSVMVNSSDSTLSLGPFIHQSNELPVNSHGSFSHSHTPLDKLIGKKRKCSPSSSSINNSSSKPTKVAKVPAVNNVHMKHTGTIPGAQGLMNSSLLHQPKARP

SEQ ID NO: 813 - DNA, 1308 bp, Homo sapiens
gtcagccgctgtccccttagccgcgatgccgctggagaacctggaggaggagggtctgcccaagaaccccgacttgcgtatcgcgcagctgcgcttcctgctcagcctgcccgagcaccgcggagacgctgccgtgcgcgacgagctgatggcggccgtccgcgataacaacatggctccttactatgaagccttgtgcaaatccctcgactggcagatagacgtggacctactcaataaaatgaagaaggcaaatgaagatgagttgaagcgtttggatgaggagctggaagatgcagagaagaatctaggagagagcgaaattcgcgatgcaatgatggcaaaggccgagtacctctgccggataggtgacaaagagggagctctgacagcctttcgcaagacatatgacaaaactgtggccctgggtcaccgattggatattgtattctatctccttaggattggcttattttatatggataatgatctcatcacacgaaacacagaaaaggccaaaagcttaatagaagaaggaggagactgggacaggagaaaccgcctaaaagtgtatcagggtctttattgtgtggctattcgtgatttcaaacaggcagctgaactcttccttgacactgtttcaacatttacatcctatgaactcatggattataaaacatttgtgacttatactgtctatgtcagtatgattgccttagaaagaccagatctcagggaaaaggtcattaaaggagcagagattcttgaagtgttgcacagtcttccagcagttcggcagtatctgttttcactctatgaatgccgttactctgttttcttccaatcattagcggttgtggaacaggaaatgaaaaaggactggctttttgcccctcattatcgatactatgtaagagaaatgagaattcatgcatacagtcagctgctggaatcatataggtcattaacccttggctatatggcagaagcgtttggtgttggtgtggaattcattgatcaggaactgtccaggtttattgctgccgggagactacactgcaaaatagataaagtgaatgaaatagtagaaaccaacagacctgatagcaagaactggcagtaccaagaaactatcaagaaaggagatctgctactaaacagagttcaaaaactttccagagtaattaatatgtaaagccatgtaactaacaaaggatttgctttagagataattatttggaatttttatagcttacttcacaatgtgcccaggtcagctgtataaaataaatactgcattgttgtttc

SEQ ID NO: 814 - protein, 389 aa, Homo sapiens
MPLENLEEEGLPKNPDLRIAQLRFLLSLPEHRGDAAVRDELMAAVRDNNMAPYYEALCKSLDWQIDVDLLNKMKKANEDELKRLDEELEDAEKNLGESEIRDAMMAKAEYLCRIGDKEGALTAFRKTYDKTVALGHRLDIVFYLLRIGLFYMDNDLITRNTEKAKSLIEEGGDWDRRNRLKVYQGLYCVAIRDFKQAAELFLDTVSTFTSYELMDYKTFVTYTVYVSMIALERPDLREKVIKGAEILEVLHSLPAVRQYLFSLYECRYSVFFQSLAVVEQEMKKDWLFAPHYRYYVREMRIHAYSQLLESYRSLTLGYMAEAFGVGVEFIDQELSRFIAAGRLHCKIDKVNEIVETNRPDSKNWQYQETIKKGDLLLNRVQKLSRVINM

SEQ ID NO: 815 - DNA, 8192 bp, Homo sapiens
ggacttctcaggcaccaccagcagcgccaccgagagttattattattttttgaccaagcagcacatttcctggttcagtggcttgagctctgtgagcagctgactagtcaccccgggtctggctcaggatcagctggtgacgctgggctggagtctatgacttcttccttcagattgtcatgaagaaggggagttaagaggaaactgggggtcctccggaaggcgatctgagcactcaggctgatctagaggaagagtagaagtcatactttttttctcttgcttggtgaattccccagcagagtctggatccagcagtgctgttttccctgagggaatgtggagcagctcggcttgagtctgttgccagcttcaggaagggttcagactgaaaagggggtttgaggagaagatgctttggctgcctgaggtcctgcttgcgttcttagaagtcagatccagggagaaagtgaactgggacaattgacaagctccaagggtctggcagaagcttcctccgagactgggcatttcatcctccctggaggaagatctgcctgcactgcaagtgtccccaggaggagcacatggtgacagtgatgccgctggagatggagaagaccatcagcaaactcatgtttgactttcagaggaactcgacctcagatgatgactcaggctgtgctttggaagagtatgcctgggtcccgccgggtctgaagcctgaacaggtacaccagtactatagctgtctcccagaagagaaagtcccttatgtcaacagtcctggagagaaactgcgaatcaagcagctactacaccagctgccgccacatgacaatgaggttcgatattgcaactccctggatgaggaagagaagagggagctgaagcttttcagcagccagaggaaacgcgaaaacttgggccgcgggaatgtcaggcctttcccagtcaccatgacaggagctatttgtgaacagtgcggaggccagatcaatggtggagacatcgctgtgtttgcgtcacgcgctggccacggcgtttgctggcacccgccgtgcttcgtatgcactgtctgcaatgagctcctggtggatctgatctacttttaccaagatgggaagatatactgtggcaggcaccatgctgagtgcctgaagccgcgctgtgctgcctgcgatgagatcatctttgcagatgaatgcacagaagctgaggggcgacactggcacatgaaacacttttgctgcttcgagtgtgagacagtgctgggcggccagcgctacatcatgaaggagggaagaccctactgttgccactgcttcgagtccttgtatgcagaatattgtgacacctgtgcccaacatataggtatcgaccaaggtcaaatgacctatgacggccaacactggcatgccactgagacctgtttctgctgtgctcactgcaagaaatccctcctggggcggccattcctcccgaagcagggccagatattctgctcacgggcctgcagtgctggggaagaccccaatggttctgactcctctgattccgccttccagaacgccagggccaaggagtcccggcgcagtgccaaaattggcaagaacaagggcaagacggaggagcccatgctgaaccagcacagccagctgcaagtgagttctaaccggctgtcagccgacgtagaccccctgtcactgcagatggacatgctcagcctgtccagccagacacccagcctcaaccgggaccccatctggaggagccgggaagagccctaccattatgggaacaagatggagcagaaccagacccagagccctctgcagctcctcagccagtgcaacatcagaacttcctacagtccaggagggcaaggggctggggcccagcccgaaatgtggggcaagcacttcagcaaccccaaaaggagctcgtcactggccatgacaggacatgctggcagcttcatcaaggaatgccgagaagactattacccggggaggctgagatctcaggagagctacagtgatatgtctagtcagagtttcagtgagacccgaggcagcatccaagtccccaaatatgaggaggaagaggaagaggaagggggcttgtccactcagcagtgtcggacccgtcatcccatcagttccctgaaatacacagaggacatgacgcccacagagcagacccctcggggctccatggaatccctggccctgtctaatgcaacaggcctctctgctgatggtggtgccaagcgccaggagcacctatcccgattttccatgcctgacctcagcaaagactctggaatgaatgtgtctgagaagctgagcaacatgggcactcttaactcgtccatgcagttccggagcgcagagtcagttcgcagcctgctctctgcccagcagtaccaggagatggagggaaacctccaccagctcagcaaccccattggctacagagacctgcagtcccacggaaggatgcatcagagctttgattttgatggagggatggcgggcagcaagctgccagggcaggagggcgtgaggatccagcccatgagtgaacgcacccggagaagagctacttcacgcgacgacaaccgccgtttccgacctcacaggtccaggcgttcccgacgctctcgctccgacaacgccctccacctggccagcgaacgcgaggccatctcccggttaaaagataggccccctctgagagccagggaggactatgaccaatttatgcgccagcggagcttccaggagagcatggggcatgggtcccggagggacctgtacggccagtgccctaggactgtgtcggacctggctttgcagaatgcctttggggaccgctggggaccctacttcgccgagtatgattggtgttccacctgctcctcctcttcagagtctgacaacgagggctatttcctaggagaacccatcccccagccagcgcgcctgcgatacgtcacaagcgatgagctgctgcacaaatacagctcctacggcctccccaaatcttccacattaggtggcagaggacagttgcacagcaggaaaagacagaagagcaaaaactgtatcatttcttaatatgattgggatcagggaatgggagaagatgggagctaagaatgtaaagtcagaaacttgcactgttttaaatgttaaagcgcttttgggggtggcttatgggggagaaaagggaaaatgctgtcagtagatggaggcaaggttacaggttgactcaataggtagtcacagttcttggcatgttgaatattatttgcacatttcactttggaaacacagtagactctatcgaggccaggcttggtcacttccttcccatcagttctgtgttgagttgccatctctcaagatggtaaattgtttcctgctcgcttttatcctctctggttctcttacttttaggacccttttttcagtaagtaatttgtttattagccaggacccaagactaagttatttacatgtccattgtaaatgcaatgtaaatgagagttctgataaaatatttttgtattttgtaatatcaaaggaatttctatatcgtaggactcagtggggacttgcatgcacatccaccattgtctctgagtagtattgaaatgtggcccggtaccacctttttttttttttttttttttctatacaaatttgttacatgtcagtgagacctttttcaaaggaacatattcaatttggctttttgtggctgaaaaaacataactgttagacccaaagcattttatgctccgttccatcttaaggagccatccttaagtctgctcccaccctcagtagaatttattttctacaaagtggtagtaatttttttttaaattgcaaatgtaatttttgccaattagagaaaccaaccggtgtcagtaaaattctgtgagaaatgccatccctgctgggaatgttgaagttacttaatgttgatctatcccttggggaaagtaaaagtgactgtgagtggtgccattgtgtgatgtcagcatgacgttgttttgaatgtggcattatgttctggtgctcatgtttcctggattgtattatctgctttcctttaccaaggcagacagaactgctgccttagcctgacaaccggttgtcctcaaagcaaatgaacttaagcatttgggattgagggacagaaggattctgagggggctctgcgagggacggtgtgtgacatgtcatgcctggagaaggaacaaggctatttgaaaacagaaggcaggtcaagggtagaagttaaaggagaatctgaaggcaggtcagggaaaagaagaactggaaatgaaacagaggacaggtgacaaccacctcgaagagctcgcagagattgtagaaagagtccagtgtaaccagcttagtaaccagagtatctggattacccaggaaggttgagctgctgagatttcagtggtgcaatgtctttaaaaaaacaggctttgttgggagggtatttccattttgaactttgaggactgttggtcagaaaatgggctcaaaagtgagtttgcttaatgaagacatttaacggttgtgctgtttatagtaaaataaaactccctaccttgcttcagttaaaaatgaagcacttggtttcttccatcctcctcctccccttaatggattgtggcagttgaaataatccatcggaggacccacctgtagtgagatgtactgtcgatgtagtgcccggtgtatctcagtggccatctgccatggtgaggtgagcgtgatctcttttcagtatagtagttaacattttctagtattttttatggagagaatgtcaaaagtggcatttcagaccccgtcccagatgggtctgaggaaaggaaggctgtaaaggacatggtaatggcactccattcgggatgtattaaaataatttgcttttcaggtattaatatgacatttgtcattgtcactgatttttttaaaaaagcaatgcacatgttggttgtggctgttttccgcatgctatcttcatatctaaatgcttcattaattatccgagcctccggagaattaactctattacgtttgtatagtaagtttgtaaactgcttggcaaactgattaagaaataatttgcaataccgtgttactaaagtggcaggtttctggtagaaattgtgcgagtccaatttggagttttaagttccttgattgatgaaactaaaaaggcaattttggaaaaagagagggggaaaagtagatcacttatcttagcaaacggttgaaaatatgtctgtcctctgtggccccaaatccagtgaaagaaattctcccagtaaaagttgcttcctaactctgtttttctcagaatacctcttacctttctcaaagaaagcttcaaccaccatcatcagaaagaaggtggcctaaaaactgacacatggccagtgcccggaggggtctggaggcataagtctagatgcccagagagcatccaggcactgaactgctcagagcttgagatgaaatgacatacaagcttcagggtaaaactgtctactagcaagattacctccctcaattctaccattgcagatttcttctgaccccaaatgcaaccttacagagaatgctgaatgaggaaggccaattccttacaatgatggcagaacccccaagcgaatgccctattgaggagaaggacatcactgtatttggaattctgcctgctagtgatagctcacacatcacatcccagaatcccactcccaatgcattatttcctgaggcaagaacttaaggtcctcacctaattcctccatcacaaccattaactcttattggacaagctcctcctgtgagtggggcctgtactcacttcctcttagttcataattccatcttcaagagactgatttccagaatagtaatctttttccagcgttctctcttctccaatgccctggttgttatttttcccacctctcctaatattgatcttcttgtcttttggttagaactgcaacttcggagttgagttcatttcctattgctgctcaattcagtagcaacatagctggcttgttcccagacccaggaagtataagtcattgacagtttcctgagtggctctgccaatccataccacccttggtactgtgaaaaggcttcttggcagccaggtggcattgaggatggtattcagggcgctttccttctgtcatatagttgtgggatctctaccaagtgtgaaggtgaatgaggtaagggagatcagaaccatgcttcctggtttttcatacatccaaggaagaagtcctggtgtgggttgtttgacaccttctttccactttcaccttttattttttattccttcctttctacccccaaccagtcgagcaaatgagcaattttgtgtttctaatacaggatctggaagtagtgctttctaatcctcatttcctgtaggatgttcctgcactataacaagattatgttttcttccttctgcagcagctttctgcttcttgggtactactagctattgttcaattcaggtgaggcctgtgatgacatatatgtagcatgtgctctgcgctccctgcaagctgagcagatacaaccaatgcatcactgtatactcttgctgagaatgtggatgcagcctcacagatctttgcaacactccaaccagccaggaccagttgatcagaactgatcttattggtctgataaccaatcttatttgtgaactgattcatatctgtctttccactcttggttttcttgccgtagaacaaaaacagtttaggaagcataattacgaacatttaggaaccaatatgtataagtaattcggagactccaattcacctgcccctcccccatcccaggttgtggaggctcgaggaagctgacttcttaggctaaaggacaaaaaaatctctttacctccttggccattttcatgttctctgccaattactataggcagtcttcattttgcagaggtgaggtaagacttcatcttattcttcatgtaatcccaccttctaacaaaaaataaataaatatttaaattccaaggagaagtgttctttgtgtatttctagcagaaaacagatgcttaagcctaagaaggaagatccgtccatgacaaaggaaagtggaaaactgaaccagttatctgaatacttcatgccaggacagttgctattagcaactgttttgcaccttcagggctttaaaatgggctctgcagacagcatttgcatatgcaagactcagtagccaagcctccactgccaattgttgaaggcagtttcagatcgccaccttttgaggtacatttctttaagcacaagagaagtagaaatggcctttgccttgtctccagtggtttgtccctctggtgcctcagcagataccagagcttattcttatgaccatttggaagtagtcctcaaagtaaagatcaagaaaaaattggattctttttccattttctcataatagtagcctagtcaacacaagactcccataaaatatgactcactattgggagccatactattttataagcttacttcctgctgacaaaactagctttcctcaaggaaatataaaggaggggaaagtcacatagtgttaggaaaacattcctgtgttttgaatacgatgaatccgtaggatagagaaaaatctgcttgttctattctgagagttctctgagatatcccttcactctgcttggcatttggccattgatattcaacaggtcactgaccaagcttttctaaatttttcagagagagttacttaccaataaggtctgttcttaaacctacctagttgattttcatatctttccataaagtgtcatgattctatcatagaccctgacttaacattgtaaggactatgagtcctccattttttaattaattattttttagcaaattaggacttcggcaggttttcctctcctaaactcattctttcctccacaggattgctttgtccatctcctctttcatttcaagtgcataaacaaaacctcaaagggcctgggaaggtgaggcaggccagagtctgtgttctgtgttgagtgtcaagctatttgttaagaaggtctgcaacaggcctttggtgtgggctctgcca

SEQ ID NO: 816 - protein, 844 aa, Homo sapiens
MVTVMPLEMEKTISKLMFDFQRNSTSDDDSGCALEEYAWVPPGLKPEQVHQYYSCLPEEKVPYVNSPGEKLRIKQLLHQLPPHDNEVRYCNSLDEEEKRELKLFSSQRKRENLGRGNVRPFPVTMTGAICEQCGGQINGGDIAVFASRAGHGVCWHPPCFVCTVCNELLVDLIYFYQDGKIYCGRHHAECLKPRCAACDEIIFADECTEAEGRHWHMKHFCCFECETVLGGQRYIMKEGRPYCCHCFESLYAEYCDTCAQHIGIDQGQMTYDGQHWHATETCFCCAHCKKSLLGRPFLPKQGQIFCSRACSAGEDPNGSDSSDSAFQNARAKESRRSAKIGKNKGKTEEPMLNQHSQLQVSSNRLSADVDPLSLQMDMLSLSSQTPSLNRDPIWRSREEPYHYGNKMEQNQTQSPLQLLSQCNIRTSYSPGGQGAGAQPEMWGKHFSNPKRSSSLAMTGHAGSFIKECREDYYPGRLRSQESYSDMSSQSFSETRGSIQVPKYEEEEEEEGGLSTQQCRTRHPISSLKYTEDMTPTEQTPRGSMESLALSNATGLSADGGAKRQEHLSRFSMPDLSKDSGMNVSEKLSNMGTLNSSMQFRSAESVRSLLSAQQYQEMEGNLHQLSNPIGYRDLQSHGRMHQSFDFDGGMAGSKLPGQEGVRIQPMSERTRRRATSRDDNRRFRPHRSRRSRRSRSDNALHLASEREAISRLKDRPPLRAREDYDQFMRQRSFQESMGHGSRRDLYGQCPRTVSDLALQNAFGDRWGPYFAEYDWCSTCSSSSESDNEGYFLGEPIPQPARLRYVTSDELLHKYSSYGLPKSSTLGGRGQLHSRKRQKSKNCIIS

SEQ ID NO: 817 - DNA, 2339 bp, Homo sapiens
ggcgtcccccgtagcagcgcaggccgggaagcttctgcgagccctagcgctgcggccccgcttcctggcggccgggtcccaggcagtttaattaacctccagaagatggctgaacctgcaggaataccagagcaagaaactgatgtctgacaacggagtgagagttcaaagattctttgtagcagacactgcaaatgaagctctcgaggctgctaagagactaaatgcaaaagaaattgttttaaaagcccagatcttagctggaggaagaggaaaaggtgtcttcaatagtggtttgaaaggaggtgttcatttaacaaaagaccctaatgttgtgggacagctggctaaacagatgattgggtacaatctagcgacaaaacaaactccaaaagaaggtgtgaaagttaacaaggtgatggttgctgaagccttggatatttccagagaaacctacctggcaattctgatggaccggtcctgcaatggccccgtgctggtgggcagcccccaggggggcgtcgacattgaagaggtggctgcttcaaacccggagctcatttttaaggagcaaattgacatttttgaaggaataaaggacagccaagctcagcggatggccgaaaatctaggcttcgttgggcctttgaaaagccaggctgcagatcaaattacgaagctgtataatctcttcctgaaaattgatgctactcaggtggaagtgaatccctttggtgaaactccagaaggacaagttgtctgttttgatgccaagataaactttgatgacaacgcagaattccgacaaaaagacatatttgctatggacgacaaatcagagaatgagcccattgaaaatgaagctgccaaatatgatctaaaatacataggactagatgggaacattgcctgctttgtgaatggtgctgggctcgccatggctacttgtgatatcattttccttaatggtgggaagccagccaacttcttggatcttggaggtggtgtaaaggaagctcaagtatatcaagcattcaaattgctcacagctgatcctaaggttgaagccatccttgtcaatatatttggtggtatcgtcaactgtgccatcattgccaatgggatcaccaaagcctgccgggagctagaactcaaggtgcccctggtggtccggcttgaaggaaccaacgtccaagaggcccagaagatactcaacaacagcggactccccattacttcagccattgacctggaggatgcagccaagaaggctgtggccagtgtggccaagaagtgatgtctttgtcctgatccaatggagaaagaaagccatttttccataaaaagggatggttcatcattgtgaaagaaatggttatctcattggggaagaaaaggggagggggaaggcaagaatcactgaaaaatcttaaatctgtgttttctggaataagatatctagacagcctaaatctgattttagtctttataaaaataatatcttgtgttctcatacttttctgtcactgtaagcctgcccagtaggcagtgttttgcagactttggggagtggtctatgtggccaaatattgtgtgtatagacagaatttgaaatcaagtcctgcttcatttacaagaattttggtgggcatcgaatcctacataatgaaaaagaaaaacagaccatttaaaaactcagacaagattatatttaatatattaattactaaaaaggcacaagattacactgaacatattagctactaaaaaggcactgctaagacattcaagcaaatagctattacacactactgcagattttacaggtttctaattctaacatatgtttgaaaaatccgtgagtattccaaaatatatttaataatggaatatctgcattaatataccatccatgtgtttttaccatttgccttaatattgaatatactgtttacctcacactaaaaagaaaaccagaagccttatttgtgattttgggagtggaagcttccatttttgtgtcaaaaatgaatcctgattcttatggaaatctctgttattaagatatttcaagatgagacaacactgaagatcaaattgtgtttagtatcactatcttctctcctcgtttctctcttactcctcatcctcccagaatctaccagtttatggtagaaagatgggaaccttatttgaatgtgtttttttttttccatgatgtccaattttgttgtgggaaaggatttggataaaatttttgtttaaattttggtagatttttatctatacaaatttaaataaaattatgttttgtaagctgaaaaaaaaaaaaaaaaaaa

SEQ ID NO: 818 - protein, 384 aa, Homo sapiens
MSDNGVRVQRFFVADTANEALEAAKRLNAKEIVLKAQILAGGRGKGVFNSGLKGGVHLTKDPNVVGQLAKQMIGYNLATKQTPKEGVKVNKVMVAEALDISRETYLAILMDRSCNGPVLVGSPQGGVDIEEVAASNPELIFKEQIDIFEGIKDSQAQRMAENLGFVGPLKSQAADQITKLYNLFLKIDATQVEVNPFGETPEGQVVCFDAKINFDDNAEFRQKDIFAMDDKSENEPIENEAAKYDLKYIGLDGNIACFVNGAGLAMATCDIIFLNGGKPANFLDLGGGVKEAQVYQAFKLLTADPKVEAILVNIFGGIVNCAIIANGITKACRELELKVPLVVRLEGTNVQEAQKILNNSGLPITSAIDLEDAAKKAVASVAKK

SEQ ID NO: 819 - DNA, 937 bp, Homo sapiens
ggggggtgggcgccagcgccccggcgaacggcaaagagggagccgctcccgctcggggggccgctggagtgcccagcgggaacccgaaagtttgtaagaggaagagagcgcgcggcgagcgagcgagcgggccgggggcagcggcagcggcgccggggaccatggtgctgccggcgcctcctccgcgggcgtgaaggcggcgctcctactccctccccggactccgcggtgtcccagaagcttttgttgacaattccagtttccgaacaaaacatttcggcaatggtgagggcttcgatcccttctctgatttgctgtcagccatgaacggatggatgtgatgcctgctagccaaaaggcttccctctgtgtgttgcagtcctgtggcattatgcatgccccctcccagtgaccccaggctttttatggctgtgagacacgttaaaatttcaggggtaagacgtgaccttttgaggtgactataactgaagattgctttacagaagccaaaaaaggtttttgagtcatgatgcaagaatctgggactgagacaaaaagtaacggttcagccatccagaatgggtcgggcggcagcaaccacttactagagtgcggcggtcttcgggaggggcggtccaacggagagacgccggccgtggacatcggggcagctgacctcgcccacgcccagcagcagcagcaacagtggcatctcataaaccatcagccctctaggagtcccagcagttggcttaagagactaatttcaagcccttgggagttggaagtcctgcaggtccccttgtggggagcagttgctgagacgaagatgagtggacctgtgtgtcagcctaacccttccccattttgaataaaattattctttggagaaaaaaaaaaaaaaaaaaaaaaaaaaaaaaaaaaaaaaaaaaaaaaa

SEQ ID NO: 820 - protein, 114 aa, Homo sapiens
MMQESGTETKSNGSAIQNGSGGSNHLLECGGLREGRSNGETPAVDIGAADLAHAQQQQQQWHLINHQPSRSPSSWLKRLISSPWELEVLQVPLWGAVAETKMSGPVCQPNPSPF

SEQ ID NO: 821 - DNA, 6222 bp, Homo sapiens
ggggggtgggcgccagcgccccggcgaacggcaaagagggagccgctcccgctcggggggccgctggagtgcccagcgggaacccgaaagtttgtaagaggaagagagcgcgcggcgagcgagcgagcgggccgggggcagcggcagcggcgccggggaccatggtgctgccggcgcctcctccgcgggcgtgaaggcggcgctcctactccctccccggactccgcggtgtcccagaagcttttgttgacaattccagtttccgaacaaaacatttcggcaatggtgagggcttcgatcccttctctgatttgctgtcagccatgaacggatggatgtgatgcctgctagccaaaaggcttccctctgtgtgttgcagtcctgtggcattatgcatgccccctcccagtgaccccaggctttttatggctgtgagacacgttaaaatttcaggggtaagacgtgaccttttgaggtgactataactgaagattgctttacagaagccaaaaaaggtttttgagtcatgatgcaagaatctgggactgagacaaaaagtaacggttcagccatccagaatgggtcgggcggcagcaaccacttactagagtgcggcggtcttcgggaggggcggtccaacggagagacgccggccgtggacatcggggcagctgacctcgcccacgcccagcagcagcagcaacaggcacttcaggtggcaagacagctccttcttcagcagcaacagcagcagcaagttagtggattaaaatctcccaagaggaatgacaaacaaccagctcttcaggttcccgtgtcagtggctatgatgacacctcaagttatcactccccagcaaatgcagcagatcctccagcaacaagtgctgagccctcagcagctccaggttctcctccagcagcagcaggccctcatgcttcaacagcagcagcttcaagagttttataaaaaacaacaggaacagttgcagcttcaacttttacaacaacaacatgctggaaaacagcctaaagagcaacagcaggtggctacccagcagttggcttttcagcagcagcttttacagatgcagcagttacagcagcagcacctcctgtctttgcagcgccaaggccttctgacaattcagcccgggcagcctgcccttccccttcaacctcttgctcaaggcatgattccaacagaactgcagcagctctggaaagaagtgacaagtgctcatactgcagaagaaaccacaggcaacaatcacagcagtttggatctgaccacgacatgtgtctcctcctctgcaccttccaagacctccttaataatgaacccacatgcctctaccaatggacagctctcagtccacactcccaaaagggaaagtttgtcccatgaggagcacccccatagccatcctctctatggacatggtgtatgcaagtggccaggctgtgaagcagtgtgcgaagatttccaatcatttctaaaacatctcaacagtgagcatgcgctggacgatagaagtacagcccaatgtagagtacaaatgcaggttgtacagcagttagagctacagcttgcaaaagacaaagaacgcctgcaagccatgatgacccacctgcatgtgaagtctacagaacccaaagccgcccctcagcccttgaatctggtatcaagtgtcactctctccaagtccgcatcggaggcttctccacagagcttacctcatactccaacgaccccaaccgcccccctgactcccgtcacccaaggcccctctgtcatcacaaccaccagcatgcacacggtgggacccatccgcaggcggtactcagacaaatacaacgtgcccatttcgtcagcagatattgcgcagaaccaagaattttataagaacgcagaagttagaccaccatttacatatgcatctttaattaggcaggccattctcgaatctccagaaaagcagctaacactaaatgagatctataactggttcacacgaatgtttgcttacttccgacgcaacgcggccacgtggaagaatgcagtgcgtcataatcttagtcttcacaagtgttttgtgcgagtagaaaacgttaaaggggcagtatggacagtggatgaagtagaattccaaaaacgaaggccacaaaagatcagtggtaacccttcccttattaaaaacatgcagagcagccacgcctactgcacacctctcaatgcagctttacaggcttcaatggctgagaatagtatacctctatacactaccgcttccatgggaaatcccactctgggcaacttagccagcgcaatacgggaagagctgaacggggcaatggagcataccaacagcaacgagagtgacagcagtccaggcagatctcctatgcaagccgtgcatcctgtacacgtcaaagaagagcccctcgatccagaggaagctgaagggcccctgtccttagtgacaacagccaaccacagtccagattttgaccatgacagagattacgaagatgaaccagtaaacgaggacatggagtgactatcggggcgggccaaccccgagaatgaagattggaaaaaggaaaaaaaaaaaaacacgtcaaaagttagcagtgaaattgttctccatttgttgtacagtctggaggattttcactacgttttgacaactctgaaatgtgttaactcttagtgccatcaagaaccccatttgggagtatttttgatttttctactttttgttgaaaaaaggaatttgtactctgtgcattggatggacttgtttggtacttgggattttcctctcttaaccgtcaacatcagtgttgtaaatttgctaaactgattcacttttagcagcagactttgaactgcagtcctgccaacgttggacactgaggacgcccgacagagcttgtgcacctaagctgcagaccaagcctttgcccagaatttaaggattccaatggacgacctatttgcacagtactgcatgttgattatcactgcctttactccttttttttttttttttttttttttttttttgcttccagttgggatggggaaggcctttgtgtgtgtattggggggaggggttaaaaaataattatcccaaactttttaatgtattgctttttttttttttttttttccttctactataccattttaagttctgacctcaggcctccatttgggccgatggcctcttggaggcttaaagttttctgtaccttgtgatgaatgttaataggtgtttttattatacaaagctgaatgtcatttctcgtttgtagctttctgtcactcattccatcttccttcagacatcaccacgtttctctaaagtcagaaaacattccgttttggtctttttcaaaaaggtcccaaatgctgcactctacacatgaaggccctctcacacagacgtgacgtcctgccagaaagagaatgaatgacagaaaaaaaaaagagagacaaactctaggaacaatgccgattcattccacgcagcagtattgggggtggttcgggggaggggtgtttcggattttctttttttcttttcttttctttttttttttttgcagcaaccattaataaatgccaccacattctaccagcacaaggaaacataggcagcactgaaaaaaaaaaaaaagctcatattaattagactgacaatatggccttggaaggctctcccttgtggaaccaagttgccatgggccttgggtgctctgcgataacgggtgtgggttggttttgtttgcaaaatggccaaaaaaaaaaaccggcttccccgagcagctgccctgaaagtaggggtggcggcggcggcgctgagtttatacattagttcagacctacttggtggcattaaactgtttgaatgcaaattcgatttcagattgaacttgttaagggagttaacgagggctgagttcagcaaatgctaaagtgttaatttcaaatatgcaaatttggtactgcagtttgttatgcaatattatatcaccaacccagtatcacaaaaactcatagaagatatcatgtaggccctgggctttgggggggtcccaaacatggtatgcagaaatgtgatggttacaggtcagtacaacctcagtccttagaacccctccacacttcagctctgcacccactttcctgtcatttatttatataggactgtagttttttttagttcgagagcctttcgaagcttaatttatattctttctttgtaccttttttctaaaattaccaaagatattacacaaaggtaaattatgttctctgttttatgctttatctgatgaagccaaatatcctcttattgttgatcaaaggaggcaaaagaatttagaggcaaatgacaagcgataggctattgcaacctgagaaagagaactgctccttcatcgtaaatttagaagaccaagtagataatggaaccaaagttgttacttttttctagtagttatttttcctttttctttttgtgtacctctacagagaccaaaactcattctcttaaagagattttatggggctactgcagataaaaataggacacaatattaaaggagctacagaaggaagggagtcccatctcaaaaaaaaaatgaatgtatgccactgcaattagagtatccaataaaggagacagtttagagtcaggacagaaaagcttccataattgaactagattacataatagtatttctagaaaaagagatatttttagattgtatgccacttttgtttaagaactgtgctgtgatcactgtattaattttggtttatcttggcatatatccttcagtttgtttttatttttaatttttcctttttttccgattaggctttggtcagcatttttcatttaaagaaaagtaacactcccatccactcataagcttggtacaaaaacttctctggcagttacttttgaagcttcactctgctttctgtataaagggcagtctgtggtcacgcaagactttaaaaaaaaaaaaaaaaaaaaaaaaaaaaaaaaaaaaaaaaacttttccaggcagcttcatgatgtgcaggcagtagccagacagggtcatgggaagggggccctgtgcttctaaactgagtggttgctggttagtttggtattcaaaagaggataaaaatctggtagattagttcattctcagcatgtgtagctagacatgagtaaagataacagcatgagaaactgttagtacgcatacctcagttcaaacctttagggaatgattaaaatttaaaaaaaaaacatttcactcagttgcacttagtcgtatgtcttgcatgcttagtctaaagactgtagcaaaaaaaaaaaaaaaagaaaaattagattttacatatctttgcaggtatcacagccttgcagaagaaccaactgaaaaaaaaattctcaggctttacagcaagcaaacttcactatgatttttacaattctgattctgtatcccctgggggttatcccagttgcttctttaggatggggtttattacgttgtacatatatcccgatgtgtctgtgtgaatctttgtcttttttgggggagggcagagggcggttctttttttagatattgttcctaaaaaggaataaatgcatacacctgtttgtcaaaacacctttgctttttgtgcaactgctttatattaacgatactaaaaaaaaatagctttggaaaaaaaactactgtatgtaacggaattgcagaatatgctgcacatgtattttatttagttatccttgctttaagaatattggatgacatttcctgacatgtgggagggagaaactccctaactttttttttctgcttttaaactgtaacatagttgaagatttcttttttctgttctcattgattggagcattttgtacaggttttgtgtgtgtgtgtgtgtgtgtgtgcgcgcgtgcgtgtgtgttaatctgttttttgatacattcctatcccttgtgtttatcctaccactgccttcctggctatcttaaacaagttcatacatttgaaaagaaaaaaaaatgttgtttaaaaaatgttttctcctgctgcagtaaatattttgcatgatgaaattccagggtcacacttttccaagtttatcagtgaagtagtgattaacaatggggagtgtcaaaactattgaacttttgta

SEQ ID NO: 822 - protein, 677 aa, Homo sapiens
MMQESGTETKSNGSAIQNGSGGSNHLLECGGLREGRSNGETPAVDIGAADLAHAQQQQQQALQVARQLLLQQQQQQQVSGLKSPKRNDKQPALQVPVSVAMMTPQVITPQQMQQILQQQVLSPQQLQVLLQQQQALMLQQQQLQEFYKKQQEQLQLQLLQQQHAGKQPKEQQQVATQQLAFQQQLLQMQQLQQQHLLSLQRQGLLTIQPGQPALPLQPLAQGMIPTELQQLWKEVTSAHTAEETTGNNHSSLDLTTTCVSSSAPSKTSLIMNPHASTNGQLSVHTPKRESLSHEEHPHSHPLYGHGVCKWPGCEAVCEDFQSFLKHLNSEHALDDRSTAQCRVQMQVVQQLELQLAKDKERLQAMMTHLHVKSTEPKAAPQPLNLVSSVTLSKSASEASPQSLPHTPTTPTAPLTPVTQGPSVITTTSMHTVGPIRRRYSDKYNVPISSADIAQNQEFYKNAEVRPPFTYASLIRQAILESPEKQLTLNEIYNWFTRMFAYFRRNAATWKNAVRHNLSLHKCFVRVENVKGAVWTVDEVEFQKRRPQKISGNPSLIKNMQSSHAYCTPLNAALQASMAENSIPLYTTASMGNPTLGNLASAIREELNGAMEHTNSNESDSSPGRSPMQAVHPVHVKEEPLDPEEAEGPLSLVTTANHSPDFDHDRDYEDEPVNEDME

SEQ ID NO: 823 - DNA, 2861 bp, Homo sapiens
gtccctcacaccgagagttcctgcgcgtggggagttggagagtttgcgtggcgggaacgcggcggcagtgagagcgagcggcgccggcccttgcgtccggtgcggcgatgctgaccccggcgttcgacctcagccaggatccggacttcctgactatcgccatccgcgtgccctacgcccgggtctccgagttcgacgtctacttcgaggggtctgacttcaagttctacgccaagccatactttctcagattaacccttcctggaagaattgtagaaaatggaagtgagcaagggtcctatgatgcagataaaggaatttttaccattcgcctgcccaaagaaacccctggccagcattttgaggggctgaacatgttaactgctcttctggcaccaagaaaatccaggacagcaaaaccacttgtggaagaaataggtgcttctgagattcctgaggaagtagttgacgatgaagagtttgattgggaaattgagcagacaccctgtgaagaggtatcagaaagtgctttgaatccgcagtgccactatggatttggaaacttacgatcaggagtgttgcaacggttacaggatgaactgagtgatgttattgatattaaggatccagatttcacccctgcagctgaacgaagacagaagcgcctggccgctgagctggccaagtttgatcctgatcattatctagctgacttttttgaagatgaggcgattgaacagattttgaagtataatccttggtggactgacaaatattcaaaaatgatggcctttttggaaaagagtcaggaacaagaaaatcatgctacattagtgtctttttctgaagaagagaagtatcagctacgaaaatttgtcaataaatcttatctgctggacaagagagcctgtcgtcaagtgtgctacagtttgattgatatccttctggcatattgctatgaaacccgtgtcactgaaggagagaagaatgttgaatctgcatggaatatcaggaaactgagtccaacactatgctggtttgagacttggactaacgttcatgatatcatggtgtcttttggaagaagggtgttgtgttacccactctatcgccatttcaagctggtgatgaaggcctacagggacactataaagatattgcaactgggtaaaagtgcagttttaaagtgtctcctggatattcacaaaatttttcaggaaaatgacccagcgtacatactgaatgatctctacatctcagactactgtgtgtggattcagaaagtcaaatccaaaaagttggcagctcttgcagaagccttaaaggaagtctcccttacaaaggcccagctggggttagaactggaagaactagaagcagcagcactgcttgtccaggaggaagaaactgcattaaaagcagcccattcagtttctgggcagcagacactttgctccagctctgaggcaagtgattcggaggactcagacagcagcgtgtcatctggaaacgaagactcaggctcagattcagaacaagatgaactcaaagatagtccatctgagacagtcagttctttgcaaggtccctttcttgaagaaagcagtgcctttcttattgttgatggtggagtacgcagaaacacagccatccaggagtctgatgccagtcagggaaagccacttgcctcttcctggcctcttggagtgtctgggcctctgatagaggagcttggggaacaactgaagactacagttcaggtttctgaacccaagggcaccactgctgtaaaccgcagcaatattcaggagagagacggctgtcagacaccaaataattgactcttaggtggttttattcattgttgagaaatatggtagattgggtttcatttaccgaatgagaattcttcattttcactttgtaatttttcttagtatatagtcagcccactgtatttgtgtgttccacatctgtggattcaaccaactgcagatcaaaaatattgaagaaaaaatcgcatctgtaccaaacatgtacagacttttttcttgttattattctctaaataatacagtatgacaactatttccacagcatttacattgtattgggtaatataagtaatctagtgatgatttaaactgtgcaggaggatgtgggtaggttatatgcaaatactgcaccattttttatcaggggcttgagcatctgaggattttagtatcctcaggagtcctggaaccaaccccccacagatacggggacaactttatgacattgtttttcaaccaatgaatgtttataccttttgttttccttgccgcgactgtgaagataaagttcaaaagtatttttaccaaagtgtagctaatatttcaagctgaaaataatagttctactgcccgtgtctccagaatgtagagcccatcaatatttttattttaggaggtgtacttgacacccaataaactgcacgtatcaaaagtgtacaatgtgttggcgtatgtataccctgcgtaaaactatcaccacaactgaagtgaggaacggacccatcattcccaagtgcccttgtgccctgttattagtttgcatgtcctagaattctatgtaaattgaatcatacaatatgtatcccttttttggtcaggcatattttactcagtatagttattttgagattcatccatgtggtagcatgtgtcacgagtttttgtttttatgtttttcattgctgagtactgcttcattgaatagatttgttcattgacctatcgatggacacctgggttgtttccagtttggggctgttataaataaagctgttatgaacatttgtgtacaaaaaaaaaaaaaaa

SEQ ID NO: 824 - protein, 577 aa, Homo sapiens
MLTPAFDLSQDPDFLTIAIRVPYARVSEFDVYFEGSDFKFYAKPYFLRLTLPGRIVENGSEQGSYDADKGIFTIRLPKETPGQHFEGLNMLTALLAPRKSRTAKPLVEEIGASEIPEEVVDDEEFDWEIEQTPCEEVSESALNPQCHYGFGNLRSGVLQRLQDELSDVIDIKDPDFTPAAERRQKRLAAELAKFDPDHYLADFFEDEAIEQILKYNPWWTDKYSKMMAFLEKSQEQENHATLVSFSEEEKYQLRKFVNKSYLLDKRACRQVCYSLIDILLAYCYETRVTEGEKNVESAWNIRKLSPTLCWFETWTNVHDIMVSFGRRVLCYPLYRHFKLVMKAYRDTIKILQLGKSAVLKCLLDIHKIFQENDPAYILNDLYISDYCVWIQKVKSKKLAALAEALKEVSLTKAQLGLELEELEAAALLVQEEETALKAAHSVSGQQTLCSSSEASDSEDSDSSVSSGNEDSGSDSEQDELKDSPSETVSSLQGPFLEESSAFLIVDGGVRRNTAIQESDASQGKPLASSWPLGVSGPLIEELGEQLKTTVQVSEPKGTTAVNRSNIQERDGCQTPNN

SEQ ID NO: 825 - DNA, 6629 bp, Homo sapiens
atgaaatggaaacatgttccttttttggtcatgatatcactcctcagcttatccccaaatcacctgtttctggcccagcttattccagaccctgaagatgtagagagggggaacgaccacgggacgccaatccccacctctgataacgatgacaattcgctgggctatacaggctcccgtcttcgtcaggaagattttccacctcgcattgttgaacacccttcagacctgattgtctcaaaaggagaacctgcaactttgaactgcaaagctgaaggccgccccacacccactattgaatggtacaaagggggagagagagtggagacagacaaagatgaccctcgctcacaccgaatgttgctgccgagtggatctttatttttcttacgtatagtacatggacggaaaagtagacctgatgaaggagtctatgtctgtgtagcaaggaattaccttggagaggctgtgagccacaatgcatcgctggaagtagccatacttcgggatgacttcagacaaaacccttcggatgtcatggttgcagtaggagagcctgcagtaatggaatgccaacctccacgaggccatcctgagcccaccatttcatggaagaaagatggctctccactggatgataaagatgaaagaataactatacgaggaggaaagctcatgatcacttacacccgtaaaagtgacgctggcaaatatgtttgtgttggtaccaatatggttggggaacgtgagagtgaagtagccgagctgactgtcttagagagaccatcatttgtgaagagacccagtaacttggcagtaactgtggatgacagtgcagaatttaaatgtgaggcccgaggtgaccctgtacctacagtacgatggaggaaagatgatggagagctgcccaaatccagatatgaaatccgagatgatcataccttgaaaattaggaaggtgacagctggtgacatgggttcatacacttgtgttgcagaaaatatggtgggcaaagctgaagcatctgctactctgactgttcaagaacctccacattttgttgtgaaaccccgtgaccaggttgttgctttgggacggactgtaacttttcagtgtgaagcaaccggaaatcctcaaccagctattttctggaggagagaagggagtcagaatctacttttctcatatcaaccaccacagtcatccagccgattttcagtctcccagactggcgacctcacaattactaatgtccagcgatctgatgttggttattacatctgccagactttaaatgttgctggaagcatcatcacaaaggcatatttggaagttacagatgtgattgcagatcggcctcccccagttattcgacaaggtcctgtgaatcagactgtagccgtggatggcactttcgtcctcagctgtgtggccacaggcagtccagtgcccaccattctgtggagaaaggatggagtcctcgtttcaacccaagactctcgaatcaaacagttggagaatggagtactgcagatccgatatgctaagctgggtgatactggtcggtacacctgcattgcatcaacccccagtggtgaagcaacatggagtgcttacattgaagttcaagaatttggagttccagttcagcctccaagacctactgacccaaatttaatccctagtgccccatcaaaacctgaagtgacagatgtcagcagaaatacagtcacattatcgtggcaaccaaatttgaattcaggagcaactccaacatcttatattatagaagccttcagccatgcatctggtagcagctggcagaccgtagcagagaatgtgaaaacagaaacatctgccattaaaggactcaaacctaatgcaatttaccttttccttgtgagggcagctaatgcatatggaattagtgatccaagccaaatatcagatccagtgaaaacacaagatgtcctaccaacaagtcagggggtggaccacaagcaggtccagagagagctgggaaatgctgttctgcacctccacaaccccaccgtcctttcttcctcttccatcgaagtgcactggacagtagatcaacagtctcagtatatacaaggatataaaattctctatcggccatctggagccaaccacggagaatcagactggttagtttttgaagtgaggacgccagccaaaaacagtgtggtaatccctgatctcagaaagggagtcaactatgaaattaaggctcgccctttttttaatgaatttcaaggagcagatagtgaaatcaagtttgccaaaaccctggaagaagcacccagtgccccaccccaaggtgtaactgtatccaagaatgatggaaacggaactgcaattctagttagttggcagccacctccagaagacactcaaaatggaatggtccaagagtataaggtttggtgtctgggcaatgaaactcgataccacatcaacaaaacagtggatggttccaccttttccgtggtcattccctttcttgttcctggaatccgatacagtgtggaagtggcagccagcactggggctgggtctggggtaaagagtgagcctcagttcatccagctggatgcccatggaaaccctgtgtcacctgaggaccaagtcagcctcgctcagcagatttcagatgtggtgaagcagccggccttcatagcaggtattggagcagcctgttggatcatcctcatggtcttcagcatctggctttatcgacaccgcaagaagagaaacggacttactagtacctacgcgggtatcagaaaagtcccgtcttttaccttcacaccaacagtaacttaccagagaggaggcgaagctgtcagcagtggagggaggcctggacttctcaacatcagtgaacctgccgcgcagccatggctggcagacacgtggcctaatactggcaacaaccacaatgactgctccatcagctgctgcacggcaggcaatggaaacagcgacagcaacctcactacctacagtcgcccagctgattgtatagcaaattataacaaccaactggataacaaacaaacaaatctgatgctccctgagtcaactgtttatggtgatgtggaccttagtaacaaaatcaatgagatgaaaaccttcaatagcccaaatctgaaggatgggcgttttgtcaatccatcagggcagcctactccttacgccaccactcagctcatccagtcaaacctcagcaacaacatgaacaatggcagcggggactctggcgagaagcactggaaaccactgggacagcagaaacaagaagtggcaccagttcagtacaacatcgtggagcaaaacaagctgaacaaagattatcgagcaaatgacacagttcctccaactatcccatacaaccaatcatacgaccagaacacaggaggatcctacaacagctcagaccggggcagtagtacatctgggagtcaggggcacaagaaaggggcaagaacacccaaggtaccaaaacagggtggcatgaactgggcagacctgcttcctcctcccccagcacatcctcctccacacagcaatagcgaagagtacaacatttctgtagatgaaagctatgaccaagaaatgccatgtcccgtgccaccagcaaggatgtatttgcaacaagatgaattagaagaggaggaagatgaacgaggccccactccccctgttcggggagcagcttcttctccagctgccgtgtcctatagccatcagtccactgccactctgactccctccccacaggaagaactccagcccatgttacaggattgtccagaggagactggccacatgcagcaccagcccgacaggagacggcagcctgtgagtcctcctccaccaccacggccgatctcccctccacatacctatggctacatttcaggacccctggtctcagatatggatacggatgcgccagaagaggaagaagacgaagccgacatggaggtagccaagatgcaaaccagaaggcttttgttacgtgggcttgagcagacacctgcctccagtgttggggacctggagagctctgtcacggggtccatgatcaacggctggggctcagcctcagaggaggacaacatttccagcggacgctccagtgttagttcttcggacggctcctttttcactgatgctgactttgcccaggcagtcgcagcagcggcagagtatgctggtctgaaagtagcacgacggcaaatgcaggatgctgctggccgtcgacattttcatgcgtctcagtgccctaggcccacaagtcccgtgtctacagacagcaacatgagtgccgccgtaatgcagaaaaccagaccagccaagaaactgaaacaccagccaggacatctgcgcagagaaacctacacagatgatcttccaccacctcctgtgccgccacctgctataaagtcacctactgcccaatccaagacacagctggaagtacgacctgtagtggtgccaaaactcccttctatggatgcaagaacagacagatcatcagacagaaaaggaagcagttacaaggggagagaagtgttggatggaagacaggttgttgacatgcgaacaaatccaggtgatcccagagaagcacaggaacagcaaaatgacgggaaaggacgtggaaacaaggcagcaaaacgagaccttccaccagcaaagactcatctcatccaagaggatattctaccttattgtagacctacttttccaacatcaaataatcccagagatcccagttcctcaagctcaatgtcatcaagaggatcaggaagcagacaaagagaacaagcaaatgtaggtcgaagaaatattgcagaaatgcaggtacttggaggatatgaaagaggagaagataataatgaagaattagaggaaactgaaagctgaagacaaccaagaggcttatgagatctaatgtgaaaatcatcactcaagatgcctcctgtcagatgacacatgacgccagataaaatgttcagtgcaatcagagtgtacaaattgtcgtttttattcctcttattgggatatcattttaaaaactttattgggtttttattgttgttgtttgatccctaaccctacaaagagccttcctattcccctcgctgttggagcaaaccattataccttacttccagcaagcaaagtgctttgacttcttgcttcagtcatcagccagcaagagggaacaaaactgttcttttgcattttgccgctgagatatggcattgcactgcttatatgccaagctaatttatagcaagatattgatcaaatatagaaagttgatattcaacctcacaagggctctcaaagtataatctttctatagccaactgctaatgcaaattaaaacatatttcattttaacatgatttcaaaatcagtttttcatactaccctttgctggaagaaactaaaaatatagcaaatgcagaaccacaaacaattcgaatggggtagaaacattgtaaatatttactctttgcaaaccctggtggtattttattttggcttcatttcaatcattgaagtatattcttattggaaatgtacttttggataagtagggctaagccagttggatctctggttgtctagtcattgtcataagtaaacctagtaaaaccttgttctatttttcaatcatcaaaaagtaattataaatacgtattacaaacaagtggatgtttttaatgaccaattgagtaagaacatccctgtcttaactggcctaaatttcttctggtagtgtcagttcaactttcagaagtgccacttaaggaagtttgatttttgtttttgtaatgcactgtttttaatctctctctctttttttttttttttttggttttaaaagcacaatcactaaactttatttgtaaaccattgtaactattaaccttttttgtcttattgaaaaaaaaaatgttgagaagcgtttttaacctgttttgttaatgctctatgtttgtatttggaatatttgaataatgacagatggtgaagtaacatgcatactttattgtgggccatgaaccaaatggttcttacttttcctggacttaaagaaaaaaagaggtttaagtttgttgtggccaatgtcgaaacctacaagatttccttaaaatctctaatagaggcattacttgctttcaattgacaaatgatgccctctgactagtagatttctatgatccttttttgtcattttatgaatatcattgattttataattggtgctatttgaagaaaaaaatgtacatttattcatagatagataagtatcaggtctgaccccagtggaaaacaaagccaaacaaaactgaaccacaaaaaaaaaggctggtgttcaccaaaaccaaacttgttcatttagataatttgaaaaagttccatagaaaaggcgtgcagtactaagggaacaatccatgtgattaatgttttcattatgttcatgtaagaagccccttatttttagccataattttgcatactgaaaatccaataatcagaaaagtaattttgtcacattatttattaaaaatgttctcaaatac

SEQ ID NO: 826 - protein, 1651 aa, Homo sapiens
MKWKHVPFLVMISLLSLSPNHLFLAQLIPDPEDVERGNDHGTPIPTSDNDDNSLGYTGSRLRQEDFPPRIVEHPSDLIVSKGEPATLNCKAEGRPTPTIEWYKGGERVETDKDDPRSHRMLLPSGSLFFLRIVHGRKSRPDEGVYVCVARNYLGEAVSHNASLEVAILRDDFRQNPSDVMVAVGEPAVMECQPPRGHPEPTISWKKDGSPLDDKDERITIRGGKLMITYTRKSDAGKYVCVGTNMVGERESEVAELTVLERPSFVKRPSNLAVTVDDSAEFKCEARGDPVPTVRWRKDDGELPKSRYEIRDDHTLKIRKVTAGDMGSYTCVAENMVGKAEASATLTVQEPPHFVVKPRDQVVALGRTVTFQCEATGNPQPAIFWRREGSQNLLFSYQPPQSSSRFSVSQTGDLTITNVQRSDVGYYICQTLNVAGSIITKAYLEVTDVIADRPPPVIRQGPVNQTVAVDGTFVLSCVATGSPVPTILWRKDGVLVSTQDSRIKQLENGVLQIRYAKLGDTGRYTCIASTPSGEATWSAYIEVQEFGVPVQPPRPTDPNLIPSAPSKPEVTDVSRNTVTLSWQPNLNSGATPTSYIIEAFSHASGSSWQTVAENVKTETSAIKGLKPNAIYLFLVRAANAYGISDPSQISDPVKTQDVLPTSQGVDHKQVQRELGNAVLHLHNPTVLSSSSIEVHWTVDQQSQYIQGYKILYRPSGANHGESDWLVFEVRTPAKNSVVIPDLRKGVNYEIKARPFFNEFQGADSEIKFAKTLEEAPSAPPQGVTVSKNDGNGTAILVSWQPPPEDTQNGMVQEYKVWCLGNETRYHINKTVDGSTFSVVIPFLVPGIRYSVEVAASTGAGSGVKSEPQFIQLDAHGNPVSPEDQVSLAQQISDVVKQPAFIAGIGAACWIILMVFSIWLYRHRKKRNGLTSTYAGIRKVPSFTFTPTVTYQRGGEAVSSGGRPGLLNISEPAAQPWLADTWPNTGNNHNDCSISCCTAGNGNSDSNLTTYSRPADCIANYNNQLDNKQTNLMLPESTVYGDVDLSNKINEMKTFNSPNLKDGRFVNPSGQPTPYATTQLIQSNLSNNMNNGSGDSGEKHWKPLGQQKQEVAPVQYNIVEQNKLNKDYRANDTVPPTIPYNQSYDQNTGGSYNSSDRGSSTSGSQGHKKGARTPKVPKQGGMNWADLLPPPPAHPPPHSNSEEYNISVDESYDQEMPCPVPPARMYLQQDELEEEEDERGPTPPVRGAASSPAAVSYSHQSTATLTPSPQEELQPMLQDCPEETGHMQHQPDRRRQPVSPPPPPRPISPPHTYGYISGPLVSDMDTDAPEEEEDEADMEVAKMQTRRLLLRGLEQTPASSVGDLESSVTGSMINGWGSASEEDNISSGRSSVSSSDGSFFTDADFAQAVAAAAEYAGLKVARRQMQDAAGRRHFHASQCPRPTSPVSTDSNMSAAVMQKTRPAKKLKHQPGHLRRETYTDDLPPPPVPPPAIKSPTAQSKTQLEVRPVVVPKLPSMDARTDRSSDRKGSSYKGREVLDGRQVVDMRTNPGDPREAQEQQNDGKGRGNKAAKRDLPPAKTHLIQEDILPYCRPTFPTSNNPRDPSSSSSMSSRGSGSRQREQANVGRRNIAEMQVLGGYERGEDNNEELEETES

SEQ ID NO: 827 - DNA, 7475 bp, Homo sapiens
acttcagacgccgctgatccgggaggagctggggtgagccgcggcggccgtctctcccacccgcagcagcatcctctctgcccttctctgccaccccggggagagccgggagctgcctctttacagcttccacgagccaggggtgcaggcagctgcccccaggaagtttgggcttctgcgtagtttaggggtgcctgcgagcgccccagagggcgaggggccgagggcgatgttgggcgccgcgcggggctgggggcgcccagaagacgtgcgagtgtccgcggtcctgctgctgtctccagtaccctccgcatcccccaagtgatgggaacaagggcccgcccaggcagccgctgtcgccgcaccgccccctcgctcgctctctgcgcgcggagtcacccagtcacactcccggcaccccgagcccttcctccggagctgctgcttctactttggctgctatcgccgccgccgcgggtggcccgctgctgactgggctcgccgggagacggagaagcactttttggccctccctcagcagctctcacaccccaactttgccgccgccgccgcgcctgccctcgcagcggcgctcggccgcacattgtgggggcgcacgccgggaggctccgcaagaccgtggaggcaggaaacggcactactgcgcttctgcctcggctctttgttgttcgctttggatggttcttgaaagtgtctgagcctcctcggaaatcctggggccggagaagacaaaccttggaattcttcctctgcaaaagtctctgagatactgacaagcgtccggaaaggtcgacgagtaattgccctgaaaactcttggctaattgacccacgttgcttatattaagcctttgtgtgtggtgtgtggcttcatacatttggggaccctatttccactccctcctcttggcatgagactgtatacaggatccacccgaggacaatgattgcggagcccgctcacttttacctgtttggattaatatgtctctgttcaggctcccgtcttcgtcaggaagattttccacctcgcattgttgaacacccttcagacctgattgtctcaaaaggagaacctgcaactttgaactgcaaagctgaaggccgccccacacccactattgaatggtacaaagggggagagagagtggagacagacaaagatgaccctcgctcacaccgaatgttgctgccgagtggatctttatttttcttacgtatagtacatggacggaaaagtagacctgatgaaggagtctatgtctgtgtagcaaggaattaccttggagaggctgtgagccacaatgcatcgctggaagtagccatacttcgggatgacttcagacaaaacccttcggatgtcatggttgcagtaggagagcctgcagtaatggaatgccaacctccacgaggccatcctgagcccaccatttcatggaagaaagatggctctccactggatgataaagatgaaagaataactatacgaggaggaaagctcatgatcacttacacccgtaaaagtgacgctggcaaatatgtttgtgttggtaccaatatggttggggaacgtgagagtgaagtagccgagctgactgtcttagagagaccatcatttgtgaagagacccagtaacttggcagtaactgtggatgacagtgcagaatttaaatgtgaggcccgaggtgaccctgtacctacagtacgatggaggaaagatgatggagagctgcccaaatccagatatgaaatccgagatgatcataccttgaaaattaggaaggtgacagctggtgacatgggttcatacacttgtgttgcagaaaatatggtgggcaaagctgaagcatctgctactctgactgttcaagaacctccacattttgttgtgaaaccccgtgaccaggttgttgctttgggacggactgtaacttttcagtgtgaagcaaccggaaatcctcaaccagctattttctggaggagagaagggagtcagaatctacttttctcatatcaaccaccacagtcatccagccgattttcagtctcccagactggcgacctcacaattactaatgtccagcgatctgatgttggttattacatctgccagactttaaatgttgctggaagcatcatcacaaaggcatatttggaagttacagatgtgattgcagatcggcctcccccagttattcgacaaggtcctgtgaatcagactgtagccgtggatggcactttcgtcctcagctgtgtggccacaggcagtccagtgcccaccattctgtggagaaaggatggagtcctcgtttcaacccaagactctcgaatcaaacagttggagaatggagtactgcagatccgatatgctaagctgggtgatactggtcggtacacctgcattgcatcaacccccagtggtgaagcaacatggagtgcttacattgaagttcaagaatttggagttccagttcagcctccaagacctactgacccaaatttaatccctagtgccccatcaaaacctgaagtgacagatgtcagcagaaatacagtcacattatcgtggcaaccaaatttgaattcaggagcaactccaacatcttatattatagaagccttcagccatgcatctggtagcagctggcagaccgtagcagagaatgtgaaaacagaaacatctgccattaaaggactcaaacctaatgcaatttaccttttccttgtgagggcagctaatgcatatggaattagtgatccaagccaaatatcagatccagtgaaaacacaagatgtcctaccaacaagtcagggggtggaccacaagcaggtccagagagagctgggaaatgctgttctgcacctccacaaccccaccgtcctttcttcctcttccatcgaagtgcactggacagtagatcaacagtctcagtatatacaaggatataaaattctctatcggccatctggagccaaccacggagaatcagactggttagtttttgaagtgaggacgccagccaaaaacagtgtggtaatccctgatctcagaaagggagtcaactatgaaattaaggctcgccctttttttaatgaatttcaaggagcagatagtgaaatcaagtttgccaaaaccctggaagaagcacccagtgccccaccccaaggtgtaactgtatccaagaatgatggaaacggaactgcaattctagttagttggcagccacctccagaagacactcaaaatggaatggtccaagagtataaggtttggtgtctgggcaatgaaactcgataccacatcaacaaaacagtggatggttccaccttttccgtggtcattccctttcttgttcctggaatccgatacagtgtggaagtggcagccagcactggggctgggtctggggtaaagagtgagcctcagttcatccagctggatgcccatggaaaccctgtgtcacctgaggaccaagtcagcctcgctcagcagatttcagatgtggtgaagcagccggccttcatagcaggtattggagcagcctgttggatcatcctcatggtcttcagcatctggctttatcgacaccgcaagaagagaaacggacttactagtacctacgcgggtatcagaaaagtcccgtcttttaccttcacaccaacagtaacttaccagagaggaggcgaagctgtcagcagtggagggaggcctggacttctcaacatcagtgaacctgccgcgcagccatggctggcagacacgtggcctaatactggcaacaaccacaatgactgctccatcagctgctgcacggcaggcaatggaaacagcgacagcaacctcactacctacagtcgcccagctgattgtatagcaaattataacaaccaactggataacaaacaaacaaatctgatgctccctgagtcaactgtttatggtgatgtggaccttagtaacaaaatcaatgagatgaaaaccttcaatagcccaaatctgaaggatgggcgttttgtcaatccatcagggcagcctactccttacgccaccactcagctcatccagtcaaacctcagcaacaacatgaacaatggcagcggggactctggcgagaagcactggaaaccactgggacagcagaaacaagaagtggcaccagttcagtacaacatcgtggagcaaaacaagctgaacaaagattatcgagcaaatgacacagttcctccaactatcccatacaaccaatcatacgaccagaacacaggaggatcctacaacagctcagaccggggcagtagtacatctgggagtcaggggcacaagaaaggggcaagaacacccaaggtaccaaaacagggtggcatgaactgggcagacctgcttcctcctcccccagcacatcctcctccacacagcaatagcgaagagtacaacatttctgtagatgaaagctatgaccaagaaatgccatgtcccgtgccaccagcaaggatgtatttgcaacaagatgaattagaagaggaggaagatgaacgaggccccactccccctgttcggggagcagcttcttctccagctgccgtgtcctatagccatcagtccactgccactctgactccctccccacaggaagaactccagcccatgttacaggattgtccagaggagactggccacatgcagcaccagcccgacaggagacggcagcctgtgagtcctcctccaccaccacggccgatctcccctccacatacctatggctacatttcaggacccctggtctcagatatggatacggatgcgccagaagaggaagaagacgaagccgacatggaggtagccaagatgcaaaccagaaggcttttgttacgtgggcttgagcagacacctgcctccagtgttggggacctggagagctctgtcacggggtccatgatcaacggctggggctcagcctcagaggaggacaacatttccagcggacgctccagtgttagttcttcggacggctcctttttcactgatgctgactttgcccaggcagtcgcagcagcggcagagtatgctggtctgaaagtagcacgacggcaaatgcaggatgctgctggccgtcgacattttcatgcgtctcagtgccctaggcccacaagtcccgtgtctacagacagcaacatgagtgccgccgtaatgcagaaaaccagaccagccaagaaactgaaacaccagccaggacatctgcgcagagaaacctacacagatgatcttccaccacctcctgtgccgccacctgctataaagtcacctactgcccaatccaagacacagctggaagtacgacctgtagtggtgccaaaactcccttctatggatgcaagaacagacagatcatcagacagaaaaggaagcagttacaaggggagagaagtgttggatggaagacaggttgttgacatgcgaacaaatccaggtgatcccagagaagcacaggaacagcaaaatgacgggaaaggacgtggaaacaaggcagcaaaacgagaccttccaccagcaaagactcatctcatccaagaggatattctaccttattgtagacctacttttccaacatcaaataatcccagagatcccagttcctcaagctcaatgtcatcaagaggatcaggaagcagacaaagagaacaagcaaatgtaggtcgaagaaatattgcagaaatgcaggtacttggaggatatgaaagaggagaagataataatgaagaattagaggaaactgaaagctgaagacaaccaagaggcttatgagatctaatgtgaaaatcatcactcaagatgcctcctgtcagatgacacatgacgccagataaaatgttcagtgcaatcagagtgtacaaattgtcgtttttattcctcttattgggatatcattttaaaaactttattgggtttttattgttgttgtttgatccctaaccctacaaagagccttcctattcccctcgctgttggagcaaaccattataccttacttccagcaagcaaagtgctttgacttcttgcttcagtcatcagccagcaagagggaacaaaactgttcttttgcattttgccgctgagatatggcattgcactgcttatatgccaagctaatttatagcaagatattgatcaaatatagaaagttgatattcaacctcacaagggctctcaaagtataatctttctatagccaactgctaatgcaaattaaaacatatttcattttaacatgatttcaaaatcagtttttcatactaccctttgctggaagaaactaaaaatatagcaaatgcagaaccacaaacaattcgaatggggtagaaacattgtaaatatttactctttgcaaaccctggtggtattttattttggcttcatttcaatcattgaagtatattcttattggaaatgtacttttggataagtagggctaagccagttggatctctggttgtctagtcattgtcataagtaaacctagtaaaaccttgttctatttttcaatcatcaaaaagtaattataaatacgtattacaaacaagtggatgtttttaatgaccaattgagtaagaacatccctgtcttaactggcctaaatttcttctggtagtgtcagttcaactttcagaagtgccacttaaggaagtttgatttttgtttttgtaatgcactgtttttaatctctctctctttttttttttttttttggttttaaaagcacaatcactaaactttatttgtaaaccattgtaactattaaccttttttgtcttattgaaaaaaaaaatgttgagaagcgtttttaacctgttttgttaatgctctatgtttgtatttggaatatttgaataatgacagatggtgaagtaacatgcatactttattgtgggccatgaaccaaatggttcttacttttcctggacttaaagaaaaaaagaggtttaagtttgttgtggccaatgtcgaaacctacaagatttccttaaaatctctaatagaggcattacttgctttcaattgacaaatgatgccctctgactagtagatttctatgatccttttttgtcattttatgaatatcattgattttataattggtgctatttgaagaaaaaaatgtacatttattcatagatagataagtatcaggtctgaccccagtggaaaacaaagccaaacaaaactgaaccacaaaaaaaaaggctggtgttcaccaaaaccaaacttgttcatttagataatttgaaaaagttccatagaaaaggcgtgcagtactaagggaacaatccatgtgattaatgttttcattatgttcatgtaagaagccccttatttttagccataattttgcatactgaaaatccaataatcagaaaagtaattttgtcacattatttattaaaaatgttctcaaatac

SEQ ID NO: 828 - protein, 1612 aa, Homo sapiens
MIAEPAHFYLFGLICLCSGSRLRQEDFPPRIVEHPSDLIVSKGEPATLNCKAEGRPTPTIEWYKGGERVETDKDDPRSHRMLLPSGSLFFLRIVHGRKSRPDEGVYVCVARNYLGEAVSHNASLEVAILRDDFRQNPSDVMVAVGEPAVMECQPPRGHPEPTISWKKDGSPLDDKDERITIRGGKLMITYTRKSDAGKYVCVGTNMVGERESEVAELTVLERPSFVKRPSNLAVTVDDSAEFKCEARGDPVPTVRWRKDDGELPKSRYEIRDDHTLKIRKVTAGDMGSYTCVAENMVGKAEASATLTVQEPPHFVVKPRDQVVALGRTVTFQCEATGNPQPAIFWRREGSQNLLFSYQPPQSSSRFSVSQTGDLTITNVQRSDVGYYICQTLNVAGSIITKAYLEVTDVIADRPPPVIRQGPVNQTVAVDGTFVLSCVATGSPVPTILWRKDGVLVSTQDSRIKQLENGVLQIRYAKLGDTGRYTCIASTPSGEATWSAYIEVQEFGVPVQPPRPTDPNLIPSAPSKPEVTDVSRNTVTLSWQPNLNSGATPTSYIIEAFSHASGSSWQTVAENVKTETSAIKGLKPNAIYLFLVRAANAYGISDPSQISDPVKTQDVLPTSQGVDHKQVQRELGNAVLHLHNPTVLSSSSIEVHWTVDQQSQYIQGYKILYRPSGANHGESDWLVFEVRTPAKNSVVIPDLRKGVNYEIKARPFFNEFQGADSEIKFAKTLEEAPSAPPQGVTVSKNDGNGTAILVSWQPPPEDTQNGMVQEYKVWCLGNETRYHINKTVDGSTFSVVIPFLVPGIRYSVEVAASTGAGSGVKSEPQFIQLDAHGNPVSPEDQVSLAQQISDVVKQPAFIAGIGAACWIILMVFSIWLYRHRKKRNGLTSTYAGIRKVPSFTFTPTVTYQRGGEAVSSGGRPGLLNISEPAAQPWLADTWPNTGNNHNDCSISCCTAGNGNSDSNLTTYSRPADCIANYNNQLDNKQTNLMLPESTVYGDVDLSNKINEMKTFNSPNLKDGRFVNPSGQPTPYATTQLIQSNLSNNMNNGSGDSGEKHWKPLGQQKQEVAPVQYNIVEQNKLNKDYRANDTVPPTIPYNQSYDQNTGGSYNSSDRGSSTSGSQGHKKGARTPKVPKQGGMNWADLLPPPPAHPPPHSNSEEYNISVDESYDQEMPCPVPPARMYLQQDELEEEEDERGPTPPVRGAASSPAAVSYSHQSTATLTPSPQEELQPMLQDCPEETGHMQHQPDRRRQPVSPPPPPRPISPPHTYGYISGPLVSDMDTDAPEEEEDEADMEVAKMQTRRLLLRGLEQTPASSVGDLESSVTGSMINGWGSASEEDNISSGRSSVSSSDGSFFTDADFAQAVAAAAEYAGLKVARRQMQDAAGRRHFHASQCPRPTSPVSTDSNMSAAVMQKTRPAKKLKHQPGHLRRETYTDDLPPPPVPPPAIKSPTAQSKTQLEVRPVVVPKLPSMDARTDRSSDRKGSSYKGREVLDGRQVVDMRTNPGDPREAQEQQNDGKGRGNKAAKRDLPPAKTHLIQEDILPYCRPTFPTSNNPRDPSSSSSMSSRGSGSRQREQANVGRRNIAEMQVLGGYERGEDNNEELEETES

SEQ ID NO: 829 - DNA, 7299 bp, Homo sapiens
aggagattgagaccatcctggctaacacggtgaaaccccgtctctactaaaaatacaaaaaaattagccgggcgtggcggcgggcgcctgtagtcccagctacttgggaggctgaggcaggagaatggtgcgaacccgggaggcagattttgcagagagccgagatcgtgccactgcactccagcctgggcgacagagcaagactccgtctcaaaacaaaaaacaaacaaacaaatatggagcattctgatatgaataagacacttgctcacttctcaattccttggtgtccagctctacaagtgtatatagacttccaaagaatatttaaatcctttaacaaaaatgccacctaagaaaatatgaaatacttcagtctgtctgtcagtgctcacttcctgtctagaaactttcaggctccggcacaaatgaaccatgttcttcgcctaagtcatttatggaacatctgctttcggtttagcatcagtgtgctattaatccaggtcttccaagaaacaaatgccaagatggtattaaacatgaaatgattttaattgtttacatgcctgaaagtaaataaagagggtgccagctaaggctgaaaaagtcttcagtgatataaattttaccacacttaaagagagagaggaaaagtttaagtggaagctcctactcagccatgctgtctaaggaagatttggcaaaaccttgagctaaagtcagccaacggaaatcccacctttctccaaagaatggatctgctttactatcttgcttggtcttattgctttgtgacctagtaatatctttctcgagtgcatgaaacatctcagaaatgcaaacatcaaggaagatactaatcctttcttccagtttctgtgtgagggttggaggctgactttggtggtgatcttgctccaaattatagaactacatcctgtcatgaagagaagtttgtcttctcgataaagccaagtagctaacagagatggtcaccccaattaccagatggacataattatacttgaatgctgacctacaacattttgtgctgtgcagaggctttgaaaatcaaacaactttgaaaatacaaagcaccgcgtggatggcctcactctgtcgctcaggctggagtggcacgatcttggctcactgcagtctctgcctcctcctcttggatgcaagcaattcggcctccaagtagctgagattacagagaggctgaaaactcaagaaatgtggactaagtgtgtgggcaagtgtgtcactgctgactaaaactatgaacagacagagtctcactctgtcatccaggctggagtccagtggtatgatcttggctcactgcaaacctttgcctccctggtccaagtgattctcctgcttcagcctccaaaagtagctaggactacagctaatcctagtgaatcctccatgaggccattgttctgaatggaagaagagagatatatgcaataggaaaaggtgacgtggaatctatgagagtcccatgtttatgtagcatattgtgcctactgtatctattcaggaggggattcttaatataagagatacatttacaaaattgcttccattacctacaaacaccataaagaaaagtaacagtgatgcatatggacagaactgcatcaccagaagttagaggaggaaagcatttcctatccaactttaaatgctgagaatgaataaccaggaaaaatggtacagaggacaaaataccaacaaaagtctccaaaagtgatgtgaagaaaataaggggctcatcattctaaattctgcaggagagcagtagaagaaatcaagggaatcccacattatgtgggactctgcgactgtattggacacatagaataatctaggataatctctctgtctcaagatcttcaaatgaatcgcagctgtaacgtcccttttgccagggaaggcaatatattcacagattctgaggattaggaatgagacctccttggagccattgtttaacctttcataggctggataatatagttttgcaaactcaatttgggcagctggacagtgatcaggcaactttccgagtccctgactcccacctagactgagattccaatgctaggtgcccagaagtttccaaccaatgcaaaggtggcagctggcaagggccctgtgcagcagtaaggcgagtcatagactgatgagagatcaccattgggaatgagctccatttgcccacaacagtgatcggctgatggctccaccctctacttagtcgcttctgtttcctgtcccatggattcctcaccccacactaatgcttccaggaacaacttctcaaataaatcacttgcacatttctagatgatatgaattatattcagacctgaagagaggacagaaaaattctggacttcaaactcaatgcaatgattggataagactttcggagtaacttcttttgggattgcgtaagagatcaagactacagactttgaggtaaaaacaacctagattcgtgagaagaggaagagtaaaagaactgcagctttcctcccactcttaaggtataaatatgaagtctaggtcatttcgagttggagaagccccagctacttcataagtgtgatgctagttttgaatgtgcattgagggacagctggtgttgagaaaaaaggaaattaccttaataccaataatttcagcacagattgtcatgtggttgggaaaatatttgatatgaagacattgaatccaccttctaaagaataacaagatatattcatgaatggaaggatttggtagggtacatgaggacagatataaaactgcacaaccaatgttacacaaaggaggtttattcttcttcacaagaaagtgatgtgtagagatattcactgaattattgaagattatatgtggcagagtcagcttggggatccaggttgtctaatccaaagattgtttaaccaagaaacaaggtcaaggcatgttcttcgatgcttgttcattaacagctctgcgggtgatgctcctagagaggtctgatgtgttgtgtgatgttctcacacaaactatgttaatttttgatcagtgattgtgagttttaattgtgttgaggtaactagagatttgttaagtggacgttacttcaaaaaggtaagttgaagcagtaaatgttaaaaccaaggaatcccccaaattcttgccctttattttttgcatgttaattccagaaaagaaaaaaaaaaaagcttgtgggttaacgtggtatttatgcaaggctgccaatgtaaatataattctgtgatttaattttttactggcatgacattatatatatgtataaaatgtgcatacataatatatacatatgtatatatgttatatattagatgtgtatgcatatataatatatattagatgtataaaatatattacatatataataaaatattagatatgtattatatagtagtatatataaaatatatacatatctaataatacattatagatcatgtattaatatatacatatatctagtatatacaatatatacatatctattatatttatacacacatacatatacatatgtgtatgtgtatgtctgtgcctgtgtgtctttttgtcttgcaagctcaatctttaaaaagaagagttcgaggagggatggagaaggaagagagtgattatatatacatatactgtccatgtttgcttagctagtatgaagcagaatctggattcaaattcaagaagtctgattcccaaacagccacccaattaggaccgctttgaaaactccgagtcttctatttgatataagtatagctcattgccatggaaataaacatatgtttcttttttaaattaaaaaaaatatttttattttgttttcaacatttagcatttttttgcatcaaagttctaagtagctgcatgtctgtttataatgtgtatatttgttgtttgtttttctgttttgtttctgtatagtttctttgtttgtatcactggtaatttaatccctcatgctatgctgtgggattatgtacaacaacacaacttcttagcctcttcaaaccctttcactgcaagctgcttttttgtgctttttgaaagaaaaggaagaaaaacacattgcattttcttaagataaaatgatacctgcttcttcatttcctcctactccttcctattatcttttgtagaaagaattgctgaatctattgatatgtaattttcatttaattctccaacatcttattgctatttaaaatggtttaagaaaactggcttaatatagccaagaaaaattctatagtaatacttgtctgtaatttctctatatttaaataaaatatcatttctatcttggaggtttgatttggccatttaaaaatgctaatgttttattgttttttcaaaaaaatactacatgcatgctcatagtataaacatcaatgtttcattaggatatatagtgaaaagtcagtaactttacaacctctgtttcaaacccaaccagtaatttaagttgttttcataacaaagtgttattatttatcttctaatacctataaaatatttatttactccccaaattaaatagagtgttggttcttcaatgaaggtatgaagttactttcaattaaatatgcagtttgattagaagaaaaaaaaatccatcagatctcagccaagctcttttggatgattatttttcttcaaaatcaaatacactaaaatttccaaacagtaacagttacaatgtttcagtttcttttaaggtagcctgaactgagacacattaaggtttatatctaatttcatagttctgttcagtaggaaataagtaaattagtttaaaggactgatccatatcaggagatcaggactggacaaagtgttaatttatctacagattttaccaggcagattgccaatatccaagttcattagacaggtcctaggactaataagaactcttgggggctacaatgtgaaatacctgagtatatgagtcaggtaaagactttagaaagtttggcttctactctcatattcccaggagttgaatagattggagtggaaaaaatgtggtcaaaaactagtgattttggattagaagtagggcataaagctcctattattgcacttgggcaatattaactggattgcaagaaactgtaatatgcagaaacagcatatttcccttagggagtacattttgttaaacttagtattcttgctacctgttttgttacctaagcttaatggacctggccctagactttagcttggtgcatggtgaaaattgaccttaagcaactgcagcattgtccaaatatttggtttcacatagaccagttttggttcttgtttctgtgtgactttgaggggctctttaagaaatccaaggacaaggtgccacatttattaaggccccgccattcacaatgcatgatgctagagcctgacagtgcaccatgctagagactgaagagacataaaaaaaagaaaaggcagagttcttgctatcaggttcttaaaattttctttgttttggttaaattcttgattggattttttcactaaatgtttggccctattaaaaataagtaaagaaaaaatgaaggaagaatggaagagagggagaataggaaatgaatgaaacaaagccaagtaagagatacgtctactacagacctgcaagttggcagtgcttgcagaagacagttgacatattctagcctggttcacattttctggttaacttttgagcatagaataaagaatataataaaatgcttttttttttttttgcacaatgaactttaaacaaatcaggagagtatattggtaatttagagaagtagcaattctcattaaatctgtttttcattgaattatcatgcccttaaaattatatgatagattattatcttcggtagtattagtttaaataagaattatatacaaccaaaatatcagtaaggctaattctctgagaccataagagaaccaagtcaatatccccatagctacatcatattgatcattcatttgatttaagaagaaagaagacaaatatgttagtgaaagggagacaaatgagtatgtgcctggcctggccaattcctgactcatttacagaggaagctaatataactctcttactcattttatgggaaatatgatagatctgattatataatttatgcctcctttcagacttcctacaccccactaattgtctcttcctttcttttctccaccttttgctcaggtatttggcagttattgcacttttttggatcttttttttaaggatgttactatcaatcttttgcctacatctaaatgacttacctatgaagaagatcccatttttagccttaatatttgcaaattacttgagagatggagtctcactctatcacccaggctggaggacagtggcacgacctcagctccctgcaacctccacctcccaggttactgatggatccgtcctaaatgccatccatctcaagacagaggcccacagaagtcaatgtatcttcaagatgggagtacctggagatggctgtagagaccatgtagcaggaaatggtgacagagaagagctgggcctctggtaccaacatgcttcccccccgttacagctatgcgggctgatagtgacgcaatgtgtggtttcaatacttcatagtgtcttacttcacctcagtataaagtactttgaaagcatcaaggaaatggtcctcaaaaaaggcttatccagtcaggacatctggtgctggctctggaatgagtggatgaagataaggccttccagtatggaggtgataaaaatcagggaagacaggtaatcacaatggatgacagaccaggattcccagatatcttggcatggctggaacaatgtacagatcaaaccatgtaaaacttaatgggtataaaccaactcttcactttggtctaaaaaagtccatttgcatggcttctagttaaaggtggacaggctcactttagaatcctattatatacaaaggatttagggggtttagttcacaatgtgctaaagccatctcacagtgaccatggtatgagctgtgtgatttggtttaaatataatagagaatgaaggacaaggttgagggtggtggttacagtcctgcctgattctgtagtgctcaggtgacctttgaagaatgaagaaagaagtcaaaaccccacactattaagacattggaagactgggaatgtttattttctgaagaataaaagatgtag

SEQ ID NO: 830 - protein, 61 aa, Homo sapiens
MKYFSLSVSAHFLSRNFQAPAQMNHVLRLSHLWNICFRFSISVLLIQVFQETNAKMVLNMK

SEQ ID NO: 831 - DNA, 3976 bp, Homo sapiens
ctgggtcctgtgtgtgccacaggggtggggtgtccagcgagcggtctcctcctcctgctagtgctgctgcggcgtcccgcggcctccccgagtcgggcgggaggggagagcgggtgtggatttgtcttgacggtaattgttgcgtttccacgtctcggaggcctgcgcgctgggttgctccttcttcgggagcgagctgttctcagcgatcccactcccagccggggctccccacacacactgggctgcgtgcgtgtggagtgggacccgcgcacacgcgtgtctctggacagctacggcgccgaaagaactaaaattccagatggcaaactcaatgaatggcagaaaccctggtggtcgaggaggaaatccccgaaaaggtcgaattttgggtattattgatgctattcaggatgcagttggaccccctaagcaagctgccgcagatcgcaggaccgtggagaagacttggaagctcatggacaaagtggtaagactgtgccaaaatcccaaacttcagttgaaaaatagcccaccatatatacttgatattttgcctgatacatatcagcatttacgacttatattgagtaaatatgatgacaaccagaaacttgcccaactcagtgagaatgagtactttaaaatctacattgatagccttatgaaaaagtcaaaacgggcaataagactctttaaagaaggcaaggagagaatgtatgaagaacagtcacaggacagacgaaatctcacaaaactgtcccttatcttcagtcacatgctggcagaaatcaaagcaatctttcccaatggtcaattccagggagataactttcgtatcacaaaagcagatgctgctgaattctggagaaagttttttggagacaaaactatcgtaccatggaaagtattcagacagtgccttcatgaggtccaccagattagctctggcctggaagcaatggctctaaaatcaacaattgatttaacttgcaatgattacatttcagtttttgaatttgatatttttaccaggctgtttcagccttggggctctattttgcggaattggaatttcttagctgtgacacatccaggttacatggcatttctcacatatgatgaagttaaagcacgactacagaaatatagcaccaaacccggaagctatattttccggttaagttgcactcgattgggacagtgggccattggctatgtgactggggatgggaatatcttacagaccatacctcataacaagcccttatttcaagccctgattgatggcagcagggaaggattttatctttatcctgatgggaggagttataatcctgatttaactggattatgtgaacctacacctcatgaccatataaaagttacacaggaacaatatgaattatattgtgaaatgggctccacttttcagctctgtaagatttgtgcagagaatgacaaagatgtcaagattgagccttgtgggcatttgatgtgcacctcttgccttacggcatggcaggagtcggatggtcagggctgccctttctgtcgttgtgaaataaaaggaactgagcccataatcgtggacccctttgatccaagagatgaaggctccaggtgttgcagcatcattgacccctttggcatgccgatgctagacttggacgacgatgatgatcgtgaggagtccttgatgatgaatcggttggcaaacgtccgaaagtgcactgacaggcagaactcaccagtcacatcaccaggatcctctccccttgcccagagaagaaagccacagcctgacccactccagatcccacatctaagcctgccacccgtgcctcctcgcctggatctaattcagaaaggcatagttagatctccctgtggcagcccaacgggttcaccaaagtcttctccttgcatggtgagaaaacaagataaaccactcccagcaccacctcctcccttaagagatcctcctccaccgccacctgaaagacctccaccaatcccaccagacaatagactgagtagacacatccatcatgtggaaagcgtgccttccagagacccgccaatgcctcttgaagcatggtgccctcgggatgtgtttgggactaatcagcttgtgggatgtcgactcctaggggagggctctccaaaacctggaatcacagcgagttcaaatgtcaatggaaggcacagtagagtgggctctgacccagtgcttatgcggaaacacagacgccatgatttgcctttagaaggagctaaggtcttttccaatggtcaccttggaagtgaagaatatgatgttcctccccggctttctcctcctcctccagttaccaccctcctccctagcataaagtgtactggtccgttagcaaattctctttcagagaaaacaagagacccagtagaggaagatgatgatgaatacaagattccttcatcccaccctgtttccctgaattcacaaccatctcattgtcataatgtaaaacctcctgttcggtcttgtgataatggtcactgtatgctgaatggaacacatggtccatcttcagagaagaaatcaaacatccctgacttaagcatatatttaaagggagatgtttttgattcagcctctgatcccgtgccattaccacctgccaggcctccaactcgggacaatccaaagcatggttcttcactcaacaggacgccctctgattatgatcttctcatccctccattaggtgaagatgcttttgatgccctccctccatctctcccacctcccccacctcctgcaaggcatagtctcattgaacattcaaaacctcctggctccagtagccggccatcctcaggacaggatctttttcttcttccttcagatccctttgttgatctagcaagtggccaagttcctttgcctcctgctagaaggttaccaggtgaaaatgtcaaaactaacagaacatcacaggactatgatcagcttccttcatgttcagatggttcacaggcaccagccagaccccctaaaccacgaccgcgcaggactgcaccagaaattcaccacagaaaaccccatgggcctgaggcggcattggaaaatgtcgatgcaaaaattgcaaaactcatgggagagggttatgcctttgaagaggtgaagagagccttagagatagcccagaataatgtcgaagttgcccggagcatcctccgagaatttgccttccctcctccagtatccccacgtctaaatctatagcagccagaactgtagacaccaaaatggaaagcaatcgatgtattccaagagtgtggaaataaagagaactgagatggaattcaagagagaagtgtctcctcctcgtgtagcagcttgagaagaggcttgggagtgcagcttctcaaaggagaccgatgcttgctcaggatgtcgacagctgtggcttccttgtttttgctagccatatttttaaatcagggttgaactgacaaaaataatttaaagacgtttacttcccttgaactttgaacctgtgaaatgctttaccttgtttacagtttggcaaagttgcagtttgttcttgtttttagtttagttttgttttggtgttttgatacctgtactgtgttcttcacagaccctttgtagcgtggtcaggtctgctgtaacatttcccaccaactctcttgctgtccacatcaacagctaaatcatttattcatatggatctctaccatccccatgccttgcccaggtccagttccatttctctcattcacaagatgctttgaaggttctgattttcaactgatcaaactaatgcaaaaaaaaaaaagtatgtattcttcactactgagtttcttctttggaaaccatcactattgagagatgggaaaaacctgaatgtataaagcatttatttgtcaataaactgccttttgtaaggggttttcacataacata

SEQ ID NO: 832 - protein, 982 aa, Homo sapiens [sequence omitted]

SEQ ID NO: 833 - DNA, 1884 bp, Homo sapiens
gccttgcacatggagatgcttagctgagggggtggctttgttagactatttgcaggtcgtgagatagagcctgagatgggggactgggcccctgcctgggggattgggtcgtgacctgtgtggagccccacactgagctgcagtgggtggggagggtggtttacaggggtgctctgtgcagcccctctgattttcccctgggagtcccaggtccaggggaaggaggacagtggcccaggccacacagctcactgggcggctctcactcccccagggctggctgctggcgggatggacaccctggaggaggtgacttgggccaatgggagcacagcgctacccccacccctggcaccaaacatcagtgtgcctcatcgctgcctgctgctgctctacgaagacattggcacctccagggtccggtactgggacctcttgctgctcatccccaatgtgctcttcctcatcttcctgctctggaagcttccatctgctcgggcgaagatccgcatcacctccagccccatttttatcaccttctacatcctggtgtttgtggtggcgctggtgggcattgcccgggccgtggtatccatgacggtgagcacctcgaacgctgcaactgttgctgataagatcctgtgggagatcacccgcttcttcctgctggccatcgagctgagtgtgatcatcctgggcctggcctttggcacctgggagagtaagtccagcatcaagcgggtgctggccatcaccacagtgctgtccctggcctactctgtcacccaggggaccctggagatcctgtaccctgatgcccatctctcagctgaggactttaatatctatggccatgggggccgccagttctggctggtcagctcctgcttcttcttcctggtctactctctggtggtcatccttcccaagaccccgctgaaggagcgcatctccctgccttctcggaggagcttctacgtgtatgcgggcatcctggcactgctcaacctactgcaggggctggggagtgtgctgctgtgcttcgacatcatcgaggggctctgctgtgtagatgccacaaccttcctgtacttcagcttcttcgctccgctcatctacgtggctttcctccggggcttcttcggctcggagcccaagatcctcttctcctacaaatgccaagtggacgagacagaggagccagatgtacacctaccccagccctacgctgtggcccggcgggagggcctggaggctgcaggggctgctggggcctcagctgccagctactcgagcacgcagttcgactctgccggcggggtggcctacctggatgacatcgcttccatgccctgccacactggcagcatcaacagcacagacagcgagcgctggaaggccatcaatgcctgagggcagctgccagggcctgtggaggacaggccagagaggaggccagcaggcccagagtccccaggggaggaggaccaggtcaagggacgttctgtgggcagtagccctgtgtggccctgttcccaccatgagtctggaggccccacctccctggggctcccaatcccctttgccatctctgctctcactggggaccctcctccccttcccacctgctctcatactgctcagtgacatggcccaggctttccttccagggccatgcttggcaaggttggctgagggcaccctccttctctgcacccttggcacgagggcagggctggctctcccaatgcctccatcccatccccatggtgctttggcctcctcaaagcatccaccatggtggatggactgaagtgtgtatattttcttgatctattttttaataaaaaggaaaaggagcaaaaaaaaaaaaaaaaagttttg

SEQ ID NO: 834 - protein, 373 aa, Homo sapiens
MDTLEEVTWANGSTALPPPLAPNISVPHRCLLLLYEDIGTSRVRYWDLLLLIPNVLFLIFLLWKLPSARAKIRITSSPIFITFYILVFVVALVGIARAVVSMTVSTSNAATVADKILWEITRFFLLAIELSVIILGLAFGTWESKSSIKRVLAITTVLSLAYSVTQGTLEILYPDAHLSAEDFNIYGHGGRQFWLVSSCFFFLVYSLVVILPKTPLKERISLPSRRSFYVYAGILALLNLLQGLGSVLLCFDIIEGLCCVDATTFLYFSFFAPLIYVAFLRGFFGSEPKILFSYKCQVDETEEPDVHLPQPYAVARREGLEAAGAAGASAASYSSTQFDSAGGVAYLDDIASMPCHTGSINSTDSERWKAINA

SEQ ID NO: 835 - DNA, 3453 bp, Homo sapiens
acttttcgcgcgaaacctggttgttgctgtagtggcggagaggatcgtggtactgctatggcggaatcatcggaatccttcaccatggcatccagcccggcccagcgtcggcgaggcaatgatcctctcacctccagccctggccgaagctcccggcgtactgatgccctcacctccagccctggccgtgaccttccaccatttgaggatgagtccgaggggctcctaggcacagaggggcccctggaggaagaagaggatggagaggagctcattggagatggcatggaaagggactaccgcgccatcccagagctggacgcctatgaggccgagggactggctctggatgatgaggacgtagaggagctgacggccagtcagagggaggcagcagagcgggccatgcggcagcgtgaccgggaggctggccggggcctgggccgcatgcgccgtgggctcctgtatgacagcgatgaggaggacgaggagcgccctgcccgcaagcgccgccaggtggagcgggccacggaggacggcgaggaggacgaggagatgatcgagagcatcgagaacctggaggatctcaaaggccactctgtgcgcgagtgggtgagcatggcgggcccccggctggagatccaccaccgcttcaagaacttcctgcgcactcacgtcgacagccacggccacaacgtcttcaaggagcgcatcagcgacatgtgcaaagagaaccgtgagagcctggtggtgaactatgaggacttggcagccagggagcacgtgctggcctacttcctgcctgaggcaccggcggagctgctgcagatctttgatgaggctgccctggaggtggtactggccatgtaccccaagtacgaccgcatcaccaaccacatccatgtccgcatctcccacctgcctctggtggaggagctgcgctcgctgaggcagctgcatctgaaccagctgatccgcaccagtggggtggtgaccagctgcactggcgtcctgccccagctcagcatggtcaagtacaactgcaacaagtgcaatttcgtcctgggtcctttctgccagtcccagaaccaggaggtgaaaccaggctcctgtcctgagtgccagtcggccggcccctttgaggtcaacatggaggagaccatctatcagaactaccagcgtatccgaatccaggagagtccaggcaaagtggcggctggccggctgccccgctccaaggacgccattctcctcgcagatctggtggacagctgcaagccaggagacgagatagagctgactggcatctatcacaacaactatgatggctccctcaacactgccaatggcttccctgtctttgccactgtcatcctagccaaccacgtggccaagaaggacaacaaggttgctgtaggggaactgaccgatgaagatgtgaagatgatcactagcctctccaaggatcagcagatcggagagaagatctttgccagcattgctccttccatctatggtcatgaagacatcaagagaggcctggctctggccctgttcggaggggagcccaaaaacccaggtggcaagcacaaggtacgtggtgatatcaacgtgctcttgtgcggagaccctggcacagcgaagtcgcagtttctcaagtatattgagaaagtgtccagccgagccatcttcaccactggccagggggcgtcggctgtgggcctcacggcgtatgtccagcggcaccctgtcagcagggagtggaccttggaggctggggccctggttctggctgaccgaggagtgtgtctcattgatgaatttgacaagatgaatgaccaggacagaaccagcatccatgaggccatggagcaacagagcatctccatctcgaaggctggcatcgtcacctccctgcaggctcgctgcacggtcattgctgccgccaaccccataggagggcgctacgacccctcgctgactttctctgagaacgtggacctcacagagcccatcatctcacgctttgacatcctgtgtgtggtgagggacaccgtggacccagtccaggacgagatgctggcccgcttcgtggtgggcagccacgtcagacaccaccccagcaacaaggaggaggaggggctggccaatggcagcgctgctgagcccgccatgcccaacacgtatggcgtggagcccctgccccaggaggtcctgaagaagtacatcatctacgccaaggagagggtccacccgaagctcaaccagatggaccaggacaaggtggccaagatgtacagtgacctgaggaaagaatctatggcgacaggcagcatccccattacggtgcggcacatcgagtccatgatccgcatggcggaggcccacgcgcgcatccatctgcgggactatgtgatcgaagacgacgtcaacatggccatccgcgtgatgctggagagcttcatagacacacagaagttcagcgtcatgcgcagcatgcgcaagacttttgcccgctacctttcattccggcgtgacaacaatgagctgttgctcttcatactgaagcagttagtggcagagcaggtgacatatcagcgcaaccgctttggggcccagcaggacactattgaggtccctgagaaggacttggtggataaggctcgtcagatcaacatccacaacctctctgcattttatgacagtgagctcttcaggatgaacaagttcagccacgacctgaaaaggaaaatgatcctgcagcagttctgaggccctatgccatccataaggattccttgggattctggtttggggtggtcagtgccctctgtgctttatggacacaaaaccagagcacttgatgaactcggggtactagggtcagggcttatagcaggatgtctggctgcacctggcatgactgtttgtttctccaagcctgctttgtgcttctcacctttgggtgggatgccttgccagtgtgtcttacttggttgctgaacatcttgccacctccgagtgctttgtctccactcagtaccttggatcagagctgctgagttcaggatgcctgcgtgtggtttaggtgttagccttcttacatggatgtcaggagagctgctgccctcttggcgtgagttgcgtattcaggctgcttttgctgcctttggccagagagctggttgaagatgtttgtaatcgttttcagtctcctgcaggtttctgtgcccctgtggtggaagagggcacgacagtgccagcgcagcgttctgggctcctcagtcgcaggggtgggatgtgagtcatgcggattatccactcgccacagttatcagctgccattgctccctgtctgtttccccactctcttatttgtgcattcggtttggtttctgtagttttaatttttaataaagttgaataaaatataaaaaaaaaaaaaaaaaaaaa

SEQ ID NO: 836 - protein, 904 aa, Homo sapiens
MAESSESFTMASSPAQRRRGNDPLTSSPGRSSRRTDALTSSPGRDLPPFEDESEGLLGTEGPLEEEEDGEELIGDGMERDYRAIPELDAYEAEGLALDDEDVEELTASQREAAERAMRQRDREAGRGLGRMRRGLLYDSDEEDEERPARKRRQVERATEDGEEDEEMIESIENLEDLKGHSVREWVSMAGPRLEIHHRFKNFLRTHVDSHGHNVFKERISDMCKENRESLVVNYEDLAAREHVLAYFLPEAPAELLQIFDEAALEVVLAMYPKYDRITNHIHVRISHLPLVEELRSLRQLHLNQLIRTSGVVTSCTGVLPQLSMVKYNCNKCNFVLGPFCQSQNQEVKPGSCPECQSAGPFEVNMEETIYQNYQRIRIQESPGKVAAGRLPRSKDAILLADLVDSCKPGDEIELTGIYHNNYDGSLNTANGFPVFATVILANHVAKKDNKVAVGELTDEDVKMITSLSKDQQIGEKIFASIAPSIYGHEDIKRGLALALFGGEPKNPGGKHKVRGDINVLLCGDPGTAKSQFLKYIEKVSSRAIFTTGQGASAVGLTAYVQRHPVSREWTLEAGALVLADRGVCLIDEFDKMNDQDRTSIHEAMEQQSISISKAGIVTSLQARCTVIAAANPIGGRYDPSLTFSENVDLTEPIISRFDILCVVRDTVDPVQDEMLARFVVGSHVRHHPSNKEEEGLANGSAAEPAMPNTYGVEPLPQEVLKKYIIYAKERVHPKLNQMDQDKVAKMYSDLRKESMATGSIPITVRHIESMIRMAEAHARIHLRDYVIEDDVNMAIRVMLESFIDTQKFSVMRSMRKTFARYLSFRRDNNELLLFILKQLVAEQVTYQRNRFGAQQDTIEVPEKDLVDKARQINIHNLSAFYDSELFRMNKFSHDLKRKMILQQF

SEQ ID NO: 837 - DNA, 2269 bp, Homo sapiens
ccagttccggcacgaggaccatgggccggctgctgcgggccgcccggctgccgccgctgctttcgccgctgctgcttctgctggttgggggagcgttcctgggtgcctgtgtggctgggtctgatgagcctggcccagagggcctcacctccacctccctgctagacctcctgctgcccactggcttggagccactggactcagaggagcctagtgagaccatgggcctgggagctgggctgggagcccctggctcaggcttccccagcgaagagaatgaagagtctcggattctgcagccaccacagtacttctgggaagaggaggaagagctgaatgactcaagtctggacctgggacccactgcagattatgtttttcctgacttaactgagaaggcaggttccattgaagacactagccaggctcaagagctgccaaacctcccctctcccttgcccaagatgaatctggttgagcctccctggcatatgcctcccagagaggaggaagaagaggaagaggaagaggaggagagggagaaggaagaggtagagaaacaagaggaggaggaagaggaggagctgctccctgtgaatggatcccaagaagaagccaagcctcaggtccgtgacttttctctcaccagcagcagccagaccccaggggccaccaaaagcaggcatgaagactccggggaccaggcctcatcaggtgtggaggtggagagcagcatggggcccagcttgctgctgccttcagtcaccccaactacagtgactccgggggaccaggactccaccagccaagaggcagaggccacagtgctgccagctgcagggcttggggtagagttcgaggctcctcaggaagcaagcgaggaagccactgcaggagcagctggtttgtctggccagcacgaggaggtgccggccttgccttcattccctcaaaccacagctcccagtggggccgagcacccagatgaagatccccttggctctagaacctcagcctcttccccactggcccctggagacatggaactgacaccttcctctgctaccttgggacaagaagatctcaaccagcagctcctagaagggcaggcagctgaagctcaatccaggataccctgggattctacgcaggtgatctgcaaggactggagcaatctggctgggaaaaactacatcattctgaacatgacagagaacatagactgtgaggtgttccggcagcaccgggggccacagctcctggccctggtggaagaggtgctgccccgccatggcagtggccaccatggggcctggcacatctctctgagcaagcccagcgagaaggagcagcaccttctcatgacactggtgggcgagcagggggtggtgcccactcaagatgtcctttccatgctgggtgacatccgcaggagcctggaggagattggcatccagaactattccacaaccagcagctgccaggcgcgggccagccaggtgcgcagcgactacggcacgctcttcgtggtgctggtggtcattggggccatctgcatcatcatcattgcgcttggcctgctctacaactgctggcagcgccggctgcccaagctcaagcacgtgtcgcacggcgaggagctgcgcttcgtggagaacggctgccacgacaaccccacgctggacgtggccagcgacagccagtcggagatgcaggagaagcaccccagcctgaacggcggcggggccctcaacggcccggggagctggggggcgctcatggggggcaagcgggaccccgaggactcggacgtgttcgaggaggacacgcacctgtgagcgcagcgaggcgcaggccgagtgggccgccaggaccaagcgaggtggaccccgaaacggacggcccggagcccgcaccagccccgcgcctacccggccgcccccgcgcctggccctcggcgcgggctccttcccgcttcccccgacttcacacggcggcttcggaccaactccctcactcccgcccgaggggcaggcctcaaagcccgccttggccccgctttcccgcccctgaaccccggccccgcgggcggcgggcgcgcttcctgcgccccgggactcaattaaacccgcccggagaccacgcgggcccagcgaaaaaaaaaaaaaaaaaaaaaaaaaaaaaaaaaaaaaaaaaaaaaaaaaaaaaaaaaaaaaaaaaaaaaaaaaaaaaaaaaaaaaaaaaaaaaaaaaaaaaaaaaaaaaaaaaa

SEQ ID NO: 838 - protein, 605 aa, Homo sapiens
MGRLLRAARLPPLLSPLLLLLVGGAFLGACVAGSDEPGPEGLTSTSLLDLLLPTGLEPLDSEEPSETMGLGAGLGAPGSGFPSEENEESRILQPPQYFWEEEEELNDSSLDLGPTADYVFPDLTEKAGSIEDTSQAQELPNLPSPLPKMNLVEPPWHMPPREEEEEEEEEEEREKEEVEKQEEEEEEELLPVNGSQEEAKPQVRDFSLTSSSQTPGATKSRHEDSGDQASSGVEVESSMGPSLLLPSVTPTTVTPGDQDSTSQEAEATVLPAAGLGVEFEAPQEASEEATAGAAGLSGQHEEVPALPSFPQTTAPSGAEHPDEDPLGSRTSASSPLAPGDMELTPSSATLGQEDLNQQLLEGQAAEAQSRIPWDSTQVICKDWSNLAGKNYIILNMTENIDCEVFRQHRGPQLLALVEEVLPRHGSGHHGAWHISLSKPSEKEQHLLMTLVGEQGVVPTQDVLSMLGDIRRSLEEIGIQNYSTTSSCQARASQVRSDYGTLFVVLVVIGAICIIIIALGLLYNCWQRRLPKLKHVSHGEELRFVENGCHDNPTLDVASDSQSEMQEKHPSLNGGGALNGPGSWGALMGGKRDPEDSDVFEEDTHL

SEQ ID NO: 839 - DNA, 2020 bp, Homo sapiens
ggcggggcggggctgagcgtgtttacatccgccgggtgcgcggcttcgccgcccgaggtcgttcggctcgggtaccatcctccgcgccatggacaccagcgacctgttcgccagctgcaggaagggggatgtgggccgagtgcgaccatgaacccgtcctgacccaggctctgacctccttcctgcccaggtacctgctggagcagcgagacgtggaggtactatgcctgcttgtgtgggcacgaggagctggtactctaccttctggccaatggagcccgctgcgaggccaacaccttcgatggtgagcgctgcctctatggggcactgagtgaccccatccgccgggctctacgcgattacaagcaggtcacggcttcctgcaggaggcgggattactatgacgacttcttgcagcggcttctagagcagggcatccacagtgacgtggtctttgtagtacacgggaagccattccgggtgcatcgctgcgtcctgggtgcacgtagtgcctactttgccaacatgctggacaccaaatggaagggcaagagtgtcgtggttctcaggcacccactgatcaaccccgtggcctttggggccctgctgcagtacctgtacacaggccgcctggacattggcgtagagcatgtgagtgactgtgagcgcctggccaagcaatgccagctgtgggacctgctcagcgacctggaggccaagtgcgagaaggtgtctgagtttgtggcgtctaagccaggcacgtgtgtgaaggtgctgaccatcgagcccccacctgcagacccccgcctccgggaggacatggcgctgctggccgattgtgccctgccccccgagctccgaggtgatctttgggagctgcccttcccttgtcctgacggcttcaacagctgccctgacatctgcttccgagtggctggctgcagcttcctctgccacaaggcctttttctgtggccgcagtgactacttccgagccctgctggatgaccacttccgagagagcgaggagccagcgacctcagggggccccccagccgtcaccctgcatggcatctcacccgacgtcttcactcacgtgctctactacatgtacagcgaccacactgagctgtcccccgaggcagcctatgatgtgctgagcgtcgccgacatgtacctgctgccaggcctgaagaggctgtgcggccgcagcctggctcagatgctagacgaggacactgtggtgggtgtgtggcgcgtggccaagctcttccgcctggcgcggcttgaggaccagtgcactgagtacatggccaaggtcattgagaagctggtggagcgggaggacttcgtggaggcggtgaaggaggaggcagcggctgtggcagcccggcaggagacggactctatcccgctggtggacgacatccgcttccacgtggccagcacggtgcagacctacagcgccatagaggaggcgcagcagcgtctgcgggcactcgaggacctgctcgtgtccatcggtctggactgttgagcccctggctgggcagccccaggggccaggagctctcttggagacaagcatgtgtatgcgtttgtgtgcagctcttcttcctgctccctgcacattgagggcttcatggggggtgcgaggggctcagtggggcttctcttccctccatgagcctggagaccccaggggaggatccatttgggatgagccccctccccccaatgcacaagccagcccccaagaccctgggggtggacaccactcagggaaacctggggtgggggtgggctttggtcttagcactttccttctccagatcccccctacccaccccagtcccaaatccagtcctctggcccttgcctagccctgaattgcttctctaagctggtgttcccatgcacagggccattcaggaagggctgggggagtgtgtgtggcaataaagcttgaaggcaccgtgggaaaaaaaaaaaaaaaaaaaaaaaaaaaaaaaaaaaaaaaa

SEQ ID NO: 840 - protein, 336 aa, Homo sapiens
MLDTKWKGKSVVVLRHPLINPVAFGALLQYLYTGRLDIGVEHVSDCERLAKQCQLWDLLSDLEAKCEKVSEFVASKPGTCVKVLTIEPPPADPRLREDMALLADCALPPELRGDLWELPFPCPDGFNSCPDICFRVAGCSFLCHKAFFCGRSDYFRALLDDHFRESEEPATSGGPPAVTLHGISPDVFTHVLYYMYSDHTELSPEAAYDVLSVADMYLLPGLKRLCGRSLAQMLDEDTVVGVWRVAKLFRLARLEDQCTEYMAKVIEKLVEREDFVEAVKEEAAAVAARQETDSIPLVDDIRFHVASTVQTYSAIEEAQQRLRALEDLLVSIGLDC

SEQ ID NO: 841 - DNA, 1989 bp, Homo sapiens
ggcggggcggggctgagcgtgtttacatccgccgggtgcgcggcttcgccgcccgaggtcgttcggctcgggtaccatcctccgcgccatggacaccagcgacctgttcgccagctgcaggaagggggatgtgggccgagtgcggtacctgctggagcagcgagacgtggaggtgaatgtgcgggacaagtgggacagcacccccttgtactatgcctgcttgtgtgggcacgaggagctggtactctaccttctggccaatggagcccgctgcgaggccaacaccttcgatggtgagcgctgcctctatggggcactgagtgaccccatccgccgggctctacgcgattacaagcaggtcacggcttcctgcaggaggcgggattactatgacgacttcttgcagcggcttctagagcagggcatccacagtgacgtggtctttgtagtacacgggaagccattccgggtgcatcgctgcgtcctgggtgcacgtagtgcctactttgccaacatgctggacaccaaatggaagggcaagagtgtcgtggttctcaggcacccactgatcaaccccgtggcctttggggccctgctgcagtacctgtacacaggccgcctggacattggcgtagagcatgtgagtgactgtgagcgcctggccaagcaatgccagctgtgggacctgctcagcgacctggaggccaagtgcgagaaggtgtctgagtttgtggcgtctaagccaggcacgtgtgtgaaggtgctgaccatcgagcccccacctgcagacccccgcctccgggaggacatggcgctgctggccgattgtgccctgccccccgagctccgaggtgatctttgggagctgcccttcccttgtcctgacggcttcaacagctgccctgacatctgcttccgagtggctggctgcagcttcctctgccacaaggcctttttctgtggccgcagtgactacttccgagccctgctggatgaccacttccgagagagcgaggagccagcgacctcagggggccccccagccgtcaccctgcatggcatctcacccgacgtcttcactcacgtgctctactacatgtacagcgaccacactgagctgtcccccgaggcagcctatgatgtgctgagcgtcgccgacatgtacctgctgccaggcctgaagaggctgtgcggccgcagcctggctcagatgctagacgaggacactgtggtgggtgtgtggcgcgtggccaagctcttccgcctggcgcggcttgaggaccagtgcactgagtacatggccaaggtcattgagaagctggtggagcgggaggacttcgtggaggcggtgaaggaggaggcagcggctgtggcagcccggcaggagacggactctatcccgctggtggacgacatccgcttccacgtggccagcacggtgcagacctacagcgccatagaggaggcgcagcagcgtctgcgggcactcgaggacctgctcgtgtccatcggtctggactgttgagcccctggctgggcagccccaggggccaggagctctcttggagacaagcatgtgtatgcgtttgtgtgcagctcttcttcctgctccctgcacattgagggcttcatggggggtgcgaggggctcagtggggcttctcttccctccatgagcctggagaccccaggggaggatccatttgggatgagccccctccccccaatgcacaagccagcccccaagaccctgggggtggacaccactcagggaaacctggggtgggggtgggctttggtcttagcactttccttctccagatcccccctacccaccccagtcccaaatccagtcctctggcccttgcctagccctgaattgcttctctaagctggtgttcccatgcacagggccattcaggaagggctgggggagtgtgtgtggcaataaagcttgaaggcaccgtgggaaaaaaaaaaaaaaaaaaaa

SEQ ID NO: 842 - protein, 478 aa, Homo sapiens
MDTSDLFASCRKGDVGRVRYLLEQRDVEVNVRDKWDSTPLYYACLCGHEELVLYLLANGARCEANTFDGERCLYGALSDPIRRALRDYKQVTASCRRRDYYDDFLQRLLEQGIHSDVVFVVHGKPFRVHRCVLGARSAYFANMLDTKWKGKSVVVLRHPLINPVAFGALLQYLYTGRLDIGVEHVSDCERLAKQCQLWDLLSDLEAKCEKVSEFVASKPGTCVKVLTIEPPPADPRLREDMALLADCALPPELRGDLWELPFPCPDGFNSCPDICFRVAGCSFLCHKAFFCGRSDYFRALLDDHFRESEEPATSGGPPAVTLHGISPDVFTHVLYYMYSDHTELSPEAAYDVLSVADMYLLPGLKRLCGRSLAQMLDEDTVVGVWRVAKLFRLARLEDQCTEYMAKVIEKLVEREDFVEAVKEEAAAVAARQETDSIPLVDDIRFHVASTVQTYSAIEEAQQRLRALEDLLVSIGLDC

SEQ ID NO: 843 - DNA, 1974 bp, Homo sapiens
ggcggggcggggctgagcgtgtttacatccgccgggtgcgcggcttcgccgcccgaggtcgttcggctcgggtaccatcctccgcgccatggacaccagcgacctgttcgccagctgcaggaagggggatgtgggccgagtgcggtacctgctggagcagcgagacgtggaggtactatgcctgcttgtgtgggcacgaggagctggtactctaccttctggccaatggagcccgctgcgaggccaacaccttcgatggtgagcgctgcctctatggggcactgagtgaccccatccgccgggctctacgcgattacaagcaggtcacggcttcctgcaggaggcgggattactatgacgacttcttgcagcggcttctagagcagggcatccacagtgacgtggtctttgtagtacacgggaagccattccgggtgcatcgctgcgtcctgggtgcacgtagtgcctactttgccaacatgctggacaccaaatggaagggcaagagtgtcgtggttctcaggcacccactgatcaaccccgtggcctttggggccctgctgcagtacctgtacacaggccgcctggacattggcgtagagcatgtgagtgactgtgagcgcctggccaagcaatgccagctgtgggacctgctcagcgacctggaggccaagtgcgagaaggtgtctgagtttgtggcgtctaagccaggcacgtgtgtgaaggtgctgaccatcgagcccccacctgcagacccccgcctccgggaggacatggcgctgctggccgattgtgccctgccccccgagctccgaggtgatctttgggagctgcccttcccttgtcctgacggcttcaacagctgccctgacatctgcttccgagtggctggctgcagcttcctctgccacaaggcctttttctgtggccgcagtgactacttccgagccctgctggatgaccacttccgagagagcgaggagccagcgacctcagggggccccccagccgtcaccctgcatggcatctcacccgacgtcttcactcacgtgctctactacatgtacagcgaccacactgagctgtcccccgaggcagcctatgatgtgctgagcgtcgccgacatgtacctgctgccaggcctgaagaggctgtgcggccgcagcctggctcagatgctagacgaggacactgtggtgggtgtgtggcgcgtggccaagctcttccgcctggcgcggcttgaggaccagtgcactgagtacatggccaaggtcattgagaagctggtggagcgggaggacttcgtggaggcggtgaaggaggaggcagcggctgtggcagcccggcaggagacggactctatcccgctggtggacgacatccgcttccacgtggccagcacggtgcagacctacagcgccatagaggaggcgcagcagcgtctgcgggcactcgaggacctgctcgtgtccatcggtctggactgttgagcccctggctgggcagccccaggggccaggagctctcttggagacaagcatgtgtatgcgtttgtgtgcagctcttcttcctgctccctgcacattgagggcttcatggggggtgcgaggggctcagtggggcttctcttccctccatgagcctggagaccccaggggaggatccatttgggatgagccccctccccccaatgcacaagccagcccccaagaccctgggggtggacaccactcagggaaacctggggtgggggtgggctttggtcttagcactttccttctccagatcccccctacccaccccagtcccaaatccagtcctctggcccttgcctagccctgaattgcttctctaagctggtgttcccatgcacagggccattcaggaagggctgggggagtgtgtgtggcaataaagcttgaaggcaccgtgggaaaaaaaaaaaaaaaaaaaaaaaaaaaaaaaaaaaaaaaa

SEQ ID NO: 844 - protein, 453 aa, Homo sapiens
MWAECGTCWSSETWRYYACLCGHEELVLYLLANGARCEANTFDGERCLYGALSDPIRRALRDYKQVTASCRRRDYYDDFLQRLLEQGIHSDVVFVVHGKPFRVHRCVLGARSAYFANMLDTKWKGKSVVVLRHPLINPVAFGALLQYLYTGRLDIGVEHVSDCERLAKQCQLWDLLSDLEAKCEKVSEFVASKPGTCVKVLTIEPPPADPRLREDMALLADCALPPELRGDLWELPFPCPDGFNSCPDICFRVAGCSFLCHKAFFCGRSDYFRALLDDHFRESEEPATSGGPPAVTLHGISPDVFTHVLYYMYSDHTELSPEAAYDVLSVADMYLLPGLKRLCGRSLAQMLDEDTVVGVWRVAKLFRLARLEDQCTEYMAKVIEKLVEREDFVEAVKEEAAAVAARQETDSIPLVDDIRFHVASTVQTYSAIEEAQQRLRALEDLLVSIGLDC

SEQ ID NO: 845 - DNA, 4192 bp, Homo sapiens
tggcggcgcagacgccgcaccctgtcgccgcgaagccggtcgcgcgcagctcgtcccggccctggcccgccgcaaacgaggatccgctgcgctcggggaacgcgacagcggcgctcgtggccccggacctgaagacccttccagcatgccagaggaaagttcccccaggcggaccccgcagagcattccctaccaggacctccctcacctggtcaatgcagacggacagtacctcttctgcaggtactggaaacccacaggcacacccaaggccctcatctttgtgtcccatggagccggagagcacagtggccgctatgaagagctggctcggatgctgatggggctggacctgctggtgttcgcccacgaccatgttggccacggacagagcgaaggggagaggatggtagtgtctgacttccacgttttcgtcagggatgtgttgcagcatgtggattccatgcagaaagactaccctgggcttcctgtcttccttctgggccactccatgggaggcgccatcgccatcctcacggccgcagagaggccgggccacttcgccggcatggtactcatttcgcctctggttcttgccaatcctgaatctgcaacaactttcaaggtccttgctgcgaaagtgctcaaccttgtgctgccaaacttgtccctcgggcccatcgactccagcgtgctctctcggaataagacagaggtcgacatttataactcagaccccctgatctgccgggcagggctgaaggtgtgcttcggcatccaactgctgaatgccgtctcacgggtggagcgcgccctccccaagctgactgtgcccttcctgctgctccagggctctgccgatcgcctatgtgacagcaaaggggcctacctgctcatggagttagccaagagccaggacaagactctcaagatttatgaaggtgcctaccatgttctccacaaggagcttcctgaagtcaccaactccgtcttccatgaaataaacatgtgggtctctcaaaggacagccacggcaggaactgcgtccccaccctgaatgcattggccggtgcccggctcatggtctgggggatgcaggcaggggaagggcagagatggcttctcagatatggcttgccaaaaaaaaaaaaaaaaaaaaatcagaaattggagaaatccttagcacaattttctaaaaaataacagacatttttgttatacattagactatcagacactggacctaccttaatggttagacactttatgcaaaaaaagagaaaggtcccaggtgattttccacaaagaatgtgctaaaatgtccactgaaaacaaagccaagcctctgccctgcctctcccagctcccacaagggttccaggaattcctggtgttcccaggacaccagactgcaataactggaggcgcctccttcctgcccacccttcgctcacgccccagcgccctctctgaccagcctccgcttggtggccttcctctggccgtgtgatgaggtggttgctgtctccataggggccagctccccagggcagactcacgtgcccctctgaggctcagaaaatgcccagcccttcctcaaaatgagcagccacccatgactttgtgggctccttgttagcctgagaccaggctttgcagaggggcggggggtgaggcttagcccagaaggagaactgagcaggaaaccaaggctcttctctgtcccctgcccttcccctcctgccagggggaggctcaggttggtccccgagtgccgcctgtactcacaaaggctgcctttcctctagagtcactaattttacctgatgctatgagagaatcatattgaagatgaaatgtctaatatataatgtatattttaaagcagagactattttggtggataggtgggagggagcaaggggagtttgagggaatcagagcttgatgctactgtacagaactggacaggttgggccggcagtggtggggccagagggctctgtgctctaggagctaagccagcagcccccgagaggggacttggctgggcctttcctatgggcaaggcccagtgctcttcctgcccaccagggaccatggagcagtggcaccctatggggctatgatccctaggcctgggcctgggcctgcctatggcccagagctaccctgggagtgtcagtgctagcagcacagctacctctggtggcaggagaagagaggcccagcacagcagcaggccaggccttcctgtccaggtctgcatggagcactcggtgacccagagcagggactggaggcacccccagccctgccccaggccacagcaggacaggccgggacaggcctcacccaaggccaaggctggcatcagccaatcattcagagctgaggccctgggcctagcctgcccttctcaggtgccaataccaccccagccctgcccttggcctcactttttcccagcaataagtggggttcaccacccgcctcgggaatactttccccttctaaatgggacttgctgttacctcaggaggctccttagtgcaaatatgaccctggtcagggctttgccaccgttgaagccctgcagaaggtgcaatgtaggggttctggggccacagaggagaggccacttcccaccaggacccccaacatgaagtctaggcctcaggggctcccgcccttcttcctccagcagcgggaactgccactgctctcccaggccctgttctggaggctaaccttggttcctggagagtgtgcccctccaccctccctccagcagccctgatcacaccatgagagccaggaacgggtcaccctgctgaagatcactctgtgccctgggggaggagccaagccctcaccccacaaggggcaggtgggggcttggttgctgacccggcccaagtccccacagagcaccttctgtagctccagcttgtctccctggcttctctttgaaggagaaaaatgtaaaatatgcactgagaaagccagccccgcctgcttagtcagccccggcagcagggcagccatgggaactcaggaaaagcaggaaccctttccaaaagcccagagatgccctgggctcagatctgtaattctcccaggagctgtgatagagcaggccacacaaagtccctacgcctccctgctgcctcccccagatgcatgtggtggcatcaccattccccaaattgaatatcagcatgcggcctgaccagggactctttagatgcatgaatttatttatatgaaggctctcacagagacacacacagcacttcagtagcatttgcattcctggttaaagaatcaccaatatttaaaataaaaactttcctgaaattgggactgtcatgttatccagaagggctggtacatccgcccaccatgtccccctgctgggtcaggagccaacacaggaccctgcgtgtgagcgtgcctgacatctcacgcacggccactccagagccggtccctgtccttggaaagctgtgaagccttgcgttgagttccttctcgatactgacggctccgtgctgacattctgagctctggagtcacaccagcgcaggggcgtggaggaactgaggtttggaaggaatgccaggtctcgcacagcttggcctcgagaaggtgagaggaaggcaaaggccagggaggggacccagagaggcctggcacacaaggcccaagcaccaccgtcaacacagcccagtccatacagaaatgggtttcatgcctgaaaagctttttacagaaagatgccgcctgtagccagtgacagccgcaaccctacaggcctcagttccttgcagaggtgaggggtagagagtcagcctccctcccttccagcagcgacccagcttccctccacttccaggtggtgctgggctcaccgagggagcactggtgggtgctctgaaaacccacaggatcccacctccaggcccacctgggtcccatctcactctcttcttctttcaccaattgctaacatagaccttgttgggatcacgatggcttcacaagccagctgttgggtttgctatgtcactgtggctcagtcacatccctgcgtgtatactgtctgcggggcacatatgtatccatttagagctaaaggaatcagtgtacactacagctaatcctaataaatccgatgttttcggaaaaa

SEQ ID NO: 846 - protein, 303 aa, Homo sapiens
MPEESSPRRTPQSIPYQDLPHLVNADGQYLFCRYWKPTGTPKALIFVSHGAGEHSGRYEELARMLMGLDLLVFAHDHVGHGQSEGERMVVSDFHVFVRDVLQHVDSMQKDYPGLPVFLLGHSMGGAIAILTAAERPGHFAGMVLISPLVLANPESATTFKVLAAKVLNLVLPNLSLGPIDSSVLSRNKTEVDIYNSDPLICRAGLKVCFGIQLLNAVSRVERALPKLTVPFLLLQGSADRLCDSKGAYLLMELAKSQDKTLKIYEGAYHVLHKELPEVTNSVFHEINMWVSQRTATAGTASPP

SEQ ID NO: 847 - DNA, 4617 bp, Homo sapiens
ctccatctttctagtccccaccttccccggtgcagacacccggcgaagcccacccggttttcccagcggcatttccgatgacagcttcggggctacgtgtcctgtgctgtcggagacgcacaggaagcaaagtttgtgagaagccttgggggcgactttgccttgggcacccgcatttgtgcgtctgcgaggtgcctcggtgtgcgcggagctagtttcccagtttcccgggcccctcccttctccgagcccctctagcgatttgtttaggaaaagtgatgacatgaactagtagtggagaatcgcagcgccgctccccgccctggggagggaggggagccccggagagcctgccggtgggagctggaagcaggctcccggctgagcgccccagcccgaaaggcagggtctgggtgcgggaagagggctcggagctgccttcctgctgccttggggccgcccagatgagggaacagcccgatttgcctggttctgattctccaggctgtcgtggttgtggaatgcaaacgccagcacataatggaaacaggacctgaagacccttccagcatgccagaggaaagttcccccaggcggaccccgcagagcattccctaccaggacctccctcacctggtcaatgcagacggacagtacctcttctgcaggtactggaaacccacaggcacacccaaggccctcatctttgtgtcccatggagccggagagcacagtggccgctatgaagagctggctcggatgctgatggggctggacctgctggtgttcgcccacgaccatgttggccacggacagagcgaaggggagaggatggtagtgtctgacttccacgttttcgtcagggatgtgttgcagcatgtggattccatgcagaaagactaccctgggcttcctgtcttccttctgggccactccatgggaggcgccatcgccatcctcacggccgcagagaggccgggccacttcgccggcatggtactcatttcgcctctggttcttgccaatcctgaatctgcaacaactttcaaggtccttgctgcgaaagtgctcaaccttgtgctgccaaacttgtccctcgggcccatcgactccagcgtgctctctcggaataagacagaggtcgacatttataactcagaccccctgatctgccgggcagggctgaaggtgtgcttcggcatccaactgctgaatgccgtctcacgggtggagcgcgccctccccaagctgactgtgcccttcctgctgctccagggctctgccgatcgcctatgtgacagcaaaggggcctacctgctcatggagttagccaagagccaggacaagactctcaagatttatgaaggtgcctaccatgttctccacaaggagcttcctgaagtcaccaactccgtcttccatgaaataaacatgtgggtctctcaaaggacagccacggcaggaactgcgtccccaccctgaatgcattggccggtgcccggctcatggtctgggggatgcaggcaggggaagggcagagatggcttctcagatatggcttgccaaaaaaaaaaaaaaaaaaaaatcagaaattggagaaatccttagcacaattttctaaaaaataacagacatttttgttatacattagactatcagacactggacctaccttaatggttagacactttatgcaaaaaaagagaaaggtcccaggtgattttccacaaagaatgtgctaaaatgtccactgaaaacaaagccaagcctctgccctgcctctcccagctcccacaagggttccaggaattcctggtgttcccaggacaccagactgcaataactggaggcgcctccttcctgcccacccttcgctcacgccccagcgccctctctgaccagcctccgcttggtggccttcctctggccgtgtgatgaggtggttgctgtctccataggggccagctccccagggcagactcacgtgcccctctgaggctcagaaaatgcccagcccttcctcaaaatgagcagccacccatgactttgtgggctccttgttagcctgagaccaggctttgcagaggggcggggggtgaggcttagcccagaaggagaactgagcaggaaaccaaggctcttctctgtcccctgcccttcccctcctgccagggggaggctcaggttggtccccgagtgccgcctgtactcacaaaggctgcctttcctctagagtcactaattttacctgatgctatgagagaatcatattgaagatgaaatgtctaatatataatgtatattttaaagcagagactattttggtggataggtgggagggagcaaggggagtttgagggaatcagagcttgatgctactgtacagaactggacaggttgggccggcagtggtggggccagagggctctgtgctctaggagctaagccagcagcccccgagaggggacttggctgggcctttcctatgggcaaggcccagtgctcttcctgcccaccagggaccatggagcagtggcaccctatggggctatgatccctaggcctgggcctgggcctgcctatggcccagagctaccctgggagtgtcagtgctagcagcacagctacctctggtggcaggagaagagaggcccagcacagcagcaggccaggccttcctgtccaggtctgcatggagcactcggtgacccagagcagggactggaggcacccccagccctgccccaggccacagcaggacaggccgggacaggcctcacccaaggccaaggctggcatcagccaatcattcagagctgaggccctgggcctagcctgcccttctcaggtgccaataccaccccagccctgcccttggcctcactttttcccagcaataagtggggttcaccacccgcctcgggaatactttccccttctaaatgggacttgctgttacctcaggaggctccttagtgcaaatatgaccctggtcagggctttgccaccgttgaagccctgcagaaggtgcaatgtaggggttctggggccacagaggagaggccacttcccaccaggacccccaacatgaagtctaggcctcaggggctcccgcccttcttcctccagcagcgggaactgccactgctctcccaggccctgttctggaggctaaccttggttcctggagagtgtgcccctccaccctccctccagcagccctgatcacaccatgagagccaggaacgggtcaccctgctgaagatcactctgtgccctgggggaggagccaagccctcaccccacaaggggcaggtgggggcttggttgctgacccggcccaagtccccacagagcaccttctgtagctccagcttgtctccctggcttctctttgaaggagaaaaatgtaaaatatgcactgagaaagccagccccgcctgcttagtcagccccggcagcagggcagccatgggaactcaggaaaagcaggaaccctttccaaaagcccagagatgccctgggctcagatctgtaattctcccaggagctgtgatagagcaggccacacaaagtccctacgcctccctgctgcctcccccagatgcatgtggtggcatcaccattccccaaattgaatatcagcatgcggcctgaccagggactctttagatgcatgaatttatttatatgaaggctctcacagagacacacacagcacttcagtagcatttgcattcctggttaaagaatcaccaatatttaaaataaaaactttcctgaaattgggactgtcatgttatccagaagggctggtacatccgcccaccatgtccccctgctgggtcaggagccaacacaggaccctgcgtgtgagcgtgcctgacatctcacgcacggccactccagagccggtccctgtccttggaaagctgtgaagccttgcgttgagttccttctcgatactgacggctccgtgctgacattctgagctctggagtcacaccagcgcaggggcgtggaggaactgaggtttggaaggaatgccaggtctcgcacagcttggcctcgagaaggtgagaggaaggcaaaggccagggaggggacccagagaggcctggcacacaaggcccaagcaccaccgtcaacacagcccagtccatacagaaatgggtttcatgcctgaaaagctttttacagaaagatgccgcctgtagccagtgacagccgcaaccctacaggcctcagttccttgcagaggtgaggggtagagagtcagcctccctcccttccagcagcgacccagcttccctccacttccaggtggtgctgggctcaccgagggagcactggtgggtgctctgaaaacccacaggatcccacctccaggcccacctgggtcccatctcactctcttcttctttcaccaattgctaacatagaccttgttgggatcacgatggcttcacaagccagctgttgggtttgctatgtcactgtggctcagtcacatccctgcgtgtatactgtctgcggggcacatatgtatccatttagagctaaaggaatcagtgtacactacagctaatcctaataaatccgatgttttcggaaaaa

SEQ ID NO: 848 - protein, 313 aa, Homo sapiens
METGPEDPSSMPEESSPRRTPQSIPYQDLPHLVNADGQYLFCRYWKPTGTPKALIFVSHGAGEHSGRYEELARMLMGLDLLVFAHDHVGHGQSEGERMVVSDFHVFVRDVLQHVDSMQKDYPGLPVFLLGHSMGGAIAILTAAERPGHFAGMVLISPLVLANPESATTFKVLAAKVLNLVLPNLSLGPIDSSVLSRNKTEVDIYNSDPLICRAGLKVCFGIQLLNAVSRVERALPKLTVPFLLLQGSADRLCDSKGAYLLMELAKSQDKTLKIYEGAYHVLHKELPEVTNSVFHEINMWVSQRTATAGTASPP

SEQ ID NO: 849 - DNA, 4121 bp, Homo sapiens
agtgtgtgtcaaaaatatatgatggaccacatggatgcctccaactgtttaggtatctattattttgcaaagcagattggagctgaagatttatctgatcgatcaaagaaatatttatatcagcactttgccgaggtatcatgatagaggaaaccagttttgggaaaagttatgcacagctgaatttcgagaactctatgctctggatggatcttcctgatgaagaacctgatcgattaagcaacaaactgttgcagtatgaccccagccaagatcaatggagtgtgcgggcacccatgaagtactctaagtaccgattcagtacagctgtagtcaacagtgagatttatgttttgggtggcattggctgtgtaggtcaagacaagggccaggttcgaaaatgccttgacgtggtggagatctacaacccagatggggacttttggcgagagggccctcccatgccaagtcccctcctctcactccgcaccaattccaccaatgcaggggcagtggatgggaaactctatgtctgcgggggattccatggagcagatcgccatgaggttatctccaaagaaatattggaactggacccatgggaaaaccagtggaatgttgtagccatcaacgtcctcatgcatgacagctatgatgtctgcctagtagccaggatgaatccccgagacctcatccccccgccttcagatttggtggaagaaggcaatgagcactaaggtgaccttgctggaggacctcctgctgttctgcaaacaaggccttcagaacggagagggcccacagcatctctgtcatgccagtcatgtgcactgcatgcgtagtggcctgtgtgtgaagaagcagtgtgtgctgggcactgggtggggagcatggggagtctcccttcagggacttcccagcctgatagggtaaataagacactacaaagaagaggtgatgacggccacaggaggggcacagggccacaggagagcagcagagggagggtctcactctgctggggacccatgaacagcactgccaaggagcagaccttttattgggtccccaaaaggatgaggaggaagtggtcccatgggtgcagtcaatgatgagttcatggaaacagccaagcatgggcccagagacagaaagctcgtgcctgtctgcagtatcctggctgggccagattgcctggggcacagggtttgtggtcaaggctggaaaagtaggttgtagctagatgaccaacgcctgaaagaatgaggagttggacctggtctgtaagccagggaattgtctcaaaatcgtgcattaagggagacttctctctgtgctctgttccagcttcagtcttataaacactgaccattctccttcagaatccccttctactgaagcaacgccacccagcagcagggctagctgtactaccagcccctaacaaccaaggcactcaagccagaccacagtggccaagaatcctgccctgggctgactctgtccgggacagggatgtggggttctgcagcctggtccactccggggctggcagggagtgtcctggagtgggctgacccaggctgcctttgcccacctctcagacacatacaaccatctgcagggtagtcctggctgaacaggactcgcccaagccacccaagccagggacagagaaggctctggctgaggacaggggaagaagcatctcctccagctgctgccaaccccatggcccggcctttgcaataaagatggagccacccacttcagcccacaattgagcataatcagaagacagtcactcccaaaatatatgttagaaataacatttaaatgacacatgggaagtccgtctatcttacttcccgtctctaattctggaagcacagtggattcaatgagggcatcttcatagctcttcttcagcaacttctccaaagagtttcacattgcacaaggctcttttggaagcaggagtggtcagtaaattcagagggagacaaaccctaagtagagacagctttctttggtgctgagctgtgtgattgtgatgaccgctagcctgtgcccctaggttccagctgcccaccaggcaggacaggcaggtcttgccaaaactggagcctgttggaaacctatttctgccaccaaggagagggaccaggagacccagcgtaggttggccccaagtaggctcaactcgggagggtgggggtcccgcctttctcttcgcacttgtgccccaagtgcactcacagtacctggcatgtgggtgacctcttgggtggccggcatggggcagtgtttctcaatcagagggcctgggccccgagcacgtccaggaatctgagttaaagtgagcttactctttccccagtggatgatcatgatctgtgcattctttttcttgctacaaagatgttcctcctagctgctgtgttggctgtcggcggccagggttgaggacggcctccacagggcctccacttccctccattcctcttcacatagtcactccacctgctccacctgcttgaaaagtccagaaagctgccgcgtctccctggctcaaggaggccttgttggcatgtcatggcacatctcctagatgttttgggttcaagatctgggttccagcccccgctctgctacttagctaaccatgtgaacttgggcaagatgacctttctaaagcctcatttccctcatatgcagagtgggaaggaaaatattaatacatactttatagggttggtatgaggattaagtgctgagcaaagtgcctgtgaaatcctgaaataataagcatgttttagctgccattattatcatcactgtcattatcattgcagtcagcacttcccaaagcaaggtgcccaaaacagactcagtgctttagggaagtggggcagatgtgcatatggcttgtgacggttctttctttttttttttttttttgagacggagtctctctctctcgccaggctggagtgcagtgcagtggcacgatctcagcccactgcaacctccgcctcccaggttcaagtgattctcctgcctcagcctcccaagtagctgggattacaggcgcccaccaccacacccagctaatttttgtatttttagtagagacggggtttcaccatgttggccaggatggtctcaatctcttgacctcgtgatctgcccgcctcggcctcccaaagtgctgggattacaggcatgagcccctgcacctggctgagatggttcttaatttcccataccctgttgcttggctcctccagttggcggctgagagttaagcaagggtttactcggatctgaggcccccgatgccctcaatggacacattcaggaccctgtggcagctcagcagaggcacctgagggtcacgctaggtgagaccatcgcccgcctgtgggaggcaagataagtgggtaaacatcattcctgtctaatgcgaggtctgggcagtgtcccagtggaactttccagagagtgccaagggaggaccgagaaggggcatgacctctgctggagccaggagggcagtgaccaggagctggcttagcactgaagggaagcaggcatcaagggcaggatttctcaaacttcttctgaggaatccccgaggtcgaaaccggtgcttcacagatttcagatgtctgatcttgatttttctttgattccatacaacagattgcttgcctgggttagtgcttattttaagttcttggtgcttcttgtctgacttctgtatttgcaattaaaaacaacatgaccctccccacctgcagccagatatcgttagaaattcaacttcgaaatatattcctatcactcctgttttcactttaatagaaggctgttgcagtactgcatgatgggctcttataaaacttctactatctgctaattcttatctttgtgacaggattgtttgacactgagcaaggaaacacaataaggaagtaatttggatgctaggctggcagaagcctgcagctgtcaaccacagcctgccccagtgtgttcaacacggtggcattgttctccctgacttcataatgagcaaatgtttcacatttgaacttaaggaataaatttttactaat

SEQ ID NO: 850 - protein, 198 aa, Homo sapiens
MIEETSFGKSYAQLNFENSMLWMDLPDEEPDRLSNKLLQYDPSQDQWSVRAPMKYSKYRFSTAVVNSEIYVLGGIGCVGQDKGQVRKCLDVVEIYNPDGDFWREGPPMPSPLLSLRTNSTNAGAVDGKLYVCGGFHGADRHEVISKEILELDPWENQWNVVAINVLMHDSYDVCLVARMNPRDLIPPPSDLVEEGNEH

SEQ ID NO: 851 - DNA, 8192 bp, Homo sapiens
atgtcggcgaggggcgtgggagctgccacccgcttgcctgcgggacaccggagtcaagaggctgcccacgccgctgcctgtccgttccacggttccgaggtctccaccgtctccccgcgcgccgcaggcggcaccaaactctgcgctccccgcggtgcgccctgcccgcgcagtgcgcgtccagaggaaatccgccccgggctttcgaagtgcagggctgggggctgcatggaagtttccccaagatttgaagttgaagatttttcaggtcataatatgatgttgctaattttgttcctcgtgataatttgttcccatatttctgtgaaccaagattccggccctgagtatgcagatgttgtgtttttggtggacagctctgatcgcctgggatccaagtccttcccatttgtgaaaatgttcatcaccaaaatgatcagcagtctccccatagaggccgacaaataccgtgtggccctggcccagtacagtgataaacttcacagtgaattccacctgagcaccttcaaaggcaggagccccatgctgaaccacctaaggaagaactttggattcattggcgggtccctgcagataggaaaggctcttcaggaggctcacaggacttatttctctgcacccgcaaatgggagagacaagaaacagtttcccccaattctagtggtcctggcttcatctgagtctgaggataatgtggaagaggcatcaaaggccctgcggaaagacggagtgaaaatcatctctgtaggggtgcagaaagcttctgaggaaaacctgaaggccatggccacgtctcagtttcatttcaaccttcggacagtcagagacctcagcatgttttcccaaaacatgacacacatcatcaaggatgtaataaagtacaaggagggagcagttgatgacatctttgtagaagcttgccaaggcccttctatggccgatgttgtgttcctattggatatgtcaatcaatggaagtgaggagaactttgactatcttaaaggattcttggaagaaagtgtatctgcccttgacataaaggaaaattgcatgagggttggccttgtggcctatagcaatgagacaaaagtgataaattcactgagcatgggcataaataagtcagaggttctccagcatatacagaacctttctccccgaactgggaaggcctatactggagctgccatcaaaaagctcaggaaggaagtttttagtgcacggaatggcagtcggaagaatcagggggtgccccagattgccgtgctggtgacccaccgagattcagaagacaacgtgacaaaagcagctgttaacctccgacgggagggtgtgaccatcttcaccctgggcatagagggcgccagcgacacccagttggaaaagatagcatcccaccctgctgagcagtatgtctccaaactgaagaccttcgctgacctggctgctcacaaccagacatttctgaagaagctgcggaaccaaataacacacacagtctctgtcttttcagagaggactgaaacgctcaaatctggttgtgtggacactgaggaagcagacatctatctgcttatcgatggctcagggagcacccaggccacagatttccatgaaatgaagacgttcctgtcagaggtggtagggatgttcaacattgctccccataaggtgcgggttggggccgttcagtatgctgacagctgggacttggaatttgagatcaataaatactccaacaagcaggatttgggaaaggccattgagaatatcaggcagatgggtgggaatacaaacacaggcgcagcactgaatttcacactgagtctgttgcaaaaagcaaagaagcagcgaggaaacaaagttccatgccaccttgttgtcctgacaaatggcatgtccaaggatagcatcttggagcctgcaaacagactgagagaagagcacatccgagtttatgctatcgggatcaaggaggccaaccaaacacagctgagagaaattgcaggagaggaaaagagagtgtattacgtgcatgactttgatgcattgaaagacataagaaaccaagttgttcaagaaatctgtactgaagaagctgacttgaataaacatcacagtttttcctatgcagcttgcaaagagatgaaagctgacatcatgtttctggtggacagttctggaagtataggacctgaaaacttcagcaaaatgaaaacatttatgaaaaacctggtgagcaagtctcagattggaccagatcgggtgcaaattggtgtagtccagttcagcgacatcaataaggaagagtttcagctcaacagattcatgtcccaaagcgacatttcaaatgcaatagaccaaatggctcacattggacaaaccaccctgactggtagtgccctgagctttgtgtctcagtacttcagccccaccaagggcgcccggcccaacatcagaaagtttctcatcctcatcacggatggtgaagctcaggacatagtaaaggaaccagcagtagtgcttcggcaagaaggtgtaatcatctattctgtgggagtgtttggctccaatgtcacccagcttgaggagatcagtgggaggcccgagatggttttttatgttgagaattttgacattctgcagcgcattgaagatgatcttgtttttggaatatgcagcccccgtgaagaatgcaagcggattgaagttttagacgttgtgtttgtcattgatagctctggcagtattgactatgatgagtataatatcatgaaggattttatgattggcttagtgaaaaaagctgatgtgggcaagaatcaggtccggtttggggctctgaagtatgctgatgacccagaggtgctgttttatctggatgactttggcacaaaactggaggtaatttcagtgctccagaatgaccaagccatgggtggcagtacttatactgctgaggcactgggcttctcagaccacatgttcactgaagcccggggcagccgcctgaacaagggggtcccccaagtcctcattgtgatcaccgatggggaatcccatgatgctgataaactcaatgccacggcaaaggccttgcgggacaaaggcattcttgtcctggctgtggggattgatggtgccaatcccgtggagctgttagccatggcaggatcaagcgacaagtacttcttcgtggagacttttggaggtctgaagggaatattttcagatgtgacagccagtgtctgcaactcttcaaaagtagattgtgaaattgacaaagtagatcttgttttccttatggatggttcaactagcattcagccaaatgacttcaagaaaatgaaggaatttctggcatctgttgttcaagactttgatgtcagcctcaacagagtgcgaataggagcggcccagtttagcgatacctatcacccggagtttccactgggaactttcataggtgaaaaagagatatcatttcagattgaaaacatcaagcagatctttggaaacacacacatcggtgctgcactcagggaggtggaacattacttcaggccagacatgggcagcaggataaatacaggtaccccacaggtgctgctggtccttacagatggccagtcccaagacgaggtggcccaggccgcggaagccctgagacacagaggtatcgacatctactccgtgggcattggggatgtggatgaccagcagctcattcagatcaccgggactgcagagaaaaaactgacagtgcacaacttcgatgaactgaagaaggtcaataaaaggatcgttcgcaacatctgtaccacagcgggtgaaagcaactgtttcgtggatgttgtggtgggatttgatgtctcaactcaggagaaagggcagactttgcttgaaggtcagccttggatggaaacctaccttcaagacatcttacgtgccatcagctccctcaatggagtaagctgtgaggtgggcacagagactcaggtcagtgtggcttttcaagtgaccaatgccatggaaaaatattctcccaagtttgagatctacagtgaaaacatactgaatagcttgaaggatataacagttaaaggaccatctcttctcaatgcaaacctcttggattctctatgggatacatttcagaataaatcagctgctcgaggaaaggtggtccttttattttcagatggattggatgatgatgttgagaaacttgaacaaaaatctgatgaacttagaaaagaaggcctgaatgccctcataactgttgctctggatggacctgctgattcaagtgacttggctgatcttccctatattgaatttgggaaaggatttgagtacaggacacagctctctattggcatgagagaacttggaagccggctgtcaaagcagctggtcaatgttgctgaaaggacatgctgctgtttgttctgcaagtgcattggaggagatggcacaatgggagatcctggaccaccagggaaaaggggacctccaggttttaaaggcagtgaaggctacctgggagaggagggaatcgctggagaaagaggagcccctggaccagtgggagagcaaggtactaagggatgctatggcaccaaaggtcctaagggaaacagaggactaaatggacaggagggagaagttggggaaaatggaattgacggattaaacggagaacagggtgataatggtcttcctggaagaaaaggagaaaagggagatgagggatctcagggaagcccagggaagagagggactcctggtgaccgtggagcaaagggcctgcgaggggatcccgtaagtgcacgggctgcaaactggagttagggcttgattcccatccgtacttctgatagggagtctcgatttcaagggagctcctggagttgacagtagcatagaaggacccacaggcttgaaaggagaacgtggaagacaaggcagaagaggctggccaggcccccccgggacaccaggctccagaagaaagacagcagctcatggcagaaggggacatacaggcccacagggaacagcaggcatcccaggaccagatggacttgaaggctccctgggacttaagggccctcagggcccaagaggagaggctggtgtgaaaggagaaaaaggaggtgtgggaagtaaaggtccccaggggcctccaggacccggaggagaggcagggaatcaaggccgtttgggaagccaaggaaataaaggagaacctggagatctgggagaaaaaggagctgttggctttcctggtcctcgtggcttgcagggcaatgatggcagtccaggttatggtagtgtcggacgcaagggagcaaagggacaagaaggattccctggagaaagtggacctaagggtgagattggggaccctggtggtccaggagagactgggctgaagggagctagaggcaaaatgatatctgctgggcttccaggagagatgggatcccctggggaaccaggacctcctggacgtaagggtgtgaaaggagccaaaggcttggcttcattttctacatgtgagctcattcagtatgtgcgagaccgcagtcctggcaggcatgattgacgacactggcacatttcaagtaatagtggttccctccggggccgactacataccagcattagagagactccagcggtgcactttctgctatgatgtgtgcaagccagatgcttcttgtgaccaagccagaccaccccctgtgcagtcttacatggatgctgctttccttctggatgcctcccggaacatgggaagtgctgaatttgaagacataagagccttccttggagcactattagatcactttgaaatcaccccagagccggagacttctgtcactggagaccgggtggccctattgagccatgctccccccgacttcctacccaacactcagaagagtccagttagagctgagttcaatcttaccacctacagaagtaagcgcctcatgaagaggcatgtgcacgagtcagttaaacaactaaatggagatgcttttattggtcatgccttacagtggactctggacaatgtatttttaagtacacccaatctgagaagaaacaaagtcatatttgtgatatctgctggggaaaccagccacttagatggggaaatcttaaagaaggaatccttgcgagccaaatgtcagggatatgccttatttgtgttttcccttggccctatttgggatgacaaggaactggaggatctcgccagccaccctttggatcaccacctggtccagcttggccgaattcataaacctgaccacagttatggtgtgaagtttgtgaagtcctttataaactcaatcaggcgtgcaatcaacaaatatccaccaataaacttaaaaataaagtgcaacagacttaactctatagatccaaagcagcccccacgaccattccgaagctttgttcctggaccacttaaagctaccctcaaagaagatgtattacagaaggcaaaattctttcaagataaaaaatatctttcaagagtagcaagaagtggcagagatgatgctattcaaaattttatgagaagcacctcccatacctttaagaatggaaggatgatagaaagtgctcccaaacaacatgattaaaaaaatgcttgaacaacttagccttaggaagcatggtaagactctggacttaaatagtaactaaatctgctgccagaactcaagcaacagtttgtaggttatcaggtgacttgaccccctgcattcattggtattaagatatatcttgttcatttatttgaccactcctgacaattccagcactctacgactgatatgtcgaagaactgtttcattagaagacagaagaatgaaagaagtgttttgaaaagtctaatggagatataatttgaaggtaaaatttatatgatgtatgcatatgtgtacatgggtcaatgttaattcttttatctctgtccagttcattttctgcaaacccatcctcctttcctaatttagtaatgtctaatgctcatctatttagtcaaagttattttttaatgttttaagctactccaaaatttatcctagaaatggatgctgtttatatgtcgtatttttttaaaacgtgaccttctattccacttaaacacaccactgtgggagttgtttgcttggactgatgagaagagggtaattttctccatctctaaatcctcctgaactcactgaaaaactcattaattcccgcagaacataaattattgcttttgagctggaagttttctcttcattaggaagcttactgccattttgatggagcttgaagcccccattttgatggacttctagtctgtctttcctgttatggtcatttattaattttcactaatccatatattctttagacaaggagagtcaagaaactacttgtcatagatgaagctctgagttacttttacccatcaggtagctgtttagtcaataataaacagcaccaaaacaggattagcagagctcttaaaaacagccttaaatacacactgagtttagaaaaatgtaagaaaatcattgttttaatctacaaattcatatgcagttgcagagatgcaaaagagatcagagtaagttaaagtaggaaaggttttataaaagtattgatggctgtgtcctcatctgcatttttgtttttatgatagggctgatattttcaacaacgaaacacccaatgttcagaccttacctcagtctaagagctggctccacagttggtagcaatggccctgttaggcagactgtccccctctttgggaatggaaagaagccctgcctggatgcatggagcagatggatactgacaccaaggacattcagattttctttcctatacctattttcataaaatttggaaagaaaaactatctgcagtatttttttaaaacgacttctgctattcttacttagagaaatccagtgatagcacctcatgtcttcagaggagcaagaagttcaaggagttaaatgtcacattcatactcaggtaatagagaagaataaaacacatcaggtttgcttcatctatcctaagtggtgcttaggggttcagaaaaaatgtttcaagtacaggaaattaatgagcaatattta

SEQ ID NO: 852 - protein, 1624 aa, Homo sapiens
MSARGVGAATRLPAGHRSQEAAHAAACPFHGSEVSTVSPRAAGGTKLCAPRGAPCPRSARPEEIRPGLSKCRAGGCMEVSPRFEVEDFSGHNMMLLILFLVIICSHISVNQDSGPEYADVVFLVDSSDRLGSKSFPFVKMFITKMISSLPIEADKYRVALAQYSDKLHSEFHLSTFKGRSPMLNHLRKNFGFIGGSLQIGKALQEAHRTYFSAPANGRDKKQFPPILVVLASSESEDNVEEASKALRKDGVKIISVGVQKASEENLKAMATSQFHFNLRTVRDLSMFSQNMTHIIKDVIKYKEGAVDDIFVEACQGPSMADVVFLLDMSINGSEENFDYLKGFLEESVSALDIKENCMRVGLVAYSNETKVINSLSMGINKSEVLQHIQNLSPRTGKAYTGAAIKKLRKEVFSARNGSRKNQGVPQIAVLVTHRDSEDNVTKAAVNLRREGVTIFTLGIEGASDTQLEKIASHPAEQYVSKLKTFADLAAHNQTFLKKLRNQITHTVSVFSERTETLKSGCVDTEEADIYLLIDGSGSTQATDFHEMKTFLSEVVGMFNIAPHKVRVGAVQYADSWDLEFEINKYSNKQDLGKAIENIRQMGGNTNTGAALNFTLSLLQKAKKQRGNKVPCHLVVLTNGMSKDSILEPANRLREEHIRVYAIGIKEANQTQLREIAGEEKRVYYVHDFDALKDIRNQVVQEICTEEADLNKHHSFSYAACKEMKADIMFLVDSSGSIGPENFSKMKTFMKNLVSKSQIGPDRVQIGVVQFSDINKEEFQLNRFMSQSDISNAIDQMAHIGQTTLTGSALSFVSQYFSPTKGARPNIRKFLILITDGEAQDIVKEPAVVLRQEGVIIYSVGVFGSNVTQLEEISGRPEMVFYVENFDILQRIEDDLVFGICSPREECKRIEVLDVVFVIDSSGSIDYDEYNIMKDFMIGLVKKADVGKNQVRFGALKYADDPEVLFYLDDFGTKLEVISVLQNDQAMGGSTYTAEALGFSDHMFTEARGSRLNKGVPQVLIVITDGESHDADKLNATAKALRDKGILVLAVGIDGANPVELLAMAGSSDKYFFVETFGGLKGIFSDVTASVCNSSKVDCEIDKVDLVFLMDGSTSIQPNDFKKMKEFLASVVQDFDVSLNRVRIGAAQFSDTYHPEFPLGTFIGEKEISFQIENIKQIFGNTHIGAALREVEHYFRPDMGSRINTGTPQVLLVLTDGQSQDEVAQAAEALRHRGIDIYSVGIGDVDDQQLIQITGTAEKKLTVHNFDELKKVNKRIVRNICTTAGESNCFVDVVVGFDVSTQEKGQTLLEGQPWMETYLQDILRAISSLNGVSCEVGTETQVSVAFQVTNAMEKYSPKFEIYSENILNSLKDITVKGPSLLNANLLDSLWDTFQNKSAARGKVVLLFSDGLDDDVEKLEQKSDELRKEGLNALITVALDGPADSSDLADLPYIEFGKGFEYRTQLSIGMRELGSRLSKQLVNVAERTCCCLFCKCIGGDGTMGDPGPPGKRGPPGFKGSEGYLGEEGIAGERGAPGPVGEQGTKGCYGTKGPKGNRGLNGQEGEVGENGIDGLNGEQGDNGLPGRKGEKGDEGSQGSPGKRGTPGDRGAKGLRGDPVSARAANWS

SEQ ID NO: 853 - DNA, 5060 bp, Homo sapiens
gcacgaggggagttcggcgtttgctggggctgcagcagctgaagtgtagtgttttcttgggactggcggtctgcacttctctcccgggttccatctccccccgcccggtggtgaggccctcgaggagggctcggacgggtgtagcgatccgcgctagaggaagacgaggcccgggaacgcatgtcccccagggcaggttagggggctggaggggtcaaatcccggggtacttgtggagactctttagcgtggcttcttctctctgctgagaccccgagagctttcccagttctcctcccaggaccaccggggttcctgaagatcgggacttttctgcgcccctccaccaacagcccatctcctgtctatgaagaaagacccttcgtagaaacaacttccccgctgctgacgcgttttcccgtcccgtccccgaagtagtctactatgacctcgttgtgagcctctgaacgattttgacactttcccgaggcctagggtattatatcctaaccttactaaagaccacagaggtgcttgccattatgggaaatcagcttgctggcattgctccctcccagatcctttctgtagagagttatttttcagatattcatgactttgaatatgataaaagcctggggagtactcggttttttaaagttgctcgagccaagcaccgagaaggcctggtcgttgtgaaggtttttgcaattcaggatcccacattgcctttaaccagctataaacaagagctggaggaactgaaaatcaggcttaattctgcacagaattgtctacctttccagaaagcatcagaaaaagcatctgagaaagcagctatgctctttaggcagtatgtgcgagacaatctctatgatcgcatcagtacccgtccattcttgaataacattgagaagcgctggattgctttccagatcctgacagctgtggaccaagcacacaaatctggagttcgtcatggggacatcaagactgagaatgtgatggtcaccagttggaattgggttcttctaactgattttgccagttttaagcccacttatcttccagaagacaacccggcagatttcaattatttctttgacacatcacggaggagaacttgctatattgctcctgaacgttttgttgatggtgggatgtttgccactgagttagaatatatgagagatccttcaactccgcttgtagacttaaatagcaatcagagaacaagaggagagttgaagagagcaatggacatcttttcagcaggttgtgtgatagctgagctttttacagaaggtgtaccattatttgatctctctcaacttttggcttatagaaatggacattttttccctgaacaagtgctaaataaaattgaagatcacagtatcagagaattggtaactcagatgattcaccgtgagccagataaacgtttagaggcagaagattacttaaaacagcagcgtggcaatgcctttcctgaaatattttacacttttcttcagccctacatggcccagtttgccaaggaaacgtttctttctgcagatgagcgtattctggttatacggaaggatttgggcaacattattcacaatctctgtggacatgatctgccagaaaaagccgaaggagagcctaaggaaaatgggctggttatcttggtatctgttataacatcctgcctacagacccttaaatactgtgattccaaactagctgctttggaactgattcttcatttggctccaagattaagtgttgaaatccttttggatcgtattactccatatcttttgcatttcagcaatgactctgttcctagggtgagggctgaagccttgaggacgttgaccaaagttcttgctctcgtcaaagaggttcctcgtaatgatatcaatatttatccggaatacattctgccaggcatagcccacttagcccaagatgatgctactatcgttagactagcctatgctgaaaacatagctctgctggcagaaacagctctgagattcctggaattagtacagttaaaaaatcttaatatggaaaatgaccccaataatgaagaaatagatgaggttacacatccaaatggaaattatgacacagagctccaagccttacatgaaatggtccagcagaaagttgttactttgctaagtgaccctgaaaatattgtaaaacaaaccttgatggaaaatggaataacacggctgtgtgtattctttggacgtcagaaagccaacgatgttttgttgtcccacatgattactttcctaaatgataagaatgattggcatctacgtggagcattttttgatagtatagttggtgttgctgcctatgttggctggcaaagctcctcaattctcaagcctctgctgcaacaaggtcttagtgatgctgaggaatttgtcattgtgaaagctctttatgcccttacttgtatgtgccagttaggactgctacaaaaaccccatgtttacgaatttgccagtgatattgcccccttcctgtgtcatcccaatttatggatacgttatggtgccgtgggatttatcacagtggtagctcgtcaaataagtacagctgatgtctactgtaaactgatgccttatcttgacccatatattacccaaccaataatacagattgaaagaaaacttgttctgctcagtgttttaaaggaaccagtaagtcgttctatatttgattatgctttgaggtctaaagatattactagcttgttcagacatcttcacatgcgtcagaagaaacgaaatggttctcttcccgactgccctccgccagaggatcctgccatagcacagcttctgaagaagttgctctcacagggaatgacagaggaagaggaagacaaacttctggcactgaaagacttcatgatgaaatctaataaagcaaaggccaatatagtggaccagagccatcttcatgatagtagtcagaaaggtgtaattgacttggcagctttaggcataactgggagacaagttgatcttgttaaaaccaaacaagaaccagatgacaaacgggccagaaaacatgtaaaacaagactcaaatgtaaatgaagaatggaaaagcatgtttgggtcactggacccaccaaacatgccacaggccctacctaaagggagtgatcaggaggtgattcagactgggaaacctcctcgttccgagtcctctgctggcatttgtgtccctttgtcaacttcttcacaggttccagaagtgacaactgtccaaaataaaaaaccagtaataccggttttaagtagtacaatcttaccatccacctatcagattcgaattacaacttgtaaaactgaacttcagcaactcatccagcaaaagcgggagcagtgcaatgctgagagaatagctaagcagatgatggaaaatgctgaatgggagagtaaaccaccaccacctggatggcgtcctaaagggctgttagttgcccatcttcatgagcataaatctgctgtgaatcgaattagagtctctgatgaacactcactttttgcaacatgttcaaatgatggcacagtgaaaatctggaacagtcaaaagatggaggggaagaccaccactaccagatctattcttacatacagccgaattggaggacgagtcaagacgctcacattctgccaaggctcccactatttagccatagcatctgataatggtgctgtccagcttcttggaattgaggcttctaagctgcccaagtctcctaaaatccatcctctacaaagcagaattctagatcagaaggaggacggttgtgttgtggatatgcatcacttcaactctggagcacagtctgttcttgcctatgccactgtgaatggctctctggttggctgggaccttaggtcttcaagcaatgcgtggactttaaagcatgatttaaagtcgggcctcatcacttcctttgctgtggacatccaccaatgctggctctgcattggtacaagcagtggtaccatggcttgttgggacatgaggttccagttgccaatttcaagtcactgtcatccttccagggctcgaatcagacgcctctcaatgcaccctctgtatcagtcctgggtgattgcagctgttcagggcaacaacgaagtgtccatgtgggacatggagactggtgacagaagatttactctctgggccagcagtgcaccaccactttctgaattacagccttctcctcatagcgtccatggtatctactgtagtcctgcagatggaaatcctatcctactaacagctggctcagatatgaaaataaggttttgggacttggcttacccagaaaggtcctatgttgttgcaggaagtactagttccccatctgtgtcctactacaggaaaataattgaaggcactgaagttgtccaggaaattcagaataagcagaaagtaggaccaagtgatgacacccctcgaaggggcccagagtccctgcccgtgggacatcatgacatcatcactgatgtcgccacattccagaccacacagggcttcatcgtaactgcttctagagatgggattgtgaaggtgtggaaataaaacctactgatttgtataaattttaatagttataaatataatactataactcgagaaaaggcatttctagagaacagattcatttgcttaattttcaaaattatgtctccatattactgtttcatgactgactgactaaatgacacccaaaatggttaagatgtacttgactagtttacttatgcatctctttgcaagaatcagccagccaacaatgtctgggatttttattgtatatgttatagaggtgagaaatgtaaaatatgaaaatgaatatgtttattttgtattgaaaaagatggttgaaaagatggttgtaagctattatagtataaacacatttttgctattaaaaatgctattcaaagcagttaaactgtaaaaaaaaaaaaaaaaaaaaaaaaaaaaaaaaaaaaaaaactcgagggggggcccggtacc

SEQ ID NO: 854 - protein, 1358 aa, Homo sapiens
MGNQLAGIAPSQILSVESYFSDIHDFEYDKSLGSTRFFKVARAKHREGLVVVKVFAIQDPTLPLTSYKQELEELKIRLNSAQNCLPFQKASEKASEKAAMLFRQYVRDNLYDRISTRPFLNNIEKRWIAFQILTAVDQAHKSGVRHGDIKTENVMVTSWNWVLLTDFASFKPTYLPEDNPADFNYFFDTSRRRTCYIAPERFVDGGMFATELEYMRDPSTPLVDLNSNQRTRGELKRAMDIFSAGCVIAELFTEGVPLFDLSQLLAYRNGHFFPEQVLNKIEDHSIRELVTQMIHREPDKRLEAEDYLKQQRGNAFPEIFYTFLQPYMAQFAKETFLSADERILVIRKDLGNIIHNLCGHDLPEKAEGEPKENGLVILVSVITSCLQTLKYCDSKLAALELILHLAPRLSVEILLDRITPYLLHFSNDSVPRVRAEALRTLTKVLALVKEVPRNDINIYPEYILPGIAHLAQDDATIVRLAYAENIALLAETALRFLELVQLKNLNMENDPNNEEIDEVTHPNGNYDTELQALHEMVQQKVVTLLSDPENIVKQTLMENGITRLCVFFGRQKANDVLLSHMITFLNDKNDWHLRGAFFDSIVGVAAYVGWQSSSILKPLLQQGLSDAEEFVIVKALYALTCMCQLGLLQKPHVYEFASDIAPFLCHPNLWIRYGAVGFITVVARQISTADVYCKLMPYLDPYITQPIIQIERKLVLLSVLKEPVSRSIFDYALRSKDITSLFRHLHMRQKKRNGSLPDCPPPEDPAIAQLLKKLLSQGMTEEEEDKLLALKDFMMKSNKAKANIVDQSHLHDSSQKGVIDLAALGITGRQVDLVKTKQEPDDKRARKHVKQDSNVNEEWKSMFGSLDPPNMPQALPKGSDQEVIQTGKPPRSESSAGICVPLSTSSQVPEVTTVQNKKPVIPVLSSTILPSTYQIRITTCKTELQQLIQQKREQCNAERIAKQMMENAEWESKPPPPGWRPKGLLVAHLHEHKSAVNRIRVSDEHSLFATCSNDGTVKIWNSQKMEGKTTTTRSILTYSRIGGRVKTLTFCQGSHYLAIASDNGAVQLLGIEASKLPKSPKIHPLQSRILDQKEDGCVVDMHHFNSGAQSVLAYATVNGSLVGWDLRSSSNAWTLKHDLKSGLITSFAVDIHQCWLCIGTSSGTMACWDMRFQLPISSHCHPSRARIRRLSMHPLYQSWVIAAVQGNNEVSMWDMETGDRRFTLWASSAPPLSELQPSPHSVHGIYCSPADGNPILLTAGSDMKIRFWDLAYPERSYVVAGSTSSPSVSYYRKIIEGTEVVQEIQNKQKVGPSDDTPRRGPESLPVGHHDIITDVATFQTTQGFIVTASRDGIVKVWK

SEQ ID NO: 855 - DNA, 3389 bp, Homo sapiens
atgctgctgctaggggtggtgggagcagccgtgggacgcgtggccgggagcgggggtgacagcctgggattccgggggcttctcttccttgtcctcctcctctcctctctattcccagtgtggccgtggctgacactaaagactttgtagccatcaacccgagtgcagtttcgatggaaaatgaaggttgcacgttttcaaaaaatacctaatggtgaaaatgagacaatgattcctgtattgacatcaaaaaaagcaagtgaattaccagtcagtgaagttgcaagcattctccaagctgatcttcagaatggtctaaacaaatgtgaagttagtcataggcgagcctttcatggctggaatgagtttgatattagtgaagatgagccactgtggaagaagtatatttctcagtttaaaaatccccttattatgctgcttctggcttctgcagtcatcagtgttttaatgcatcagtttgatgatgccgtcagtatcactgtggcaatacttatcgttgttacagttgcctttgttcaggaatatcgttcagaaaaatctcttgaagaattgagtaaacttgtgccaccagaatgccattgtgtgcgtgaaggaaaattggagcatacacttgcccgagacttggttccaggtgatacagtttgcctttctgttggggatagagttcctgctgacttacgcttgtttgaggctgtggatctttccattgatgagtccagcttgacaggtgagacaacgccttgttctaaggtgacagctcctcagccagctgcaactaatggagatcttgcatcgagaagtaacattgcctttatgggaacactggtcagatgtggcaaagcaaagggtgttgtcattggaacaggagaaaattctgaatttggggaggtttttaaaatgatgcaagcagaagaggcaccaaaaacccctctgcagaagagcatggacctcttaggaaaacaactttccttttactcctttggtataataggaatcatcatgttggttggctggttactgggaaaagatatcctggaaatgtttactattagtgtaagtttggctgtagcagcaattcctgaaggtctccccattgtggtcacagtgacgctagctcttggtgttatgagaatggtgaagaaaagggccattgtgaaaaagctgcctattgttgaaactctgggctgctgtaatgtgatttgttcagataaaactggaacactgacgaagaatgaaatgactgttactcacatatttacttcagatggtctgcatgctgaggttactggagttggctataatcaatttggggaagtgattgttgatggtgatgttgttcatggattctataacccagctgttagcagaattgttgaggcgggctgtgtgtgcaatgatgctgtaattagaaacaatactctaatggggaagccaacagaaggggccttaattgctcttgcaatgaagatgggtcttgatggacttcaacaagactacatcagaaaagctgaatacccttttagctctgagcaaaagtggatggctgttaagtgtgtacaccgaacacagcaggacagaccagagatttgttttatgaaaggtgcttacgaacaagtaattaagtactgtactacataccagagcaaagggcagaccttgacacttactcagcagcagagagatgtgtaccaacaagagaaggcacgcatgggctcagcgggactcagagttcttgctttggcttctggtcctgaactgggacagctgacatttcttggcttggtgggaatcattgatccacctagaactggtgtgaaagaagctgttacaacactcattgcctcaggagtatcaataaaaatgattactggagattcacaggagactgcagttgcaatcgccagtcgtctgggattgtattccaaaacttcccagtcagtctcaggagaagaaatagatgcaatggatgttcagcagctttcacaaatagtaccaaaggttgcagtattttacagagctagcccaaggcacaagatgaaaattattaagtcgctacagaagaacggttcagttgtagccatgacaggagatggagtaaatgatgcagttgctctgaaggctgcagacattggagttgcgatgggccagactggtacagatgtttgcaaagaggcagcagacatgatcctagtggatgatgattttcaaaccataatgtctgcaatcgaagagggtaaagggatttataataacattaaaaatttcgttagattccagctgagcacgagtatagcagcattaactttaatctcattggctacattaatgaactttcctaatcctctcaatgccatgcagattttgtggatcaatattattatggatggacccccagctcagagccttggagtagaaccagtggataaagatgtcattcgtaaacctcctcgcaactggaaagacagcattttgactaaaaacttgatacttaaaatacttgtttcatcaataatcattgtttgtgggactttgtttgtcttctggcgtgagctacgagacaatgtgattacacctcgagacacaacaatgaccttcacatgctttgtgttttttgacatgttcaatgcactaagttccagatcccagaccaagtctgtgtttgagattggactctgcagtaatagaatgttttgctatgcagttcttggatccatcatgggacaattactagttatttactttcctccgcttcagaaggtttttcagactgagagcctaagcatactgggtctggctctgggagaggagtggacagcagctggttgagatacatccccatctggagacaggactgccactgacagaagatgtgagctgtgtctaagtccagtcttgtgcccagccgtgtctgcgccttcactctttggaactctgcatacaacatcttagcaccatcttcctgcagctcttccttacctaaataaagaaacagcccaagggcagtatttctaaaagcactgtaacagcttttcattttctccacatatactacaaattctataaagaaagaaattaatttaaaaaaactaagatgtttttctcttctggcttcataaatgccttgctgtataaattgaaatattgatactgaactgtctttttaatgatgacctaactttattcaacccatcggaatttactttttccctgaaataagatcttttccactggtctactacctgaccataaacatgtctgcatttgaattctctaaaccctaaatctgtgtctatgaaaaatacaaatgactattaaatattattctctttactgttctctttcaccgaaaaaaaaaaaaaaaaaaaaaa

SEQ ID NO: 856 - protein, 888 aa, Homo sapiens
MKVARFQKIPNGENETMIPVLTSKKASELPVSEVASILQADLQNGLNKCEVSHRRAFHGWNEFDISEDEPLWKKYISQFKNPLIMLLLASAVISVLMHQFDDAVSITVAILIVVTVAFVQEYRSEKSLEELSKLVPPECHCVREGKLEHTLARDLVPGDTVCLSVGDRVPADLRLFEAVDLSIDESSLTGETTPCSKVTAPQPAATNGDLASRSNIAFMGTLVRCGKAKGVVIGTGENSEFGEVFKMMQAEEAPKTPLQKSMDLLGKQLSFYSFGIIGIIMLVGWLLGKDILEMFTISVSLAVAAIPEGLPIVVTVTLALGVMRMVKKRAIVKKLPIVETLGCCNVICSDKTGTLTKNEMTVTHIFTSDGLHAEVTGVGYNQFGEVIVDGDVVHGFYNPAVSRIVEAGCVCNDAVIRNNTLMGKPTEGALIALAMKMGLDGLQQDYIRKAEYPFSSEQKWMAVKCVHRTQQDRPEICFMKGAYEQVIKYCTTYQSKGQTLTLTQQQRDVYQQEKARMGSAGLRVLALASGPELGQLTFLGLVGIIDPPRTGVKEAVTTLIASGVSIKMITGDSQETAVAIASRLGLYSKTSQSVSGEEIDAMDVQQLSQIVPKVAVFYRASPRHKMKIIKSLQKNGSVVAMTGDGVNDAVALKAADIGVAMGQTGTDVCKEAADMILVDDDFQTIMSAIEEGKGIYNNIKNFVRFQLSTSIAALTLISLATLMNFPNPLNAMQILWINIIMDGPPAQSLGVEPVDKDVIRKPPRNWKDSILTKNLILKILVSSIIIVCGTLFVFWRELRDNVITPRDTTMTFTCFVFFDMFNALSSRSQTKSVFEIGLCSNRMFCYAVLGSIMGQLLVIYFPPLQKVFQTESLSILGLALGEEWTAAG

SEQ ID NO: 857 - DNA, 3514 bp, Homo sapiens
atgctgctgctaggggtggtgggagcagccgtgggacgcgtggccgggagcgggggtgacagcctgggattccgggggcttctcttccttgtcctcctcctctcctctctattcccagtgtggccgtggctgacactaaagactttgtagccatcaacccgagtgcagtttcgatggaaaatgaaggttgcacgttttcaaaaaatacctaatggtgaaaatgagacaatgattcctgtattgacatcaaaaaaagcaagtgaattaccagtcagtgaagttgcaagcattctccaagctgatcttcagaatggtctaaacaaatgtgaagttagtcataggcgagcctttcatggctggaatgagtttgatattagtgaagatgagccactgtggaagaagtatatttctcagtttaaaaatccccttattatgctgcttctggcttctgcagtcatcagtgttttaatgcatcagtttgatgatgccgtcagtatcactgtggcaatacttatcgttgttacagttgcctttgttcaggaatatcgttcagaaaaatctcttgaagaattgagtaaacttgtgccaccagaatgccattgtgtgcgtgaaggaaaattggagcatacacttgcccgagacttggttccaggtgatacagtttgcctttctgttggggatagagttcctgctgacttacgcttgtttgaggctgtggatctttccattgatgagtccagcttgacaggtgagacaacgccttgttctaaggtgacagctcctcagccagctgcaactaatggagatcttgcatcgagaagtaacattgcctttatgggaacactggtcagatgtggcaaagcaaagggtgttgtcattggaacaggagaaaattctgaatttggggaggtttttaaaatgatgcaagcagaagaggcaccaaaaacccctctgcagaagagcatggacctcttaggaaaacaactttccttttactcctttggtataataggaatcatcatgttggttggctggttactgggaaaagatatcctggaaatgtttactattagtgtaagtttggctgtagcagcaattcctgaaggtctccccattgtggtcacagtgacgctagctcttggtgttatgagaatggtgaagaaaagggccattgtgaaaaagctgcctattgttgaaactctgggctgctgtaatgtgatttgttcagataaaactggaacactgacgaagaatgaaatgactgttactcacatatttacttcagatggtctgcatgctgaggttactggagttggctataatcaatttggggaagtgattgttgatggtgatgttgttcatggattctataacccagctgttagcagaattgttgaggcgggctgtgtgtgcaatgatgctgtaattagaaacaatactctaatggggaagccaacagaaggggccttaattgctcttgcaatgaagatgggtcttgatggacttcaacaagactacatcagaaaagctgaatacccttttagctctgagcaaaagtggatggctgttaagtgtgtacaccgaacacagcaggacagaccagagatttgttttatgaaaggtgcttacgaacaagtaattaagtactgtactacataccagagcaaagggcagaccttgacacttactcagcagcagagagatgtgtaccaacaagagaaggcacgcatgggctcagcgggactcagagttcttgctttggcttctggtcctgaactgggacagctgacatttcttggcttggtgggaatcattgatccacctagaactggtgtgaaagaagctgttacaacactcattgcctcaggagtatcaataaaaatgattactggagattcacaggagactgcagttgcaatcgccagtcgtctgggattgtattccaaaacttcccagtcagtctcaggagaagaaatagatgcaatggatgttcagcagctttcacaaatagtaccaaaggttgcagtattttacagagctagcccaaggcacaagatgaaaattattaagtcgctacagaagaacggttcagttgtagccatgacaggagatggagtaaatgatgcagttgctctgaaggctgcagacattggagttgcgatgggccagactggtacagatgtttgcaaagaggcagcagacatgatcctagtggatgatgattttcaaaccataatgtctgcaatcgaagagggtaaagggatttataataacattaaaaatttcgttagattccagctgagcacgagtatagcagcattaactttaatctcattggctacattaatgaactttcctaatcctctcaatgccatgcagattttgtggatcaatattattatggatggacccccagctcagagccttggagtagaaccagtggataaagatgtcattcgtaaacctcctcgcaactggaaagacagcattttgactaaaaacttgatacttaaaatacttgtttcatcaataatcattgtttgtgggactttgtttgtcttctggcgtgagctacgagacaatgtgattacacctcgagacacaacaatgaccttcacatgctttgtgttttttgacatgttcaatgcactaagttccagatcccagaccaagtctgtgtttgagattggactctgcagtaatagaatgttttgctatgcagttcttggatccatcatgggacaattactagttatttactttcctccgcttcagaaggtttttcagactgagagcctaagcatactggatctgttgtttcttttgggtctcacctcatcagtgtgcatagtggcagaaattataaagaaggttgaaaggagcagggaaaagatccagaagcatgttagttcgacatcatcatcttttcttgaagtctggctctgggagaggagtggacagcagctggttgagatacatccccatctggagacaggactgccactgacagaagatgtgagctgtgtctaagtccagtcttgtgcccagccgtgtctgcgccttcactctttggaactctgcatacaacatcttagcaccatcttcctgcagctcttccttacctaaataaagaaacagcccaagggcagtatttctaaaagcactgtaacagcttttcattttctccacatatactacaaattctataaagaaagaaattaatttaaaaaaactaagatgtttttctcttctggcttcataaatgccttgctgtataaattgaaatattgatactgaactgtctttttaatgatgacctaactttattcaacccatcggaatttactttttccctgaaataagatcttttccactggtctactacctgaccataaacatgtctgcatttgaattctctaaaccctaaatctgtgtctatgaaaaatacaaatgactattaaatattattctctttactgttctctttcaccgaaaaaaaaaaaaaaaaaaaaaa

SEQ ID NO: 858 - protein, 949 aa, Homo sapiens
MKVARFQKIPNGENETMIPVLTSKKASELPVSEVASILQADLQNGLNKCEVSHRRAFHGWNEFDISEDEPLWKKYISQFKNPLIMLLLASAVISVLMHQFDDAVSITVAILIVVTVAFVQEYRSEKSLEELSKLVPPECHCVREGKLEHTLARDLVPGDTVCLSVGDRVPADLRLFEAVDLSIDESSLTGETTPCSKVTAPQPAATNGDLASRSNIAFMGTLVRCGKAKGVVIGTGENSEFGEVFKMMQAEEAPKTPLQKSMDLLGKQLSFYSFGIIGIIMLVGWLLGKDILEMFTISVSLAVAAIPEGLPIVVTVTLALGVMRMVKKRAIVKKLPIVETLGCCNVICSDKTGTLTKNEMTVTHIFTSDGLHAEVTGVGYNQFGEVIVDGDVVHGFYNPAVSRIVEAGCVCNDAVIRNNTLMGKPTEGALIALAMKMGLDGLQQDYIRKAEYPFSSEQKWMAVKCVHRTQQDRPEICFMKGAYEQVIKYCTTYQSKGQTLTLTQQQRDVYQQEKARMGSAGLRVLALASGPELGQLTFLGLVGIIDPPRTGVKEAVTTLIASGVSIKMITGDSQETAVAIASRLGLYSKTSQSVSGEEIDAMDVQQLSQIVPKVAVFYRASPRHKMKIIKSLQKNGSVVAMTGDGVNDAVALKAADIGVAMGQTGTDVCKEAADMILVDDDFQTIMSAIEEGKGIYNNIKNFVRFQLSTSIAALTLISLATLMNFPNPLNAMQILWINIIMDGPPAQSLGVEPVDKDVIRKPPRNWKDSILTKNLILKILVSSIIIVCGTLFVFWRELRDNVITPRDTTMTFTCFVFFDMFNALSSRSQTKSVFEIGLCSNRMFCYAVLGSIMGQLLVIYFPPLQKVFQTESLSILDLLFLLGLTSSVCIVAEIIKKVERSREKIQKHVSSTSSSFLEVWLWERSGQQLVEIHPHLETGLPLTEDVSCV

SEQ ID NO: 859 - DNA, 3484 bp, Homo sapiens
atgctgctgctaggggtggtgggagcagccgtgggacgcgtggccgggagcgggggtgacagcctgggattccgggggcttctcttccttgtcctcctcctctcctctctattcccagtgtggccgtggctgacactaaagactttgtagccatcaacccgagtgcagtttcgatggaaaatgaaggttgcacgttttcaaaaaatacctaatggtgaaaatgagacaatgattcctgtattgacatcaaaaaaagcaagtgaattaccagtcagtgaagttgcaagcattctccaagctgatcttcagaatggtctaaacaaatgtgaagttagtcataggcgagcctttcatggctggaatgagtttgatattagtgaagatgagccactgtggaagaagtatatttctcagtttaaaaatccccttattatgctgcttctggcttctgcagtcatcagtgttttaatgcatcagtttgatgatgccgtcagtatcactgtggcaatacttatcgttgttacagttgcctttgttcaggaatatcgttcagaaaaatctcttgaagaattgagtaaacttgtgccaccagaatgccattgtgtgcgtgaaggaaaattggagcatacacttgcccgagacttggttccaggtgatacagtttgcctttctgttggggatagagttcctgctgacttacgcttgtttgaggctgtggatctttccattgatgagtccagcttgacaggtgagacaacgccttgttctaaggtgacagctcctcagccagctgcaactaatggagatcttgcatcgagaagtaacattgcctttatgggaacactggtcagatgtggcaaagcaaagggtgttgtcattggaacaggagaaaattctgaatttggggaggtttttaaaatgatgcaagcagaagaggcaccaaaaacccctctgcagaagagcatggacctcttaggaaaacaactttccttttactcctttggtataataggaatcatcatgttggttggctggttactgggaaaagatatcctggaaatgtttactattagtgtaagtttggctgtagcagcaattcctgaaggtctccccattgtggtcacagtgacgctagctcttggtgttatgagaatggtgaagaaaagggccattgtgaaaaagctgcctattgttgaaactctgggctgctgtaatgtgatttgttcagataaaactggaacactgacgaagaatgaaatgactgttactcacatatttacttcagatggtctgcatgctgaggttactggagttggctataatcaatttggggaagtgattgttgatggtgatgttgttcatggattctataacccagctgttagcagaattgttgaggcgggctgtgtgtgcaatgatgctgtaattagaaacaatactctaatggggaagccaacagaaggggccttaattgctcttgcaatgaagatgggtcttgatggacttcaacaagactacatcagaaaagctgaatacccttttagctctgagcaaaagtggatggctgttaagtgtgtacaccgaacacagcaggacagaccagagatttgttttatgaaaggtgcttacgaacaagtaattaagtactgtactacataccagagcaaagggcagaccttgacacttactcagcagcagagagatgtgtaccaacaagagaaggcacgcatgggctcagcgggactcagagttcttgctttggcttctggtcctgaactgggacagctgacatttcttggcttggtgggaatcattgatccacctagaactggtgtgaaagaagctgttacaacactcattgcctcaggagtatcaataaaaatgattactggagattcacaggagactgcagttgcaatcgccagtcgtctgggattgtattccaaaacttcccagtcagtctcaggagaagaaatagatgcaatggatgttcagcagctttcacaaatagtaccaaaggttgcagtattttacagagctagcccaaggcacaagatgaaaattattaagtcgctacagaagaacggttcagttgtagccatgacaggagatggagtaaatgatgcagttgctctgaaggctgcagacattggagttgcgatgggccagactggtacagatgtttgcaaagaggcagcagacatgatcctagtggatgatgattttcaaaccataatgtctgcaatcgaagagggtaaagggatttataataacattaaaaatttcgttagattccagctgagcacgagtatagcagcattaactttaatctcattggctacattaatgaactttcctaatcctctcaatgccatgcagattttgtggatcaatattattatggatggacccccagctcagagccttggagtagaaccagtggataaagatgtcattcgtaaacctcctcgcaactggaaagacagcattttgactaaaaacttgatacttaaaatacttgtttcatcaataatcattgtttgtgggactttgtttgtcttctggcgtgagctacgagacaatgtgattacacctcgagacacaacaatgaccttcacatgctttgtgttttttgacatgttcaatgcactaagttccagatcccagaccaagtctgtgtttgagattggactctgcagtaatagaatgttttgctatgcagttcttggatccatcatgggacaattactagttatttactttcctccgcttcagaaggtttttcagactgagagcctaagcatactggatctgttgtttcttttgggtctcacctcatcagtgtgcatagtggcagaaattataaagaaggttgaaaggagcagggaaaagatccagaagcatgtctggctctgggagaggagtggacagcagctggttgagatacatccccatctggagacaggactgccactgacagaagatgtgagctgtgtctaagtccagtcttgtgcccagccgtgtctgcgccttcactctttggaactctgcatacaacatcttagcaccatcttcctgcagctcttccttacctaaataaagaaacagcccaagggcagtatttctaaaagcactgtaacagcttttcattttctccacatatactacaaattctataaagaaagaaattaatttaaaaaaactaagatgtttttctcttctggcttcataaatgccttgctgtataaattgaaatattgatactgaactgtctttttaatgatgacctaactttattcaacccatcggaatttactttttccctgaaataagatcttttccactggtctactacctgaccataaacatgtctgcatttgaattctctaaaccctaaatctgtgtctatgaaaaatacaaatgactattaaatattattctctttactgttctctttcaccgaaaaaaaaaaaaaaaaaaaaaa

SEQ ID NO: 860 - protein, 939 aa, Homo sapiens
MKVARFQKIPNGENETMIPVLTSKKASELPVSEVASILQADLQNGLNKCEVSHRRAFHGWNEFDISEDEPLWKKYISQFKNPLIMLLLASAVISVLMHQFDDAVSITVAILIVVTVAFVQEYRSEKSLEELSKLVPPECHCVREGKLEHTLARDLVPGDTVCLSVGDRVPADLRLFEAVDLSIDESSLTGETTPCSKVTAPQPAATNGDLASRSNIAFMGTLVRCGKAKGVVIGTGENSEFGEVFKMMQAEEAPKTPLQKSMDLLGKQLSFYSFGIIGIIMLVGWLLGKDILEMFTISVSLAVAAIPEGLPIVVTVTLALGVMRMVKKRAIVKKLPIVETLGCCNVICSDKTGTLTKNEMTVTHIFTSDGLHAEVTGVGYNQFGEVIVDGDVVHGFYNPAVSRIVEAGCVCNDAVIRNNTLMGKPTEGALIALAMKMGLDGLQQDYIRKAEYPFSSEQKWMAVKCVHRTQQDRPEICFMKGAYEQVIKYCTTYQSKGQTLTLTQQQRDVYQQEKARMGSAGLRVLALASGPELGQLTFLGLVGIIDPPRTGVKEAVTTLIASGVSIKMITGDSQETAVAIASRLGLYSKTSQSVSGEEIDAMDVQQLSQIVPKVAVFYRASPRHKMKIIKSLQKNGSVVAMTGDGVNDAVALKAADIGVAMGQTGTDVCKEAADMILVDDDFQTIMSAIEEGKGIYNNIKNFVRFQLSTSIAALTLISLATLMNFPNPLNAMQILWINIIMDGPPAQSLGVEPVDKDVIRKPPRNWKDSILTKNLILKILVSSIIIVCGTLFVFWRELRDNVITPRDTTMTFTCFVFFDMFNALSSRSQTKSVFEIGLCSNRMFCYAVLGSIMGQLLVIYFPPLQKVFQTESLSILDLLFLLGLTSSVCIVAEIIKKVERSREKIQKHVWLWERSGQQLVEIHPHLETGLPLTEDVSCV

SEQ ID NO: 861 - DNA, 4753 bp, Homo sapiens
atgctgctgctaggggtggtgggagcagccgtgggacgcgtggccgggagcgggggtgacagcctgggattccgggggcttctcttccttgtcctcctcctctcctctctattcccagtgtggccgtggctgacactaaagactttgtagccatcaacccgagtgcagtttcgatggaaaatgaaggttgcacgttttcaaaaaatacctaatggtgaaaatgagacaatgattcctgtattgacatcaaaaaaagcaagtgaattaccagtcagtgaagttgcaagcattctccaagctgatcttcagaatggtctaaacaaatgtgaagttagtcataggcgagcctttcatggctggaatgagtttgatattagtgaagatgagccactgtggaagaagtatatttctcagtttaaaaatccccttattatgctgcttctggcttctgcagtcatcagtgttttaatgcatcagtttgatgatgccgtcagtatcactgtggcaatacttatcgttgttacagttgcctttgttcaggaatatcgttcagaaaaatctcttgaagaattgagtaaacttgtgccaccagaatgccattgtgtgcgtgaaggaaaattggagcatacacttgcccgagacttggttccaggtgatacagtttgcctttctgttggggatagagttcctgctgacttacgcttgtttgaggctgtggatctttccattgatgagtccagcttgacaggtgagacaacgccttgttctaaggtgacagctcctcagccagctgcaactaatggagatcttgcatcgagaagtaacattgcctttatgggaacactggtcagatgtggcaaagcaaagggtgttgtcattggaacaggagaaaattctgaatttggggaggtttttaaaatgatgcaagcagaagaggcaccaaaaacccctctgcagaagagcatggacctcttaggaaaacaactttccttttactcctttggtataataggaatcatcatgttggttggctggttactgggaaaagatatcctggaaatgtttactattagtgtaagtttggctgtagcagcaattcctgaaggtctccccattgtggtcacagtgacgctagctcttggtgttatgagaatggtgaagaaaagggccattgtgaaaaagctgcctattgttgaaactctgggctgctgtaatgtgatttgttcagataaaactggaacactgacgaagaatgaaatgactgttactcacatatttacttcagatggtctgcatgctgaggttactggagttggctataatcaatttggggaagtgattgttgatggtgatgttgttcatggattctataacccagctgttagcagaattgttgaggcgggctgtgtgtgcaatgatgctgtaattagaaacaatactctaatggggaagccaacagaaggggccttaattgctcttgcaatgaagatgggtcttgatggacttcaacaagactacatcagaaaagctgaatacccttttagctctgagcaaaagtggatggctgttaagtgtgtacaccgaacacagcaggacagaccagagatttgttttatgaaaggtgcttacgaacaagtaattaagtactgtactacataccagagcaaagggcagaccttgacacttactcagcagcagagagatgtgtaccaacaagagaaggcacgcatgggctcagcgggactcagagttcttgctttggcttctggtcctgaactgggacagctgacatttcttggcttggtgggaatcattgatccacctagaactggtgtgaaagaagctgttacaacactcattgcctcaggagtatcaataaaaatgattactggagattcacaggagactgcagttgcaatcgccagtcgtctgggattgtattccaaaacttcccagtcagtctcaggagaagaaatagatgcaatggatgttcagcagctttcacaaatagtaccaaaggttgcagtattttacagagctagcccaaggcacaagatgaaaattattaagtcgctacagaagaacggttcagttgtagccatgacaggagatggagtaaatgatgcagttgctctgaaggctgcagacattggagttgcgatgggccagactggtacagatgtttgcaaagaggcagcagacatgatcctagtggatgatgattttcaaaccataatgtctgcaatcgaagagggtaaagggatttataataacattaaaaatttcgttagattccagctgagcacgagtatagcagcattaactttaatctcattggctacattaatgaactttcctaatcctctcaatgccatgcagattttgtggatcaatattattatggatggacccccagctcagagccttggagtagaaccagtggataaagatgtcattcgtaaacctcctcgcaactggaaagacagcattttgactaaaaacttgatacttaaaatacttgtttcatcaataatcattgtttgtgggactttgtttgtcttctggcgtgagctacgagacaatgtgattacacctcgagacacaacaatgaccttcacatgctttgtgttttttgacatgttcaatgcactaagttccagatcccagaccaagtctgtgtttgagattggactctgcagtaatagaatgttttgctatgcagttcttggatccatcatgggacaattactagttatttactttcctccgcttcagaaggtttttcagactgagagcctaagcatactggatctgttgtttcttttgggtctcacctcatcagtgtgcatagtggcagaaattataaagaaggttgaaaggagcagggaaaagatccagaagcatgttagttcgacatcatcatcttttcttgaagtatgatgcatattgcattattttatttgcaaactaggaattgcagtctgaggatcatttagaagggcaagttcaagaggatatgaagatttgagaactttttaactattcattgactaaaaatgaacattaatgttaaagacttaagactttaacctgctggcagtcccaaatgaaattatgcaactttgatatcatattccttgatttaaattggcttttgtgattgagtgaaactttataaagcatatggtcagttatttaattaaaaaggcaaaacctgaaccaccttctgcacttaaagaagtctaacagtacaaatacactatctatcttagatagatatatttttttttatttttaaatattgtactatttatggtggtggggctttcttactaatacacaaataaatttaatcatttcaaaggcattctatttggtttagaagttgattcccaggagtgccatatttcagctactgtatttcctttttcttgtaatgtaagcagctcagataccatgtgctatcatttttgtatcaagttttttgcacaggatgtgaccactgtcagatcactgttcttttctttctttttgtgattgaaaagcctatactacaatttgaagtaaatttttgtttttcttagtaagtgtaaatggttgctttatttttattttaaaaaggtatgtctttggtttggcagaattcatgcagggctatcaagtggtgttctagggtaacagtgtccataattaacgcttagtcatagagtcaaaaacatttaagactgattgggttgaagtttataataaattatattaacatgtcttcctttttgaggtaaagatatatactttgtcaaatatcattttgtcatcctctaaatataaatccaaatacctcagctaagtaattctattttattatttttactgttatgtatgtttttaatcatatttcttaggaagtataggctactggacttagaataaaaagtccccaaacccaaacaaatggtttatgaaccagagtatatgtggaagattctttgctggtcttgctctgtgtgcatctgaagcttctttggcctagattttagcacaaacctgagtatatctcttctactttcatcatgtgttctgtaccttctttttgtttcattgggcatgctagggaaataggtggattttgtgtgtaatgccatcagtttttatgaaagcttgatgaggtataggtcatttgttttgagtatgtgggccagaaatttaaaattagaaatttgtttttctgttgagtatataaacaaaaattggtcccaattctaacaggtttaatccttcttgaagccaataagttttatcttttataatctgtcaggatgaaccactccttagcttttatccaatattaaactgcaagtgttagcactgaaatattgtcattgatagggaaaatatctattctttgagtcattgttactgaggcagttgagtgtaaggagctggctgcagtttattctacttaaccctttaaggctgaattgtcaaatgtacattgttccatgtcgttagatggaacatggaagccattgtctaatcaactctatcattagtgacttgatgtctcataccttaattttgtaatgatttttattctctgttacaaagacttgaaatacgtattaaatgcacgttaatgttttgctttgcattttaggttcagattatgacttgattgaaataaatgtgcctatacattcatttgctttgtactataaaaataaaaatgatttcttaagttaaaaaaaaaaaaaaa

SEQ ID NO: 862 - protein, 919 aa, Homo sapiens
MKVARFQKIPNGENETMIPVLTSKKASELPVSEVASILQADLQNGLNKCEVSHRRAFHGWNEFDISEDEPLWKKYISQFKNPLIMLLLASAVISVLMHQFDDAVSITVAILIVVTVAFVQEYRSEKSLEELSKLVPPECHCVREGKLEHTLARDLVPGDTVCLSVGDRVPADLRLFEAVDLSIDESSLTGETTPCSKVTAPQPAATNGDLASRSNIAFMGTLVRCGKAKGVVIGTGENSEFGEVFKMMQAEEAPKTPLQKSMDLLGKQLSFYSFGIIGIIMLVGWLLGKDILEMFTISVSLAVAAIPEGLPIVVTVTLALGVMRMVKKRAIVKKLPIVETLGCCNVICSDKTGTLTKNEMTVTHIFTSDGLHAEVTGVGYNQFGEVIVDGDVVHGFYNPAVSRIVEAGCVCNDAVIRNNTLMGKPTEGALIALAMKMGLDGLQQDYIRKAEYPFSSEQKWMAVKCVHRTQQDRPEICFMKGAYEQVIKYCTTYQSKGQTLTLTQQQRDVYQQEKARMGSAGLRVLALASGPELGQLTFLGLVGIIDPPRTGVKEAVTTLIASGVSIKMITGDSQETAVAIASRLGLYSKTSQSVSGEEIDAMDVQQLSQIVPKVAVFYRASPRHKMKIIKSLQKNGSVVAMTGDGVNDAVALKAADIGVAMGQTGTDVCKEAADMILVDDDFQTIMSAIEEGKGIYNNIKNFVRFQLSTSIAALTLISLATLMNFPNPLNAMQILWINIIMDGPPAQSLGVEPVDKDVIRKPPRNWKDSILTKNLILKILVSSIIIVCGTLFVFWRELRDNVITPRDTTMTFTCFVFFDMFNALSSRSQTKSVFEIGLCSNRMFCYAVLGSIMGQLLVIYFPPLQKVFQTESLSILDLLFLLGLTSSVCIVAEIIKKVERSREKIQKHVSSTSSSFLEV

SEQ ID NO: 863 - DNA, 2662 bp, Homo sapiens
aagtaggcggagaaagcagaggaggaccggcgggccaagctttcctagcctgacagcagccatttcggaacgtacgtcccagccctctttagctacttagcgcctctgggcccgagaacacctgctccttggctcagtctggcgccaccggcatcacggaactgtacttcccagagacgtcacaccgggagacttccgattcccgctcttgagattggactctcacgtgcaggagccagtcctcgctgggctctagcgggcttctgatggaggagctactcctctgggaggacagaaattagcagcagcctctgtcaccatccaaagattacaacccatgaaaccattgaatttgtgccttgtatcagaaagcaaaggagaatgaaaaagcacagctaacattgcttgaggatctaggcgattaattctttagactgtcatcatgggtatccgaggactaatgagttttgtggaagatcatagtaatgaattcttcactgatttgaagttgcgggacacaaaaattgtcattgatggttatgctcttttccaccgtctttgcttcagttcaaacttggatctccggtatggaggggactatgattcttttgcagatgttgtacaaaaattctttgaatcactgtttgcttgtaatatatgcccatatgttgtattagatggaggatgtgacatttcagataaaaagcttacaactttaaaggatagagctagagagaagatccagatggcccattccctttctgttggtgggagtgggtacgtatgtcccttactcatccgggaagtattcatacaggttttgatcaagctgcgggtgtgttttgtccagtgcttttcagaagcagatcgggacattatgacacttgctaaccattggaattgccctgtgttatcatcagatagtgacttttgcatttttgacctgaaaactgggttttgcccattgaatagctttcagtggagaaatatgaacactattaagggcacacaaaactatatccctgccaaatgcttttcccttgatgcattctgccatcacttcagcaatatgaataaagctctactacctctctttgcggtgctatgtggaaatgaccatgttaatctacccatcatggagacattcttaagtaaagcgcgtcttcctcttggagctaccagttctaaagggaggagacaccaccgaatcctgggacttctgaattggttgtctcattttgccaaccctaccgaagcactagataatgttctgaaatacctcccaaaaaaggatcgagaaaatgttaaggaacttctctgctgttccatggaagaataccaacagtcccaggtgaagctacaggacttcttccagtgtggtacttatgtctgtccagatgccttgaatcttggtttaccagaatgggtattagtggctttagctaaaggccagctatctcctttcatcagtgatgctttggtcctaagacggaccattcttcccacacaggtggaaaacatgcagcaaccaaatgcccacagaatatctcagcccatcaggcaaatcatctatgggcttcttttaaatgcctcaccacatctggacaagacatcctggaatgcattgcctcctcagcctctagctttcagtgaagtggaaaggattaataaaaatatcagaacctcaatcattgatgcagtagaactggccaaggatcattctgacttaagcagattgactgagctctccttgaggaggcggcagatgcttctgttagaaaccctgaaggtgaaacagaccattctggagccaatccctacttcactgaagttgcccattgctgtcagttgctactggttgcagcacaccgagaccaaagcaaagctacatcatctacaatccttactgctcacaatgctagtggggcccttgattgccataatcaacagccctggtaaggaagagctgcaggaagatggtgctaagatgttgtatgcagagttccaaagagtgaaggcgcagacacggctgggcacaagactggacttagacacagctcacatcttctgtcagtggcagtcctgtctccagatggggatgtatctcaaccagctgctgtccactcctctcccagagccagacctaactcgactgtacagtggaagcctggtgcacggactatgccagcaactgctagcatcgacctctgtagaaagtctcctgagcatatgtcctgaggctaagcaactttatgaatatctattcaatgccacaaggtcatatgcccccgctgaaatattcctaccaaaaggtagatcaaattcaaaaaaaaaaaggcagaagaaacagaataccagctgttctaagaacagagggagaaccactgcacacaccaagtgttggtatgagggaaacaaccggtttgggttgttaatggttgaaaacttagaggaacatagtgaggcctccaacattgaataaaactcagtttgcatcaaactagatgtatttaatataatccttacttaaaattcttccgttaccacccttgaaacaattagctttttctttaggactgacctgttaggggataaacatcacaataatctgaattccaagttattttgtattttgtttttaataaatacaacctgatttaag

SEQ ID NO: 864 - protein, 679 aa, Homo sapiens
MGIRGLMSFVEDHSNEFFTDLKLRDTKIVIDGYALFHRLCFSSNLDLRYGGDYDSFADVVQKFFESLFACNICPYVVLDGGCDISDKKLTTLKDRAREKIQMAHSLSVGGSGYVCPLLIREVFIQVLIKLRVCFVQCFSEADRDIMTLANHWNCPVLSSDSDFCIFDLKTGFCPLNSFQWRNMNTIKGTQNYIPAKCFSLDAFCHHFSNMNKALLPLFAVLCGNDHVNLPIMETFLSKARLPLGATSSKGRRHHRILGLLNWLSHFANPTEALDNVLKYLPKKDRENVKELLCCSMEEYQQSQVKLQDFFQCGTYVCPDALNLGLPEWVLVALAKGQLSPFISDALVLRRTILPTQVENMQQPNAHRISQPIRQIIYGLLLNASPHLDKTSWNALPPQPLAFSEVERINKNIRTSIIDAVELAKDHSDLSRLTELSLRRRQMLLLETLKVKQTILEPIPTSLKLPIAVSCYWLQHTETKAKLHHLQSLLLTMLVGPLIAIINSPGKEELQEDGAKMLYAEFQRVKAQTRLGTRLDLDTAHIFCQWQSCLQMGMYLNQLLSTPLPEPDLTRLYSGSLVHGLCQQLLASTSVESLLSICPEAKQLYEYLFNATRSYAPAEIFLPKGRSNSKKKRQKKQNTSCSKNRGRTTAHTKCWYEGNNRFGLLMVENLEEHSEASNIE

SEQ ID NO: 865 - DNA, 2939 bp, Homo sapiens
ccaaacagccgtggcccgcggtgtctggcgctcggtgggtgtggttgcccctagtttgaggcctgcccgattacccgcaagacttgggcagccccgggcgccgctccgaccacgacagggaaaggaaccttaatctcatctttaaaataaggagaattactgagtgacctgaaggacccttttcagctggaaagtctgaactgaccaacactggatgaatttgaccatttcttaggagactggaatgttaagtttctataaatgaatgaaccagttctctcttgtttggagcaatgctgaaattccaagaggcagctaagtgtgtgagtggatcaacagccatttccacttatccaaagaccttgattgcaagaagatacgtgcttcaacaaaaacttggcagtggaagttttggaactgtctatctggtttcagacaagaaagccaaacgaggagaggaattaaaggtacttaaggaaatatctgttggagaactaaatccaaatgaaactgtacaggccaatttggaagcccaactcctctccaagctggaccacccagccattgtcaagttccatgcaagttttgtggagcaagataatttctgcattatcacggagtactgtgagggccgagatctggacgataaaattcaggaatataaacaagctggaaaaatctttccagaaaatcaaataatagaatggtttatccagctgctgctgggagttgactacatgcatgagaggaggatacttcatcgagacttaaagtcaaagaatgtatttctgaaaaataatctccttaaaattggagattttggagtttctcgacttctaatgggatcctgtgacctggccacaactttaactggaactccccattatatgagtcctgaggctctgaaacaccaaggctatgacacaaagtcggacatctggtcactggcatgcattttgtatgagatgtgctgcatgaatcatgcattcgctggctccaatttcttatccattgttttaaaaattgttgaaggtgacacaccttctctccctgagagatatccaaaagaactaaatgccatcatggaaagcatgttgaacaagaatccttcattaagaccatctgctatcgaaattttaaaaatcccttaccttgatgagcagctacagaacctaatgtgtagatattcagaaatgactctggaagacaaaaatttggattgtcagaaggaggctgctcatataattaatgccatgcaaaaaaggatccacctgcagactctgagggcactgtcagaagtacagaaaatgacgccaagagaaaggatgcggctgaggaagctccaggcggctgatgagaaagccaggaagctgaaaaagattgtggaagaaaaatatgaagaaaatagcaaacgaatgcaagaattgagatctcggaactttcagcagctgagtgttgatgtactccatgaaaaaacacatttaaaaggaatggaagaaaaggaggagcaacctgagggaagactttcttgttcaccccaggacgaggatgaagagaggtggcaaggcagggaagaggaatctgatgaaccaactttagagaacctgcctgagtctcagcctattccttccatggacctccacgaacttgaatcaattgtagaggatgccacatctgaccttggataccatgagatcccagaagacccacttgtggctgaagagtactacgctgatgcatttgattcctattgtgtagagagtgatgaggaggaagaagaaatagcgttagaaagaccagagaaagaaatcaggaatgagggatcccagcctgcttacagaacaaaccaacaggacagtgatatcgaagcgttggccaggtgtttggaaaatgtcctgggttgcacttctctagacacaaagaccatcaccaccatggctgaagacatgtccccaggaccaccaattttcaacagtgtgatggccaggaccaagatgaaacgcatgagggaatcagccatgcagaagctggggacagaagtatttgaagaggtctataattacctcaagagagcaaggcatcagaatgctagcgaagcagagatccgcgagtgtttggaaaaagtggtgcctcaagccagcgactgttttgaagtggaccagctcctgtactttgaagagcagttgctgatcacgatgggaaaagaacctactctccagaaccatctctaggcaactatcaaaaagaagcagaagttcaagtggacaaatttatgtgaaaattcatttaacatataagctgaactctattatggggaatggatacaaaagcagagctcccatcttgactttcaattcctcatcagaagtactggcttctttagagagtagtaagcatggctgcctatgcttggagtcataagtgttatttggactataccctgagataagcttatagatcaagtttggctcccttgaaaagcatttctctcatgtgcgccctcagggcttccagcaggattgagtcaccctgacgatgaccggggagaagccgtgtgctcttcattattttcagctggaggacagagctcagtgcctgactgcctagggtctcatggactgtaggcagcctgccagtgaaggtcactggactctagcctacaacatgctgagctacagcccagaagccagacatgcctgtcttagctgacctgtttttggtccacttttgcccttccatgactaataaggaagatatgtgtgtatttcatacacacacaaggacctggattaaaaatccaaaaagtgattctcttctatgatttatttcaaactcatccatagataattcaagatttgtattcaaaataaacatagttttcacagttacaaaataaatcacctattttatctttagaaaaaaaaaaaaaaaaaaaaaaa

SEQ ID NO: 866 - protein, 645 aa, Homo sapiens
MLKFQEAAKCVSGSTAISTYPKTLIARRYVLQQKLGSGSFGTVYLVSDKKAKRGEELKVLKEISVGELNPNETVQANLEAQLLSKLDHPAIVKFHASFVEQDNFCIITEYCEGRDLDDKIQEYKQAGKIFPENQIIEWFIQLLLGVDYMHERRILHRDLKSKNVFLKNNLLKIGDFGVSRLLMGSCDLATTLTGTPHYMSPEALKHQGYDTKSDIWSLACILYEMCCMNHAFAGSNFLSIVLKIVEGDTPSLPERYPKELNAIMESMLNKNPSLRPSAIEILKIPYLDEQLQNLMCRYSEMTLEDKNLDCQKEAAHIINAMQKRIHLQTLRALSEVQKMTPRERMRLRKLQAADEKARKLKKIVEEKYEENSKRMQELRSRNFQQLSVDVLHEKTHLKGMEEKEEQPEGRLSCSPQDEDEERWQGREEESDEPTLENLPESQPIPSMDLHELESIVEDATSDLGYHEIPEDPLVAEEYYADAFDSYCVESDEEEEEIALERPEKEIRNEGSQPAYRTNQQDSDIEALARCLENVLGCTSLDTKTITTMAEDMSPGPPIFNSVMARTKMKRMRESAMQKLGTEVFEEVYNYLKRARHQNASEAEIRECLEKVVPQASDCFEVDQLLYFEEQLLITMGKEPTLQNHL

SEQ ID NO: 867 - DNA, 2080 bp, Homo sapiens
ccaaacagccgtggcccgcggtgtctggcgctcggtgggtgtggttgcccctagtttgaggcctgcccgattacccgcaagacttgggcagccccgggcgccgctccgaccacgacagggaaaggaaccttaatctcatctttaaaataaggagaattactgagtgacctgaaggacccttttcagctggaaagtctgaactgaccaacactggatgaatttgaccatttcttaggagactggaatgttaagtttctataaatgaatgaaccagttctctcttgtttggagcaatgctgaaattccaagaggcagctaagtgtgtgagtggatcaacagccatttccacttatccaaagaccttgattgcaagaagatacgtgcttcaacaaaaacttggcagtggaagttttggaactgtctatctggtttcagacaagaaagccaaacgaggagaggaattaaaggtacttaaggaaatatctgttggagaactaaatccaaatgaaactgtacaggccaatttggaagcccaactcctctccaagctggaccacccagccattgtcaagttccatgcaagttttgtggagcaagataatttctgcattatcacggagtactgtgagggccgagatctggacgataaaattcaggaatataaacaagctggaaaaatctttccagaaaatcaaataatagaatggtttatccagctgctgctgggagttgactacatgcatgagaggaggatacttcatcgagacttaaagtcaaagaatgtatttctgaaaaataatctccttaaaattggagattttggagtttctcgacttctaatgggatcctgtgacctggccacaactttaactggaactccccattatatgagtcctgaggctctgaaacaccaaggctatgacacaaagtcggacatctggtcactggcatgcattttgtatgagatgtgctgcatgaatcatgcattcgctggctccaatttcttatccattgttttaaaaattgttgaaggtgacacaccttctctccctgagagatatccaaaagaactaaatgccatcatggaaagcatgttgaacaagaatccttcattaagaccatctgctatcgaaattttaaaaatcccttaccttgatgagcagctacagaacctaatgtgtagatattcagaaatgactctggaagacaaaaatttggattgtcagaaggaggctgctcatataattaatgccatgcaaaaaaggatccacctgcagactctgagggcactgtcagaagtacagaaaatgacgccaagagaaaggatgcggctgaggaagctccaggcggctgatgagaaagccaggaagctgaaaaagattgtggaagaaaaatatgaagaaaatagcaaacgaatgcaagaattgagatctcggaactttcagcagctgagtgttgatgtactccatgaaaaaacacatttaaaaggaatggaagaaaaggaggagcaacctgagggaagactttcttgttcaccccaggacgaggatgaagagaggtggcaaggcagggaagaggaatctgatgaaccaactttagagaacctgcctgagtctcagcctattccttccatggacctccacgaacttgaatcaattgtagaggatgccacatctgaccttggataccatgcaactcacagctgactttcagagcagtgttttttccaaagctggaatagcctgagactctagggcctgggtctacaaggagcatgactccctaccccaccattcagatgtggagaatgcagtgaagtaggccttggctgcttacccacatcctgaccagctgtcacctcttcatttcctgttcagccactctttaagcaatcactgagcccaatgctcagagatagctcagacctgtaggtggttgtgctttgcttgcctgtaggagccccacatgccctttacagttctgggctgtctatgacttacgatatcacctcttctttttaaatgtccaagtggaaataaagtgatttgaactttgccaaaaaaaaaaaaaaaaaaaaaaa

SEQ ID NO: 868 - protein, 470 aa, Homo sapiens
MLKFQEAAKCVSGSTAISTYPKTLIARRYVLQQKLGSGSFGTVYLVSDKKAKRGEELKVLKEISVGELNPNETVQANLEAQLLSKLDHPAIVKFHASFVEQDNFCIITEYCEGRDLDDKIQEYKQAGKIFPENQIIEWFIQLLLGVDYMHERRILHRDLKSKNVFLKNNLLKIGDFGVSRLLMGSCDLATTLTGTPHYMSPEALKHQGYDTKSDIWSLACILYEMCCMNHAFAGSNFLSIVLKIVEGDTPSLPERYPKELNAIMESMLNKNPSLRPSAIEILKIPYLDEQLQNLMCRYSEMTLEDKNLDCQKEAAHIINAMQKRIHLQTLRALSEVQKMTPRERMRLRKLQAADEKARKLKKIVEEKYEENSKRMQELRSRNFQQLSVDVLHEKTHLKGMEEKEEQPEGRLSCSPQDEDEERWQGREEESDEPTLENLPESQPIPSMDLHELESIVEDATSDLGYHATHS

SEQ ID NO: 869 - DNA, 3857 bp, Homo sapiens
gagagatcgaggtgacaggcgagctggctggactcggagcgcggtcgaggctttctgcgttcgcggcggcggaatggcccgtgcgcggctcgccgcgtcgcggctctgtggtccctagacgtcggctcccgccctcggcgctgatctccggcgcgggcactgctttccactcggctcctgtcgtccgttctctcaggctcccgttcaggatttttagactctgaggagcagttggagctaatccacattatggaaatggaaaccaccgaacctgagccagactgtgtagtgcagcctccctctcctcctgatgacttttcatgccaaatgagactctctgagaagatcactccattgaagacttgttttaagaaaaaggatcagaaaagattgggaactggaaccctgaggtctttgaggccaatattaaacactcttctagaatctggctcacttgatggggtttttagatctaggaaccagagtacagatgagaacagcttacatgaacctatgatgaagaaagccatggaaatcaattcatcatgcccaccagcagaaaataatatgtctgttctgattcctgataggacaaatgttggggaccagataccggaagcccatccttccactgaagctccagaacgagtggttccaatccaagatcacagctttccatcagaaaccctcagtgggacggtggcagattccacaccagctcacttccagactgatcttttgcacccagtttcaagtgatgttcctactagtcctgactgcttagacaaagtcatagattatgttccaggcattttccaagaaaacagttttacaatccaatacattctggacaccagtgataagctgagtactgagctctttcaggacaaaagtgaagaggcttcccttgacctcgtgtttgagctggtgaaccagttgcagtaccacactcaccaagagaacggaattgaaatttgcatggactttctgcaaggcacttgtatttatggcagggattgtttgaagcaccacactgtcttgccatatcattggcagatcaaaaggacaactactcaaaagtggcagagtgtattcaatgattctcaggagcacttggaaagattttactgtaacccagaaaatgatagaatgagaatgaagtatggaggacaagaattttgggcagatttgaatgccatgaacgtgtatgaaacaactgaatttgaccaactacgaaggctgtccacaccaccctctagcaatgtcaactctatttaccacacagtctggaaattcttctgtagggaccactttggatggagagagtatcccgagtctgtcattcgattgattgaagaagccaactctcggggtctgaaagaggttcgatttatgatgtggaataaccactacatcctccacaattcattcttcaggagagagataaaaaggagacccctcttccgctcctgttttatactgcttccatatttacagacacttggtggggttcccacacaagctcctccacctcttgaagcaacttcatcatcacaaattatctgcccagatggggtcacttcagcaaacttttaccctgaaacttgggtttatatgcatccatctcaggacttcatccaagtccctgtttctgcagaggataaaagttatcggatcatttacaatctttttcataagactgtgcctgagtttaaatacagaattttgcagatattgagagtccaaaaccagtttctttgggagaaatataaaaggaaaaaggaatatatgaacaggaaaatgtttggccgtgacaggataataaatgagagacatttatttcatggaacatcccaggatgtggtagatggaatctgcaaacacaactttgaccctcgagtctgtggaaagcatgctacaatgtttggacaaggcagttattttgcaaagaaggcaagctactctcataacttttctaagaagtcctccaaaggagtccacttcatgtttctggccaaagtgctgacgggcagatacacaatgggcagtcatggcatgagaaggcccccgccagtcaatcctggcagtgtcaccagtgacctttatgactcttgtgtggataatttctttgagcctcagatttttgtcatttttaatgatgaccagagttacccttattttgttatccaatatgaagaagtcagtaacactgtttccatttgaaaaatcttggtactgctaaattatttgatatgaactcaatccagcatttgtagcaggttttgaatgggtgggactgggtggggaacagcattggacattaatagggcacttttcagacccattttttaaagtgctagaaaatgctttttttaaaaaaaaaatacaagttttaaaatgaccacttactctttaattatttactaattgctagtgtactcagtgtggaaaagactacagattacacactcttttcattcacacttgtacatatagacagcaatgttattaggagcattaaattaaaaaactgaacagcctaatttaaatgtggcttgggcctggtagaagtttgaccaaatggaatggaggctgtgagcaatgtgaggattctatttatttatttacgtttgataaaacttactggaactagtactaccatgcgtattccctgtccaaagcatcactgctttggtatagtataagttcatgaaattctggtgggtagaaagaaatttttatttctatcagcagtactaaaatgtatcagccaaccagagaacatcagtgactttaacttctgcagagtttgccccagaattcagagttctatttagaggaagttaaaacaacaacaaaaaacaaccatttgaaaaatttttgtcaccagcaaaacttttcactaattagtgatatgaaatgtgatttttgtgttgttaaacttcagctttggaaaactcagtctctttcattatcatccattccaatttgaaggagttgggcagctaatttggttaaaggcagtcttgagggttagaagtattacttccttttcgggttccagacctagcttgtgactgaaagttttagaaaaaggaagtacatctatagccgaattgataaggttattactgtgttttgcacaaagtatattagcaaaagtatttgctggaattattggtagatggcagtcccactcctacacctgctttgtcagatacagctgggttccctggctgactctgtaccttacttacactacttacttaatagaaacacaaacttggaaattgtgccagtggtccagctggagcacaacgtttggtgaatatgctgtttcctcagttcagagaggtagcaactaggtaaactccttataaaaagcaaatacctggatttacaaaagtgaaagtagttgttcacaaaagaattcgccatggaattctttcagttaccaagctctcctggtaatgtttgtggttatatcatttacacaaaacttttcaggaacttctgtgttgtttaagcaagatgtatctgtactgatgtctcagtgaatcagtctgtttattaagcacttatcagggcttccacacacttatttattttgccctagttaatcctgttgtttgctgccattggcatgaaatggccaactgtggctgttacagttctttcattcaattataacttgtaaaccagtgactcctaatctttttcaagttaagacaccttaccattgcttatttggttttatgagacttgttcctttttttctccctaaggaaaaagaaagctttatgacatatttatttttttaataaaactaagcaaaaacaaaaaaaaaaaaaaaaaaa

SEQ ID NO: 870 - protein, 657 aa, Homo sapiens
MEMETTEPEPDCVVQPPSPPDDFSCQMRLSEKITPLKTCFKKKDQKRLGTGTLRSLRPILNTLLESGSLDGVFRSRNQSTDENSLHEPMMKKAMEINSSCPPAENNMSVLIPDRTNVGDQIPEAHPSTEAPERVVPIQDHSFPSETLSGTVADSTPAHFQTDLLHPVSSDVPTSPDCLDKVIDYVPGIFQENSFTIQYILDTSDKLSTELFQDKSEEASLDLVFELVNQLQYHTHQENGIEICMDFLQGTCIYGRDCLKHHTVLPYHWQIKRTTTQKWQSVFNDSQEHLERFYCNPENDRMRMKYGGQEFWADLNAMNVYETTEFDQLRRLSTPPSSNVNSIYHTVWKFFCRDHFGWREYPESVIRLIEEANSRGLKEVRFMMWNNHYILHNSFFRREIKRRPLFRSCFILLPYLQTLGGVPTQAPPPLEATSSSQIICPDGVTSANFYPETWVYMHPSQDFIQVPVSAEDKSYRIIYNLFHKTVPEFKYRILQILRVQNQFLWEKYKRKKEYMNRKMFGRDRIINERHLFHGTSQDVVDGICKHNFDPRVCGKHATMFGQGSYFAKKASYSHNFSKKSSKGVHFMFLAKVLTGRYTMGSHGMRRPPPVNPGSVTSDLYDSCVDNFFEPQIFVIFNDDQSYPYFVIQYEEVSNTVSI

SEQ ID NO: 871 - DNA, 2881 bp, Homo sapiens
agccgactggcggcgcggtcgcccgggagaccgggaaagccgtttcacacccgtcctagtcgaagtcgagatttcctttggcttcaaagctctctcaccatattttgggaagttatggatcatcacattcccatgcatgcgttgcctgaagaaatccaaaagatgttgcctgaagaaaaagtttgtaagtactgtggagtcagctatctaattcttcatgaatttaaggctatggaagaaaaagtgaaagcaatggaaaaagagatgaaattttatcaaggaagtatagatcgtgaaaagagacttcaagaaaagctgcattctcttagccaagaacttgaacagtacaaaattgacaacaaatccaaaacagaaagaatttacgatgtaggcatgcagttaaaaagtcaacaaaatgaatttcagaaagtaaagaaacaactgagtcatttgcaagatgagctaaaaattaaatatagacaatcatacatcttcagtcaaagattgtcagagtacaaatatttctggaataagactctttcattacttacttttactaaaagggaactaaccagtattaaaaatgaagtatatgataattaccaaaactggacttcattgaaaggagcagtttttctacaaattaaatctataagtgaaacagccttgacagaaatagacatactgaataaaagttcgacagtatcccagagaaataaagtatgccttgaaaaggaaatgaaaaatctgaaattgttgtcagatgcagccatattgagatctcagcagattcggacatctagacaacaggaagtaaacttgcaaaccagatgctatgatttgcaaaaagaagtactagatttacaatgtctagtagaggcacttggattaaaacttcagaaggcggtgacagagatggacaactataaagaaatgcttatgtaagatggagaatattaaacaacttataacagtgctctgtagatgtgttacaaaatggcaagaattaggaagaaatgacaagaattataaagaccctgcctgggcaacacggagaaactttgtctccacaaaaaaatacaaaaattatccatgcgtgttggcacactcctgtagtcccagctactcgggaggctgaactgggaagatcacctaagcctagaaagttgaagctacagtgaaccatgattatgccactacactccagcctgggcgacagagtgagaccctgtctcaaaatgaataaataagaataaatctaatgaagctgatgactgtcaaagagaacttaaaaaactgaagtttgaatccattatttctgagtcacagcatactatgctgcttaaggaaaaagaagactctttaatgacttgtcaacagatatataaagcattacaggaagagctgactgtgaaagaaaagcaagaagaagacataaagagaagaattaaccttgcagaaaatgaactggagataaccaaaactcttctgaatcagacaagggaagaggttttaacactgaaaaatgaaagggaattgatgctgatttcacatcagaaaagcatcgagcagctgcaagaaacccttagacagaagctgctgagtgatgataactggaaggagaagattgaagcagaacttgccaaggaaagggcccaacacttggttgaatttgaagagcaagctcttctctttaaggaagaaacaaaattgcaacttgatattgaaaaagaaaaacaccaagatgtaatccaaaagtataagaaagaacaagaggaactacaaatgaagatatctgacttaatcacaggcgctacaagagatctaaggcaggaagtgaccactcttaaagaaaaacttcacaaatcccatactcggtacactgaagaatctaattcaaaggaaaaagaaattgaaaatcttaaaaatttggttgcagaatttgaatctcgcttgaagaaggaaattgacagtaatgattcagtttcagaaaacttgaggaaggaaatggaacagaagtcggatgaactgaaaagagtaatgctggctcaaacacaactgatagagcaatttaaccagtcccaggaagagaatacttttcttcaggagacagtgcgtagagaatgtgaagaacgctttgaactgacagaggctttgagtcaagccagagaacagctcctggagctcagtaagcttcgtggaagtttaccattctcaccgtgttccctcagcaagggcagcctaacctcccctgctgcagcagtcagtaatcatggagagagaagccttgcaagactgaactctgaaaaaggaatccaaattcccaacctgcgcggggtgtcaaaacccaccactttcccaacctcagataagccgaagagggttagatcaggcgtgcccattctcccccagccacatcctcccaggggtggagcatcttcagcaaatgagactagacagagactggctgccattcttaggagaaggcggagtcagcaatgatccaaaatgaggagcaggaagctccctacagcgtgcacgctctttcagagagtgccaggaattcactgtaactgagaatgacaatgataaaattattttcacagatcaggaaggcatacctatagatgtatttaacaaaagactgtaaaaagctggaaaattgtgaagccttatttttcaagagggttttgatagagtaacagatcattaagttgttggtattccagaggtccgatttctatgtttatgttggaatgtgctctatgaatatagccttttagagatcacaggtaaaatttttcacccataacatcttttcaatttcttgcgccactacaagcagatatatttccacaaaaaaatagattgtttgagattt

SEQ ID NO: 872 - protein, 388 aa, Homo sapiens
MLLKEKEDSLMTCQQIYKALQEELTVKEKQEEDIKRRINLAENELEITKTLLNQTREEVLTLKNERELMLISHQKSIEQLQETLRQKLLSDDNWKEKIEAELAKERAQHLVEFEEQALLFKEETKLQLDIEKEKHQDVIQKYKKEQEELQMKISDLITGATRDLRQEVTTLKEKLHKSHTRYTEESNSKEKEIENLKNLVAEFESRLKKEIDSNDSVSENLRKEMEQKSDELKRVMLAQTQLIEQFNQSQEENTFLQETVRRECEERFELTEALSQAREQLLELSKLRGSLPFSPCSLSKGSLTSPAAAVSNHGERSLARLNSEKGIQIPNLRGVSKPTTFPTSDKPKRVRSGVPILPQPHPPRGGASSANETRQRLAAILRRRRSQQ

SEQ ID NO: 873 - DNA, 2625 bp, Homo sapiens
atagggtccacagccttgtgttcttcaaatactgtaaagcagccctctccagattccttgagggtcactttatattacacattcgtccacacaggacaacaaagtcaccacttccacccgccaaagcgcgctcaggtcggccgccacttcccttggtacacgcggaacgcaagccgcgccgaggctaaaggaagaggccggaatgcagggcgaaggggcgcagagatgctagccaatgctgccacctctattttggatataagggatcttgtaaagctccgttattcgtgtggctatcacaaacaaggtggtttcgaccggccttggctagagaaggcctcctcagcctctgaggatcccaaggtctgtcgcagcacccaacactcccctcgcaggcccagatgccgagggcggaggcgcggcctggagggactagttggcgcgcggctgcccggcgtggtgacgtcagggcggaagcgcacgcggcgtgaagcggcccagaacccggcggtcacgggaatatccgtcgcgccgagaacgctggttagtcttgtttcgggttccggctgcgttgggcttgcgtgcggctcgctaagactatggcgtccgggcctcattcgacagctactgctgccgcagccgcctcatcggccgccccaagcgcgggcggctccagctccgggacgacgaccacgacgacgaccacgacgggagggatcctgatcggcgatcgcctgtactcggaagtttcacttaccatcgaccactctctgattccggaggagaggctctcgcccaccccatccatgcaggatgggctcgacctgcccagtgagacggacttacgcatcctgggctgcgagctcatccaggccgccggcattctcctccggctgccgcaggtggcgatggcaacggggcaggtgttgtttcatcgttttttctactccaaatctttcgtcaaacacagtttcgagattgttgctatggcttgtattaatcttgcatcaaaaatcgaagaagcacctagaagaataagagatgtgattaatgtattccaccacctccgccagttaagaggaaaaaggactccaagccccctgatccttgatcagaactacattaacaccaaaaatcaagttatcaaagcagagaggagggtgctaaaggagttgggattttgtgttcatgtcaagcatcctcataagatcattgttatgtatttacaagtcttagaatgtgaacgtaatcaaaccctggttcaaactgcctggaattacatgaatgacagtcttcgaaccaatgtgtttgttcgatttcaaccagagactatagcatgtgcttgcatctaccttgcagctagagcacttcagattccgttgccaactcgtccccattggtttcttctttttggtactacagaagaggaaatccaggaaatctgcatagaaacacttaggctttataccagaaaaaagccaaactatgaattactggaaaaagaagtagaaaaaagaaaagtagccttacaagaagccaaattaaaagcaaagggattgaatccggatggaactccagccctttcaaccctgggtggattttctccagcctccaagccatcatcaccaagagaagtaaaagctgaagagaaatcaccaatctccattaatgtgaagacagtcaaaaaagaacctgaggatagacaacaggcttccaaaagcccttacaatggtgtaagaaaagacagcaagagaagtagaaatagcagaagtgcaagtcgatcgaggtcaagaacacgatcacgttctagatcacatactccaagaagacactataataataggcggagtcgatctggaacatacagctcgagatcaagaagcaggtcccgcagtcacagtgaaagccctcgaagacatcataatcatggttctcctcaccttaaggccaagcataccagagatgatttaaaaagttcaaacagacatggtcataaaaggaaaaaatctcgttctcgatctcagagcaagtctcgggatcactcagatgcagccaagaaacacaggcatgaaaggggacatcatagggacaggcgtgaacgatctcgctcctttgagaggtcccataaaagcaagcaccatggtggcagtcgctcaggacatggcaggcacaggcgctgactttctcttcctttgagcctgcatcagttcttggttttgcctatctacagtgtgatgtatggactcaatcaaaaacattaaacgcaaactgattaggatttgatttcttgaaaccctctaggtctctagaacactgaggacagtttcttttgaaaagaactatgttaatttttttgcacattaaaatgccctagcagtatctaattaaaaaccatggtcaggttcaattgtactttattatagttgtgtattgtttattgctataagaactggagcgtgaattctgtaaaaatgtatcttatttttatacagataaaattgcagacactgttctatttaagtggttatttgtttaaatgatggtgaatactttcttaacactggtttgtctgcatgtgtaaagatttttacaaggaaataaaatacaaatcttgttttttctaaa

SEQ ID NO: 874 - protein, 526 aa, Homo sapiens
MASGPHSTATAAAAASSAAPSAGGSSSGTTTTTTTTTGGILIGDRLYSEVSLTIDHSLIPEERLSPTPSMQDGLDLPSETDLRILGCELIQAAGILLRLPQVAMATGQVLFHRFFYSKSFVKHSFEIVAMACINLASKIEEAPRRIRDVINVFHHLRQLRGKRTPSPLILDQNYINTKNQVIKAERRVLKELGFCVHVKHPHKIIVMYLQVLECERNQTLVQTAWNYMNDSLRTNVFVRFQPETIACACIYLAARALQIPLPTRPHWFLLFGTTEEEIQEICIETLRLYTRKKPNYELLEKEVEKRKVALQEAKLKAKGLNPDGTPALSTLGGFSPASKPSSPREVKAEEKSPISINVKTVKKEPEDRQQASKSPYNGVRKDSKRSRNSRSASRSRSRTRSRSRSHTPRRHYNNRRSRSGTYSSRSRSRSRSHSESPRRHHNHGSPHLKAKHTRDDLKSSNRHGHKRKKSRSRSQSKSRDHSDAAKKHRHERGHHRDRRERSRSFERSHKSKHHGGSRSGHGRHRR

SEQ ID NO: 875 - DNA, 3044 bp, Homo sapiens
attcttccacccggcaccggctccgcaatgaacaacttcaggttcactgagctgagcggattccactcgctgtgccctcggagcctgcctgaatctcccgcccagtctcaaaccatgcagctgagtaactgcaagggcgcctttgaggagtagcacgcagagagtgtcaatgaagacctcaaagtctggagaaaaatgacctttcatggaataagaagtatacctccttctacatgtttttgtcttactgacctctgataactggaacacatgactctgggtctgtagaaagtcaactgatcaaactcatcctcaccatgcatcaactgttcagactggttttgggacaaaaagatctttcacgagctggggacctcttctccttagatgactctgagattgaagacagccttacagaagctttggagcaaattaagataattagctcatcttcagattaccaaaccaataacaatgaccaggcagtagttgaaatctgtatcacaagaatcacaacagccatcagagagaccgagtccattgaaaagcatgcaaaggcccttgtggggctctgggactcctgcttggaacataacctgagaccctttgggaaagacgaagacactcctcatgcaaaaatcgcatctgatatcatgagttgcattttacagaattacaaccgacccccagtgatggcattagccatccccattgcagtgaaattcctccacagaggcaacaaggaactgtgcaggaatatgtctaactacctgtctctggctgcaattaccaaggcagatctcctggctgatcacacggaagttatagtaaagagcatactccaaggtaacaccatgttgttgagagtgttacctgctgtgtatgaaaagcagcctcagccaattaatagacacctgacagaactcctggccttgatgtctcagctggaacagccagaacagtaccatctactacggcttttgcatgtagcagcaaagaaaaaacaactcgaggtagttcagaagtgtattcctttcctaattgggcatttgaaggattcaacccataatgacatcatcctaaacatcctcatggagatagcagtctatgagccagtggctttgaacagttttcttccaatgctgaaagagattggtgagagattcccctacctcactggacagatggcaaggatttatggagctgttgggcatgtggatgaagagagagccaggagctgcctgacatacctggtgagccaactggccaacatggagcattcgtttcaccatattctcctgctggagattaaaagcatcaccgacaccttctcctcaatcttgggccctcagagcagagacatcttccgcatgagcaacagcttcaccgccattgctaaactccttacccgacaactggaaaataccaaggctggaagtggcaggagaaaaatcagcactgaaattgaattccctgagaaactggaagaaaccaagctcatagtaactgaaaatgaagaccatgaaaaactccaagttaaaatccaggcttttgaagacaagataaatgcagggagcaatacccctggctctatcagaagatatagtctgggccaagtttctaaagaagaaagaaaaaacattagatttaacaggtcaaaaagtttggctttccacactatgctcacaaagggtgtgggttcagatgacggcgaagatgaaaacaggggagacataccagccagcatctctctttcagaaatagacccacttggccaaggaaatgacaagctgccgtttaagacagacactgagagatcacagctgggggagtcttcagtttcatacccaaatattatacatatagactcagagaatttgtcagaaactgttaaagaaaactcccaggaagaaactccagagacaactgcaagtcctatagaataccaagataagctctacttgcacttaaaaaaaaacctcagcaaagtgaaagcatatgccatggaaattggaaagaagattccagtccctgatcagtgtaccattgaagacactgtgagaagttgtgtagcaaagttgttcttcacctgctccctgaagggtcattactgcctatacagtaagtccagttttattctcatcagccaagaacctcagccatggatccagatcatgtttctatttcagcagagcctgtttcctgaacccctgtccattcagagtcattctgtgcaattcctcagagctctgtgggagaagacccaggcagggggtgctcacagctttgaaactgccatgatggagtccacgtttccacagcagaaggatctggaccaggtacagctccatctggaagaagtgaggttctttgacgtgtttggcttcagtgaaacagcaggagcatggcaatgcttcatgtgcaacaatcctgagaaagcaactgttgtaaatcaagatggccagcctctcatagaaggaaaacttaaagagaagcaagtcagatggaagttcatcaaaaggtggaaaacacgctattttacactggctggaaatcaacttctgtttcaaaaaggaaagtctaaagatgaccctgacgactgcccaatagaactcagcaaagtacagagtgtgaaggctgtggccaagaaacgcagggaccgctctctcccccgggctttcgaaatcttcacagacaataaaacctatgtctttaaggccaaggatgagaagaatgcagcagaatggctccagtgcatcaacgtggcagttgcccaagccaaagaaagggaaagtagagaagtaaccacatatctgtagggatttataagtcagccatgacaattatacaccacaggcattgtattatcattgccaatgtcaagaaaaagagctaaatttaccaagccatgttgttttttactaaataccaatggaattgttgtcctttaagaagaagggcctaaaatggcaggattcttagtaaatgtcatactctaacagctttagtattgacttcagaatatatctgatgcccacaaaaat

SEQ ID NO: 876 - protein, 833 aa, Homo sapiens
MHQLFRLVLGQKDLSRAGDLFSLDDSEIEDSLTEALEQIKIISSSSDYQTNNNDQAVVEICITRITTAIRETESIEKHAKALVGLWDSCLEHNLRPFGKDEDTPHAKIASDIMSCILQNYNRPPVMALAIPIAVKFLHRGNKELCRNMSNYLSLAAITKADLLADHTEVIVKSILQGNTMLLRVLPAVYEKQPQPINRHLTELLALMSQLEQPEQYHLLRLLHVAAKKKQLEVVQKCIPFLIGHLKDSTHNDIILNILMEIAVYEPVALNSFLPMLKEIGERFPYLTGQMARIYGAVGHVDEERARSCLTYLVSQLANMEHSFHHILLLEIKSITDTFSSILGPQSRDIFRMSNSFTAIAKLLTRQLENTKAGSGRRKISTEIEFPEKLEETKLIVTENEDHEKLQVKIQAFEDKINAGSNTPGSIRRYSLGQVSKEERKNIRFNRSKSLAFHTMLTKGVGSDDGEDENRGDIPASISLSEIDPLGQGNDKLPFKTDTERSQLGESSVSYPNIIHIDSENLSETVKENSQEETPETTASPIEYQDKLYLHLKKNLSKVKAYAMEIGKKIPVPDQCTIEDTVRSCVAKLFFTCSLKGHYCLYSKSSFILISQEPQPWIQIMFLFQQSLFPEPLSIQSHSVQFLRALWEKTQAGGAHSFETAMMESTFPQQKDLDQVQLHLEEVRFFDVFGFSETAGAWQCFMCNNPEKATVVNQDGQPLIEGKLKEKQVRWKFIKRWKTRYFTLAGNQLLFQKGKSKDDPDDCPIELSKVQSVKAVAKKRRDRSLPRAFEIFTDNKTYVFKAKDEKNAAEWLQCINVAVAQAKERESREVTTYL

SEQ ID NO: 877 - DNA, 2112 bp, Homo sapiens
cggctttcaaagccaatttgaataaacaactcttccctctcaaatgggcaagagtaactcttcagcaccatggagaggtccgggcagcgtgttacaacgtgggactgtgaccagggcaagcactctgacagtgattaccgagaggatgggatggatctaggcagtgacgccggcagcagcagcagcagcagccgcgccagttcacagtccaactccaccaaagtgaccccttgctccgagtgcaaatcttcatcgtcgccggggggcagcctggacttggtgtctgccctggaggactatgaggagcccttcccggtctaccagaagaaggtgattgatgagtgggcgccggaggaggacggggaggaggaggaagaggaggacgagcgcgaccagcgagggtaccgggatgaccgctctccggcccgggaaccgggggacgtaagcgccaggacccgcagcggcggcggcgggggcaggagcgccaccaccgccatgccgcccccggtgcccaacggcaacctccaccagcacgacccccaggacctcaggcacaatggcaacgtggtggtggctggccggccgagctgttcccggggcccccgccgggcgatccaaaagccccagccggctgggggccggcgcagtggccgcggcccggcggctggggggctctgccttcagcccccagacggcgggacgtgcgtccccgaagagcccccggtgccacctatggattgggaggcgctggagaagcatctggccgggctgcagttccgggagcaggaggtacggaaccagggccaggcgaggaccaactccacctccgcacagaaaaatgagagagagtctatcagacagaagttggcacttggaagcttctttgatgatggcccaggaatttataccagctgtagcaaaagtgggaagccaagcctttcctcccgactgcagagtgggatgaacttgcagatatgctttgtcaacgacagtggcagtgataaggacagtgatgctgatgacagtaagactgaaaccagcttggacacccccttgtctcccatgagcaaacagagttcttcctattctgatagagacactactgaagaggagtctgaatccttggatgacatggacttccttacaaggcaaaagaaattgcaagctgaagccaaaatggcccttgccatggccaaaccaatggccaaaatgcaagtagaagtggagaaacagaacaggaaaaagtctcccgtcgctgatcttctgccacacatgcctcatataagtgaatgcttgatgaaaagaagtttaaaacccaccgacctgagagacatgactattgggcagctacaagtgatagtcaatgatctccattcccagatagaaagcttgaatgaagagttggtccagctgcttctcatccgagatgagctgcacacagagcaggatgccatgctggtggacattgaagacttgaccagacatgctgaaagtcagcagaagcacatggcagagaaaatgcctgcaaagtgaaaagaagccattcaaccagagaacaagctagaatttattttgcttctgtggttgtaaaaatgctgttgctaaaggtggcgcagaaacaaatatcagtgttagtcattgataatgtctgaagcttaatgtccagtgattggcctttgcttcttaatttattttaattttttacttgtgccacttaatatcaggcattttaataaaatattgttacaaaaaatgtacagtactgacaccaccacaaatcatggttaataaaagagagtagttttaactttatttttatttgtttagagattttaagttggaacagtattttcccattgactacttttcattcttcactgtagttttaaagaagaactgtaaatgacggtgctatacaagtcaaaaaatacatgcctgcctcgtagtgaagttgtagctctccgtaatatgtatattttactcagttttcaacattttgtgaatgttgactacctgaagttcctttttagatgtgctattaacattctgttggattcagagggttccttgaaagttttatgtataaatatgtaaaataaaaattaaaacccg

SEQ ID NO: 878 - protein, 487 aa, Homo sapiens
MERSGQRVTTWDCDQGKHSDSDYREDGMDLGSDAGSSSSSSRASSQSNSTKVTPCSECKSSSSPGGSLDLVSALEDYEEPFPVYQKKVIDEWAPEEDGEEEEEEDERDQRGYRDDRSPAREPGDVSARTRSGGGGGRSATTAMPPPVPNGNLHQHDPQDLRHNGNVVVAGRPSCSRGPRRAIQKPQPAGGRRSGRGPAAGGLCLQPPDGGTCVPEEPPVPPMDWEALEKHLAGLQFREQEVRNQGQARTNSTSAQKNERESIRQKLALGSFFDDGPGIYTSCSKSGKPSLSSRLQSGMNLQICFVNDSGSDKDSDADDSKTETSLDTPLSPMSKQSSSYSDRDTTEEESESLDDMDFLTRQKKLQAEAKMALAMAKPMAKMQVEVEKQNRKKSPVADLLPHMPHISECLMKRSLKPTDLRDMTIGQLQVIVNDLHSQIESLNEELVQLLLIRDELHTEQDAMLVDIEDLTRHAESQQKHMAEKMPAK

SEQ ID NO: 879 - DNA, 1444 bp, Homo sapiens
tttcattttgggccgagctggaggcggcggggccgtcccggaacggctgcggccgggcaccccgggagttaatccgaaagcgccgcaagccccgcgggccggccgcaccgcacgtgtcaccgagaagctgatgtagagagagacacagaaggagacagaaagcaagagaccagagtcccgggaaagtcctgccgcgcctcgggacaattataaaaatgtggccccctgggtcagcctcccagccaccgccctcacctgccgcggccacaggtctgcatccagcggctcgccctgtgtccctgcagtgccggctcagcatgtgtccagcgcgcagcctcctccttgtggctaccctggtcctcctggaccacctcagtttggccagaaacctccccgtggccactccagacccaggaatgttcccatgccttcaccactcccaaaacctgctgagggccgtcagcaacatgctccagaaggccagacaaactctagaattttacccttgcacttctgaagagattgatcatgaagatatcacaaaagataaaaccagcacagtggaggcctgtttaccattggaattaaccaagaatgagagttgcctaaattccagagagacctctttcataactaatgggagttgcctggcctccagaaagacctcttttatgatggccctgtgccttagtagtatttatgaagacttgaagatgtaccaggtggagttcaagaccatgaatgcaaagcttctgatggatcctaagaggcagatctttctagatcaaaacatgctggcagttattgatgagctgatgcaggccctgaatttcaacagtgagactgtgccacaaaaatcctcccttgaagaaccggatttttataaaactaaaatcaagctctgcatacttcttcatgctttcagaattcgggcagtgactattgatagagtgatgagctatctgaatgcttcctaaaaagcgaggtccctccaaaccgttgtcatttttataaaactttgaaatgaggaaactttgataggatgtggattaagaactagggagggggaaagaaggatgggactattacatccacatgatacctctgatcaagtatttttgacatttactgtggataaattgtttttaagttttcatgaatgaattgctaagaagggaaaatatccatcctgaaggtgtttttcattcactttaatagaagggcaaatatttataagctatttctgtaccaaagtgtttgtggaaacaaacatgtaagcataacttattttaaaatatttatttatataacttggtaatcatgaaagcatctgagctaacttatatttatttatgttatatttattaaattatttatcaagtgtatttgaaaaatatttttaagtgttctaaaaataaaagtattgaattaaagtgaaaaaaaa

SEQ ID NO: 880 - protein, 253 aa, Homo sapiens
MWPPGSASQPPPSPAAATGLHPAARPVSLQCRLSMCPARSLLLVATLVLLDHLSLARNLPVATPDPGMFPCLHHSQNLLRAVSNMLQKARQTLEFYPCTSEEIDHEDITKDKTSTVEACLPLELTKNESCLNSRETSFITNGSCLASRKTSFMMALCLSSIYEDLKMYQVEFKTMNAKLLMDPKRQIFLDQNMLAVIDELMQALNFNSETVPQKSSLEEPDFYKTKIKLCILLHAFRIRAVTIDRVMSYLNAS

SEQ ID NO: 881 - DNA, 4928 bp, Homo sapiens
acagtagaaagtcagaaggtcacaaagcttgcagggtaagtgacacaacttgaaactgcttggccctctttaaaaagaaataataaaatgggagagaatgaagcaagtttacctaacacgtctttgcaaggtaaaaagatggcctatcagaaggtccatgcagatcaaagagctccaggacactcacagtacttagacaatgatgaccttcaagccactgcccttgacttagagtgggacatggagaaggaactagaggagtctggttttgaccaattccagctagacggtgctgagaatcagaacctagggcattcagagactatagacctcaatcttgattccattcaaccagcaacttcacccaaaggaaggttccagagacttcaagaagaatctgactacattacccattatacacgatctgcaccaaagagcaatcgctgcaacttttgccacgtcttaaaaatactttgcacagccaccattttatttatttttgggattttgataggttattatgtacatacaaattgcccttcagatgctccatcttcaggaacagttgatcctcagttatatcaagagattctcaagacaatccaggcagaagatattaagaagtctttcagaaatttggtacaactatataaaaatgaagatgacacggaaatttcaaagaagattaagactcagtggacctctttgggcctagaagatgtacagtttgtaaattactctgtgctgcttgatctgccaggcccttctcccagcactgtgactctgagcagcagtggtcaatgctttcatcctaatggccagccttgcagtgaagaagccagaaaagatagcagccaagacctgctctattcatatgcagcctattctgccaaaggaactctcaaggctgaagtcatcgatgtgagttatggaatggcagatgatttaaaaaggattaggaaaataaaaaacgtaacaaatcagatcgcactcctgaaattaggaaaattgccactgctttataagctttcctcattggaaaaggctggatttggaggtgttcttctgtatatcgatccttgtgatttgccaaagactgtgaatcctagccatgataccttcatggtgtcactgaatccaggaggagacccttctacgcctggttacccaagtgtcgatgaaagttttagacaaagccgatcaaacctcacctctctattagtgcagcccatctctgcatccctcgttgcaaaactgatctcttcgccaaaagctagaaccaaaaatgaagcgtgtagctctctagagcttccaaataatgaaataagagtcgtcagcatgcaagttcagacagtcacaaaattgaaaacagttactaatgttgttggatttgtaatgggcttgacatctccagaccggtatatcatagttggcagccatcatcacactgcacacagttataatggacaagaatgggccagtagtactgcaataatcacagcgtttatccgtgccttgatgtcaaaagttaagagagggtggagaccagaccgaactattgttttctgttcttggggaggaacagcttttggcaatattggctcatatgaatggggagaggatttcaagaaggttcttcaaaaaaatgttgtggcttatattagcctccacagtcccataagggggaactctagtctgtatcctgtagcatcaccatctcttcagcaactggtagtagagaaaaataatttcaactgtaccagaagagcccagtgcccagaaaccaatatcagttctatacagatacaaggtgatgctgattatttcatcaaccatcttggagttcccatcgtgcagtttgcttacgaggacatcaaaacattagagggtccaagttttctctccgaggcccgtttttctacacgagcaacaaaaattgaagaaatggatcgctctttcaaccttcatgaaaccattactaagctctcaggagaagtgattttgcaaattgccaacgaacctgttctgccctttaatgcacttgatatagctttagaagttcaaaacaaccttaaaggtgatcaacccaacactcatcaactgttagccatggcgtcacgcctgcgggagagtgctgaactttttcagtctgatgagatgcgacctgctaatgatcccaaggagagagcacccatccgcatccggatgctgaatgacattctccaagacatggagaaaagctttctggtaaagcaggcaccaccaggtttttatagaaacatcctctaccaccttgatgaaaagacaagccggttttcaatacttatagaggcttgggaacactgcaaaccccttgcatcaaatgagacccttcaagaagccctgtcagaggtgttgaacagcattaattcagctcaggtttacttcaaagcaggacttgatgtgttcaagagtgtcttggatgggaagaattgagaaaactctgagcatttttaaaagtttgtttacaattccacaagcaaaagctctaatttaaccagattttctgacattgaaggcttattttccccaatggctttttgacaagtataaagctattattacattgtattttttaaatgtaaatatagaaagaacattttgcacatttaatatttttcttatatctacatttctgaatatgtaaagcaagttattgaaataggacttaagaattacctattaaaaagaaatctgatatataaaaatatgtactattttaaggaaaaatttccaagaagttctggactatctttgttcctatggggagggcatataggaacacagtttattctctctgatagagctattaatgacttagtttctgtaaaagaaatggagagttgatatggttcagattaacttcactattaagtgttcaatatgaagaattcaagtattctgactgagtgattggttgacctaaaccactttgaatgtttctattttatgagatgaagtttctcttcttaacacaactagatgtagtaatacactggttatgaaattgtatttttttaagtattaatgaaaaaagagccataagcattccaggggaaaatctcaagggagctacatagagcaatttaaatgcaaatttttttcctaacaacttacaaggtgactagctttgaaacccctaatttgcctcagttgattttctaagaatttcaggagtgatgtatgtcttaagagggagaaaaaaatatttcttattactttttctcttgtttctgttggaaacactgaagcagggactctaaaatgaaagcatctcacattggttttctttcttgtatcttttctgaaactccttgctgtaaggcagctttctcagagtactatatatttccaacagtaaagtagcagagtttctctttgaaacccaaaatgtcttctaaagaatcaaatttctatttctgcctctgacaaaaagaacttactatgaaagaaatagttgttttatcaataaaagccccttaatattatgaagaaacttttcatattttttcttctttatccttaattgtgactaagatggaaatctagaaaatattcatgcttctaagtttctgcagtgttactgtaagagagtgtctcgtctacacttcagttcttctctcatgtggaaaactaagctttttatattgacattgccattgaatagctctagcaactattattattcccccaaaccctaaaattctacctattaggtgtcaggttaaagttctaatttatctttagaaatttatgtgaaaaatggttttcctatactggataaagcaattccccttaggaaacatagcctcagagtatttcatataaattttctctatctaattcaaacatatctccccatgatacaccgccagagtgacattgcagacagtctgtgtatgtttaaattttcactttttatggatgagcataaacctagtcttagtttaaaggcaaactaaagttgaggggaaataattaatcaatactgattaattgatttataaggttcaacactgtctaccctaaataatttttatatgctcaaggcaaagcagggaatagaggcaattagctagataattcaagcagaaatccattttcatcgaaattgcctgtgtgcacatatttttagatgaaaaatgaaactaccttacaatattatttttttaatcaatgtatttgtttgcaaacatttgccatgttgaagagtgtgtataggaaaggtctagaaataaataggcttgtgcatacctaggcattcatgctctttcttcctcttcagagatcatcagaaaagaggtgggaatacacaagcaggtgcatgtaagcccaaaagctagaaagccttatatttaaccaaaggttgatgtgttcattccagttattcacttacagatgaaactaaaacaaataaaggcaagctattatcagtttggtagttcgttattttagaacaaatttctaaatgaatttattcccataacctacaatagcactgagaacagaaaacatgtttcttcttcattttgtttaaagattgcgtacctaggtaagtcacactgtatagataaaaaccttcttctgtattcctcacctctaaattatatgttatttgctatttgaaaactgtagttaactatggttttttattagtctattaaaagatacgtggagatattaaattatacctaaagcagacgtccaacaaattctgtacatgctgctttacatctttgcaacaaacctcttaactagcagcattatttctatagtgtgattacctgagggtgcctccaaatgtatatcatttcactcccctcccctccccacccccaatagattcaaataaataaaatcctgagcaaattaaaaaaaaaaaaaaaaaa

SEQ ID NO: 882 - protein, 795 aa, Homo sapiens
MGENEASLPNTSLQGKKMAYQKVHADQRAPGHSQYLDNDDLQATALDLEWDMEKELEESGFDQFQLDGAENQNLGHSETIDLNLDSIQPATSPKGRFQRLQEESDYITHYTRSAPKSNRCNFCHVLKILCTATILFIFGILIGYYVHTNCPSDAPSSGTVDPQLYQEILKTIQAEDIKKSFRNLVQLYKNEDDTEISKKIKTQWTSLGLEDVQFVNYSVLLDLPGPSPSTVTLSSSGQCFHPNGQPCSEEARKDSSQDLLYSYAAYSAKGTLKAEVIDVSYGMADDLKRIRKIKNVTNQIALLKLGKLPLLYKLSSLEKAGFGGVLLYIDPCDLPKTVNPSHDTFMVSLNPGGDPSTPGYPSVDESFRQSRSNLTSLLVQPISASLVAKLISSPKARTKNEACSSLELPNNEIRVVSMQVQTVTKLKTVTNVVGFVMGLTSPDRYIIVGSHHHTAHSYNGQEWASSTAIITAFIRALMSKVKRGWRPDRTIVFCSWGGTAFGNIGSYEWGEDFKKVLQKNVVAYISLHSPIRGNSSLYPVASPSLQQLVVEKNNFNCTRRAQCPETNISSIQIQGDADYFINHLGVPIVQFAYEDIKTLEGPSFLSEARFSTRATKIEEMDRSFNLHETITKLSGEVILQIANEPVLPFNALDIALEVQNNLKGDQPNTHQLLAMASRLRESAELFQSDEMRPANDPKERAPIRIRMLNDILQDMEKSFLVKQAPPGFYRNILYHLDEKTSRFSILIEAWEHCKPLASNETLQEALSEVLNSINSAQVYFKAGLDVFKSVLDGKN

SEQ ID NO: 883 - DNA, 1210 bp, Homo sapiens
agcacgatggaatctggtggcttaaacctagctgtccacatttcactatctgaagagcagaaaatgtgttaataggagcctggtgagtggaggagactgaagatggagagagagcctggacctcaacatgagcatctggagccatttggcagcattaggctgtgaccgcttagagaaccgaaaggtgcagagctttaaaggattatggagtctgaagaccaaatgggatgatggagaacagctattcagtggtacaaatgtaaatgctcccaggcccgggcagaaaagagaaaacatttccatggaagaggaaacaggaaattccaacagatcagcaacagttggagtgctaacctgtcactggaatgggaaaaaaaatgctgtcgttgacacatcttttccttgtttttgacacaaattagaaacaccacctggaacacagctgtgacttgataaacaagtgaaacattctttggtgtggtgaggggaaaacaaatttctcaaaggacacgcaccatggtgtatgagaggacactggagcccagccagcatctgacatgctgaattcaaagtgcaggtgaaagtaggacaactgattcacaagctgggatgcctgtgttgttgtttgccagtgtgcgtgtgtgtgttttcctggcacccttcattcattccccagcacagttgacatcaggttggaagcagtgagttctgagggagactgctagaggacccaacttggagaatcaacgatctgcgatgaagataatgaagataaagacaatgtcaatgtcagcgtccaaaatcataaggaccctttaagaagcttccagagcagaagtgactgtgcaagaagggccaataaagtctaggcaatgcacgaccaggcgcggtcgctcacgcctgtaatcccagcactttgggaggccgaggtggttggattacctgaggttaggagtttgagaccagcctgaccaacatagtttcaccccatctctactaaaaaaaaaaaaaaaaacaaaacaaaagttagccaggtgtggtgctgcacacctgtaatcccagctactctggaagctgaggcaggagaatcgcttgaacccaggaggcggaggtggcagtgagctgagattgcaccgctgcactccagcctgggcgacagagtgagactctgtctcaaaaataaataaataaataaataataaagtctagg

SEQ ID NO: 884 - protein, 94 aa, Homo sapiens [sequence omitted]

SEQ ID NO: 885 - DNA, 2832 bp, Homo sapiens
cttccgcttcctgtaccaccctgctcaagtagcggacacggaacagggaactatcagcccgtcggcctccgggccctgcattctctagccatggaccgggaccttttgcggcagtcgctaaattgccacgggtcgtctttgctctctctacttcggagcgaacagcaggacaatccacacttccgtagcctcctggggtcggccgccgagccagcccggggcccgccgccccagcacccgttgcagggcagaaaagagaagagagttgacaacatcgagatacagaaattcatctccaaaaaagcggatctgctttttgcactttcctggaaatcagatgcacctgcaacttctgaaattaatgaagacagtgaagatcattatgcaatcatgccacctttagagcaattcatggagatacctagtatggatcggagagagctgtttttccgagatattgagcgtggtgatatagtgattggaagaattagttctattcgggaattcggttttttcatggtgttgatctgtttaggaagtggtatcatgagagatatagcccacttagaaatcacagctctttgtcccttaagagatgtgccttctcacagtaaccatggggatcctttatcatattaccaaactggtgacatcattcgagctggaatcaaggatattgacagataccatgaaaagctagcagtatctctgtatagctcttctcttccaccacacctatctggtattaaattaggtgtaattagctctgaagagcttcctttatactacaggagaagtgttgagctaaatagcaattctttggagtcctatgaaaatgtcatgcagagttccttgggatttgttaatccaggagtagttgaattccttctagaaaaactaggaatagatgaatctaatccaccatctttaatgagaggcctacaaagcaaaaatttctctgaagatgattttgcttctgcattgagaaaaaaacaatccgcatcttgggctttaaaatgtgtgaagatcggagttgactattttaaagttggacgccatgtggatgctatgaatgaatacaataaagctttggaaatagacaaacaaaacgtggaagctttggtagctcgtggagcattatatgcgacaaaaggaagtttgaacaaagcaatagaagattttgagcttgcattagaaaactgtccaactcacagaaatgcaagaaaatacctctgccagacacttgtagagagaggaggacagttagaagaagaagaaaagtttttaaatgctgaaagttactataagaaagccttggctttggatgagacttttaaagatgcagaggatgctttgcagaaacttcataaatatatgcagaaatctttggaattaagagaaaaacaagctgaaaaggaagaaaagcagaaaacaaagaaaatagaaacaagtgcagaaaagttgcgtaagctcttaaaagaagagaagaggctaaagaagaaaagaagaaaatcaacttcttcttcaagtgtttcttctgctgatgaatcagtgtcttcatcatcatcctcttcctcttctggtcacaaaaggcataagaaacataagaggaaccgttcagagtcttctcgcagttccagaaggcattcatctagggcatcctcaaatcagatagatcagaataggaaagatgagtgctacccagttccagctaatacttcagcatcttttcttaaccataaacaagaagtggagaaactactggggaagcaggataggttacagtatgaaaagacacagataaaagagaaagatagatgccctctctcttcatcttcacttgaaataccggatgattttggaggtaggtctgaagatccaagagatttttataacagctataaaacccaagcaggtagtagcaaaacagaaaagccatataaatcagaaagacatttttccagtagaagaaattcctcagattccttctgtaggaattcagaggacaagatttatggttataggagatttgaaaaggatatagagggaagaaaagagcactatagaaggtgggaaccaggttctgtgaggcattctacctcaccagcaagctcagaatactcttggaagtcagttgagaaatacaaaaaatacgctcactctggatcacgtgatttcagtagacatgagcaaagataccgtttaaatacaaatcaaggagaatatgaaagagaggacaattatggggaggatatcaaaacagaggttccagaagaagatgcactaagtagcaaagaacactcagaaagcagtgttaagaaaaatttacctcagaatttactgaatatatttaatcagatagctgaatttgaaaaagaaaaaggaaataagtcaaaaaattaatacaccaaggatatcggcaccattacacaaaatgccattaagtgaagtttttggttgtattagtcataacagttgagtgcagaaatctctgcttctaaaattatttgtagagattacaggaaacaaatgcttttaagtaagtttctctcaaattttgtttcagttctaggtcccttgtcacagcttggtttttagactttttatgtatatgtttatgtacagtatattactcttgacagtttgaatttcttcacctaaagataattctctgaaagtactgtttcttcattctattgcggtatatgagaattcctgggtgcatcttattctgctgtttgagagaaaaatttgtgcattgaacacttggatcatttttataaaaattaatttcattttcttttctgttaaattaaaaatcgtcagcttttg

SEQ ID NO: 886 - protein, 770 aa, Homo sapiens
MDRDLLRQSLNCHGSSLLSLLRSEQQDNPHFRSLLGSAAEPARGPPPQHPLQGRKEKRVDNIEIQKFISKKADLLFALSWKSDAPATSEINEDSEDHYAIMPPLEQFMEIPSMDRRELFFRDIERGDIVIGRISSIREFGFFMVLICLGSGIMRDIAHLEITALCPLRDVPSHSNHGDPLSYYQTGDIIRAGIKDIDRYHEKLAVSLYSSSLPPHLSGIKLGVISSEELPLYYRRSVELNSNSLESYENVMQSSLGFVNPGVVEFLLEKLGIDESNPPSLMRGLQSKNFSEDDFASALRKKQSASWALKCVKIGVDYFKVGRHVDAMNEYNKALEIDKQNVEALVARGALYATKGSLNKAIEDFELALENCPTHRNARKYLCQTLVERGGQLEEEEKFLNAESYYKKALALDETFKDAEDALQKLHKYMQKSLELREKQAEKEEKQKTKKIETSAEKLRKLLKEEKRLKKKRRKSTSSSSVSSADESVSSSSSSSSSGHKRHKKHKRNRSESSRSSRRHSSRASSNQIDQNRKDECYPVPANTSASFLNHKQEVEKLLGKQDRLQYEKTQIKEKDRCPLSSSSLEIPDDFGGRSEDPRDFYNSYKTQAGSSKTEKPYKSERHFSSRRNSSDSFCRNSEDKIYGYRRFEKDIEGRKEHYRRWEPGSVRHSTSPASSEYSWKSVEKYKKYAHSGSRDFSRHEQRYRLNTNQGEYEREDNYGEDIKTEVPEEDALSSKEHSESSVKKNLPQNLLNIFNQIAEFEKEKGNKSKN

SEQ ID NO: 887 - DNA, 4535 bp, Homo sapiens
tacttttgtattgtttaattttttttaacagttgtcttgttttttcttctgcagtgaaaataatggtgacaagaagcccactgcctgattcacataagcaaggcatgctgcagggaagacagggttcttattaatatttcctttcatgtgcttacatatgagttacagttgctaatcctttcccacagtttagcacctagttaaaagaaagggcttcggaatcaggtaagtgtagattaaagttataacggcaaattgctgaacctttggaagcctcggtttttccacctggaaaatggatttttatcttacaggactgtcgtgaggattgatgagctaacattcctaaatcagggagtttgaagtctggcccagggtattttcctcctttcctgaaataatgtgtagttctgaccaagtgagaagaatcataagaatatgggattttgaaaaacatgaaaacatcctaagaaataccaggaaggagtcccacagtgaagcacaaatgaaactcaagatgactgcctaaaataagaaatcatggatcttaggagaaagggggcaaggaagtaaatcaaaggacaaagctgaagaccaagtggaccgaaaagaagatggaatacattttcccaaacactggtgttctctggagttggcttatcaacatcttgtgcaatcggaggatcgtgtggtttacttccagccagctgccccgtggtcctccagccagctccgggggccacagttttcacacgctccgggagcgatccgagagccgccttttcgtggaaagttacgctgccgcctggcaacccccgggaacgtcgggaggggcaagttgctgctcatccctcagtgctcaagtcatgagtagcgaattcctggctgagctgcactgggaggatgggttcgccatcccggtggcgaacgaggagaacaagctactggaagatcagttgtcaaagctgaaggatgaaagagcaagcttgcaagatgagttacgtgagtatgaagagcgaattaattctatgacttctcacttcaaaaatgttaagcaagagctctcaattacacagtctctttgcaaagcaagggagcgtgagactgaaagtgaagaacattttaaggccattgctcaaagagaattgggacgagtgaaagatgaaattcaacggctggaaaatgagatggcttcaatactggaaaagaaaagtgataaagaaaatggcatatttaaagccactcaaaaattggatggtttgaaatgtcaaatgaactgggaccagcaagcattggaggcctggttagaagaatcagctcataaagatagtgatgctctcactctccagaagtatgcacaacaagatgataataaaatcagggcactgactctgcaattagaaagactaactttggaatgtaatcagaaaagaaagatacttgacaacgaacttacagagactataagcgcacagttagaattggataaagcagcacaagattttcgtaagattcataatgaaagacaagaactcattaaacaatgggagaacacaatagaacagatgcagaagagggatggagacatagataactgtgctttggaattagcaaggataaagcaggaaacgagagaaaaagaaaatttggttaaagaaaagatcaagtttttggaaagtgagattgggaataacacagagtttgagaaaagaatttctgtggctgatcgtaaacttttaaaatgtagaacggcatatcaggaccatgaaactagtagaattcagctgaagggtgagctggattctttaaaagccactgtgaatagaacttccagtgatttagaagctctgaggaaaaatatttccaagataaagaaggacattcatgaagaaacagcaaggttacaaaaaactaaaaatcataatgagataatacaaacaaaattaaaggagataactgagaaaaccatgtctgtagaagagaaagctactaatttggaagatatgctaaaggaggaggaaaaagatgtgaaggaagtagatgttcaactgaacctcataaaaggtgtgctgtttaagaaagctcaggagttacagactgagacaatgaaagaaaaagctgttttatcagaaattgaaggaactcgttcctctctgaaacatctcaaccatcagttacaaaaactggattttgaaaccttgaagcagcaagaaattatgtacagccaggattttcacattcaacaagtggaacggagaatgtcacggttaaagggagaaattaattcagaagaaaaacaagcgcttgaagcaaaaattgttgaacttaggaagtctttggaagagaaaaaatctacatgtggccttttggaaacacagatcaagaagcttcataatgatctttattttatcaagaaggcacatagtaaaaacagtgatgaaaaacagtcccttatgaccaaaataaatgaactaaaccttttcatcgacagatcagagaaagaacttgataaagccaaaggttttaagcaggatttgatgatagaggacaatcttttaaaacttgaagttaagcgtactcgagaaatgcttcacagtaaggcagaagaagttctttccctagaaaaaagaaaacagcaattatacacagcaatggaagagcgaactgaagaaatcaaggttcataaaacaatgcttgcgtcacaaataagatatgttgatcaagaacgggaaaacataagcactgagtttcgcgagcggctaagtaaaattgagaagctgaagaatagatatgaaattctgactgttgttatgctgcctcctgaaggagaagaggagaaaacacaggcctattatgtaataaaggtgatgagtatgagctaaaaattcaactagaagaacaaaaaagagctgttgatgaaaaatacagatacaaacaaagacaaatcagagaacttcaagaagacatccagagcatggaaaatacattagatgttatagaacatttggcaaataatgttaaagaaaagttatcagagaagcaggcttattcatttcaactaagtaaagaaacggaggagcagaagccaaaattagaaagagtgaccaaacagtgtgcaaaactcacaaaggaaatccgtcttttgaaagacacaaaagatgaaacaatggaagaacaagacatcaaacttcgtgaaatgaaacagtttcacaaagttattgatgaaatgttagttgatatcatagaagaaaatactgagatccgtattatccttcaaacatactttcaacagagtgggttagaactacctacagctagcacaaaaggcagtcgtcagagctctagatctccttcacatacttcactatcagcaaggtcatctaggagtacaagtacatctacttctcagtcttcaattaaagtactggagcttaaattcccggcctcctcttcactagtaggcagcccttctaggccatctagtgctagtagtagctctagtaatgttaagagcaaaaagagcagcaaataaacattttaatctcttctgaaaaagttgtaaacacaaaaacaaaaatatactttaaaatacaaaacgacccaacacattttatctagtggaaagtgtaaaaacttagtggtaagtgtaaaaactgatagttttaaaaaaaaaggaacgttctcattttctctactgttttcttcatactgaagaaattaatagcagattcttgacaaggctacatgttatacaagcataggaaaaatgctgtatttcactgtaattctgatgttcgtagtgttagaaaatagtttgcttcattatttcacgaaactacactcacttctaatgtaacaatctttcaagaagaaatttctaaagatttactgtactattatgagcgtattgcaatgtgaaaatctcatttaccctacaagacaccaaaattaggttttctttattcaaagtaactatttctcagacttttggggagaaaaattgttaaaggcagtttcttcttttgctataatttttaaccaaaaaatagcatcaacccctacccaccccacccccccaaaaaaaaaccggtaagagaaacactgtatatcaattttaaaatgcagcataaatttagaaaaatcacttctgaccttgaaataaatcacttctgaccttgaaataaacgcattaaagatttgctttcagatacagccaaccaagtataaacaattttgaaattttcttgatttaataaacgatttaatgaaagctaggtatgacttgatttgcaatagaaatttcatttacagttggaggtagactgccaaatgtagtagtttttccagttaacacttcattataacatgtgcccaacactttgtactcttggaatagagtgtggaatattataaaactggattttaaataaatgtattagaattcacgaatgtacatgtgtctccttcaaaccttgggaaaaaatgctcattacaactgtcattattttagaactgttgtttgtacttctttctga

SEQ ID NO: 888 - protein, 755 aa, Homo sapiens
MEYIFPNTGVLWSWLINILCNRRIVWFTSSQLPRGPPASSGGHSFHTLRERSESRLFVESYAAAWQPPGTSGGASCCSSLSAQVMSSEFLAELHWEDGFAIPVANEENKLLEDQLSKLKDERASLQDELREYEERINSMTSHFKNVKQELSITQSLCKARERETESEEHFKAIAQRELGRVKDEIQRLENEMASILEKKSDKENGIFKATQKLDGLKCQMNWDQQALEAWLEESAHKDSDALTLQKYAQQDDNKIRALTLQLERLTLECNQKRKILDNELTETISAQLELDKAAQDFRKIHNERQELIKQWENTIEQMQKRDGDIDNCALELARIKQETREKENLVKEKIKFLESEIGNNTEFEKRISVADRKLLKCRTAYQDHETSRIQLKGELDSLKATVNRTSSDLEALRKNISKIKKDIHEETARLQKTKNHNEIIQTKLKEITEKTMSVEEKATNLEDMLKEEEKDVKEVDVQLNLIKGVLFKKAQELQTETMKEKAVLSEIEGTRSSLKHLNHQLQKLDFETLKQQEIMYSQDFHIQQVERRMSRLKGEINSEEKQALEAKIVELRKSLEEKKSTCGLLETQIKKLHNDLYFIKKAHSKNSDEKQSLMTKINELNLFIDRSEKELDKAKGFKQDLMIEDNLLKLEVKRTREMLHSKAEEVLSLEKRKQQLYTAMEERTEEIKVHKTMLASQIRYVDQERENISTEFRERLSKIEKLKNRYEILTVVMLPPEGEEEKTQAYYVIKVMSMS

SEQ ID NO: 889 - DNA, 4239 bp, Homo sapiens
ctgtgggcctgggagctgcctctgaggaacacgccgcagggccaggcatgtgaggtctctgcgggtcatggagaacctccctgccgtgaccactgaggagccgacccccatggggaggggtcctgtgggaccctcaggaggtggcagcacccgggaccaggtccggactgtggtcatgaggccctctgtgagctgggagaaagcggggcccgaggaggccaaggcgccggtgagaggcgacgaggctcctcctgcccgcgtggctgggcctgctgctgggacccctccctgccagatgggggtttatcccacagacctgaccctgcagctgctggctgtgcggaggaagagcagactgcgggaccccggcctacagcagaccctccggggccagctccgcctgctggagaatgatagccgggagatggcccgcgtgcttggggaattatcagccaggctgctgtccatccacagtgaccaggaccggatcgtggtgacgtttaagacttttgaagaaatctggaagttttccacctaccatgctctcggcttcactcatcactgcctggcaaacctgctcatggaccaggccttctggctgctcttgcccagtgaggaggaggagacggccatccaagtccatgtggatgagaacgccttaaggctgacccacgagagcctcctcatccaagaagggcccttctttgtcctgtgtcctgaccaccatgtgagagtgatgacgggtccccgggatgcaggaaatggcccccaggccctcaggcaggcttcgggggcaccccagggagaggcggccccggaaacagactcttcaccgccgagccccagcgtgtcctccgaggaggtggcagtggcggccgccccggagcctttgattccatttcatcagtgggctcttaggatcccccaggaccccatcgacgatgccatgggtggccctgtgatgcccggcaacccgctgatggctgtgggcctggcctcggcattggcagacttccagggctcggggcccgaagagatgaccttccgaggtggcgacctcatcgagatccttggggcgcaggtgcccagcctgccctggtgcgtgggccgacacgcagcctcgggccgggtggggtttgtgcggagcagcctcatcagcatgcagggccccgtgtccgagttggaaagtgcgatttttctcaatgaggaagaaaagtcattcttcagcgagggctgcttttctgaggaggatgccaggcagttgctgaggcggatgtcgggcaccgatgtctgcagcgtgtacagcctggactcagtagaggaagctgagaccgagcagccgcaggaaaaagaaatacctccaccttgcctgagcccggagccacaggagaccttgcagaaggtgaagaatgttctggaacaatgcaagacctgcccaggctgcccccaggagccagcgtcctggggtctctgtgcggcatccagcgacgtgagcttgcaggaccccgaggagccctccttctgcttggaagccgaggacgactgggaggacccagaggccctgagctcactgctgctgttcctgaacgcccctgggtacaaggccagcttccgtggcctgtacgatgtggcgctgccgtggctgagcagcgtgttccgcagcttcagcgacgaggaggagctgactgggcgcctggcacaggcccggggggcggccaagaaagctggcctcctcatggccctggccaggctctgcttcctcctggggcggctgtgcagcaggaggctcaagctgtcccaggcccgggtgtactttgaggaagcgctgggggccctggagggcagcttcggggacctgttcctggtggtggctgtgtacgccaacctggccagcatttaccggaagcagaagaaccgggagaagtgtgcacaggtggtgcccaaagccatggccctgctcctggggacgcccgaccacatctgcagcaccgaggcggagggggagctcctgcagctggcgctgcggcgggcggtgggtggccagagcctgcaggccgaggcccgggcctgcttcctgctggccaggcaccacgtgcacctcaagcagcccgaggaggccctgcccttcctagagcggctgctgcttttgcacagggactcgggagccccagaggccgcgtggctctcagactgctacctactcctggctgacatctacagccgcaagtgcctgccccacctggtgctgagctgtgtcaaggtggcctcattgcggacacggggctcgctggccggctcgctgaggagtgtgaacctggtgctccagaacgccccccagccccacagcctccctgcccaaacttcccactacctcaggcaagcgctggcctccctgaccccgggcacaggccaggcgctgcgcggccccctctacaccagcttggcccagctgtacagccaccatggctgccacggcccggccatcaccttcatgacgcaggcagtggaagccagtgctattgccggagtccgtgccatcgtggaccacctggtggccctggcctggctgcacgtgcttcatgggcagagcccggtggccctggacatcctgcagtctgtccgggatgcagtggtggccagcgaggaccaggagggcgtgattgccaacatggtggccgtggctctgaagaggacgggccggacgaggcaggcagctgagagctactaccgcgccctgcgggtggctcgggacctgggccagcaaaggaaccaggcagtggggctggccaacttcggggccctgtgcctgcatgcgggtgccagcaggctggcccagcactacctcctggaggccgtgcggctgttctcgaggctgccccttggggagtgtggccgggacttcacccacgtgctcctgcagctgggccatctctgcacccgccagggcccggcccagcagggcaagggctactacgagtgggcccttctggtcgccgtggagatgggccacgtggagagccagctgcgggccgtccagcggctgtgccacttctacagcgccgtcatgcccagcgaggcccagtgtgtcatctaccatgagctccagctctccccggcctgcaaggtggccgacaaggtgctggaggggcagctcctggagaccatcagccagctctacctgtccctgggcaccgagcgggcctacaaatccgcactggactacaccaaacgaagtctggggattttcattgacctccagaagaaagagaaggaggcgcatgcctggctgcaagcagggaagatctattacatcttgcggcagagcgagctggtggacctctacatccaggtggcacagaacgtggccctgtacacaggcgaccccaacctggggctggagctgtttgaggcggctggagacatcttcttcgacggggcctgggagcgggagaaagctgtgtccttctaccgggaccgggccctgcccctggcagtgactacgggcaaccgcaaggcggagctgcggctgtgcaacaagctggtggcactgctggccacgctggaggagccccaggagggcttggagtttgcccacatggccctagcactcagcatcaccctgggggaccggctgaacgagcgcgtggcctaccaccggctggccgccctgcaacaccgactgggccatggcgagctggcagagcacttctacctcaaggccctgtcgctctgcaactcgccgctggagtttgacgaggagaccctctactacgtgaaggtgtacctggtgctcggtgacatcatcttctacgacctgaaggacccgtttgatgcagccgggtactaccagctggcgctggcggccgccgtggacctgggcaacaagaaggcacagctgaagatctacacgcggctggccaccatctaccacaacttcctcctggaccgtgagaagtcgctcttcttctaccagaaggccaggaccttcgccacagagctcaacgtccgcagggtcaacctgcctcctctgccactctgcgggtgggccccctggttggcccccagccaccctcgctgaggacagcatccaagggagtgggttttgtgcaagggctgggggtctcctgcctctcctggtgtcgccggtggctcattttctggcaaatggaggcacgaacgcaggggccaaatagcaataaatgggttttgttttttttttgcaataaaaaaaaaaaaaaa

SEQ ID NO: 890 - protein, 1336 aa, Homo sapiens
MENLPAVTTEEPTPMGRGPVGPSGGGSTRDQVRTVVMRPSVSWEKAGPEEAKAPVRGDEAPPARVAGPAAGTPPCQMGVYPTDLTLQLLAVRRKSRLRDPGLQQTLRGQLRLLENDSREMARVLGELSARLLSIHSDQDRIVVTFKTFEEIWKFSTYHALGFTHHCLANLLMDQAFWLLLPSEEEETAIQVHVDENALRLTHESLLIQEGPFFVLCPDHHVRVMTGPRDAGNGPQALRQASGAPQGEAAPETDSSPPSPSVSSEEVAVAAAPEPLIPFHQWALRIPQDPIDDAMGGPVMPGNPLMAVGLASALADFQGSGPEEMTFRGGDLIEILGAQVPSLPWCVGRHAASGRVGFVRSSLISMQGPVSELESAIFLNEEEKSFFSEGCFSEEDARQLLRRMSGTDVCSVYSLDSVEEAETEQPQEKEIPPPCLSPEPQETLQKVKNVLEQCKTCPGCPQEPASWGLCAASSDVSLQDPEEPSFCLEAEDDWEDPEALSSLLLFLNAPGYKASFRGLYDVALPWLSSVFRSFSDEEELTGRLAQARGAAKKAGLLMALARLCFLLGRLCSRRLKLSQARVYFEEALGALEGSFGDLFLVVAVYANLASIYRKQKNREKCAQVVPKAMALLLGTPDHICSTEAEGELLQLALRRAVGGQSLQAEARACFLLARHHVHLKQPEEALPFLERLLLLHRDSGAPEAAWLSDCYLLLADIYSRKCLPHLVLSCVKVASLRTRGSLAGSLRSVNLVLQNAPQPHSLPAQTSHYLRQALASLTPGTGQALRGPLYTSLAQLYSHHGCHGPAITFMTQAVEASAIAGVRAIVDHLVALAWLHVLHGQSPVALDILQSVRDAVVASEDQEGVIANMVAVALKRTGRTRQAAESYYRALRVARDLGQQRNQAVGLANFGALCLHAGASRLAQHYLLEAVRLFSRLPLGECGRDFTHVLLQLGHLCTRQGPAQQGKGYYEWALLVAVEMGHVESQLRAVQRLCHFYSAVMPSEAQCVIYHELQLSPACKVADKVLEGQLLETISQLYLSLGTERAYKSALDYTKRSLGIFIDLQKKEKEAHAWLQAGKIYYILRQSELVDLYIQVAQNVALYTGDPNLGLELFEAAGDIFFDGAWEREKAVSFYRDRALPLAVTTGNRKAELRLCNKLVALLATLEEPQEGLEFAHMALALSITLGDRLNERVAYHRLAALQHRLGHGELAEHFYLKALSLCNSPLEFDEETLYYVKVYLVLGDIIFYDLKDPFDAAGYYQLALAAAVDLGNKKAQLKIYTRLATIYHNFLLDREKSLFFYQKARTFATELNVRRVNLPPLPLCGWAPWLAPSHPR

SEQ ID NO: 891 - DNA, 2585 bp, Homo sapiens
gggagctggtccctgcgctccctgcgccctggggatgcccctgccgccctgacgcccgccagcctgagccaccggcgcatgtgaccgcgcgtccgccccagtcccatccgtaggcgcccggcgcccggccccgcagcggcctcgttgtccccgccggcccccgcccggtctcccgcgctgccacccgccgccggccctgccgccatgcaggcgcgagcgctgctcctggccgcgttggccgcgctggcgctggcccgggagccccctgcggcgccgtgtcccgcgcgctgcgacgtgtcgcggtgtcccagcccccgctgccccggcggctacgtgcccgacctctgcaactgctgcctggtgtgcgccgccagcgagggcgagccctgtggcggccctctggactcgccttgcggcgagagcctggagtgcgtgcgcggcctatgccgctgccgctggtcgcacgccgtgtgtggcaccgacgggcacacctatgccaacgtgtgcgcgctgcaggcggccagccgccgcgcgctgcagctctccgggacgcccgtgcgccagctgcagaagggcgcctgcccgttgggtctccaccagctgagcagcccgcgctacaagttcaacttcattgctgacgtggtggagaagatcgcaccagccgtggtccacatagagctcttcctgagacacccgctgtttggccgcaacgtgcccctgtccagcggttctggcttcatcatgtcagaggccggcctgatcatcaccaatgcccacgtggtgtccagcaacagtgctgccccgggcaggcagcagctcaaggtgcagctacagaatggggactcctatgaggccaccatcaaagacatcgacaagaagtcggacattgccaccatcaagatccatcccaagaaaaagctccctgtgttgttgctgggtcactcggccgacctgcggcctggggagtttgtggtggccatcggcagtcccttcgccctacagaacacagtgacaacgggcatcgtcagcactgcccagcgggagggcagggagctgggcctccgggactccgacatggactacatccagacggatgccatcatcaactacgggaactccgggggaccactggtgaacctggatggcgaggtcattggcatcaacacgctcaaggtcacggctggcatctcctttgccatcccctcagaccgcatcacacggttcctcacagagttccaagacaagcagatcaaagactggaagaagcgcttcatcggcatacggatgcggacgatcacaccaagcctggtggatgagctgaaggccagcaacccggacttcccagaggtcagcagtggaatttatgtgcaagaggttgcgccgaattcaccttctcagagaggcggcatccaagatggtgacatcatcgtcaaggtcaacgggcgtcctctagtggactcgagtgagctgcaggaggccgtgctgaccgagtctcctctcctactggaggtgcggcgggggaacgacgacctcctcttcagcatcgcacctgaggtggtcatgtgaggggcgcattcctccagcgccaagcgtcagagcctgcagacaacggagggcagcgcccccccgagatcaggacgaaggaccaccgtcggtcctcagcagggcggcagcctcctcctggctgtccggggcagagcggaggctgggcttggccaggggcccgaatttccgcctggggagtgttggatccacatcccggtgccggggagggaagcccaacatccccttgtacagatgatcctgaaagtcacttccaagttctccggatattcacaaaactgccttccatggaggtcccctcctctcctagcttcccgcctctgcccctgtgaacacccatctgcagtatcccctgctcctgcccctcctactgcaggtctgggctgccaagcttcttcccccctgacaaacgcccacctgacctgaggccccagcttccctctgccctaggacttaccaagctgtagggccagggctgctgcctgccagcctggggtccctggaggacaggtcacatctgatccctttggggtgcgggggtggggtccagcccagagcaggcactgagtgaatgccccctggctgcggagctgagccccgccctgccatgaggttttcctccccaggcaggcaggaggccgcggggagcacgtggaaagttggctgctgcctggggaagtttttcctccccaaggcggccatggggcagcctgcagaggacagtggacgtggagctgcggggtgtgaggactgagccggcttccccttcccacgcagttttgggatgcagcagccgctcgcatggaagtgccgcccagaggcatgcaggctgctgggcccccccccctcatccagggaacgagtgtgtctcaaggggcatttgtgagctttgctgtaaatggattcccagtgttgcttgtactgtatgtttctctactgtatggaaaataaagtttacaagcacacggttttcaaaaaaaaaaaaaaaaaaaaaaaaaaaaaaaaaaaaaaaaaaaaaaaaa

SEQ ID NO: 892 - protein, 453 aa, Homo sapiens
MQARALLLAALAALALAREPPAAPCPARCDVSRCPSPRCPGGYVPDLCNCCLVCAASEGEPCGGPLDSPCGESLECVRGLCRCRWSHAVCGTDGHTYANVCALQAASRRALQLSGTPVRQLQKGACPLGLHQLSSPRYKFNFIADVVEKIAPAVVHIELFLRHPLFGRNVPLSSGSGFIMSEAGLIITNAHVVSSNSAAPGRQQLKVQLQNGDSYEATIKDIDKKSDIATIKIHPKKKLPVLLLGHSADLRPGEFVVAIGSPFALQNTVTTGIVSTAQREGRELGLRDSDMDYIQTDAIINYGNSGGPLVNLDGEVIGINTLKVTAGISFAIPSDRITRFLTEFQDKQIKDWKKRFIGIRMRTITPSLVDELKASNPDFPEVSSGIYVQEVAPNSPSQRGGIQDGDIIVKVNGRPLVDSSELQEAVLTESPLLLEVRRGNDDLLFSIAPEVVM

SEQ ID NO: 893 - DNA, 2415 bp, Homo sapiens
cggatcctttcctgcttttggtttccctggcaggggttgaactgtggagtgtgtgggctcttatcacgcgatggcatccactgtggaaggaggcgacacagctctgctcccagaattccccagggggcccctcgatgcctaccgagcaagagcgtccttcagctggaaggacgtggcgctgttcacggaaggggagggcaatgtccgctttaagaaaaccatcttctcagctcttgagaatgaccctcttttcgctcgttcccctggagccgacctgtccttggagaagtatcgcgagctgaacttccttcgatgcaagcggatcttcgagtatgacttcctcagtgtcgaagcaatgttcaagagccctctgaaggtccccgccttgattcagtgcctgggcatgtatgactcttctctggctgccaagtacctcctccatagcttggtttttggatcagcagtttacagttctggttctgaaagacatctcacatatattcaaaagatcttcaggatggagatttttggatgttttgctctgaccgaattaagccacggcagtaataccaaggccattcgcacaactgcccactacgatcctgccactgaggaattcatcatacattcccctgatttcgaagctgccaagttttgggttggcaacatgggcaagacagccactcacgcggtggtgtttgctaagctgtgtgtgccaggggaccagtgccatgggctgcatccctttatcgtgcagatccgggacccgaagacccttcttcccatgcctggagtgatggttggcgacataggaaaaaaactcgggcagaacggtctagataatggtttcgccatgttccacaaggtcagagttcctcgccagagccttctgaaccggatgggagacgtcacccccgagggcacctatgtcagcccctttaaggacgtcaggcagcgctttggagcgtccctggggagcctgtcctcgggccgggtctccatcgtgagcctggccatccttaacctaaagctggccgtggccatcgctcttcgcttctcagccactcggcgtcagtttggacccacagaggaggaggaaataccagtgcttgagtatccaatgcagcaatggcgcttgcttccatatctggcagctgtctacggcttagaccatttctccaagtcgctcttcctggacctggtggagctccagcgaggacttgcatcgggagaccgcagcgccagacaggcagagcttggacgtgagatccacgccctggcatcggccagcaagcccctggcctcgtggaccacccagcaaggaattcaggaatgccgggaggcgtgtggaggacacggctatctggccatgaaccggttgggtgtccttagagatgacaacgatcccaactgcacatacgaaggtgacaacaacatcctgctgcagcagacaagcaactatttgctgggtctcctggcacaccaggtccacgatggagcttgcttccgcagtccgctgaagtcagtggactttctggacgcctatcccggcatccttgaccagaagtttgaggtctccagtgttgccgactgcttggactctgcagtcgccctggcagcatacaagtggctggtttgctacctgctccgagagacttatcaaaaattaaaccaagagaaaagatcaggaagcagtgactttgaagcaaggaacaaatgccaggtgtcccacggccgtccgttggcgctggccttcgtggagctcacggtggtccagaggttccacgagcacgtgcaccagccttccgtgccgccctcgctgcgggccgtgctggggcggctcagtgctctgtacgccctgtggtccctgaagcgccacgcggccctgctctaccgaggaggatacttctccggtgagcaggcgggagaagtgttggagagcgccgtcctggctttgtgttcccagctgaaagacgatgcagttgccctggtagacgtgatcgctcctcctgactttgttctggactcaccgattggcagagccgacggcgagctctacaaaaacctctggggcgctgtcctgcaggaaagcaaggtgttggagcgggcatcctggtggccagagttttctgtgaacaaacctgtcataggaagtctgaaatcgaagctctagtgggactggcacattcagccaagtctaatgaaacgaagggaactaatcagacgtggacctcaacttctgattccagaacacgccggagattgctgctgctttctgagcccgcacctgtgcgcctaaactgctgattggcctcaacttgcccaggcggacgggagggaggcacccggccggctggacctaatctgggatcgcggtgatttgcaccgtggaaaagaaattgcagattgatcatg

SEQ ID NO: 894 - protein, 700 aa, Homo sapiens
MASTVEGGDTALLPEFPRGPLDAYRARASFSWKDVALFTEGEGNVRFKKTIFSALENDPLFARSPGADLSLEKYRELNFLRCKRIFEYDFLSVEAMFKSPLKVPALIQCLGMYDSSLAAKYLLHSLVFGSAVYSSGSERHLTYIQKIFRMEIFGCFALTELSHGSNTKAIRTTAHYDPATEEFIIHSPDFEAAKFWVGNMGKTATHAVVFAKLCVPGDQCHGLHPFIVQIRDPKTLLPMPGVMVGDIGKKLGQNGLDNGFAMFHKVRVPRQSLLNRMGDVTPEGTYVSPFKDVRQRFGASLGSLSSGRVSIVSLAILNLKLAVAIALRFSATRRQFGPTEEEEIPVLEYPMQQWRLLPYLAAVYGLDHFSKSLFLDLVELQRGLASGDRSARQAELGREIHALASASKPLASWTTQQGIQECREACGGHGYLAMNRLGVLRDDNDPNCTYEGDNNILLQQTSNYLLGLLAHQVHDGACFRSPLKSVDFLDAYPGILDQKFEVSSVADCLDSAVALAAYKWLVCYLLRETYQKLNQEKRSGSSDFEARNKCQVSHGRPLALAFVELTVVQRFHEHVHQPSVPPSLRAVLGRLSALYALWSLKRHAALLYRGGYFSGEQAGEVLESAVLALCSQLKDDAVALVDVIAPPDFVLDSPIGRADGELYKNLWGAVLQESKVLERASWWPEFSVNKPVIGSLKSKL

SEQ ID NO: 895 - DNA, 1851 bp, Homo sapiens
aagctcttagaggcgtaggcaaatatgtgcaggccatcagtacagtactgtgcagtacagcagcaagaaaatcagcttggtaccaccagactgggctgcaggttccagctgttgctgctagcaggaagtggctaagctggccatcgtatcacaggcatccaggcagagggattgatgtccgaagaagaaaaatctgggacatgtatggaccacaaactcagttagaggaagatgcaatcacacccaatgataagacccttttccctgatgttgattggttaatcggtaaccattctgatgaactcacaccatggatacctgtcattgcagccaggtcttcctacaattgccgcttctttgtcctcccctgctgcttctttgacttcattggaagatactcccggaggcagagtaagaagactcagtaccgggaataccttgacttcattaaagaagtgggcttcacctgtgggtttcacgtggacgaagactgcctcaggattccttcaaccaaaagagtctgtctcgttggaaaatccagaacatacccttcctccagagaagcttccgtggatgaaaagaggactcagtacattaagagcaggcggggctgccctgtaagcccacctggctgggagctttccccttctccacgctgggttgctgctggcagtgctggtcactgtgacggtcagcaagctctggacgccagggtcgggtgtgtaaccagggcctgggccgctgagcatggagcagggccccaggctgaaggaccctggctacctggatttcatcccagagaaaaggctgagcgtgtgaggaactgtgccgccctgccacgagattttattgaccaagtggttttgcaagtagcgaatttactgttaggtggaaagcaattaaacacaagaagttctcgaaatgggagtttgaagacctggaatgggggagagagcctatctctggcagaagtagccaacgagctggacacggagaccctgcggaggctgaagcgggagtgtgggggcctgcagacgctgctccggaacagccaccaggtgttccaagttgtgaatgggagagttcacatccgcgactggcgagaggagacactgtggaagacaaagcaaccggaagcgaaacagagactgctctctgaagcctgcaaaacccgcctctgctggttcttcatgcatcaccctgatggctgcgctctgtccacggactgctgcccgtttgcccatgggcctgcggagctgcggccaccccggaccaccccgaggaagaagatttcatgagctgcatccttgccagccgaggcctggttggggaggccaaaccaaggagagcttccccagcagtcgtcagtgctgtggtctctgctctggctgtgtttcagcccacctcctcccagctttctccacatcctcacagtgatgaaccgtatttcataaacatcacacgccagagaagccacagttactcggaagcccccagctgactgcctggcttgtttcagatgcagccgcttgaaacgtgcgcagcatcttcatatcataaagattgtgcacggatccttacaatgtctcctgggggagagcggctgaggctgccttgcacaggcccttcccagggcgctgtccgacgcctgccccaccatgtccacatctgtgaagaggatggggctcctcgagaagtaagaccgtatctgccagcgtttctcaccacactggagagcagctgctctggagcagggatccaccagattggtatttttaaaaaaggtgtcaggcttgctatgttgaggttgtttttagagttacagagaataaaaacactcataatttcctg

SEQ ID NO: 896 - protein, 365 aa, Homo sapiens
MYGPQTQLEEDAITPNDKTLFPDVDWLIGNHSDELTPWIPVIAARSSYNCRFFVLPCCFFDFIGRYSRRQSKKTQYREYLDFIKEVGFTCGFHVDEDCLRIPSTKRVCLVGKSRTYPSSREASVDEKRTQYIKSRRGCPVSPPGWELSPSPRWVAAGSAGHCDGQQALDARVGCVTRAWAAEHGAGPQAEGPWLPGFHPREKAERVRNCAALPRDFIDQVVLQVANLLLGGKQLNTRSSRNGSLKTWNGGESLSLAEVANELDTETLRRLKRECGGLQTLLRNSHQVFQVVNGRVHIRDWREETLWKTKQPEAKQRLLSEACKTRLCWFFMHHPDGCALSTDCCPFAHGPAELRPPRTTPRKKIS

SEQ ID NO: 897 - DNA, 1550 bp, Homo sapiens
gtggcctaccatggtttcaacgggtaacggggaataagggttcgattcggagctgcgggagccgggctggcaggagcaggatggcggcggcggcggctgcaggcgaggcgcgccgggtgctggtgtacggcggcaggggcgctctgggttctcgatgcgtgcaggcttttcgggcccgcaactggtgggttgccagcgttgatgtggtggagaatgaagaggccagcgctacgatcattgttaaaatgacagactcgttcactgagcaggctgaccaggtgactgctgaggttggaaagctcttgggtgaagagaaggtggatgcaattctttgcgttgctggaggatgggccgggggcaatgccaaatccaagtctctctttaagaactgtgacctgatgtggaagcagagcatatggacatcgaccatctccagccatctggctaccaagcatctcaaggaaggaggcctcctgaccttggctggcgcaaaggctgccctggatgggactcctggtatgatcgggtacggcatggccaagggtgctgttcaccagctctgccagagcctggctgggaagaacagcggcatgccgcccggggcagccgccatcgctgtgctcccggttaccctggataccccgatgaacaggaaatcaatgcctgaggctgacttcagctcctggacacccttagaattcctagttgaaactttccatgactggatcacagggaaaaaccgaccgagctcaggaagcctaatccaggtggtaaccacagaaggaaggacggaactcaccccagcatatttttaggcctcatctcagtgcctatgaggggcctgccagaaaagtcactaacctgtctcagtgtggccttgtccagccttgtgttttctgtaacccctgtttgtggtacgagataatgagtcctatttttctctcacataatatgcatttgctctcctagggacaagtgtaatacatttatgtgaagtaagacaatgcgagactggtggccgtcaaatagcatccgtcaatctgtgttaactgcataggaggctctcgatagcacctgctatagcggtgtcatgttggatcgctttgtgactgttcatctgtccttgacagtggctgtcatcttgactactttgttgatttgttggtattggggacattttaaaggctgagttatttttgaatgtcatgtttatgtcatagacgtagaaaacgcatccttgaattaaactgccttaactccttttgtggtataagcaaactacatggactctgtccctggtatccttttcctgtgtggttgcccctgtgcctgtggtctggcctaggttaagtgtgcaagataactactcgtgagttattcagaatgttgttcctaataaatgcacttgttgtctgtcttctttaatcaaatcacatcttatatacagcagtcagagatgagtatactagaatcatggattgctggaggtcttttaatctgatgttctcagaagggggtggatttaaatcctgaaataaatatttcaacac

SEQ ID NO: 898 - protein, 244 aa, Homo sapiens
MAAAAAAGEARRVLVYGGRGALGSRCVQAFRARNWWVASVDVVENEEASATIIVKMTDSFTEQADQVTAEVGKLLGEEKVDAILCVAGGWAGGNAKSKSLFKNCDLMWKQSIWTSTISSHLATKHLKEGGLLTLAGAKAALDGTPGMIGYGMAKGAVHQLCQSLAGKNSGMPPGAAAIAVLPVTLDTPMNRKSMPEADFSSWTPLEFLVETFHDWITGKNRPSSGSLIQVVTTEGRTELTPAYF

SEQ ID NO: 899 - DNA, 499 bp, Homo sapiens
gtgatcatcttttctttgacattggaagcagaatctgaaactttctgaggagagcatttgagcttcagatttctaacagcctctttgcaacaaaatagaccagtagctgaaggcaactgcaatccttcatgatgtttcccttggccagaaatgcactaagcagtctcaagattcaaagcattctgcaaagcatggcaagacatagccatgtaaaacactcaccagattttcatgataaatatggtaatgctgtgctagccagtggaactgctttctgtgttgctacatgggtgtttacagccactcagattggaatagaatggaacctatcccctgttggcagagttaccccaaaagagtggaaacatcagtaaccatcacagttgctgtaatgacagaattgtttaaaaaaccaacttgtcatgtaagcactctactgcttattaaaatatagcacaattgaaaaaataaaatgtgttttaaatctttaaaaaaaaaa

SEQ ID NO: 900 - protein, 80 aa, Homo sapiens
MFPLARNALSSLKIQSILQSMARHSHVKHSPDFHDKYGNAVLASGTAFCVATWVFTATQIGIEWNLSPVGRVTPKEWKHQ

SEQ ID NO: 901 - DNA, 8192 bp, Homo sapiens
gggctggctgagcgcgggcgagtgtgagcgcgagtgtgcgcacgccgcgggagcctctctgccctctcctcgcaccctgctcagggcatctgaagagcctggaaacgtgaacaggcttgaagtatggcatgttgcaaagatggtttctgccaagaaggtacccgcgatcgctctgtccgccggggtcagtttcgccctcctgcgcttcctgtgcctggcggtttgtttaaacgaatccccaggacagaaccaaaaggaggagaaattgtgcacagaaaatttcacccgcatcctggacagtttgctcgatggttatgacaacaggctgcgtcctggatttgggggtcctgttacagaagtgaaaactgacatatatgtcaccagctttggacctgtttctgatgttgaaatggaatacacaatggatgtgttcttcaggcagacatggattgacaaaagattaaaatatgacggccccattgaaattttgagattgaacaatatgatggtaacgaaagtgtggacccctgatactttcttcaggaatggaaagaaatctgtctcacataatatgacagctccaaataagctttttagaattatgagaaatggtactattttatacacaatgagactcaccataagtgcggagtgtcccatgagattggtggattttcccatggatggtcatgcatgccctttgaaattcgggagttatgcctatccaaagagtgagatgatctatacctggacaaaaggtcctgagaaatcagttgaagttccgaaggagtcttccagcttagttcaatatgatttgattgggcaaaccgtatcaagtgaaaccatcaaatcaattacgggtgaatatattgttatgacggtttacttccacctcagacggaagatgggttattttatgattcagacctatattccgtgcattatgacagtgattctttctcaagtttcattttggataaataaagaatcagttcccgctaggactgtatttggaataacaactgtcctcaccatgaccacactaagcatcagtgcacgacattctttgcccaaagtgtcctatgctaccgccatggactggttcatagctgtctgctttgcttttgtattttcggcccttatcgagtttgctgctgtcaactatttcaccaatattcaaatggaaaaagccaaaaggaagacatcaaagccccctcaggaagttcccgctgctccagtgcagagagagaagcatcctgaagcccctctgcagaatacaaatgccaatttgaacatgagaaaaagaacaaatgctttggttcactctgaatctgatgttggcaacagaactgaggtgggaaaccattcaagcaaatcttccacagttgttcaagaatcttctaaaggcacacctcggtcttacttagcttccagtccaaacccattcagccgtgcaaatgcagctgaaaccatatctgcagcaagagcacttccatctgcttctcctacttctatccgaactggatatatgcctcgaaaggcttcagttggatctgcttctactcgtcacgtgtttggatcaagactgcagaggataaagaccacagttaataccataggggctactgggaagttgtcagctactcctcctccatcggctccaccaccttctggatctggcacaagtaaaatagacaaatatgcccgtattctctttccagtcacatttggggcatttaacatggtttattgggttgtttatttatctaaggacactatggagaaatcagaaagtctaatgtaatttcgttgctatagtagtttgctaaaagatgatgaaaatgcagaatgtctttttaaatgtttttaaatataaacaaatattctttactaaaataaaaactctgtgtaatttttccatttaaagatataagccagttattgggagagttaattaattcctgagtgaaaaagtgaactatgttttttttcagaaaaattattttaaaagaactcagcattcagttagatagaatacacaccatcctggaaagttgggataagagaaatagagctattagagacaagtggcgcatattttttcattgatatttgaaaacagactatgacattttaaaaatctgccctatgagtatcaacctgccaccctaaatttcccagtggcactacccttaaccagaattgtttattagatgtcatatgcagtgacctttggtgatcttcttaggaacttcaagaaaaggaattttcctgttaaattaaacattggcaaaaggaaatggaatagtataaacactgatcaatagagtaaaatatctgctgcataaaaaactaagacaaagaccagaggaaatatcttccctttcttatgttggctaaacagtacttaacagttgacttgaaattttgttctctgagccaaagtttaactcattgtatgaattctttttcatggtagttcattcagttatgtgtttatttactacatagttattcagagcctactgtgttccaggaactatgctagaaactgtctctctaggaaagctcttgcacctttatctacaatattacttaaaaagtagaacagtcaatgcatgccaaagaaccataaactagcagaggacattgcattctttagtgaaggacatttatttagagtctgacaacatattcaaaatatttttcagcctctactgatagtggataacaaatatatttgttcacataaccactttgatgtcagtacaacttcagcaattggttttcaaaatagatgagaatatggtacagattgttctataagtgaaaagcattatgtacttgaaagtaaaaatcagggcaatataagacttaatagattaactgtcgcaaatttgatcagagtcacagagtagaatttgatcagaatcacagaatcatcagacataggaactgagcacaggctttttcaggtgctttccccaagatagatctagatattagctagtgaaatgctaaattttgaagagttttgtgtccgtagttctgtaattctgggcagtcatcatgttggtttttttgggagtttttttaaggtttaataactaaggggaatattttaaaattaagagagcagcaaatgaaaggagtaaagaaaaaaatagctgtcgggtaggatgccactgactctgctatgtgatttatcagggttttcatctactgacttctttctcattaggtaggcttaacaacttacttgagaattttgcaactgtctatgcagctgaatctaagtatggttttttgtcatattgcctctagattttcttctgtgcttctctctatctgctctggaatggatgagtgaatgtgttctgggtgttttagggaacatattgatagaaatgaccaccttgcagacaaaatctctctctctctttttgtttttatagaaaagaagtgatagtagttaattggcatcgatttttcagatattgcactaccttataatggttgtttttgatacctgaaaattgtgcaaatgccaaatattaattgtaagtcatatctgagaaatcattcttggctgtctttctaggtattccatagaatcaacacattttaaggctgaaagatactgtcgaaatcacccagtcccaaccccccaatttaaaattgattctagtaaaattaggtccagtaacacctgtatatatgtatatatttaataaagagtacttgtacaaaaaagcttatcataaattatttcatgaatgtgaatagatttctggccttgaggacgatgtttggaaatatggttggaagcacaattcattcgctactagttattcagagcgtactttgttccaggaactatgctggaaactgatagttcactattctgatgaaaaggctggttttgttgttgttgttgttgttgttgttgttgtttttggtgaggaactcttactctttgctaatctattggcctatcttaagaaataattatttggttattcattggcttcctttaaaaaaaagtgttcttctacaaatcttacagagtgtaaagagataaaaagaaatgattttttttcttacctttacatatgaaggtttaaaaatacatcatgtggccaaagaatgagaaaggacagaattaaccaaggattcttaattgttaatttgaagaacacattaaccagaaagcttaaacattattattaaaataaattatttcatttgcacacaatgataataatgatgataataataataataataataataataataataataataataatatgttgtttgctttccttaactgaatttcatcaaattcattcagtgatttttattttggtcattatttctatcttcccaataacccagaggtacatcaagtaaaaacacttttgcaaagagccagtcacttttccctcttagaaaatctcagaagaatgattaggggcacccaaagttctggttatctatgaataataatgaataattttggctgagaatggtacctttatataactcttttaaagatgaaattcagaataattttattcaggacctagtatctgcagtccatgttggccactaactgctacataattactttcaatttcctccaggcatgactaggtataaacatatatttacatgattaatccacattttaaaatgacttgcacttgtgcatatacatagtactttgaataatgtatattttaaattggacctcacaaatcttgtattaaagtaggtagagagtagagtcacactttttttgatgaaatgagtcacagagaagttacatgacaaagataaaatcacagggttggaaagaactttgaaaggtcatttttcaataatctcaccttaaaagtgaccccttttcaaacaaagcataaacaatttatttgtggcttattttacccatgagctggccaatacttcctggcctagaaaaatatctccactctccccattcctgttcttaatggtcttctcttctcaatttgtaaatattctccagtaaaagacaccaggtgtggagatgggtcacttaatttcaagttctgagtgtcttgtggttttaaacaagtctcttaacctctctaagactgattcctcatttataacagggaggaggtggattatgtaatatctaagagcttttcagttttaatactctctgattctcatagtaaatacaagcatactcttgtaagaaaaacactgaatactttgaaccacaaataagtgtttatggacaaaaatttagttctactgcttgattactttaagttcattgcttgcttcaaactaaggtttccctaccttcaaaaatatatataacatctctccatttagataaagtatattcttccccagggaagactgtattctttaaagacagtagaatattggctatttctcttttctgggatttcctgggcttttattcactaaatgggctcctgcccagtttgggtactgtgctgatttttagatatacagagataaaaatagcccctttccttgcaggtagtcacagtccggaagagatgatagatgcatagacaaaaaattatgggatgtaactaatgcttcagtagaatacagcagggccaaaactagagtgatactcatctcaggcacaaatatatatggggacatcaaaacttcaataatcaagatacctaatatttaagtgaatatttttaaaactcaaaattaatgcaaaagatttatgatgaacagaatatacaaattttaaataaattaatagaatcagtagtaataatattttcttctgcctcaggctccaaaattgctcagcatagcactgatctagatagaggtggataaaagatccacataacttaattacattgttgaaggagaggaacaagagtgatagcagagaaggtttcacagatataatcttaagctaaattttatagaatgatttggagttcttatagcctccattcccacttccacaaacaaacaaaaaaatgaaagcgcaattttatcagcacctgaggcaggagaagagatgaggatgtggaaagtcaaggggaactcttactacaaattcttagttctgtgtttggaggtaagggtgaatgcagggaagtgagagttgttgatgttggaaagacctaaagagcctggattaggaagagttttgtgtaaattactgaaggaatggaatttgatcaggattagtggcaatttattaaaaatcttgaagaataatacgatgaaaactaacatccttatttttctgttttagagaaagcacctgattattgtgtgaactatggtttggagggccacaaatctagaggtagtggaacagttgagatctcttattttttctttcctgtcttaaactttgccttctattccttttttctttttttgaccgcaatgacttcattgtcatttgtaaaagtgatacatgactgttaaagatagacattgtagaaacttaaaaacaatctcaaaattctaccacccagaaatcagaaatattttgtatttggatatgtttgtctagaagagtagattgcttgattaaaagacagagttttataaatgtagaagccaatatgacatacatgctgccattaaataataaaaaattaaattgacttttatctcaagataagattaaaattggagggtaaaactgaagaaattgttgaaatttggatggtgcttctttaaagcaagagatttagagagtcagagctttttatcccaggtttcaatctttatttcaggaaaattttctgcaattttgtctaagttaattttttttttttaagaaatgccaattatgtcaaatcccttttgtctctatacaatagtccccaactgttttggcaacaggcacgggtgagggtgggggaatggttttcagatgaaattgttccatctcagatcatcaggcattagtcgattctcataaggagcggacaaccttgcatgccctcctatgagaatctaatgccgccgctaatctgacaggaggcagagctcaggcgataatgctcaatgggtgccactcacctcctgttgtgctgcccaattcctaacaggtcatggataagtactggtcagtggcccaggggttggggaccactgctctgtaactatttacagtattctttgtaactactttggtatctttaaaattttctttaacttttgtcaaccataaccctagtgagttttcagttgtgattattctattttgtaacttccaatgtacttttcaacttcataatggttaattttgttttccattgctttcttggtcactgtcatttcatttttcttctctttctctatttttaccattgctttattgaaatatcttctttgagcttctcatgtttctctattaatgagatcatgtctataatattttttgagactacagagacctatttatataaactcttcctctatttcttgaaaaagtttttatctggcgtgagcttcatctgctttttcattgaggttttatctcccttgcctatttttggggctggtttctttctattaatcactgagcagagccagctatttactgaactacagtgtgggaagtggtgggagggtgagtcagatcagcccacagaagctatttaaatttcaggtttcaagcccacctccccaaaaccgttttatgtgttttttcttctgcccaggcaccatatttttatatctatttttgacatttgggcggcctatgtagttcacagtgtaaaactctctgttttactttctttatgttattgctagtgattattgcttgtagtcccacccccttccccacattagccttagtattctatattattcagcaagcttgttcacaactctcaaatatagtctatcagaatttttatctttacctctacattccactattcggaagtatatagtaaaatcgtatgaagacagattttgtctttttcttgcctgtttacactctatcttacagaggtttcaaacaaaccatctttgtttgaaacatcgcaggataatgatacttattgaaatctacatcctgcccaagatatatgccagtcaatttcctttctcctattagtgcaaatggctacctacttaaaagctgctgactatagtttgtc

SEQ ID NO: 902 - protein, 554 aa, Homo sapiens [sequence omitted]

SEQ ID NO: 903 - DNA, 5084 bp, Homo sapiens
gatcccatcgcagctaccgcgatgagaggcgctcgcggcgcctgggattttctctgcgttctgctcctactgcttcgcgtccagacaggctcttctcaaccatctgtgagtccaggggaaccgtctccaccatccatccatccaggaaaatcagacttaatagtccgcgtgggcgacgagattaggctgttatgcactgatccgggctttgtcaaatggacttttgagatcctggatgaaacgaatgagaataagcagaatgaatggatcacggaaaaggcagaagccaccaacaccggcaaatacacgtgcaccaacaaacacggcttaagcaattccatttatgtgtttgttagagatcctgccaagcttttccttgttgaccgctccttgtatgggaaagaagacaacgacacgctggtccgctgtcctctcacagacccagaagtgaccaattattccctcaaggggtgccaggggaagcctcttcccaaggacttgaggtttattcctgaccccaaggcgggcatcatgatcaaaagtgtgaaacgcgcctaccatcggctctgtctgcattgttctgtggaccaggagggcaagtcagtgctgtcggaaaaattcatcctgaaagtgaggccagccttcaaagctgtgcctgttgtgtctgtgtccaaagcaagctatcttcttagggaaggggaagaattcacagtgacgtgcacaataaaagatgtgtctagttctgtgtactcaacgtggaaaagagaaaacagtcagactaaactacaggagaaatataatagctggcatcacggtgacttcaattatgaacgtcaggcaacgttgactatcagttcagcgagagttaatgattctggagtgttcatgtgttatgccaataatacttttggatcagcaaatgtcacaacaaccttggaagtagtagataaaggattcattaatatcttccccatgataaacactacagtatttgtaaacgatggagaaaatgtagatttgattgttgaatatgaagcattccccaaacctgaacaccagcagtggatctatatgaacagaaccttcactgataaatgggaagattatcccaagtctgagaatgaaagtaatatcagatacgtaagtgaacttcatctaacgagattaaaaggcaccgaaggaggcacttacacattcctagtgtccaattctgacgtcaatgctgccatagcatttaatgtttatgtgaatacaaaaccagaaatcctgacttacgacaggctcgtgaatggcatgctccaatgtgtggcagcaggattcccagagcccacaatagattggtatttttgtccaggaactgagcagagatgctctgcttctgtactgccagtggatgtgcagacactaaactcatctgggccaccgtttggaaagctagtggttcagagttctatagattctagtgcattcaagcacaatggcacggttgaatgtaaggcttacaacgatgtgggcaagacttctgcctattttaactttgcatttaaaggtaacaacaaagagcaaatccatccccacaccctgttcactcctttgctgattggtttcgtaatcgtagctggcatgatgtgcattattgtgatgattctgacctacaaatatttacagaaacccatgtatgaagtacagtggaaggttgttgaggagataaatggaaacaattatgtttacatagacccaacacaacttccttatgatcacaaatgggagtttcccagaaacaggctgagttttgggaaaaccctgggtgctggagctttcgggaaggttgttgaggcaactgcttatggcttaattaagtcagatgcggccatgactgtcgctgtaaagatgctcaagccgagtgcccatttgacagaacgggaagccctcatgtctgaactcaaagtcctgagttaccttggtaatcacatgaatattgtgaatctacttggagcctgcaccattggagggcccaccctggtcattacagaatattgttgctatggtgatcttttgaattttttgagaagaaaacgtgattcatttatttgttcaaagcaggaagatcatgcagaagctgcactttataagaatcttctgcattcaaaggagtcttcctgcagcgatagtactaatgagtacatggacatgaaacctggagtttcttatgttgtcccaaccaaggccgacaaaaggagatctgtgagaataggctcatacatagaaagagatgtgactcccgccatcatggaggatgacgagttggccctagacttagaagacttgctgagcttttcttaccaggtggcaaagggcatggctttcctcgcctccaagaattgtattcacagagacttggcagccagaaatatcctccttactcatggtcggatcacaaagatttgtgattttggtctagccagagacatcaagaatgattctaattatgtggttaaaggaaacgctcgactacctgtgaagtggatggcacctgaaagcattttcaactgtgtatacacgtttgaaagtgacgtctggtcctatgggatttttctttgggagctgttctctttaggaagcagcccctatcctggaatgccggtcgattctaagttctacaagatgatcaaggaaggcttccggatgctcagccctgaacacgcacctgctgaaatgtatgacataatgaagacttgctgggatgcagatcccctaaaaagaccaacattcaagcaaattgttcagctaattgagaagcagatttcagagagcaccaatcatatttactccaacttagcaaactgcagccccaaccgacagaagcccgtggtagaccattctgtgcggatcaattctgtcggcagcaccgcttcctcctcccagcctctgcttgtgcacgacgatgtctgagcagaatcagtgtttgggtcacccctccaggaatgatctcttcttttggcttccatgatggttattttcttttctttcaacttgcatccaactccaggatagtgggcaccccactgcaatcctgtctttctgagcacactttagtggccgatgatttttgtcatcagccaccatcctattgcaaaggttccaactgtatatattcccaatagcaacgtagcttctaccatgaacagaaaacattctgatttggaaaaagagagggaggtatggactgggggccagagtcctttccaaggcttctccaattctgcccaaaaatatggttgatagtttacctgaataaatggtagtaatcacagttggccttcagaaccatccatagtagtatgatgatacaagattagaagctgaaaacctaagtcctttatgtggaaaacagaacatcattagaacaaaggacagagtatgaacacctgggcttaagaaatctagtatttcatgctgggaatgagacataggccatgaaaaaaatgatccccaagtgtgaacaaaagatgctcttctgtggaccactgcatgagcttttatactaccgacctggtttttaaatagagtttgctattagagcattgaattggagagaaggcctccctagccagcacttgtatatacgcatctataaattgtccgtgttcatacatttgaggggaaaacaccataaggtttcgtttctgtatacaaccctggcattatgtccactgtgtatagaagtagattaagagccatataagtttgaaggaaacagttaataccattttttaaggaaacaatataaccacaaagcacagtttgaacaaaatctcctcttttagctgatgaacttattctgtagattctgtggaacaagcctatcagcttcagaatggcattgtactcaatggatttgatgctgtttgacaaagttactgattcactgcatggctcccacaggagtgggaaaacactgccatcttagtttggattcttatgtagcaggaaataaagtataggtttagcctccttcgcaggcatgtcctggacaccgggccagtatctatatatgtgtatgtacgtttgtatgtgtgtagacaaatatttggaggggtatttttgccctgagtccaagagggtcctttagtacctgaaaagtaacttggctttcattattagtactgctcttgtttcttttcacatagctgtctagagtagcttaccagaagcttccatagtggtgcagaggaagtggaaggcatcagtccctatgtatttgcagttcacctgcacttaaggcactctgttatttagactcatcttactgtacctgttccttagaccttccataatgctactgtctcactgaaacatttaaattttaccctttagactgtagcctggatattattcttgtagtttacctctttaaaaacaaaacaaaacaaaacaaaaaactccccttcctcactgcccaatataaaaggcaaatgtgtacatggcagagtttgtgtgttgtcttgaaagattcaggtatgttgcctttatggtttcccccttctacatttcttagactacatttagagaactgtggccgttatctggaagtaaccatttgcactggagttctatgctctcgcacctttccaaagttaacagattttggggttgtgttgtcacccaagagattgttgtttgccatactttgtctgaaaaattcctttgtgtttctattgacttcaatgatagtaagaaaagtggttgttagttatagatgtctaggtacttcaggggcacttcattgagagttttgtcttgccatactttgtctgaaaaattcctttgtgtttctattgacttcaatgatagtaagaaaagtggttgttagttatagatgtctaggtacttcaggggcacttcattgagagttttgtcaatgtcttttgaatattcccaagcccatgagtccttgaaaatattttttatatatacagtaactttatgtgtaaatacataagcggcgtaagtttaaaggatgttggtgttccacgtgttttattcctgtatgttgtccaattgttgacagttctgaagaattc

SEQ ID NO: 904 - protein, 976 aa, Homo sapiens [sequence omitted]

SEQ ID NO: 905 - DNA, 5830 bp, Homo sapiens
actgagtcccgggaccccgggagagcggtcagtgtgtggtcgctgcgtttcctctgcctgcgccgggcatcacttgcgcgccgcagaaagtccgtctggcagcctggatatcctctcctaccggcacccgcagacgcccctgcagccgccggtcggcgcccgggctccctagccctgtgcgctcaactgtcctgcgctgcggggtgccgcgagttccacctccgcgcctccttctctagacaggcgctgggagaaagaaccggctcccgagttctgggcatttcgcccggctcgaggtgcaggatgcagagcaaggtgctgctggccgtcgccctgtggctctgcgtggagacccgggccgcctctgtgggtttgcctagtgtttctcttgatctgcccaggctcagcatacaaaaagacatacttacaattaaggctaatacaactcttcaaattacttgcaggggacagagggacttggactggctttggcccaataatcagagtggcagtgagcaaagggtggaggtgactgagtgcagcgatggcctcttctgtaagacactcacaattccaaaagtgatcggaaatgacactggagcctacaagtgcttctaccgggaaactgacttggcctcggtcatttatgtctatgttcaagattacagatctccatttattgcttctgttagtgaccaacatggagtcgtgtacattactgagaacaaaaacaaaactgtggtgattccatgtctcgggtccatttcaaatctcaacgtgtcactttgtgcaagatacccagaaaagagatttgttcctgatggtaacagaatttcctgggacagcaagaagggctttactattcccagctacatgatcagctatgctggcatggtcttctgtgaagcaaaaattaatgatgaaagttaccagtctattatgtacatagttgtcgttgtagggtataggatttatgatgtggttctgagtccgtctcatggaattgaactatctgttggagaaaagcttgtcttaaattgtacagcaagaactgaactaaatgtggggattgacttcaactgggaatacccttcttcgaagcatcagcataagaaacttgtaaaccgagacctaaaaacccagtctgggagtgagatgaagaaatttttgagcaccttaactatagatggtgtaacccggagtgaccaaggattgtacacctgtgcagcatccagtgggctgatgaccaagaagaacagcacatttgtcagggtccatgaaaaaccttttgttgcttttggaagtggcatggaatctctggtggaagccacggtgggggagcgtgtcagaatccctgcgaagtaccttggttacccacccccagaaataaaatggtataaaaatggaataccccttgagtccaatcacacaattaaagcggggcatgtactgacgattatggaagtgagtgaaagagacacaggaaattacactgtcatccttaccaatcccatttcaaaggagaagcagagccatgtggtctctctggttgtgtatgtcccaccccagattggtgagaaatctctaatctctcctgtggattcctaccagtacggcaccactcaaacgctgacatgtacggtctatgccattcctcccccgcatcacatccactggtattggcagttggaggaagagtgcgccaacgagcccagccaagctgtctcagtgacaaacccatacccttgtgaagaatggagaagtgtggaggacttccagggaggaaataaaattgaagttaataaaaatcaatttgctctaattgaaggaaaaaacaaaactgtaagtacccttgttatccaagcggcaaatgtgtcagctttgtacaaatgtgaagcggtcaacaaagtcgggagaggagagagggtgatctccttccacgtgaccaggggtcctgaaattactttgcaacctgacatgcagcccactgagcaggagagcgtgtctttgtggtgcactgcagacagatctacgtttgagaacctcacatggtacaagcttggcccacagcctctgccaatccatgtgggagagttgcccacacctgtttgcaagaacttggatactctttggaaattgaatgccaccatgttctctaatagcacaaatgacattttgatcatggagcttaagaatgcatccttgcaggaccaaggagactatgtctgccttgctcaagacaggaagaccaagaaaagacattgcgtggtcaggcagctcacagtcctagagcgtgtggcacccacgatcacaggaaacctggagaatcagacgacaagtattggggaaagcatcgaagtctcatgcacggcatctgggaatccccctccacagatcatgtggtttaaagataatgagacccttgtagaagactcaggcattgtattgaaggatgggaaccggaacctcactatccgcagagtgaggaaggaggacgaaggcctctacacctgccaggcatgcagtgttcttggctgtgcaaaagtggaggcatttttcataatagaaggtgcccaggaaaagacgaacttggaaatcattattctagtaggcacggcggtgattgccatgttcttctggctacttcttgtcatcatcctacggaccgttaagcgggccaatggaggggaactgaagacaggctacttgtccatcgtcatggatccagatgaactcccattggatgaacattgtgaacgactgccttatgatgccagcaaatgggaattccccagagaccggctgaagctaggtaagcctcttggccgtggtgcctttggccaagtgattgaagcagatgcctttggaattgacaagacagcaacttgcaggacagtagcagtcaaaatgttgaaagaaggagcaacacacagtgagcatcgagctctcatgtctgaactcaagatcctcattcatattggtcaccatctcaatgtggtcaaccttctaggtgcctgtaccaagccaggagggccactcatggtgattgtggaattctgcaaatttggaaacctgtccacttacctgaggagcaagagaaatgaatttgtcccctacaagaccaaaggggcacgattccgtcaagggaaagactacgttggagcaatccctgtggatctgaaacggcgcttggacagcatcaccagtagccagagctcagccagctctggatttgtggaggagaagtccctcagtgatgtagaagaagaggaagctcctgaagatctgtataaggacttcctgaccttggagcatctcatctgttacagcttccaagtggctaagggcatggagttcttggcatcgcgaaagtgtatccacagggacctggcggcacgaaatatcctcttatcggagaagaacgtggttaaaatctgtgactttggcttggcccgggatatttataaagatccagattatgtcagaaaaggagatgctcgcctccctttgaaatggatggccccagaaacaatttttgacagagtgtacacaatccagagtgacgtctggtcttttggtgttttgctgtgggaaatattttccttaggtgcttctccatatcctggggtaaagattgatgaagaattttgtaggcgattgaaagaaggaactagaatgagggcccctgattatactacaccagaaatgtaccagaccatgctggactgctggcacggggagcccagtcagagacccacgttttcagagttggtggaacatttgggaaatctcttgcaagctaatgctcagcaggatggcaaagactacattgttcttccgatatcagagactttgagcatggaagaggattctggactctctctgcctacctcacctgtttcctgtatggaggaggaggaagtatgtgaccccaaattccattatgacaacacagcaggaatcagtcagtatctgcagaacagtaagcgaaagagccggcctgtgagtgtaaaaacatttgaagatatcccgttagaagaaccagaagtaaaagtaatcccagatgacaaccagacggacagtggtatggttcttgcctcagaagagctgaaaactttggaagacagaaccaaattatctccatcttttggtggaatggtgcccagcaaaagcagggagtctgtggcatctgaaggctcaaaccagacaagcggctaccagtccggatatcactccgatgacacagacaccaccgtgtactccagtgaggaagcagaacttttaaagctgatagagattggagtgcaaaccggtagcacagcccagattctccagcctgactcggggaccacactgagctctcctcctgtttaaaaggaagcatccacaccccaactcccggacatcacatgagaggtctgctcagattttgaagtgttgttctttccaccagcaggaagtagccgcatttgattttcatttcgacaacagaaaaaggacctcggactgcagggagccagtcttctaggcatatcctggaagaggcttgtgacccaagaatgtgtctgtgtcttctcccagtgttgacctgatcctcttttttcattcatttaaaaagcattatcatgcccctgctgcgggtctcaccatgggtttagaacaaagagcttcaagcaatggccccatcctcaaagaagtagcagtacctggggagctgacacttctgtaaaactagaagataaaccaggcaacgtaagtgttcgaggtgttgaagatgggaaggatttgcagggctgagtctatccaagaggctttgtttaggacgtgggtcccaagccaagccttaagtgtggaattcggattgatagaaaggaagactaacgttaccttgctttggagagtactggagcctgcaaatgcattgtgtttgctctggtggaggtgggcatggggtctgttctgaaatgtaaagggttcagacggggtttctggttttagaaggttgcgtgttcttcgagttgggctaaagtagagttcgttgtgctgtttctgactcctaatgagagttccttccagaccgttagctgtctccttgccaagccccaggaagaaaatgatgcagctctggctccttgtctcccaggctgatcctttattcagaataccacaaagaaaggacattcagctcaaggctccctgccgtgttgaagagttctgactgcacaaaccagcttctggtttcttctggaatgaataccctcatatctgtcctgatgtgatatgtctgagactgaatgcgggaggttcaatgtgaagctgtgtgtggtgtcaaagtttcaggaaggattttacccttttgttcttccccctgtccccaacccactctcaccccgcaacccatcagtattttagttatttggcctctactccagtaaacctgattgggtttgttcactctctgaatgattattagccagacttcaaaattattttatagcccaaattataacatctattgtattatttagacttttaacatatagagctatttctactgatttttgcccttgttctgtcctttttttcaaaaaagaaaatgtgttttttgtttggtaccatagtgtgaaatgctgggaacaatgactataagacatgctatggcacatatatttatagtctgtttatgtagaaacaaatgtaatatattaaagccttatatataatgaactttgtactattcacattttgtatcagtattatgtagcataacaaaggtcataatgctttcagcaattgatgtcattttattaaagaacattgaaaaacttga

SEQ ID NO: 906 - protein, 1356 aa, Homo sapiens
MQSKVLLAVALWLCVETRAASVGLPSVSLDLPRLSIQKDILTIKANTTLQITCRGQRDLDWLWPNNQSGSEQRVEVTECSDGLFCKTLTIPKVIGNDTGAYKCFYRETDLASVIYVYVQDYRSPFIASVSDQHGVVYITENKNKTVVIPCLGSISNLNVSLCARYPEKRFVPDGNRISWDSKKGFTIPSYMISYAGMVFCEAKINDESYQSIMYIVVVVGYRIYDVVLSPSHGIELSVGEKLVLNCTARTELNVGIDFNWEYPSSKHQHKKLVNRDLKTQSGSEMKKFLSTLTIDGVTRSDQGLYTCAASSGLMTKKNSTFVRVHEKPFVAFGSGMESLVEATVGERVRIPAKYLGYPPPEIKWYKNGIPLESNHTIKAGHVLTIMEVSERDTGNYTVILTNPISKEKQSHVVSLVVYVPPQIGEKSLISPVDSYQYGTTQTLTCTVYAIPPPHHIHWYWQLEEECANEPSQAVSVTNPYPCEEWRSVEDFQGGNKIEVNKNQFALIEGKNKTVSTLVIQAANVSALYKCEAVNKVGRGERVISFHVTRGPEITLQPDMQPTEQESVSLWCTADRSTFENLTWYKLGPQPLPIHVGELPTPVCKNLDTLWKLNATMFSNSTNDILIMELKNASLQDQGDYVCLAQDRKTKKRHCVVRQLTVLERVAPTITGNLENQTTSIGESIEVSCTASGNPPPQIMWFKDNETLVEDSGIVLKDGNRNLTIRRVRKEDEGLYTCQACSVLGCAKVEAFFIIEGAQEKTNLEIIILVGTAVIAMFFWLLLVIILRTVKRANGGELKTGYLSIVMDPDELPLDEHCERLPYDASKWEFPRDRLKLGKPLGRGAFGQVIEADAFGIDKTATCRTVAVKMLKEGATHSEHRALMSELKILIHIGHHLNVVNLLGACTKPGGPLMVIVEFCKFGNLSTYLRSKRNEFVPYKTKGARFRQGKDYVGAIPVDLKRRLDSITSSQSSASSGFVEEKSLSDVEEEEAPEDLYKDFLTLEHLICYSFQVAKGMEFLASRKCIHRDLAARNILLSEKNVVKICDFGLARDIYKDPDYVRKGDARLPLKWMAPETIFDRVYTIQSDVWSFGVLLWEIFSLGASPYPGVKIDEEFCRRLKEGTRMRAPDYTTPEMYQTMLDCWHGEPSQRPTFSELVEHLGNLLQANAQQDGKDYIVLPISETLSMEEDSGLSLPTSPVSCMEEEEVCDPKFHYDNTAGISQYLQNSKRKSRPVSVKTFEDIPLEEPEVKVIPDDNQTDSGMVLASEELKTLEDRTKLSPSFGGMVPSKSRESVASEGSNQTSGYQSGYHSDDTDTTVYSSEEAELLKLIEIGVQTGSTAQILQPDSGTTLSSPPV

SEQ ID NO: 907 - DNA, 2271 bp, Homo sapiens
gaggctgagaccggtgcgccgcgcgctagtggccgctcttccgcgggctagcgggcggtgggggcgccagcagcgcggaaggcgggcacgcgggccatggctccctgggcggaggccgagcactcggcgctgaacccgctgcgcgcggtgtggctcacgctgaccgccgccttcctgctgaccctactgctgcagctcctgccgcccggcctgctcccgggctgcgcgatcttccaggacctgatccgctatgggaaaaccaagtgtggggagccgtcgcgccccgccgcctgccgagcctttgatgtccccaagagatatttttcccacttttatatcatctcagtgctgtggaatggcttcctgctttggtgccttactcaatctctgttcctgggagcaccttttccaagctggcttcatggtttgctcagaattctcggggcggcacagttccagggaggggagctggcactgtctgcattcttagtgctagtatttctgtggctgcacagcttacgaagactcttcgagtgcctctacgtcagtgtcttctccaatgtcatgattcacgtcgtgcagtactgttttggacttgtctattatgtccttgttggcctaactgtgctgagccaagtgccaatggatggcaggaatgcctacataacagggaaaaatctattgatgcaagcacggtggttccatattcttgggatgatgatgttcatctggtcatctgcccatcagtataagtgccatgttattctcggcaatctcaggaaaaataaagcaggagtggtcattcactgtaaccacaggatcccatttggagactggtttgaatatgtttcttcccctaactacttagcagagctgatgatctacgtttccatggccgtcacctttgggttccacaacttaacttggtggctagtggtgacaaatgtcttctttaatcaggccctgtctgcctttctcagccaccaattctacaaaagcaaatttgtctcttacccgaagcataggaaagctttcctaccatttttgttttaagttaacctcagtcatgaagaatgcaaaccaggtgatggtttcaatgcctaaggacagtgaagtctggagcccaaagtacagtttcagcaaagctgtttgaaactctccattccatttctataccccacaagttttcactgaatgagcatggcagtgccactcaagaaaatgaatctccaaagtatcttcaaagaataaatactaatggcagatctgcgatttctgggtccactttctgagatgctttctaaaaccaaccaactgataaaaagtagatgagacttctccaagctgcttcacaagcaaactaaccgaaaaactgaaaatatacaaacagcttcacacacacacacacacacacacacacacacacacacacaaaggaagatcatcaatggctgcggtagcctagtaggaatggactatataataatatagcaggtgctcaataactgtttgttgcatttcagtaaaagcagaataacctttcaaaataataacaggctgggtgcaatggctcacacctgttaatcccagcacttcgggaggccaaggtgggcagttcgcttgggcccaagagttcgagaccagcctgggcaacatggtgaaaccctatctccgtgaaaaaatatgaaaattagccaagagtggtggcacatgcctgtagtcccagatacttgggagtgggctgggatgggagaatcgcttgagcccaggaggtcaagggtacagtgagccgaggtcatgccactgcactccagcctggcctgggcaacagagcaagaccctgtctcaaaataataataatatataattttacaccaaaagtttcaggaaaaaacgagtttgttggagttagtttatactttcacatatcaccacaaagatctccagttaaataactatcaatatccatttccattcatctccccctcaaatcatagcctaacagaacactttgaaagctcttttatttaatatttttttacatcctttgaagggagtgcttcaaaaatgaaagcatcagaagataaaatatttttatatttatgcatagcaagccttcatgaacggaagtgacacactctggattgaataatactgtagcctcattcatatgtagttattcaaattggattaatgtctgtgtgagtttatttgaactagcagaaagtatctgaagatattcaggaatagagtttatacttaaaatagctt

SEQ ID NO: 908 - protein, 318 aa, Homo sapiens
MAPWAEAEHSALNPLRAVWLTLTAAFLLTLLLQLLPPGLLPGCAIFQDLIRYGKTKCGEPSRPAACRAFDVPKRYFSHFYIISVLWNGFLLWCLTQSLFLGAPFPSWLHGLLRILGAAQFQGGELALSAFLVLVFLWLHSLRRLFECLYVSVFSNVMIHVVQYCFGLVYYVLVGLTVLSQVPMDGRNAYITGKNLLMQARWFHILGMMMFIWSSAHQYKCHVILGNLRKNKAGVVIHCNHRIPFGDWFEYVSSPNYLAELMIYVSMAVTFGFHNLTWWLVVTNVFFNQALSAFLSHQFYKSKFVSYPKHRKAFLPFLF

SEQ ID NO: 909 - DNA, 5687 bp, Homo sapiens
aatcgtccgccgctcccgttaccggggcaaccgcggcgcctcctccgtgtcggccccgatcgtccctccgcgccattttcaaactgctctagcgccggagcccgtgcctggacggaaggagctagtgggggactcgaggcctgagggcaatgcggctggaggcggaggcaacggcggctggagctgccggactttaatttttggaagtgaataaaacttgttttagaagacgagatgactacagctgtagagagaaagtatattaatattaggaaaaggctggatcagctgggataccgccagactctgacagtggagtgtttacctttggtagaaaaacttttcagcgacttagttcatacaactgagagccttcggcaatcaaaattatctgctgtgaaagctgaaaaagaaagtgccaattttgattttgttttggaaccctataaacttgaaaatgcaagattgagtagagaaaataatgaattatacctagagttaatgaaactgagagaacattcagaccaacacgttaaagagttgaaaacttcattgaagaaatgtgcacgtgaaacagctgatctgaaatttctgaataaccaatatgctcataaactcaaactgttggagaaagagagcaaagctaagaatgaaagaattcaacaacttcaagaaaagaatttgcatgctgtagtacaaactccaggtggcaagaaaagaagtattgctttcaggcgccagcgtatgcaaattgatgaaccggttcctccctctgaagtcagttcatatccagttcctcaaccagatgacccttacattgcagacctccttcaagtggctgataacaggattcaagaacttcaacaggaagtccaccagctacaagaaaagttagcaatgatggaaagtggggtgagagactatagcaagcagattgagctaagagaacgagagatagaacgactgtcagttgctttggatggtggtcggtcccctgatgtcctttctctggagtctagaaataaaaccaatgaaaagcttattgctcatttaaatattcaggttgactttcttcagcaagctaataaagacctggagaagcgtatacgagagcttatggaaaccaaggaaacagtgacatctgaagtcgttaatttaagtaacaaaaatgaaaaactctgccaagaattaactgaaatagatcagttagcacagcagttggaaagacataaagaagaagtgcttgagactgctgataaagagcttggggaagcaaagaaagagattaaaagaaagctctctgaaatgcaggatcttgaagaaacaatggcaaaacttcagctggaattgaacttatgccagaaagaaaaggagagactgagtgatgaactccttgtaaaatcagacctagaaactgttgttcatcagcttgaacaagaaaagcaaagacttagcaaaaaagttgaaagttttgcagttacagaacgacaacttactctggaggttgagaggatgagactagaacatggaataaaacgtcgagacaggtcaccttctcgtttagatacatttctgaaaggtatagaagaagaacgagattattataagaaagagctagagagactccaacatataatacagcgaagatcttgctctacaagttatagcgcacgtgaaaaaagttcaatatttagaacaccagaaaagggtgattacaattcagaaattcatcagatcacaagagaaagagatgaacttcagcgtatgctagaaagatttgaaaaatatatggaagatatacagtccaatgttaaattattgacagcagaaagagataaactaagtgtcttatataatgaagctcaggaagaattatctgccctaagaaaggaatccacccaaaccacagcaccccataatattgttagtcttatggaaaaggaaaaagaacttgcgttatctgacttaagaagaattatggcagaaaaggaagctttaagagaaaaattagagcatattgaagaagtgagtctttttggaaaatcagaattagagaaaactattgaacatttgacatgtgttaatcatcagcttgaaagcgaaaaatatgaattaaagtctaaagtgttaataatgaaagaaacaatagagtcgttagagaacaaattaaaagtccaagctcaaaaatttagccatgtggctggtgactcatctcatcagaaaacagaggtgaactcacttaggatagtgaatgagcagctacagcggtcagttgatgactatcagcaccgactttccataaaaagaggtgaacttgaatcagcccaagcacaaattaaaatactggaggaaaagatagatgaactaaaccttaagatgacttcacaggatgaggaggctcatgtaatgaaaaagaccattggtgttattgataaagaaaaagactttctccaggagactgtagatgagaagacagaaaagattgcaaatttgcaagaaaacctagctaataaagaaaaagctgttgctcaaatgaagataatgatctcagagtgtgaatcatctgtgaaccagctgaaagaaacattggttaatcgagatcgtgagataaacagcctccggcgccagcttgatgcagctcacaaagaactcgatgaagtaggaagatctagagaaatcgcttttaaggaaaacagaagactgcaagatgacctggctacaatggcaagagaaaatcaagaaatctcattggaattggaagcagcagtgcaagaaaaagaagaaatgaagagcagagttcataaatacataacagaggtgtcacgatgggagagcttaatggctgccaaggaaaaagaaaatcaagatttgttagatagatttcagatgcttcataaccgtgctgaagactgggaggtcaaagcccatcaagctgagggagaaagcagctcagttcgactggaacttctttctattgacactgagaggagacatcttcgagaaagagtggagctattagaaaaagaaattcaagagcacataaatgcccatcatgcttatgaatctcagatctcatcaatggcaaaagccatgtctcgattagaagaagagctgagacatcaagaagatgagaaagcaacagtattaaatgacttgtcatctcttagagaactttgcattaaacttgattcaggcaaagatattatgacccagcaattgaattcgaaaaaccttgagtttgagagggttgtggtggaattagaaaatgtaaagtcagagtcagacctactgaaaaaacaactttcaaatgagagacatacagttaaaaacctcgaatcattgttggctacaaacagagataaagaatttcattctcacttaacctcccacgagaaggatacagaaatccagctacttaaggagaagttaaccctttctgaaagcaaattaactagtcaaagccgggaaaacaccatgcttcgagctaaagtggcacagttacaaacagattatgatgctctgaaaaggcagatctcaactgaaagatacgaacgagaacgagcaatccaagagatgcgtcgacatggtcttgctacaccaccccttagttccactctgaggtctccttcacattctcctgaacatagaaatgtgtaattatcagaaagaataatggctttcaatgagttcctatgtggatttttaaaagaacagaacagtaatgaaatatttgaagtacttgttgctgaaaatcatgaacatggacacaaattctacctctgtcaacttttatttaaatcagtgaatatgttaaaaagtttggtttaaaagaactatatctatatgtatattttcatatatatgacagaacaagaatatgtattaatagtgcctaatgtatctatatttttattattcatgaattaaattactaaaagtatgtttatactgtgaattaatataatgtattcacattattctttaataatctgtttattaataagccatgatatgtgtatgtaaatattcttacagtacttgtttttagttgtcatgcctatgtttagaccatatcttaatgtattcacaaagaattatcaactttgatgctatgctgtcatgcttaactttttcttcttaaaattattcatagatctactgtctgttgtcaaggggaatatattcaggtctagtcttcttataatagcagaggtcttggtaaaataactaccatatataacgtgttattgccatctagaagaactatgatgagaaagatacatttatatattatgtaaaatgttaactatcatcatatggactctatgtaacacaaattcaaaagcaaactaaaagctatatgcagagttttgtataaaacaatagaacagaaatttgggacatttttctaggaaataaaattcctcggtgtattaatctaaggtttcaaagtataaaagtatatggggtaggccgggtgcagtggctcacgcctgtaatcccagcactttgggaggccgaggcgagtggatttcctaaggtcaggagtttgagaccagcctgagcaatgtggtgaaaccccatctctactaaaaatacaaaaattatctgggcttggtggcgggcacctgtaatcccagccacttgggaggctgaggcaggagaattgcttgaacccgggaggtggaggctgcggtgagccaagatcatgccattgcactccagcctgggtgacagagtaacactctgtctcagaaaaaaaaaaaaagaaaaatatatggggtaaatacagtaaaacgttttgttaaattccaatatacattcagtgataccactctttttcttctaagcctgtgtgttataatttaccagttccccaaaatgccatttttaacgccgaactgtgtaatatacatggaaaacagctttttacaattaattttcaaagttgtaattttaaagaatttgggtgtatacctatgttaatgaaacaacagaagtacaaaaaagaatatcagatacaaaaatcaatcgtgaagaaaatctgttcttaatatatttcattatgattgaaaaacataaaaactaacataggaaagtgaatgatcagttacttatgatatattttgtttcctcttgtggtttaataaagtgaagtgtgtgtgtgtgtgtgtgtgtgtatacctgggggtgggcagtgctctttttctaaaactaatatggcttatatatctgaattatgccctttttagtgtgtattaggatgtgggctggtttgcttttctaccacctttgtaattttatgtatcccatctcctttgtgtgaattcatatattatagcaaaatacaagagacatgggactgtttgcaataccatatggaaatcttttaataaatatatgtaaataaaataaaaaatatttgtctccaccttttccccaaaagcaacagcaagacatattttgttagatattttatttttaatgttttctataatttaaaaatgtatagcctgccaaatgttgttttcataaccatgatattgttttgaaaaaattttatcttaaaatactgaatgttctgaccttttatagatgtttttgattttgttttaaataattttaaattatggagcttgacctagatttgccaataaactttctagcctaaaaaaaaaaaaaaaaaa

SEQ ID NO: 910 - protein, 1140 aa, Homo sapiens
MTTAVERKYINIRKRLDQLGYRQTLTVECLPLVEKLFSDLVHTTESLRQSKLSAVKAEKESANFDFVLEPYKLENARLSRENNELYLELMKLREHSDQHVKELKTSLKKCARETADLKFLNNQYAHKLKLLEKESKAKNERIQQLQEKNLHAVVQTPGGKKRSIAFRRQRMQIDEPVPPSEVSSYPVPQPDDPYIADLLQVADNRIQELQQEVHQLQEKLAMMESGVRDYSKQIELREREIERLSVALDGGRSPDVLSLESRNKTNEKLIAHLNIQVDFLQQANKDLEKRIRELMETKETVTSEVVNLSNKNEKLCQELTEIDQLAQQLERHKEEVLETADKELGEAKKEIKRKLSEMQDLEETMAKLQLELNLCQKEKERLSDELLVKSDLETVVHQLEQEKQRLSKKVESFAVTERQLTLEVERMRLEHGIKRRDRSPSRLDTFLKGIEEERDYYKKELERLQHIIQRRSCSTSYSAREKSSIFRTPEKGDYNSEIHQITRERDELQRMLERFEKYMEDIQSNVKLLTAERDKLSVLYNEAQEELSALRKESTQTTAPHNIVSLMEKEKELALSDLRRIMAEKEALREKLEHIEEVSLFGKSELEKTIEHLTCVNHQLESEKYELKSKVLIMKETIESLENKLKVQAQKFSHVAGDSSHQKTEVNSLRIVNEQLQRSVDDYQHRLSIKRGELESAQAQIKILEEKIDELNLKMTSQDEEAHVMKKTIGVIDKEKDFLQETVDEKTEKIANLQENLANKEKAVAQMKIMISECESSVNQLKETLVNRDREINSLRRQLDAAHKELDEVGRSREIAFKENRRLQDDLATMARENQEISLELEAAVQEKEEMKSRVHKYITEVSRWESLMAAKEKENQDLLDRFQMLHNRAEDWEVKAHQAEGESSSVRLELLSIDTERRHLRERVELLEKEIQEHINAHHAYESQISSMAKAMSRLEEELRHQEDEKATVLNDLSSLRELCIKLDSGKDIMTQQLNSKNLEFERVVVELENVKSESDLLKKQLSNERHTVKNLESLLATNRDKEFHSHLTSHEKDTEIQLLKEKLTLSESKLTSQSRENTMLRAKVAQLQTDYDALKRQISTERYERERAIQEMRRHGLATPPLSSTLRSPSHSPEHRNV

SEQ ID NO: 911 - DNA, 3349 bp, Homo sapiens
ggtggactgagccgctcgggacagcggcaccggaggaggctcggagaagatgcggggctcggggccccggggtgcgggacaccggcggcccccaagcggcggcggcgacacccccatcaccccagcgtccctggccggctgctactctgcacctcgacgggctcccctctggacgtgccttctcctgtgcgccgcactccggaccctcctggccagccccagcaacgaagtgaatttattggattcacgcactgtcatgggggacctgggatggattgcttttccaaaaaatgggtgggaagagattggtgaagtggatgaaaattatgcccctatccacacataccaagtatgcaaagtgatggaacagaatcagaataactggcttttgaccagttggatctccaatgaaggtgcttccagaatcttcatagaactcaaatttaccctgcgggactgcaacagccttcctggaggactggggacctgtaaggaaacctttaatatgtattactttgagtcagatgatcagaatgggagaaacatcaaggaaaaccaatacatcaaaattgataccattgctgccgatgaaagctttacagaacttgatcttggtgaccgtgttatgaaactgaatacagaggtcagagatgtaggacctctaagcaaaaagggattttatcttgcttttcaagatgttggtgcttgcattgctctggtttctgtgcgtgtatactataaaaaatgcccttctgtggtacgacacttggctgtcttccctgacaccatcactggagctgattcttcccaattgctcgaagtgtcaggctcctgtgtcaaccattctgtgaccgatgaacctcccaaaatgcactgcagcgccgaaggggagtggctggtgcccatcgggaaatgcatgtgcaaggcaggatatgaagagaaaaatggcacctgtcaagtgtgcagacctgggttcttcaaagcctcacctcacatccagagctgcggcaaatgtccacctcacagttatacccatgaggaagcttcaacctcttgtgtctgtgaaaaggattatttcaggagagagtctgatccacccacaatggcatgcacaagacccccctctgctcctcggaatgccatctcaaatgttaatgaaactagtgtctttctggaatggattccgcctgctgacactggtggaaggaaagacgtgtcatattatattgcatgcaagaagtgcaactcccatgcaggtgtgtgtgaggagtgtggcggtcatgtcaggtaccttccccggcaaagcggcctgaaaaacacctctgtcatgatggtggatctactcgctcacacaaactatacctttgagattgaggcagtgaatggagtgtccgacttgagcccaggagcccggcagtatgtgtctgtaaatgtaaccacaaatcaagcagctccatctccagtcaccaatgtgaaaaaagggaaaattgcaaaaaacagcatctctttgtcttggcaagaaccagatcgtcccaatggaatcatcctagagtatgaaatcaagtattttgaaaaggaccaagagaccagctacacgattatcaaatctaaagagacaactattactgcagagggcttgaaaccagcttcagtttatgtcttccaaattcgagcacgtacagcagcaggctatggtgtcttcagtcgaagatttgagtttgaaaccaccccagtgtttgcagcatccagcgatcaaagccagattcctgtaattgctgtgtctgtgacagtgggagtcattttgttggcagtggttatcggcgtcctcctcagtggaagttgctgcgaatgtggctgtgggagggcttcttccctgtgcgctgttgcccatccaagcctaatatggcggtgtggctacagcaaagcaaaacaagatccagaagaggaaaagatgcattttcataatgggcacattaaactgccaggagtaagaacttacattgatccacatacctatgaggatcccaatcaagctgtccacgaatttgctaaggagatagaagcatcatgtatcaccattgagagagttattggagcaggtgaatttggtgaagtttgtagtggacgtttgaaactaccaggaaaaagagaattacctgtggctatcaaaacccttaaagtaggctatactgaaaagcaacgcagagatttcctaggtgaagcaagtatcatgggacagtttgatcatcctaacatcatccatttagaaggtgtggtgaccaaaagtaaaccagtgatgatcgtgacagagtatatggagaatggctctttagatacatttttgaagaaaaacgatgggcagttcactgtgattcagcttgttggcatgctgagaggtatctctgcaggaatgaagtacctttctgacatgggctatgtgcatagagatcttgctgccagaaacatcttaatcaacagtaaccttgtgtgcaaagtgtctgactttggactttcccgggtactggaagatgatcccgaggcagcctacaccacaaggggaggaaaaattccaatcagatggactgccccagaagcaatagctttccgaaagtttacttctgccagtgatgtctggagttatggaatagtaatgtgggaagttgtgtcttatggagagagaccctactgggagatgaccaatcaagatgtgattaaagcggtagaggaaggctatcgtctgccaagccccatggattgtcctgctgctctctatcagttaatgctggattgctggcagaaagagcgaaatagcaggcccaagtttgatgaaatagtcaacatgttggacaagctgatacgtaacccaagtagtctgaagacgctggttaatgcatcctgcagagtatctaatttattggcagaacatagcccactaggatctggggcctacagatcagtaggtgaatggctagaggcaatcaagatgggccggtatacagagattttcatggaaaatggatacagttcaatggacgctgtggctcaggtgaccttggaggatttgagacggcttggagtgactcttgtcggtcaccagaagaagatcatgaacagccttcaagaaatgaaggtgcagctggtaaacggaatggtgccattgtaacttcatgtaaatgtcgcttcttcaagtgaatgattctgcactttgtaaacagcactgagatttattttaacaaaaaaagggggaaaagggaaaacagtgatttctaaaccttagaaaacatttgcctcagccacagaatttgtaatcatggttttactgaagtatccagttcttagtccttagtct

SEQ ID NO: 912 - protein, 1037 aa, Homo sapiens
MRGSGPRGAGHRRPPSGGGDTPITPASLAGCYSAPRRAPLWTCLLLCAALRTLLASPSNEVNLLDSRTVMGDLGWIAFPKNGWEEIGEVDENYAPIHTYQVCKVMEQNQNNWLLTSWISNEGASRIFIELKFTLRDCNSLPGGLGTCKETFNMYYFESDDQNGRNIKENQYIKIDTIAADESFTELDLGDRVMKLNTEVRDVGPLSKKGFYLAFQDVGACIALVSVRVYYKKCPSVVRHLAVFPDTITGADSSQLLEVSGSCVNHSVTDEPPKMHCSAEGEWLVPIGKCMCKAGYEEKNGTCQVCRPGFFKASPHIQSCGKCPPHSYTHEEASTSCVCEKDYFRRESDPPTMACTRPPSAPRNAISNVNETSVFLEWIPPADTGGRKDVSYYIACKKCNSHAGVCEECGGHVRYLPRQSGLKNTSVMMVDLLAHTNYTFEIEAVNGVSDLSPGARQYVSVNVTTNQAAPSPVTNVKKGKIAKNSISLSWQEPDRPNGIILEYEIKYFEKDQETSYTIIKSKETTITAEGLKPASVYVFQIRARTAAGYGVFSRRFEFETTPVFAASSDQSQIPVIAVSVTVGVILLAVVIGVLLSGSCCECGCGRASSLCAVAHPSLIWRCGYSKAKQDPEEEKMHFHNGHIKLPGVRTYIDPHTYEDPNQAVHEFAKEIEASCITIERVIGAGEFGEVCSGRLKLPGKRELPVAIKTLKVGYTEKQRRDFLGEASIMGQFDHPNIIHLEGVVTKSKPVMIVTEYMENGSLDTFLKKNDGQFTVIQLVGMLRGISAGMKYLSDMGYVHRDLAARNILINSNLVCKVSDFGLSRVLEDDPEAAYTTRGGKIPIRWTAPEAIAFRKFTSASDVWSYGIVMWEVVSYGERPYWEMTNQDVIKAVEEGYRLPSPMDCPAALYQLMLDCWQKERNSRPKFDEIVNMLDKLIRNPSSLKTLVNASCRVSNLLAEHSPLGSGAYRSVGEWLEAIKMGRYTEIFMENGYSSMDAVAQVTLEDLRRLGVTLVGHQKKIMNSLQEMKVQLVNGMVPL

SEQ ID NO: 913 - DNA, 3283 bp, Homo sapiens
ggtggactgagccgctcgggacagcggcaccggaggaggctcggagaagatgcggggctcggggccccggggtgcgggacaccggcggcccccaagcggcggcggcgacacccccatcaccccagcgtccctggccggctgctactctgcacctcgacgggctcccctctggacgtgccttctcctgtgcgccgcactccggaccctcctggccagccccagcaacgaagtgaatttattggattcacgcactgtcatgggggacctgggatggattgcttttccaaaaaatgggtgggaagagattggtgaagtggatgaaaattatgcccctatccacacataccaagtatgcaaagtgatggaacagaatcagaataactggcttttgaccagttggatctccaatgaaggtgcttccagaatcttcatagaactcaaatttaccctgcgggactgcaacagccttcctggaggactggggacctgtaaggaaacctttaatatgtattactttgagtcagatgatcagaatgggagaaacatcaaggaaaaccaatacatcaaaattgataccattgctgccgatgaaagctttacagaacttgatcttggtgaccgtgttatgaaactgaatacagaggtcagagatgtaggacctctaagcaaaaagggattttatcttgcttttcaagatgttggtgcttgcattgctctggtttctgtgcgtgtatactataaagaatgcccttctgtggtacgacacttggctgtcttccctgacaccatcactggagctgattcttcccaattgctcgaagtgtcaggctcctgtgtcaaccattctgtgaccgatgaacctcccaaaatgcactgcagcgccgaaggggagtggctggtgcccatcgggaaatgcatgtgcaaggcaggatatgaagagaaaaatggcacctgtcaagtgtgcagacctgggttcttcaaagcctcacctcacatccagagctgcggcaaatgtccacctcacagttatacccatgaggaagcttcaacctcttgtgtctgtgaaaaggattatttcaggagagagtctgatccacccacaatggcatgcacaagacccccctctgctcctcggaatgccatctcaaatgttaatgaaactagtgtctttctggaatggattccgcctgctgacactggtggaaggaaagacgtgtcatattatattgcatgcaagaagtgcaactcccatgcaggtgtgtgtgaggagtgtggcggtcatgtcaggtaccttccccggcaaagcggcctgaaaaacacctctgtcatgatggtggatctactcgctcacacaaactatacctttgagattgaggcagtgaatggagtgtccgacttgagcccaggagcccggcagtatgtgtctgtaaatgtaaccacaaatcaagcagctccatctccagtcaccaatgtgaaaaaagggaaaattgcaaaaaacagcatctctttgtcttggcaagaaccagatcgtcccaatggaatcatcctagagtatgaaatcaagtattttgaaaaggaccaagagaccagctacacgattatcaaatctaaagagacaactattactgcagagggcttgaaaccagcttcagtttatgtcttccaaattcgagcacgtacagcagcaggctatggtgtcttcagtcgaagatttgagtttgaaaccaccccagtgtttgcagcatccagcgatcaaagccagattcctgtaattgctgtgtctgtgacagtgggagtcattttgttggcagtggttatcggcgtcctcctcagtggaaggcggtgtggctacagcaaagcaaaacaagatccagaagaggaaaagatgcattttcataatgggcacattaaactgccaggagtaagaacttacattgatccacatacctatgaggatcccaatcaagctgtccacgaatttgctaaggagatagaagcatcatgtatcaccattgagagagttattggagcaggtgaatttggtgaagtttgtagtggacgtttgaaactaccaggaaaaagagaattacctgtggctatcaaaacccttaaagtaggctatactgaaaagcaacgcagagatttcctaggtgaagcaagtatcatgggacagtttgatcatcctaacatcatccatttagaaggtgtggtgaccaaaagtaaaccagtgatgatcgtgacagagtatatggagaatggctctttagatacatttttgaagaaaaacgatgggcagttcactgtgattcagcttgttggcatgctgagaggtatctctgcaggaatgaagtacctttctgacatgggctatgtgcatagagatcttgctgccagaaacatcttaatcaacagtaaccttgtgtgcaaagtgtctgactttggactttcccgggtactggaagatgatcccgaggcagcctacaccacaaggggaggaaaaattccaatcagatggactgccccagaagcaatagctttccgaaagtttacttctgccagtgatgtctggagttatggaatagtaatgtgggaagttgtgtcttatggagagagaccctactgggagatgaccaatcaagatgtgattaaagcggtagaggaaggctatcgtctgccaagccccatggattgtcctgctgctctctatcagttaatgctggattgctggcagaaagagcgaaatagcaggcccaagtttgatgaaatagtcaacatgttggacaagctgatacgtaacccaagtagtctgaagacgctggttaatgcatcctgcagagtatctaatttattggcagaacatagcccactaggatctggggcctacagatcagtaggtgaatggctagaggcaatcaagatgggccggtatacagagattttcatggaaaatggatacagttcaatggacgctgtggctcaggtgaccttggaggatttgagacggcttggagtgactcttgtcggtcaccagaagaagatcatgaacagccttcaagaaatgaaggtgcagctggtaaacggaatggtgccattgtaacttcatgtaaatgtcgcttcttcaagtgaatgattctgcactttgtaaacagcactgagatttattttaacaaaaaaagggggaaaagggaaaacagtgatttctaaaccttagaaaacatttgcctcagccacagaatttgtaatcatggttttactgaagtatccagttcttagtccttagtct

SEQ ID NO: 914 - protein, 1015 aa, Homo sapiens
MRGSGPRGAGHRRPPSGGGDTPITPASLAGCYSAPRRAPLWTCLLLCAALRTLLASPSNEVNLLDSRTVMGDLGWIAFPKNGWEEIGEVDENYAPIHTYQVCKVMEQNQNNWLLTSWISNEGASRIFIELKFTLRDCNSLPGGLGTCKETFNMYYFESDDQNGRNIKENQYIKIDTIAADESFTELDLGDRVMKLNTEVRDVGPLSKKGFYLAFQDVGACIALVSVRVYYKECPSVVRHLAVFPDTITGADSSQLLEVSGSCVNHSVTDEPPKMHCSAEGEWLVPIGKCMCKAGYEEKNGTCQVCRPGFFKASPHIQSCGKCPPHSYTHEEASTSCVCEKDYFRRESDPPTMACTRPPSAPRNAISNVNETSVFLEWIPPADTGGRKDVSYYIACKKCNSHAGVCEECGGHVRYLPRQSGLKNTSVMMVDLLAHTNYTFEIEAVNGVSDLSPGARQYVSVNVTTNQAAPSPVTNVKKGKIAKNSISLSWQEPDRPNGIILEYEIKYFEKDQETSYTIIKSKETTITAEGLKPASVYVFQIRARTAAGYGVFSRRFEFETTPVFAASSDQSQIPVIAVSVTVGVILLAVVIGVLLSGRRCGYSKAKQDPEEEKMHFHNGHIKLPGVRTYIDPHTYEDPNQAVHEFAKEIEASCITIERVIGAGEFGEVCSGRLKLPGKRELPVAIKTLKVGYTEKQRRDFLGEASIMGQFDHPNIIHLEGVVTKSKPVMIVTEYMENGSLDTFLKKNDGQFTVIQLVGMLRGISAGMKYLSDMGYVHRDLAARNILINSNLVCKVSDFGLSRVLEDDPEAAYTTRGGKIPIRWTAPEAIAFRKFTSASDVWSYGIVMWEVVSYGERPYWEMTNQDVIKAVEEGYRLPSPMDCPAALYQLMLDCWQKERNSRPKFDEIVNMLDKLIRNPSSLKTLVNASCRVSNLLAEHSPLGSGAYRSVGEWLEAIKMGRYTEIFMENGYSSMDAVAQVTLEDLRRLGVTLVGHQKKIMNSLQEMKVQLVNGMVPL

SEQ ID NO: 915 - DNA, 958 bp, Homo sapiens
ctgccctcctgcttccgttgctagggacgcttcggccgaggataccgcaatggatcaggaagaggggctgaaggccttggacaatattgtcactcaattcaacgcctatgaagatttcctggactcgcagatcactactgtggacttgtactacctggaggatgaaaccctggcccgccagttggtggagctaggctaccgagggactggagagagagtgaaaagggaagattttgaagcaaggaaagcggctatagagattgcaagactggctgaaagagctcagcaaaagacgctaacaagtgctggtaaagacctacaagataattttctgacggccctggcaatgagagaagaagacaatcgcagtggaaaactgagttccgtgatctttattcgtgacagaaattctcatgggcaagagatatcaggatacatcgactatgcccacaggctaaagacggaagattttgaagtctactttactggaaaaaaaagacttcttccaaggcctacagatataagcttttacaactgggacgctgatattgctgttagtaattcaagtcccaactatcaagtgattgccgataatccagaaggcttacttttcagatacaaaagagacagaaaaattcttaatgtggacccaaaggcgcagccaggtgacaactctactagaatcactatcctgacagaactctacatacaagctgtcatttttgaccacatttccagaaggaagacttaagtaccaacatgttaatttcctaataatttgctaaatttaaataaattccgtagacagagcaaattagaataataaatgagccctgtagctggaaggcaaattagaacaataaagttaataaagaagttagaaagaaaaaaaaaaaaaaaaaaaaaaaaaaaaaaaaaaaaaaaaaaaaaaaaaaaaaaaaaaaaaaaaaaaaaaaaa

SEQ ID NO: 916 - protein, 233 aa, Homo sapiens
MDQEEGLKALDNIVTQFNAYEDFLDSQITTVDLYYLEDETLARQLVELGYRGTGERVKREDFEARKAAIEIARLAERAQQKTLTSAGKDLQDNFLTALAMREEDNRSGKLSSVIFIRDRNSHGQEISGYIDYAHRLKTEDFEVYFTGKKRLLPRPTDISFYNWDADIAVSNSSPNYQVIADNPEGLLFRYKRDRKILNVDPKAQPGDNSTRITILTELYIQAVIFDHISRRKT

SEQ ID NO: 917 - DNA, 1774 bp, Homo sapiens
agatcttgaaaacacccgggccacacacgccgcgacctacagctctttctcagcgttggagtggagacggcgcccgcagcgccctgcgcgggtgaggtccgcgcagctgctggggaagagcccacctgtcaggctgcgctgggtcagcgcagcaagtggggctggccgctatctcgctgcacccggccgcgtcccgggctccgtgcgccctcgccccagctggtttggagttcaaccctcggctccgccgccggctccttgcgccttcggagtgtcccgcagcgacgccgggagccgacgcgccgcgcgggtacctagccatggctggggcgagcaggctgctctttctgtggctgggctgcttctgcgtgagcctggcgcagggagagagaccgaagccacctttcccggagctccgcaaagctgtgccaggtgaccgcacggcaggtggtggcccggactccgagctgcagccgcaagacaaggtctctgaacacatgctgcggctctatgacaggtacagcacggtccaggcggcccggacaccgggctccctggagggaggctcgcagccctggcgccctcggctcctgcgcgaaggcaacacggttcgcagctttcgggcggcagcagcagaaactcttgaaagaaaaggactgtatatcttcaatctgacatcgctaaccaagtctgaaaacattttgtctgccacactgtatttctgtattggagagctaggaaacatcagcctgagttgtccagtgtctggaggatgctcccatcatgctcagaggaaacacattcagattgatctttctgcatggaccctcaaattcagcagaaaccaaagtcaactccttggccatctgtcagtggatatggccaaatctcatcgagatattatgtcctggctgtctaaagatatcactcaattcttgaggaaggccaaagaaaatgaagagttcctcataggatttaacattacgtccaagggacgccagctgccaaagaggaggttaccttttccagagccttatatcttggtatatgccaatgatgccgccatttctgagccagaaagtgtggtatcaagcttacagggacaccggaattttcccactggaactgttcccaaatgggatagccacatcagagctgccctttccattgagcggaggaagaagcgctctactggggtcttgctgcctctgcagaacaacgagcttcctggggcagaataccagtataaaaaggatgaggtgtgggaggagagaaagccttacaagacccttcaggctcaggcccctgaaaagagtaagaataaaaagaaacagagaaaggggcctcatcggaagagccagacgctccaatttgatgagcagaccctgaaaaaggcaaggagaaagcagtggattgaacctcggaattgcgccaggagatacctcaaggtagactttgcagatattggctggagtgaatggattatctcccccaagtcctttgatgcctattattgctctggagcatgccagttccccatgccaaagtctttgaagccatcaaatcatgctaccatccagagtatagtgagagctgtgggggtcgttcctgggattcctgagccttgctgtgtaccagaaaagatgtcctcactcagtattttattctttgatgaaaataagaatgtagtgcttaaagtataccctaacatgacagtagagtcttgcgcttgcagataacctggcaaagaactcatttgaatgcttaattcaat

SEQ ID NO: 918 - protein, 472 aa, Homo sapiens
MAGASRLLFLWLGCFCVSLAQGERPKPPFPELRKAVPGDRTAGGGPDSELQPQDKVSEHMLRLYDRYSTVQAARTPGSLEGGSQPWRPRLLREGNTVRSFRAAAAETLERKGLYIFNLTSLTKSENILSATLYFCIGELGNISLSCPVSGGCSHHAQRKHIQIDLSAWTLKFSRNQSQLLGHLSVDMAKSHRDIMSWLSKDITQFLRKAKENEEFLIGFNITSKGRQLPKRRLPFPEPYILVYANDAAISEPESVVSSLQGHRNFPTGTVPKWDSHIRAALSIERRKKRSTGVLLPLQNNELPGAEYQYKKDEVWEERKPYKTLQAQAPEKSKNKKKQRKGPHRKSQTLQFDEQTLKKARRKQWIEPRNCARRYLKVDFADIGWSEWIISPKSFDAYYCSGACQFPMPKSLKPSNHATIQSIVRAVGVVPGIPEPCCVPEKMSSLSILFFDENKNVVLKVYPNMTVESCACR

SEQ ID NO: 919 - DNA, 3328 bp, Homo sapiens
ggtccctgagcaaaatgggaaatggttcagtgaaacctaaacattctaagcacccagatggacactctgggaacctcaccactgatgctctgcggaacaaggtgacagagctggagagagagttgaggaggaaggatgctgagatccaggagcgggagtaccatttgaaggagctgcgggagcagctgtcgaagcagactgtggccattgctgaactcacagaggagctccagaacaagtgcatccagctgaacaagctgcaggatgtggtgcatatgcagggaggaagcccgcttcaggcctctccagataaagtgcctcttgaggtccaccggaagacctctggattggtctctctccatagcaggaggggagcaaaggctggcgtgtctgctgagccaacaacccggacctatgacctgaacaaaccccctgaattttcctttgagaaagcaagagtcagaaaagactccagtgagaagaagctcattacagatgcccttaataaaaatcagtttctgaaaagactggatcctcagcagatcaaagacatggtggaatgcatgtatgggagaaactatcagcaagggagttacattattaagcaaggagaaccaggaaaccatatctttgtgctggcagagggtcgactagaggtgttccaaggggagaaattgctgtcctccatccctatgtggaccacatttggggagcttgccattttatacaattgtacaaggactgcctctgtgaaagctattaccaatgttaaaacatgggcactagatcgagaggtattccagaatataatgaggaggacagcccaagctagagatgaacaatacagaaacttcctcagaagtgtatccttgctgaagaatttacctgaagataaattaaccaagatcattgactgcttggaagtggaatactatgacaaaggagattacatcattagagagggcgaggaaggaagtacctttttcattttggcaaaaggaaaggtaaaagtaacacagagcacagaaggccatgatcaaccacagctgataaaaacactgcagaaaggagaatactttggagaaaaagctcttatcagtgatgatgtcaggtcagctaacattattgctgaagaaaatgatgttgcatgcctggttatagatcgagaaacattcaaccaaactgtcggtacatttgaagagctgcaaaaataccttgaaggatatgtggcaaacctgaaccgtgatgatgaaaaaagacatgcgaagcggtccatgtctaactggaagctgtccaaagcactctctctggaaatgattcagctgaaggagaaggtggccagattttcctcatcatccccattccagaaccttgagattattgcaacactgggcgttggtgggttcggaagagttgagcttgttaaagtaaaaaatgagaatgttgcttttgctatgaagtgtataaggaagaagcacatagttgacaccaagcagcaggagcatgtctactcagagaagaggatcctagaggagctgtgctctccattcattgtgaaattatatcgtactttcaaggacaataagtatgtatacatgcttctggaggcctgcttaggtggggagctctggagtatattaagggacagaggcagctttgatgaacccacctccaaattctgcgttgcttgtgtgacagaagcatttgattacctgcatcgactaggtattatctacagagacttgaaaccagaaaacttaattctagatgctgagggttaccttaaattggttgactttggatttgcgaagaaaatagggtctggacagaaaacatggacattctgtgggactccagaatatgtagctcctgaagtcattctcaacaagggacatgacttcagtgtggatttctggtcactgggaattctagtgtatgagctcctaacgggcaacccacccttttctggggttgaccaaatgatgacctacaatttgattctcaaaggaattgaaaaaatggattttcccaggaagataacacgacgacctgaggatttgattcggaggctttgcaggcaaaatccaacagaaaggctgggaaatctgaagaatggaataaatgacattaagaaacacaggtggttaaatggttttaattgggagggactgaaagcacggagccttccatcacctttgcaaagagagctcaagggacccatagatcacagctactttgacaaatatcctcctgaaaagggaatgcctccagatgagctatcaggctgggataaagacttctgacagaagaaaagttgattactgcctgtactctacagaagaggacctcaaggatcaataatccaacacattattttcttttcagagtattataatatctttggaagaccattagggaaaagaaattcctgcacaatgggaagaggagaatggtgtggatatggttctgagttatagtgtcttatttagatgctgtgaattattgatgtattacattatttgcttttctcaactgctagaggctaccccattttcctttccacaatcagagccatttttgttaaagtggcagttttttctgcaatctattgttccattccaatcatatccttctcgtttgagtactactaacgtttaaaaagggtcttgcccttgaataactaagtcatacaaatagaaggaaaaacaatggtgaattttggagagctccccagctctcagcaacttcatataagcatggtggtatcttaaaatggtggtttgcagaaaccatggtagccaacagaacctcctgactttcacctgcttttaacctgaaaatatattaatacgcctctgacatgagtccagggagaggcaagattgagcaatagtcagtggcaccatttcctaaagtaactgaatcaatcaatccagtcaggtaattattttctattggggaacttagaaaaaaaagtaaagcaagaaatattttctctcctttatgatcagtgataccttagagacttttcgaaagtccttgttaaagatagttacaatgtgtggttaaatgatgctaaaatattttcacaaccagagtagaaaacgtgctggaacaaaattgcgaaggcttttgcctcccagtaaatagaaaggaaaatatattctagtaggtaagactgctgactctttgaaaatctgaggtattttgaaaaattctgtgatagttgctattaataaaccaaaattgtatagaatcatcgttaatttttaatataaatcccattgacaaatgttgatgcactgtagtcactgctgagttaatagcg

SEQ ID NO: 920 - protein, 762 aa, Homo sapiens
MGNGSVKPKHSKHPDGHSGNLTTDALRNKVTELERELRRKDAEIQEREYHLKELREQLSKQTVAIAELTEELQNKCIQLNKLQDVVHMQGGSPLQASPDKVPLEVHRKTSGLVSLHSRRGAKAGVSAEPTTRTYDLNKPPEFSFEKARVRKDSSEKKLITDALNKNQFLKRLDPQQIKDMVECMYGRNYQQGSYIIKQGEPGNHIFVLAEGRLEVFQGEKLLSSIPMWTTFGELAILYNCTRTASVKAITNVKTWALDREVFQNIMRRTAQARDEQYRNFLRSVSLLKNLPEDKLTKIIDCLEVEYYDKGDYIIREGEEGSTFFILAKGKVKVTQSTEGHDQPQLIKTLQKGEYFGEKALISDDVRSANIIAEENDVACLVIDRETFNQTVGTFEELQKYLEGYVANLNRDDEKRHAKRSMSNWKLSKALSLEMIQLKEKVARFSSSSPFQNLEIIATLGVGGFGRVELVKVKNENVAFAMKCIRKKHIVDTKQQEHVYSEKRILEELCSPFIVKLYRTFKDNKYVYMLLEACLGGELWSILRDRGSFDEPTSKFCVACVTEAFDYLHRLGIIYRDLKPENLILDAEGYLKLVDFGFAKKIGSGQKTWTFCGTPEYVAPEVILNKGHDFSVDFWSLGILVYELLTGNPPFSGVDQMMTYNLILKGIEKMDFPRKITRRPEDLIRRLCRQNPTERLGNLKNGINDIKKHRWLNGFNWEGLKARSLPSPLQRELKGPIDHSYFDKYPPEKGMPPDELSGWDKDF

SEQ ID NO: 921 - DNA, 787 bp, Homo sapiens
tttggagttgtttacattcagacaaagctcatctggttgtttgcagctagtcacaaggtggcccattgtcctgccttgcttttctccattatctctgggtcaagttgtttctttgataaatccaaatcatgaaaatagcctgctgaaagaattcactttgaaaatgccacaaaacagacaatggaaaaatgagatgaacaagtgcgaatccatcattcttctcaggttctggaaaaatgctggttttcagctcctggaaaattctcacaagacatctgttttgttttatatcttcatttgtttccattcatctttcctactgtagacactgtctatgatttttttgtgtgggggttttggcaaagtgcatacgattactttgaatttagagaattaaattgtatttatccactgaaagctgtttttaagatctagctgtgttgtcacttggatatctagtttattacttctacttgcaaagtagtacaatgagataccaaaccaccatattttttccatctattttctcaattatggacacttttcaacttattactacagtagggaagttaaaggctatttgaattattggagaatagagatacctaggatcagaattaccaagtcatagaccgaaactttggctaagacctaaacttaatatgggtaaatattgttacattgctccctagaatattgatatggtttggatttgtgtccccacgcaaatctcatgttgaattgtaatcctcaatgttggaggtggggaatggtaaggggtgattag

SEQ ID NO: 922 - protein, 53 aa, Homo sapiens
MPQNRQWKNEMNKCESIILLRFWKNAGFQLLENSHKTSVLFYIFICFHSSFLL

SEQ ID NO: 923 - DNA, 1750 bp, Homo sapiens
cggcttcctttttctccacacttctagctaccttgtttttatcgttttcggcacctgcccttccccagcgcccccaccaccccgagcactatgtatgatcgggctccccgcctgctcaaattggctgaaggtggcagcactgaggcccatgtgggtcctggatcctaccaggtacctttcctgaagcagcaggcgacaggtagtaatgcaccatttctttctttgactgccagagaaagtacttttaccattgcctctagcattgagaaagctgttccaggtccaggacactataatgtttcagaagcacagaaaatttcaagatcacctacacttaccagaagtgttgatgttccttcaattccttcttgtggaaagtcatatggttatcatattaatgatgatggcagtattataaaatgttttccacctgcttgtgacagtacacttggtccagcatactacaaacctcaatttgatgtttccaatgcaactttgaaatacaaaggtatacattttggcaactcttcaggaagacaagagttacctaaaaagtcaggtcctggtccaggacagtatgatatagtccagaaaaagacatcatattatgaaaatgttaacatcaagagagatcaacaacaaaattattgttcatttatcccacgactatatgaaataatagtattgcaggagaaaaaaaagagatttttacctatgaaatcaatcaccccggctcctggcacatataatgaacctcgaactgctctcaagtctttgaagaaaacatcaggactgaaaaatattccatttggtcaaagtgctgttcgattcacacaggacatcaggacagaggaaatgccaggtcctggattttataatgtcttgaacaatactataattgccagtgttagaaatatctgctcaaagaaacagaagaaaagtgcatttggttcttctgttcctcggactttcttctcggttcagaaagaagcttgtgctacccctggacctgctgattatcaggaattttggcattcacagggtgtgggaatttctgatgaattacctaacttgactaacaaatatgctgctttcttgtcaagagccaaaagaactatgaaagtaccagatatggttattccagcgccaggcagctatgatgttcacaaatcatatgagatgtcccaagttaagcataaatatatgccacctcgtagtttagtggctaaaagaaaacatgcctcttttcttagtgcaactcctcggtgcctagaaaaagtgactgatgggccaggtcctgcagcatacaatcctgttttaaggaaatcttgccccatacccttatttgtgaaagcatcaaagcgctttgaagagtccaaagagattactccaggcccagcaacatatgagatatcccaggagaaaaagaaaggaaatctcattggtgaaatggctgctgatataatgtgacataaatttatggcaaaaacttaaaaaacaacttcatggaagtcagtttatttctttgtcattttaacaaaatttattccaaatataggagtaataaaagcataattttcacttgttcaggcattcgctcaggctttagtgactatatgacacaaccacggagaaataaaccttgaagactgaaaaaaaaaaaaaaaaaaaaaaaaaaaaaaaaaaaaaaaaaaaaaaaaaaaaaaaaaaaaaaaaaaaaaaaaaaaaaaaaaaaaaaaaaaaaaaaaaa

SEQ ID NO: 924 - protein, 459 aa, Homo sapiens
MYDRAPRLLKLAEGGSTEAHVGPGSYQVPFLKQQATGSNAPFLSLTARESTFTIASSIEKAVPGPGHYNVSEAQKISRSPTLTRSVDVPSIPSCGKSYGYHINDDGSIIKCFPPACDSTLGPAYYKPQFDVSNATLKYKGIHFGNSSGRQELPKKSGPGPGQYDIVQKKTSYYENVNIKRDQQQNYCSFIPRLYEIIVLQEKKKRFLPMKSITPAPGTYNEPRTALKSLKKTSGLKNIPFGQSAVRFTQDIRTEEMPGPGFYNVLNNTIIASVRNICSKKQKKSAFGSSVPRTFFSVQKEACATPGPADYQEFWHSQGVGISDELPNLTNKYAAFLSRAKRTMKVPDMVIPAPGSYDVHKSYEMSQVKHKYMPPRSLVAKRKHASFLSATPRCLEKVTDGPGPAAYNPVLRKSCPIPLFVKASKRFEESKEITPGPATYEISQEKKKGNLIGEMAADIM

SEQ ID NO: 925 - DNA, 1613 bp, Homo sapiens
gccacacaggctccttggagtaagagtgtgagaaactggatgaagacagctgtattcttttggaagcgttcgagattggtctgtctctaccaactaaaaacttctagcttaagtgcagagatttaaggagatcaacaaaaactcagtctagacatattatgaggctgggagggtatcaacagacttgagttcttgtcagcaagatcacctgcttttaatattgtcctcagggtctgagcacatctggaagtgaggtcaatcaagttagaccccaaaaacttttgtgacaacagtgaagaggggaaaataaacacaccacaaacatgaacctcaaccccccgacatctgctcttcagatcgagggcaaaggcagccatattatggctagaaatgtaagctgctttctagtcaggcacacccctcatcccagaagagtctgccacatcaaaggcttgaataacattccaatctgtactgtgaatgatgatgagaatgcatttggaacattgtgggaagttggccagtctaactacttagagaagaacaggataccatttgccaattgcagttaccccccgagcactgcagtccagaagagccctgtaagaggaatgtcgccagccccaaacggtgccaaagtgcctccacggcctcattctgagcccagtagaaaaattaaagagtgcttcaaaacttccagtgagaatcccttagtaattaaaaaggaagaaattaaggccaaaagaccaccatcacctccaaaggcatgctctactcctggctcctgttcttcagggatgacaagtaccaagaatgatgtgaaagcaaacaccatttgcataccaaactatctggatcaggaaataaaaatcctggcaaagctctgtagcattttgcatactgattctctggcagaagttttacagtggctgcttcatgcaacttcaaaagaaaaagagtgggtctcagctttgattcattctgagcttgccgagataaacctgttaactcatcacagaagaaacacctcaatggaaccagcagcagagactgggaagccacccacagttaaatcaccacccacagttaaattgcccccaaattttactgcaaaatcaaaagtgctgaccagagatacagaaggggatcaaccaaccagagtgtcaagtcaaggatctgaagaaaacaaggaagtaccaaaagaggctgagcacaagcctccactacttataagaagaaataatatgaaaatacctgttgcagaatatttcagcaaaccaaattctcctcccaggcctaacactcaggagagtggatcagcaaaaccagtgtcagcaaggagtatacaagaatacaacctctgtccccaaagagcatgttatccttcaacacaccggaggtagaagttctagactgggtgaattctttcatgaatatgagcttcacatttacatcatcaaattatttttcaaatgaatatttttggtattgaggaatcaagtggtcctctttatggtggcacatgtaaatctaaaaatacctgtatgtaatgctacaaataaatattactggaaatgatatttccatttgtagttaaaaaaaaaaaaaaaaaa

SEQ ID NO: 926 - protein, 359 aa, Homo sapiens
MNLNPPTSALQIEGKGSHIMARNVSCFLVRHTPHPRRVCHIKGLNNIPICTVNDDENAFGTLWEVGQSNYLEKNRIPFANCSYPPSTAVQKSPVRGMSPAPNGAKVPPRPHSEPSRKIKECFKTSSENPLVIKKEEIKAKRPPSPPKACSTPGSCSSGMTSTKNDVKANTICIPNYLDQEIKILAKLCSILHTDSLAEVLQWLLHATSKEKEWVSALIHSELAEINLLTHHRRNTSMEPAAETGKPPTVKSPPTVKLPPNFTAKSKVLTRDTEGDQPTRVSSQGSEENKEVPKEAEHKPPLLIRRNNMKIPVAEYFSKPNSPPRPNTQESGSAKPVSARSIQEYNLCPQRACYPSTHRR

SEQ ID NO: 927 - DNA, 3711 bp, Homo sapiens
gtttgctggctgggagcctagaagggatagtgggcgaggctccgccccgtggtggggcgctttccgtcggcgtgtgttttggggttgccatcggcccgtagtatgtgaaaagtgagtttgcaaagaatcagtgggaaatctgtactctaaagggccggaaagcgtgttatggccctgccacttcgtggctagagaccgtgggctttacctctttaaagctgccttacctcatttttcctgcaaagggctgacgtcgctgaactctctgaaatgtagagagcccgaggggaagttgctgcagaggcaccaaataatgtcatctgaaatgttgccagcatttattgaaacttctaatgttgacaaaaagcaaggcataaatgaagatcaagaggagagccagaagccaagattaggtgaagggtgtgaaccaatatctaaacgacaaatgaaaaaactaataaaacagaaacaatgggaagagcaacgggaactccgcaaacaaaagcgaaaagaaaaacgcaagaggaaaaaattagagcgacaatgtcaaatggaaccaaactcagatggacatgacagaaaacgtgttcgaagagatgttgttcatagcacccttcgccttattattgactgtagttttgatcacttgatggtattaaaggacattaagaaacttcataagcagattcaacgatgttacgcagaaaaccgacgggcactgcatcctgtgcagttttacttgacaagccacggaggccagctgaaaaagaacatggatgaaaatgacaaaggatgggtcaactggaaggatatccatatcaaaccagagcactatagtgaactcataaagaaagaagacctgatttaccttacgtcagattcacctaatatactgaaggaattagatgaatcaaaggcctatgtgattggaggattagtagatcacaaccatcacaagggactcacatataaacaagcgtcagattatggaatcaatcatgcacagctcccacttggaaattttgtgaagatgaatagtcgaaaagttttggcagttaatcatgtgtttgaaattattctggaatacctggaaacaagagactggcaagaagcattttttactatcttgccccaacggaaaggagctgttcccacagacaaagcctgtgaaagtgcttctcatgacaatcagtctgtcaggatggaggaaggtggatcggacagtgattccagtgaggaggaatatagcagaaatgaactagattcaccacatgaagaaaagcaggataaggaaaatcacactgaatctacagtgaactctctgccacactaatgttacctggtttccttttagtttaaggaaaaattaggagaaagtgaggtgctatatagaatattgaaattggaagaacattttattttctcttatttctgttgtgatttttaaaaacttttttttggacctaaataataataaaaaaaaaagccctttaaactttgtaaggaaatattttttgattttgcgtaagaagatttaaatgtgtatgtgattttttttgtttttgtttttaaagcctcagtagtttctagataattttactgtattagtatattttcattctttcattttatattctttagaatgtgccttctgacctttcagttttttaattttatagtcacatcaacatctttatgatctattgcctatatatctgtgagggcacatattcataaatatactgtcaatctatcagcatttgtgtatggtaggttaccctctatttgcagcttttatgtttaaattagttacttgaaagaatgtagtaattttaggaagaagtatcagtttgatagacttaataattcatttcttttggactatggagcgcatatctgttccttctttatgatgcctttttatggttctgaagtaattactgaagagttgagaatctctttaatgcattttcttaattcttacaatggtgataagttacttcaattataaaattgaattttgcagactaaattattttataaggctgttgctattgaaagatcaattttgtctttacctgcatttaaaatggaacagctcttagcagctgtggtttttttttccatattttttttaaatttgttggctcttaagatgaataaagtttataggtgcatctgcctcctcttctctaagaatatgcatactaatgtttgtttctataaatcaaatacacatgtgataatatgcatgtaaatacataactatcctcatcatgtatggctctcagttcttaattgatgataacatgattgaattgccatatatctgtattacttgtgtgaatggttgtgttgaacacgctaagaacaatttgaattttattaagtacaaaaatccttaacgtttgtatgggaacattggcaagaaagaatagtgtgaaagggaactgttttagtttcctatcagtaattgtacatgcagttaaatgtttaaggtaaaatgattggtctctgtcacagctaaaagatttcagtagccttcattgagtttgggtaaaataagttgctgttcttttgtcttctttttaatatataaaagttatatttaaaaagtatataacatactatatatgttacatactaacatatatatacacaacagaaagtttattggatttagtactgatatttactgtctatttttgttactttgttcttagtaatctattatagttacctattttaaggtaaggtctgtaggcaagatatgtaagtaaagacaagccctacaattttaaaataacaaagcttatgtcttaagttgtattttttcaaaggttcatgtttttctgagtaaatgtggtttattagcatgaaatattatgccttttacttaaattattttatgtaaaatagggcactgtttaattatgaaagggggaaaatcattccaaataagagtttaatttttattaattataaaaaactctgtattagtttcctagatgtgctagaacaaattaccacaaactgggtggctttaaacaacagaaatttattctcttaacagttccagagactaaatgtccagactcacaatgtcccagtgccatgcttcctccttaggccctaggaaagaatacttcctagcctcttcctggcttttggtggttgccagcaatccctgctgttccttagcctatagtggcttgactccaatctcagttttgttgtcaagtggtcttctaccctgtcttctatgtttgtatccgtgtccaaactctttttctagggagaccagcactggattagagttcaccatgatccaatatgacctcatcttgactacatccgcaaagaccctgtctccaaataaggtcacatttacagggtaccatgtgttaggatttgacatatcttttgggggacacaattctacccactacaggcccatatcttatctaggatgttggtggcaagaaggtgaagattactacctcttttgatataactagtttctgaggtatttaaaaatttggttttaaaaatattaagctttttgctcatttgcatgtatacttttctctcaacattgttttggtttatttaggttatttgttaaaacttcagtaaatactaaagttacttgtattagaacataataaaagtagagaattaaactacctaaaaaagaaaaaaaaaaaaaaa

SEQ ID NO: 928 - protein, 339 aa, Homo sapiens
MSSEMLPAFIETSNVDKKQGINEDQEESQKPRLGEGCEPISKRQMKKLIKQKQWEEQRELRKQKRKEKRKRKKLERQCQMEPNSDGHDRKRVRRDVVHSTLRLIIDCSFDHLMVLKDIKKLHKQIQRCYAENRRALHPVQFYLTSHGGQLKKNMDENDKGWVNWKDIHIKPEHYSELIKKEDLIYLTSDSPNILKELDESKAYVIGGLVDHNHHKGLTYKQASDYGINHAQLPLGNFVKMNSRKVLAVNHVFEIILEYLETRDWQEAFFTILPQRKGAVPTDKACESASHDNQSVRMEEGGSDSDSSEEEYSRNELDSPHEEKQDKENHTESTVNSLPH

SEQ ID NO: 929 - DNA, 3392 bp, Homo sapiens
actccctcactggctgccattgaaagagtccacttctcagtgactcctagctgggcactggatgcagttgaggattgctggtcaatatgattcttcttgctgtgctttttctctgcttcatttcctcatattcagcttctgttaaaggtcacacaactggtctctcattaaataatgaccggctgtacaagctcacgtactccactgaagttcttcttgatcggggcaaaggaaaactgcaagacagcgtgggctaccgcatttcctccaacgtggatgtggccttactatggaggaatcctgatggtgatgatgaccagttgatccaaataacgatgaaggatgtaaatgttgaaaatgtgaatcagcagagaggagagaagagcatcttcaaaggaaaaagcccatctaaaataatgggaaaggaaaacttggaagctctgcaaagacctacgctccttcatctaatccatggaaaggtcaaagagttctactcatatcaaaatgaggcagtggccatagaaaatatcaagagaggtctggctagcctatttcagacacagttaagctctggaaccaccaatgaggtagatatctctggaaattgtaaagtgacctaccaggctcatcaagacaaagtgatcaaaattaaggccttggattcatgcaaaatagcgaggtctggatttacgaccccaaatcaggtcttgggtgtcagttcaaaagctacatctgtcaccacctataagatagaagacagctttgttatagctgtgcttgctgaagaaacacacaattttggactgaatttcctacaaaccattaaggggaaaatagtatcgaagcagaaattagagctgaagacaaccgaagcaggcccaagattgatgtctggaaagcaggctgcagccataatcaaagcagttgattcaaagtacacggccattcccattgtggggcaggtcttccagagccactgtaaaggatgtccttctctctcggagctctggcggtccaccaggaaatacctgcagcctgacaacctttccaaggctgaggctgtcagaaacttcctggccttcattcagcacctcaggactgcgaagaaagaagagatccttcaaatactaaagatggaaaataaggaagtattacctcagctggtggatgctgtcacctctgctcagacctcagactcattagaagccattttggactttttggatttcaaaagtgacagcagcattatcctccaggagaggtttctctatgcctgtggatttgcttctcatcccaatgaagaactcctgagagccctcattagtaagttcaaaggttctattggtagcagtgacatcagagaaactgttatgatcatcactgggacacttgtcagaaagttgtgtcagaatgaaggctgcaaactcaaagcagtagtggaagctaagaagttaatcctgggaggacttgaaaaagcagagaaaaaagaggacaccaggatgtatctgctggctttgaagaatgccctgcttccagaaggcatcccaagtcttctgaagtatgcagaagcaggagaagggcccatcagccacctggctaccactgctctccagagatatgatctccctttcataactgatgaggtgaagaagaccttaaacagaatataccaccaaaaccgtaaagttcatgaaaagactgtgcgcactgctgcagctgctatcattttaaataacaatccatcctacatggacgtcaagaacatcctgctgtctattggggagcttccccaagaaatgaataaatacatgctcgccattgttcaagacatcctacgtttggaaatgcctgcaagcaaaattgtccgtcgagttctgaaggaaatggtcgctcacaattatgaccgtttctccaggagtggatcttcttctgcctacactggctacatagaacgtagtccccgttcggcatctacttacagcctagacattctctactcgggttctggcattctaaggagaagtaacctgaacatctttcagtacattgggaaggctggtcttcacggtagccaggtggttattgaagcccaaggactggaagccttaatcgcagccacccctgacgagggggaggagaaccttgactcctatgctggtatgtcagccatcctctttgatgttcagctcagacctgtcacctttttcaacggatacagtgatttgatgtccaaaatgctgtcagcatctggcgaccctatcagtgtggtgaaaggacttattctgctaatagatcattctcaggaacttcagttacaatctggactaaaagccaatatagaggtccagggtggtctagctattgatatttcaggtgcaatggagtttagcttgtggtatcgtgagtctaaaacccgagtgaaaaatagggtgactgtggtaataaccactgacatcacagtggactcctcttttgtgaaagctggcctggaaaccagtacagaaacagaagcaggcttggagtttatctccacagtgcagttttctcagtacccattcttagtttgcatgcagatggacaaggatgaagctccattcaggcaatttgagaaaaagtacgaaaggctgtccacaggcagaggttatgtctctcagaaaagaaaagaaagcgtattagcaggatgtgaattcccgctccatcaagagaactcagagatgtgcaaagtggtgtttgcccctcagccggatagtacttccagcggatggttttgaaactgacctgtgatattttacttgaatttgtctccccgaaagggacacaatgtggcatgactaagtacttgctctctgagagcacagcgtttacatatttacctgtatttaagatttttgtaaaaagctacaaaaaactgcagtttgatcaaatttgggtatatgcagtatgctacccacagcgtcattttgaatcatcatgtgacgctttcaacaacgttcttagtttacttatacctctctcaaatctcatttggtacagtcagaatagttattctctaagaggaaactagtgtttgttaaaaacaaaaataaaaacaaaaccacacaaggagaacccaattttgtttcaacaatttttgatcaatgtatatgaagctcttgataggacttccttaagcatgacgggaaaaccaaacacgttccctaatcaggaaaaaaaaaaaaaaaaaaaagtaagacacaaacaaaccatttttttctctttttttggagttgggggcccagggagaagggacaaggcttttaaaagacttgttagccaacttcaagaattaatatttatgtctctgttattgttagttttaagccttaaggtagaaggcacatagaaataacatc

SEQ ID NO: 930 - protein, 894 aa, Homo sapiens
MILLAVLFLCFISSYSASVKGHTTGLSLNNDRLYKLTYSTEVLLDRGKGKLQDSVGYRISSNVDVALLWRNPDGDDDQLIQITMKDVNVENVNQQRGEKSIFKGKSPSKIMGKENLEALQRPTLLHLIHGKVKEFYSYQNEAVAIENIKRGLASLFQTQLSSGTTNEVDISGNCKVTYQAHQDKVIKIKALDSCKIARSGFTTPNQVLGVSSKATSVTTYKIEDSFVIAVLAEETHNFGLNFLQTIKGKIVSKQKLELKTTEAGPRLMSGKQAAAIIKAVDSKYTAIPIVGQVFQSHCKGCPSLSELWRSTRKYLQPDNLSKAEAVRNFLAFIQHLRTAKKEEILQILKMENKEVLPQLVDAVTSAQTSDSLEAILDFLDFKSDSSIILQERFLYACGFASHPNEELLRALISKFKGSIGSSDIRETVMIITGTLVRKLCQNEGCKLKAVVEAKKLILGGLEKAEKKEDTRMYLLALKNALLPEGIPSLLKYAEAGEGPISHLATTALQRYDLPFITDEVKKTLNRIYHQNRKVHEKTVRTAAAAIILNNNPSYMDVKNILLSIGELPQEMNKYMLAIVQDILRLEMPASKIVRRVLKEMVAHNYDRFSRSGSSSAYTGYIERSPRSASTYSLDILYSGSGILRRSNLNIFQYIGKAGLHGSQVVIEAQGLEALIAATPDEGEENLDSYAGMSAILFDVQLRPVTFFNGYSDLMSKMLSASGDPISVVKGLILLIDHSQELQLQSGLKANIEVQGGLAIDISGAMEFSLWYRESKTRVKNRVTVVITTDITVDSSFVKAGLETSTETEAGLEFISTVQFSQYPFLVCMQMDKDEAPFRQFEKKYERLSTGRGYVSQKRKESVLAGCEFPLHQENSEMCKVVFAPQPDSTSSGWF

SEQ ID NO: 931 - DNA, 8192 bp, Homo sapiens
atggggcatgccagtgggtcacatttcctctctgaatctccctccaagccgcactgtactcttgaagggaaagggacaaggcttcacaagaaacagcacatgctttcctttcatttctggaagtcccggggtcaacctacagatgctgcttcttccgtggccgatggcattcagactcctcgctgctgccgacggtgccaggcaaacaactggacaggacagctcagctacagaacactggccacagtctcggccggagcagcagccccccagccacagaccacctccaccgcctcatccaggagccttcccacctccctcaggcttgctgcggccccgccacaggggctgaagaactgggaggtggtggcagcagtggcagcagtgcctacagccttggggccagtccagatacgtgggaccctgcttcgggcaactctgcagcccctccggggccagagacggacccaagacttccccagcgatcaccattgtctcttcctgtcgctgaaacctgggcaagggctcataatggaagctgcccctcctgagctgaattcgaaagcaagacaggcggaggtgggggacggggtgagcagtgctcaagacagccaggagctcaagcagcagctgtggccacttcccaagccttcagcctcctcccagcgagaagcgaaatatgtggacatgtgtgcttcagctgaagtccagagggagagtccccagaccatgaaacttaccctggggcactgccctgggggtcagagggcctctaggagcccaaaggagaaagcccaagatgaacccagcagcaagactccaagcccccagaacaatcctgcctcctcccaactctctagatcccagcactctgcctctgaagagggtggcaatttctcatcttcctcatcctcctccccgatgaacaaagcagaagaggatggcctttccaaaatggaggactccaccacatccacaggggctctggccacctcctcttcatccttaggcttcgagagtgagagtggtgaaagtgaaggttgccaggccggcagcagggacccccccaaagtcgaagaggctcactacatcaccacccatgagatccagctgagtgaggtggaacaggacatggatttcgacgtgggactggcctcccgctgggatttcgaggacaacaacgtgatctactcgttcgtggattatgcttcctttggtggcagcgacgagaccccaggggacatcaccagtctgaccgaagaggacgacgacaacagctgctacctcagcaccactcccagcaccaacaccacccggacgcccagccctacaagcagcgacctggcccgccccaatgcaggccgcagtggccgcgacaccagcagcaccgaagcagcttcaggggcagcagccgccgccgcaagcagctgtgggagtgcagcaagccagatcctcctatcaatcaaaccggcttcccgggctataaatgagcctagcaacgtgcgtgcaaagcaaaacattatttatgctgccaagcatgaaggcgacatgagcctccgcgtctctacagctgctgaacacaattcaagttcgctgaagcaaaacccggctgcagcagtggctcaggaccatgcaaagaaattcattgctgtacctgctcgcctgcaaaccaggtgcggggccatccgggcgaaggagctggtggactactccagcggagcctccagtgccgtgagcgaactggacgatgcggacaaagaggtgcgtaacctgacctcccgggccttccggagcctggcttacccctactttgaggctctgaacatcagctcccgggagtcctccaccacgctctccgaagtgggctttgggcgctggtcaactttcctggacttaaaatgtgggggtgttggggccagggtggagcagagcctcctcaggagcagcgcggcctctgtggctgcaggtctgaggaagggcagtggggcccgggccactgccgaccagctctacatccagtccaagaagtctcagaccaaggccttggagttcgtggtcagcaaagtcgagggggaaatcaaacatgtggagacgcccctgtgtttccagaagcaggtccagacgggctcccgcgtcgtcacccttttggagcccctgaatgtacgcagtgagagcaaagccagctcggcccctgggcccggcagggccaccaaaggccccggcaagggtcccgggtcggcatacacggacgacggctccgagacctccgagggcagcaagcccacctcccgcgccgatggcccccagaagtccaagttcgcctccagtctgctcaaaaatgtcatttccaagaagatgcagcgggaacacgagttcaaaatggagaggggagaagtcatggatacatcccaccacctctcaggcacctccaaggagacggagggcgcccgcgggagcgagaggcagcgagagaggggcctgcagaggcagagctctcgtcactccgaggccggctccgagtacacagtggtcagcatgtccgacgcgggcggggaggggtccgtggcgggctccaaatctccagtcttcaaagccagtactcctcgcgagcgcaacgcaggccctggccggaatttcaccgatggacacacagaagtgtgtgaaattaaaaagagtgcctcagagaccgtcaagggcatcttcctccgtagtcagaacagtgcgttccggtcatggaaggagaaagaggccgagaagagggaggaacaagcccctatagggaagctgaagctgcccaaaggaggcgactggcgggctgatctcggggagatttctgccagcaagaacaccatcatgtctcgcctctttgtccccaacatccagcagacacccaaggacaagcagccgaggaagcaggccaccaagtaccctgctgctcaggccacctccacagcggtgatcagacccaaggctcccgaaatcaagatccggctggggagtgtgcagcagccgagctcagacttcaacattgccaagttgctcacgcccaagctggccggtggcagcgcctctaacctgttcaagaccatcgaggacaacagcagggcacagcagaaactcttccgcggggacaacctagaaaaagtgccccatttccaggtgagagacatcagagacaagtccaaggctcaaggccccctccaccaggtgagagatgtcaggaaactaattaaagggtcaggggatagtagtgacaagggcagtgttaccccagagcaggggctgactggacccaaacccaggcagctgtctgcagcagctggcggatctggatccctgtcccccatggtgattacatgccaggctgtagtgaaccagagggaagacagcatggaccgagagcccagggaaagcatgggcaaagggggcggcagcagagtcttgaattcttcctccccagaagggacagtcttggttcacagggcatctggcaggctgcctgtggctaccattgcccccaataagcccgagcagggctcatacctgcctgtgctcaagattgtctccaaggcttccacccagaagaccccagagaagctcaaggaggaggaggtcaaggaggaagggaaagccacgaagccagcccggaatgccctggagaagctgactgcagccgtgaggtccatggaagagctgtacagcttcaacaggaacgagtggaagcgcaaaagcgaccccttgcctatgatgatggacagccacgtgctgtcgctcattgccagtgaggagagggaaggggtagtggttgctgatggagaccacgacaagctgtccaaacggctgggtgaggtggaagagcggggcacaggaaacaaagctggtgtggtcctgcgaggggcccccatagaacgtctgcagcggagaaactccaaccccagcgctgagagtgtgtctgccagggcagcggcctttgagaacctggccagggaaagaccccgatctctctatattcccccagtccacaaggatgtagagagaacccaacccctgcagcccctcccaccactccccagcaaccggaacgtgttcacagtgagtgccagcagcatccagaaaactgggggtgtcgctggcaagttcccacaagggccttctccggagagtccttcagcagctaagggcatcaagtcgcagggactccggtccctcaagatctctccagccacccgggcacctcctgatgaggtgaccaacaggaaaagtggcagcaatttggagaagagcaacagtgactgtgagaattacctgaccatccctcttaaaggaagctctgctgcaggggagcttcttagcaggcctggggcttccagggaggggccccccaactcctcagctgccactctctgtagtttacccccgctgagtgcccgcagtcaggtccccagtagctccaaaggctctcaggttagtggaaccagccgaccagcttggcgtaccaaacctgacaacccccgggagacagtagctgcccccccagggccacagagccccgagcatccccccaccaccatctaccaccagccgccgctgcccttcaccctacagggggcccagcctcaggtcctctgcttctccccacccagcatgcctgccccagcacctgcagcctcagctcccgtccccacagaccccttccagcaggcacagcctcaacagacccagcgtaagatgctcctggatgtgacaacaggccagtactatctggtggacacaccagtacagcccatgacccggagactgtttgaccctgagacagggcagtatgtggatgtgcccatgacctcccagcagcaggctgtggctcccatgtccatctctgtgcctcccttggccctgagtcctggggcttatggacccacctacatgatttaccctgggtttctgcctaccgtgctgcccaccaatgctctgcagcccacaccaattgctcgcgctccaagaggaagtgagctctccccaatggtggcagaaccttccagcaaagaggcagctgcaacgttcaccgaggccccatacttcatggcttctggtcagtctccggcctcctcaacctcctcagccccagcagccacatcccagctcctaggggccaaggcctttgcccagctgcatggcaagcctgtcatcagcattacttcgcagcccctggggccacggatcattgctcccccttcctttgatggcaccaccatgagctttgtggtagaacacagatgatgagcagccaccaggaagcggaatgaaaaactgctggagcaagacaaaaagatggactattcttctttaatctggaatttgcattgtaatagcactaagaattatttcatctgaaaaacttcttccacatgtgttattcttaatttttgcttcttataagctaagtgtgtaagtttctatatttttctgaacaatcctcttaaggcagtttttattttaattttattaagttgattgaatggttgcattttttccctttatgactatttctttttatacttcaacacaggatataagctttctattcacctccttcccccctgtacttgtgactagacaaacaattcctttgttcccattgttcagtcaaaacataccacagaatgggattgattctgttgtaaaccaagctagtaaatgagtaatttggatcacgaatctccttatagtttcttggaatatatcaagactagctggctgagttgtaatacgtatttaagttttcactatgatggtctgctctttgaatcatatatcagccaaacctacccattctcttggttatgctctatatgttcttttattaggtttggcatgatttcaaatgtgattgtgaaaaatggtggttgtaatgtttgtgctttattttatttttcccatttgtacaatgccacgacactatttgttgccttaaaatagaatggcttgaaatactggaaagccaatgattgcatctaaaattaagtacttagtctcagaaaggtataaaatatctattttcctttaagaatccaattatttttgtgggtgcataacatttttcttttcttcaataattccctccatagttgcatactcgtgtctctcatggattgtttagagtctaaagagtgacccatttggggcagtagagtagaatatggcactaattcagtggctctgattcactccagccctagcctcgctatcccaataacagtaacctagagttacagcacttgctccttatgaggatgaggcaggtttgaagagatgtcaagaatccaaatcacagaatcttttattgacatttagtactgtctcagttgtaacccaattctgaaggctatttgagtgagtgttcacagggagtcttgaagactggaagacttgattgaacagataaatatttagcttgtcataataagtgtatcgatatatacttggcaaatgttacattgaaatattacttaattactttttaaaggaataatttgaaggttttcccaggatttttttttaagaatctccttttatttaccaatttgtttaaagataaagcattctggtaattttttaaacaccctaatattattttaaacctcagcaatatttgatttctgcttaaattttcttcataagccacagaattttatgctactcatgacaaaaagtgtgagtaaaaaactaggagactgagttttgtatgatttatataatctttttactttgtagttatgcttcccatctcagactcttaaaaaagacttaatttcactttcagggccttcctttaagggatcttactctgaaaaaaagttctcttgggtatagggaaaggtttgaggcgggaatagtcagctctgatcacgattcaattgcttgttgtgctgatgagctatgaaatgaagctatagactttatgagacatgaaatatgaaacatagtctctgtgtataaaaaagatgcccttgtgccaaattcaagaaaaagatatttctttatcatagaggtcttcttacccaggcacatcaatcaattccccccagaacttaaagtaagttttatccactggggaacaaatcttatggcatcagagcttcctcgttttcaggagagattggctgggtataaggtaacttaatattgacccaagaaagtagaatccctttcagaaatcttacacttattttactgaaagcagcaccaagaaacctccagtatttgaatacacctggtgaaacctatataggatttgggtggatagtaccaaaattgttaagactggtttaaagccaaatgcgactttcaggaaaaaccagtggccatgttgagtagtgactgctcaccaactcttccaaaagagagacaactccttctctagaaaatgtggtagagttgagggcttgggacccctaatctatgtatcagtgtttctcaccagcagatttgagttttaaattctcacactgaggtaaattaggacacaaactaaggaaagaaagaaaaagcttttcatttgtttgttctatacaagaggcttcaccttttaggaagttgccaaggacacagtgatgtccaagtggctaaaaacgcaacttttaaataatgttctattaatatcatgtcatctatcgataattttatggttctctatttcaccaaatcatacaaagctgctaggccattcactacctccagtgatagggaaaaaatattttcacgggcatgaggtaaatctcaatcttgatttttattgttttgtcatttcttgaggttgcatgaatatttgaatgaagtgatatacccttccttttatagctcaaggggaatcaaacaagagcctatgaagccttctgacccataaaactattaccctaataatgtccctttagttactgaacttcccttttattttttattactataaaaccattagtaaaacatttcctaaatagtgccttgaacttgaatctaatcagaattgcagagtctggcttttataatatcctcttagggttatatgtgtggcttagttttccagaagatccactttttacttgttgataaaatggtcatatttgaaatatgtcccatttcaatcatttctggaaaactgaacacatgtgtaaccgtataaaaatttaattcgccag

SEQ ID NO: 932 - protein, 1758 aa, Homo sapiens
MGHASGSHFLSESPSKPHCTLEGKGTRLHKKQHMLSFHFWKSRGQPTDAASSVADGIQTPRCCRRCQANNWTGQLSYRTLATVSAGAAAPQPQTTSTASSRSLPTSLRLAAAPPQGLKNWEVVAAVAAVPTALGPVQIRGTLLRATLQPLRGQRRTQDFPSDHHCLFLSLKPGQGLIMEAAPPELNSKARQAEVGDGVSSAQDSQELKQQLWPLPKPSASSQREAKYVDMCASAEVQRESPQTMKLTLGHCPGGQRASRSPKEKAQDEPSSKTPSPQNNPASSQLSRSQHSASEEGGNFSSSSSSSPMNKAEEDGLSKMEDSTTSTGALATSSSSLGFESESGESEGCQAGSRDPPKVEEAHYITTHEIQLSEVEQDMDFDVGLASRWDFEDNNVIYSFVDYASFGGSDETPGDITSLTEEDDDNSCYLSTTPSTNTTRTPSPTSSDLARPNAGRSGRDTSSTEAASGAAAAAASSCGSAASQILLSIKPASRAINEPSNVRAKQNIIYAAKHEGDMSLRVSTAAEHNSSSLKQNPAAAVAQDHAKKFIAVPARLQTRCGAIRAKELVDYSSGASSAVSELDDADKEVRNLTSRAFRSLAYPYFEALNISSRESSTTLSEVGFGRWSTFLDLKCGGVGARVEQSLLRSSAASVAAGLRKGSGARATADQLYIQSKKSQTKALEFVVSKVEGEIKHVETPLCFQKQVQTGSRVVTLLEPLNVRSESKASSAPGPGRATKGPGKGPGSAYTDDGSETSEGSKPTSRADGPQKSKFASSLLKNVISKKMQREHEFKMERGEVMDTSHHLSGTSKETEGARGSERQRERGLQRQSSRHSEAGSEYTVVSMSDAGGEGSVAGSKSPVFKASTPRERNAGPGRNFTDGHTEVCEIKKSASETVKGIFLRSQNSAFRSWKEKEAEKREEQAPIGKLKLPKGGDWRADLGEISASKNTIMSRLFVPNIQQTPKDKQPRKQATKYPAAQATSTAVIRPKAPEIKIRLGSVQQPSSDFNIAKLLTPKLAGGSASNLFKTIEDNSRAQQKLFRGDNLEKVPHFQVRDIRDKSKAQGPLHQVRDVRKLIKGSGDSSDKGSVTPEQGLTGPKPRQLSAAAGGSGSLSPMVITCQAVVNQREDSMDREPRESMGKGGGSRVLNSSSPEGTVLVHRASGRLPVATIAPNKPEQGSYLPVLKIVSKASTQKTPEKLKEEEVKEEGKATKPARNALEKLTAAVRSMEELYSFNRNEWKRKSDPLPMMMDSHVLSLIASEEREGVVVADGDHDKLSKRLGEVEERGTGNKAGVVLRGAPIERLQRRNSNPSAESVSARAAAFENLARERPRSLYIPPVHKDVERTQPLQPLPPLPSNRNVFTVSASSIQKTGGVAGKFPQGPSPESPSAAKGIKSQGLRSLKISPATRAPPDEVTNRKSGSNLEKSNSDCENYLTIPLKGSSAAGELLSRPGASREGPPNSSAATLCSLPPLSARSQVPSSSKGSQVSGTSRPAWRTKPDNPRETVAAPPGPQSPEHPPTTIYHQPPLPFTLQGAQPQVLCFSPPSMPAPAPAASAPVPTDPFQQAQPQQTQRKMLLDVTTGQYYLVDTPVQPMTRRLFDPETGQYVDVPMTSQQQAVAPMSISVPPLALSPGAYGPTYMIYPGFLPTVLPTNALQPTPIARAPRGSELSPMVAEPSSKEAAATFTEAPYFMASGQSPASSTSSAPAATSQLLGAKAFAQLHGKPVISITSQPLGPRIIAPPSFDGTTMSFVVEHR

SEQ ID NO: 933 - DNA, 2950 bp, Homo sapiens
gcaggctgctgtctcacagagcgagaaggtgtcaggagcagcccagttgtgtctctctctctacctctgtgaagggcgcgaatgggcagagcagaacttctagaagggaagatgagcacccaggatccctcagatctgtggagcagatccgatggagaggctgagctgctccaggacttggggtggtatcacggcaacctcacacgccatgctgctgaagctcttctcctctcaaatggatgtgacggcagctaccttctgagggacagcaatgagaccaccgggctgtactctctctctgtgagggccaaagattctgttaaacactttcatgttgaatatactggatattcatttaaatttggctttaatgaattctcatctttgaaggattttgtcaagcattttgcaaatcagcctttgattggaagcgagacaggcactctgatggttctaaaacatccctacccaagaaaagtggaagaaccctccatttatgaatctgtccgggttcacacagcaatgcagacaggaagaacagaagatgaccttgtgcccacagcaccttctctgggcaccaaagaaggttacctcaccaaacagggaggcctggtcaagacctggaaaacaagatggtttactctgcacaggaatgaactgaaatacttcaaagaccagatgtcaccagaaccaattcggatcctagacctaacagaatgttcagctgtacaattcgattattcacaagaaagggtaaactgtttttgtttggtatttccattcaggacattttatctctgtgcaaagaccggagtagaagctgatgagtggatcaagatattacgctggaaattggtcaaggacaaaagctgtattttgtctgctctctgtatatctcccgaggagaagactgatcacaaataagaaaacagctcaaccaaggggaaggcacgatccgatctcggtcgttcatctttaaatagatctttcttgccaaggaatgctctggcccaggagcaaggtggaatgtttccctgacgctgtgatctgcagcaggcttcaaatgaaaaccgactaaggattttctttcaaaaacaaatcagaagcagatgctgattgggacccatataccacgttgctgactcacgttgctgcccttccatgatgttgccatctccttgagaacactgaagcaatcaccattctgatagaaagtgcttaaaccaccactcttaggtctgctcactcttagaacacacaatggaagaggaagggtttttgttttcactcattgtggtccccaagcctattgacactagttgcctagagtcccactgtgagtcatggtcagcctgtctgacatccaggttgtgctattaaccaagaaggaaacagatacttggaggcttagatgacttctgcaggatttatattcagatagaaaacatcaaatattttcaggggagaggtttttttttttaatttttccccctttatacaaaaaaaaagaacatttccaaaactaaaatagaaaatgcttgtggcatttattttctctttttaaaaggttcagaaatttggcaggtcctttgcttctaatgacaaaactgtgagagctagatgtcctatgggcaattaggtagtataataaaggtaaatgaaggtacaatttttaaaccattattttcaccctgttggggtaaatgttttaaagagtgagaaaacataaattgagaaagggtgataaagtaatagataacttttagtttaataataattattgttattatactactaataatagagcacttgtaagcactaagttatctttatccaacatttctccaaatggactgaaagaaacttttcaaggacagtgtattataacaatccctttcccagaattagttgtatagggttggcccaagagatgtaagaaaaatctcgcattgctccctaagcaccctgggccttattaaagagcaacttctatttccagtcgggggagtaacactaaagctacaagaaatatgtaataatgataggtaataatgtgttccaaagctttttcaaactagaataaggaggcaaatagaagaatgagatactgatgtccacagttcattggcagaatctaaccccttctgttatcttttttaatactatttttgtttagatagaagtttcaaagaagataaaaatgcttgaagagcctgagagtaaaaagattatgctgcaaagctatgatataaactgctcttgcagtccaaagggatacctgattaaagaagtttcttatttaaacatctcagacgcaaaaattacattaaatttttgtatatttcaacaacattttaaatgtattttgttatgtttgtattatataggataaagcaaatgtcaagttaaaatgtattgtgttgtttgtaaagtaagaagttactggccaggagcggcggctcatgcctgtaatcccaggactttggtaggccaagacaagcagatcacttgaggtcaggagttcaacatcagcctggccaacatgatgaaaccttgtctttactaaaaatacaaaaattagctgggcatggtggcaggcgcctgtaatcccagctactcaggaggctgaggcaggagaattgcttgaacccgggaggtggaggttgcagtgaaccaagatcgcggcgctgcactctagcctgggtgacagagtcagactccgtcccaaaaaaacaaacaaacaaaacaaaacaaaaaaaacagaagttacaaatgaatactcacggatatgtatagttttatgtttgttttcttagaaacaaatgtgtttctttgggtgggtaatattgtgttttactatgtttaccttttataaaacataacctgtttatttatattctttggctttgtttattaaaaagcatgattttgctgtgcatgtaccattttg

SEQ ID NO: 934 - protein, 280 aa, Homo sapiens
MGRAELLEGKMSTQDPSDLWSRSDGEAELLQDLGWYHGNLTRHAAEALLLSNGCDGSYLLRDSNETTGLYSLSVRAKDSVKHFHVEYTGYSFKFGFNEFSSLKDFVKHFANQPLIGSETGTLMVLKHPYPRKVEEPSIYESVRVHTAMQTGRTEDDLVPTAPSLGTKEGYLTKQGGLVKTWKTRWFTLHRNELKYFKDQMSPEPIRILDLTECSAVQFDYSQERVNCFCLVFPFRTFYLCAKTGVEADEWIKILRWKLVKDKSCILSALCISPEEKTDHK

SEQ ID NO: 935 - DNA, 2085 bp, Homo sapiens
atgctcagctcagctcggccctcgcctttgatttattttttttctgggcggccgctgcgacccgggactgacttcgggatgggaagtggagcccccggagctgctaccgtggcggcggcgctgtgaggagcagccagggggaggcagctgcggctcgccggtgagtatccgggaagcgccaccatggggctccgtaagaagagcaccaagaacccccccgttctcagccaggaattcatcctgcagaatcatgcggacatcgtctcctgcgtggggatgttcttcctgctggggcttgtgttcgagggaacagcagaagcatccatcgtgtttctcactcttcagcacagtgttgctgcccctgcagcagaggaacaagccacgggctcaaagtccctctattattatggtgtcaaagatttggccacggttttcttctacatgctggtggcaatcattattcatgccacaattcaggaatatgtgttggataaaattaacaagagaatgcagttcaccaaagcgaaacaaaacaagtttaacgagtctggtcagtttagtgtgttctactttttttcttgtatttggggcacattcattttaatctctgaaaactgcctgtcagacccaactcttatatggaaggctcgtccccatagcatgatgacatttcaaatgaagtttttctacatatcccagttggcttactggtttcatgcttttcctgaactctacttccagaaaaccaaaaaacaagacatccctcgtcaacttgtctacattggtcttcacctcttccacattactggagcttatctcttgtacttgaatcatttgggacttcttcttttggtactgcattattttgttgaattactttcccacatgtgcggcctgttttactttagtgatgagaagtaccagaaaggcatatctctgtgggccattgtgtttatcttgggtagacttgtgactttaattgtttccgtactcactgttgggtttcacctggctggatcgcagaatcggaatcctgatgcccttactggaaatgtaaatgtgttggcagctaaaattgctgttctgtcgtccagttgcacgatccaagcctacgtaacatggaacttaattactctctggcttcagaggtgggtagaagattctaatattcaggcctcatgtatgaaaaagaaacggtcgagatcttctaaaaaaagaacagaaaacggagtgggagtggaaacttcaaatagagtagactgtccgccaaagaggaaagagaaatcttcataatctttgcaagcgcattgattaatgtctgcaaaggaatctgctctttgaggtttctttctgcactagagatttttctgtttttgaaaatagttcgtgctcttcggtttttgttattgaactgtttcatgtattttttaaagacatttgaggggaggaggattattatgaatgggaaaaaaagattttggttgagactaaattactcatcgtcaaaataatgtcaaaatagttttggggatcaccactatattttgttttgatttttaacctttcaacattttcctaatgatttgcagagataactgcacaattttgcatatcaatgatactggttcttactcccaccagtgtttcataatactaacaagatggtctctcctagcaagattatgtgtttaatgcttgctttggggtaaaataaaagtacgaaaaaggtggaagtcaaatcagtattctgtaattgttagaatttattttttaagaacttacaactcagaaaagattgctagactcaccaaaataataaatgttctttattttacaggtagtgattattagtgcttcatccccatttaaaaaaacacagtactaatgggtaacacatatggaggtttgctgccatatatattgtatcaaaatatcattaattaatataaaaatattaaaatcattcctgtccattccacttgtaaatgggaattcatgaaattaaatattactttaaaaaggaaaaaaaaaaaaaaaaaaaagaaaaaaaaaaaaaaaaaaaaaaaaacaaaaaaaaaaaaaaaa

SEQ ID NO: 936 - protein, 369 aa, Homo sapiens
MGLRKKSTKNPPVLSQEFILQNHADIVSCVGMFFLLGLVFEGTAEASIVFLTLQHSVAAPAAEEQATGSKSLYYYGVKDLATVFFYMLVAIIIHATIQEYVLDKINKRMQFTKAKQNKFNESGQFSVFYFFSCIWGTFILISENCLSDPTLIWKARPHSMMTFQMKFFYISQLAYWFHAFPELYFQKTKKQDIPRQLVYIGLHLFHITGAYLLYLNHLGLLLLVLHYFVELLSHMCGLFYFSDEKYQKGISLWAIVFILGRLVTLIVSVLTVGFHLAGSQNRNPDALTGNVNVLAAKIAVLSSSCTIQAYVTWNLITLWLQRWVEDSNIQASCMKKKRSRSSKKRTENGVGVETSNRVDCPPKRKEKSS

SEQ ID NO: 937 - DNA, 2126 bp, Homo sapiens
gaagaagcaatcagaagattggcaggatttaggaatctatttgaaatattcattacctattttgaattggtcttaaaaatttaaagaaatataaagctggataattaaagataaataataaaggaagaatacaaggtttctatgctgtgaagcaactgagattattatgattttggggcagtgaatttgtttctagaagttttgttggaactaaggcagaaaggaagaagaacaaatgaccttggaatgaaaaactttaagttactccacctaaccactatgaatgatagtcttgtctcaccaaccccagcccatcatctgttggacttggagctcacactttaaaaaagaagatcattctaactgcccctcatgactactgaagaggctatgcctgaaaaagcaaaatgtcctacattagagatcaccaagcaagacttttttcaagaagcaaaaactctcattgcccaacattatgagaaaataaatgagaataaagttcaaggtacttctataaatgtttttagaaagaaacaccaaaaaccgaaatctggcaaatacatacctttggagattgacaaaaaggtaacacgtgatgtggtgcaagaacatcgggccgcactcagaaggatttgctttcccaaggagctttccaaaagcgagcatcttcaggaacccccacaacgaatctccttcaaggaaccacacatttttagtagaagagaaagatgcaggcccatagatctaattacaaaaggtatgtagtgaacctgttccctgctcatgtattcaattccaagtgtattcagatgacaagttaaattggataaaatcatgactattattgaaccagtgagtaaaaaaatggagacagcaaagcaacagcactttgaggagtccagaaacagaatgttggaattactctatccctttcctgtccatctttacttacaacctgggacctctaacttggaacttctgaaagaacctgacaaagcattctatgactggagaggatttgtgctgacaaggtctttccgtttggcttgtgactcccgtcgagttagtttctctcaatcatcatcaatatttcgggattattattctaaaacctttaaaacccttattaaaaaggagcgacaacctatcaagccagaaccaaaatcacaacccaggataaaaggtactccaaataaaactgataaacttgacagtaaagttaaaagaattggaccacacatagaaatcttccaagtgttccgagaaagaaaaaaattcatgattaccccaaaattgattagaatggtcaccgtcatgcaggcacatgtcaggggatggcttgaacggaaaagattgcaaagagtaatgaccaaggctttggatcatggaccagatatgaaagcagttattaacatgtatggcagactaatccaccgtgttagatatcgacgtggtctttggaggacaagacaaattctcaacttagcagagctagaggagtggatggaccgaaaaaaattctatgaaataatgtttgctaagagggaagattggccaaaaattgaaagaaatgagctccccaatttcttcagtgactgtggtcatttcccaactcagaaacaagttgatgatacttgggacctggtccatcaagacacacccaggatcaatattttgcatccttcaatccaatcgagttgacactcagtattaaccatcacaagctccaagaaggttaagagacattaacagactgaaaaacaacctgcagcgtatagctgcccagctatgcccagcctagaccagatgaaccccacctgactcacatgagctaactaaatgtttatcattgatatgataaacacatatgagatggcaaagaaaaatattctgaactaatcaaaaagtccaaagcaattgaaatgttatttacactctatcctcctgaaggtgcacatgtgcctgacagtacactactcaagtcgacttggttgagacccatagtaaatggggaagaaggttatagatatatagttttccacctgaaattatcagaaggtgacctatatctatttgtgtttgttgtttagagtctatttgcactttgttaaaataaacaaattaaa

SEQ ID NO: 938 - protein, 288 aa, Homo sapiens
MTIIEPVSKKMETAKQQHFEESRNRMLELLYPFPVHLYLQPGTSNLELLKEPDKAFYDWRGFVLTRSFRLACDSRRVSFSQSSSIFRDYYSKTFKTLIKKERQPIKPEPKSQPRIKGTPNKTDKLDSKVKRIGPHIEIFQVFRERKKFMITPKLIRMVTVMQAHVRGWLERKRLQRVMTKALDHGPDMKAVINMYGRLIHRVRYRRGLWRTRQILNLAELEEWMDRKKFYEIMFAKREDWPKIERNELPNFFSDCGHFPTQKQVDDTWDLVHQDTPRINILHPSIQSS

SEQ ID NO: 939 - DNA, 3570 bp, Homo sapiens
agacaggtcaggacatttggtaggggaaggttgaaagacaaaagcagcaggccttgggttctcagccttttaaaaactattattaaatatatatttttaaaatttagtggttagagcttttagtaatgtgcctgtattacatgtagagagtattcgtcaaccaagaggagttttaaaatgtcaaaaccgggaaaacctactctaaaccatggcttggttcctgttgatcttaaaagtgcaaaagagcctctaccacatcaaactgtgatgaagatatttagcattagcatcattgcccaaggcctccctttttgtcgaagacggatgaaaagaaagttggaccatggttctgaggtccgctctttttctttgggaaagaaaccatgcaaagtctcagaatatacaagtaccactgggcttgtaccatgttcagcaacaccaacaacttttggggacctcagagcagccaatggccaagggcaacaacgacgccgaattacatctgtccagccacctacaggcctccaggaatggctaaaaatgtttcagagctggagtggaccagagaaattgcttgctttagatgaactcattgatagttgtgaaccaacacaagtaaaacatatgatgcaagtgatagaaccccagtttcaacgagacttcatttcattgctccctaaagagttggcactctatgtgctttcattcctggaacccaaagacctgctacaagcagctcagacatgtcgctactggagaattttggctgaagacaaccttctctggagagagaaatgcaaagaagaggggattgatgaaccattgcacatcaagagaagaaaagtaataaaaccaggtttcatacacagtccatggaaaagtgcatacatcagacagcacagaattgatactaactggaggcgaggagaactcaaatctcctaaggtgctgaaaggacatgatgatcatgtgatcacatgcttacagttttgtggtaaccgaatagttagtggttctgatgacaacactttaaaagtttggtcagcagtcacaggcaaatgtctgagaacattagtgggacatacaggtggagtatggtcatcacaaatgagagacaacatcatcattagtggatctacagatcggacactcaaagtgtggaatgcagagactggagaatgtatacacaccttatatgggcatacttccactgtgcgttgtatgcatcttcatgaaaaaagagttgttagcggttctcgagatgccactcttagggtttgggatattgagacaggccagtgtttacatgttttgatgggtcatgttgcagcagtccgctgtgttcaatatgatggcaggagggttgttagtggagcatatgattttatggtaaaggtgtgggatccagagactgaaacctgtctacacacgttgcaggggcatactaatagagtctattcattacagtttgatggtatccatgtggtgagtggatctcttgatacatcaatccgtgtttgggatgtggagacagggaattgcattcacacgttaacagggcaccagtcgttaacaagtggaatggaactcaaagacaatattcttgtctctgggaatgcagattctacagttaaaatctgggatatcaaaacaggacagtgtttacaaacattgcaaggtcccaacaagcatcagagtgctgtgacctgtttacagttcaacaagaactttgtaattaccagctcagatgatggaactgtaaaactatgggacttgaaaacgggtgaatttattcgaaacctagtcacattggagagtggggggagtgggggagttgtgtggcggatcagagcctcaaacacaaagctggtgtgtgcagttgggagtcggaatgggactgaagaaaccaagctgctggtgctggactttgatgtggacatgaagtgaagagcagaaaagatgaatttgtccaattgtgtagacgatatactccctgcccttccccctgcaaaaagaaaaaaagaaaagaaaaagaaaaaaatcccttgttctcagtggtgcaggatgttggcttggggcaacagattgaaaagacctacagactaagaaggaaaagaagaagagatgacaaaccataactgacaagagaggcgtctgctgtctcatcacataaaaggcttcacttttgactgagggcagctttgcaaaatgagactttctaaatcaaaccaggtgcaattatttctttattttcttctccagtggtcattgggcagtgttaatgctgaaacatcattacagattctgctagcctgttcttttaccactgacagctagacacctagaaaggaactgcaataatatcaaaacaagtactggttgactttctaattagagagcatctgcaacaaaaagtcatttttctggagtggaaaagcttaaaaaaattactgtgaattgtttttgtacagttatcatgaaaagcttttttttttttttttttgccaaccattgccaatgtcaatcaatcacagtattagcctctgttaatctatttactgttgcttccatatacattcttcaatgcatatgttgctcaaaggtggcaagttgtcctgggttctgtgagtcctgagatggatttaattcttgatgctggtgctagaagtaggtcttcaaatatgggattgttgtcccaaccctgtactgtactcccagtggccaaacttatttatgctgctaaatgaaagaaagaaaaaagcaaattatttttttttattttttttctgctgtgacgttttagtcccagactgaattccaaatttgctctagtttggttatggaaaaaagactttttgccactgaaacttgagccatctgtgcctctaagaggctgagaatggaagagtttcagataataaagagtgaagtttgcctgcaagtaaagaattgagagtgtgtgcaaagcttattttcttttatctgggcaaaaattaaaacacattccttggaacagagctattacttgcctgttctgtggagaaacttttctttttgagggctgtggtgaatggatgaacgtacatcgtaaaactgacaaaatattttaaaaatatataaaacacaaaattaaaataaagttgctggtcagtcttagtgttttacagtatttgggaaaacaactgttacagttttattgctctgagtaactgacaaagcagaaactattcagtttttgtagtaaaggcgtcacatgcaaacaaacaaaatgaatgaaacagtcaaatggtttgcctcattctccaagagccacaactcaagctgaactgtgaaagtggtttaacactgtatcctaggcgatcttttttcctccttctgtttatttttttgtttgttttatttatagtctgatttaaaacaatcagattcaagttggttaattttagttatgtaacaacctgacatgatggaggaaaacaacctttaaagggattgtgtctatggtttgattcacttagaaattttattttcttataacttaagtgcaataaaatgtgttttttcatgtta

SEQ ID NO: 940 - protein, 589 aa, Homo sapiens
MSKPGKPTLNHGLVPVDLKSAKEPLPHQTVMKIFSISIIAQGLPFCRRRMKRKLDHGSEVRSFSLGKKPCKVSEYTSTTGLVPCSATPTTFGDLRAANGQGQQRRRITSVQPPTGLQEWLKMFQSWSGPEKLLALDELIDSCEPTQVKHMMQVIEPQFQRDFISLLPKELALYVLSFLEPKDLLQAAQTCRYWRILAEDNLLWREKCKEEGIDEPLHIKRRKVIKPGFIHSPWKSAYIRQHRIDTNWRRGELKSPKVLKGHDDHVITCLQFCGNRIVSGSDDNTLKVWSAVTGKCLRTLVGHTGGVWSSQMRDNIIISGSTDRTLKVWNAETGECIHTLYGHTSTVRCMHLHEKRVVSGSRDATLRVWDIETGQCLHVLMGHVAAVRCVQYDGRRVVSGAYDFMVKVWDPETETCLHTLQGHTNRVYSLQFDGIHVVSGSLDTSIRVWDVETGNCIHTLTGHQSLTSGMELKDNILVSGNADSTVKIWDIKTGQCLQTLQGPNKHQSAVTCLQFNKNFVITSSDDGTVKLWDLKTGEFIRNLVTLESGGSGGVVWRIRASNTKLVCAVGSRNGTEETKLLVLDFDVDMK

SEQ ID NO: 941 - DNA, 3603 bp, Homo sapiens
agtcaaggctttgacagggcatagtctcctccaataatcttctccgttctctctcattattccctcgagttcttctcagtcaagctgcatgtatgtatgtgtgtcccgagaagcggtttgatactgagctgcatttgcctttactgtggagttttgttgccggttctgctccctaatcttccttttctgacgtgcctgagcatgtccacattagaatctgtgacatacctacctgaaaaaggtttatattgtcagagactgccaagcagccggacacacgggggcacagaatcactgaaggggaaaaatacagaaaatatgggtttctacggcacattaaaaatgattttttacaaaatgaaaagaaagttggaccatggttctgaggtccgctctttttctttgggaaagaaaccatgcaaagtctcagaatatacaagtaccactgggcttgtaccatgttcagcaacaccaacaacttttggggacctcagagcagccaatggccaagggcaacaacgacgccgaattacatctgtccagccacctacaggcctccaggaatggctaaaaatgtttcagagctggagtggaccagagaaattgcttgctttagatgaactcattgatagttgtgaaccaacacaagtaaaacatatgatgcaagtgatagaaccccagtttcaacgagacttcatttcattgctccctaaagagttggcactctatgtgctttcattcctggaacccaaagacctgctacaagcagctcagacatgtcgctactggagaattttggctgaagacaaccttctctggagagagaaatgcaaagaagaggggattgatgaaccattgcacatcaagagaagaaaagtaataaaaccaggtttcatacacagtccatggaaaagtgcatacatcagacagcacagaattgatactaactggaggcgaggagaactcaaatctcctaaggtgctgaaaggacatgatgatcatgtgatcacatgcttacagttttgtggtaaccgaatagttagtggttctgatgacaacactttaaaagtttggtcagcagtcacaggcaaatgtctgagaacattagtgggacatacaggtggagtatggtcatcacaaatgagagacaacatcatcattagtggatctacagatcggacactcaaagtgtggaatgcagagactggagaatgtatacacaccttatatgggcatacttccactgtgcgttgtatgcatcttcatgaaaaaagagttgttagcggttctcgagatgccactcttagggtttgggatattgagacaggccagtgtttacatgttttgatgggtcatgttgcagcagtccgctgtgttcaatatgatggcaggagggttgttagtggagcatatgattttatggtaaaggtgtgggatccagagactgaaacctgtctacacacgttgcaggggcatactaatagagtctattcattacagtttgatggtatccatgtggtgagtggatctcttgatacatcaatccgtgtttgggatgtggagacagggaattgcattcacacgttaacagggcaccagtcgttaacaagtggaatggaactcaaagacaatattcttgtctctgggaatgcagattctacagttaaaatctgggatatcaaaacaggacagtgtttacaaacattgcaaggtcccaacaagcatcagagtgctgtgacctgtttacagttcaacaagaactttgtaattaccagctcagatgatggaactgtaaaactatgggacttgaaaacgggtgaatttattcgaaacctagtcacattggagagtggggggagtgggggagttgtgtggcggatcagagcctcaaacacaaagctggtgtgtgcagttgggagtcggaatgggactgaagaaaccaagctgctggtgctggactttgatgtggacatgaagtgaagagcagaaaagatgaatttgtccaattgtgtagacgatatactccctgcccttccccctgcaaaaagaaaaaaagaaaagaaaaagaaaaaaatcccttgttctcagtggtgcaggatgttggcttggggcaacagattgaaaagacctacagactaagaaggaaaagaagaagagatgacaaaccataactgacaagagaggcgtctgctgtctcatcacataaaaggcttcacttttgactgagggcagctttgcaaaatgagactttctaaatcaaaccaggtgcaattatttctttattttcttctccagtggtcattgggcagtgttaatgctgaaacatcattacagattctgctagcctgttcttttaccactgacagctagacacctagaaaggaactgcaataatatcaaaacaagtactggttgactttctaattagagagcatctgcaacaaaaagtcatttttctggagtggaaaagcttaaaaaaattactgtgaattgtttttgtacagttatcatgaaaagcttttttttttttttttttgccaaccattgccaatgtcaatcaatcacagtattagcctctgttaatctatttactgttgcttccatatacattcttcaatgcatatgttgctcaaaggtggcaagttgtcctgggttctgtgagtcctgagatggatttaattcttgatgctggtgctagaagtaggtcttcaaatatgggattgttgtcccaaccctgtactgtactcccagtggccaaacttatttatgctgctaaatgaaagaaagaaaaaagcaaattatttttttttattttttttctgctgtgacgttttagtcccagactgaattccaaatttgctctagtttggttatggaaaaaagactttttgccactgaaacttgagccatctgtgcctctaagaggctgagaatggaagagtttcagataataaagagtgaagtttgcctgcaagtaaagaattgagagtgtgtgcaaagcttattttcttttatctgggcaaaaattaaaacacattccttggaacagagctattacttgcctgttctgtggagaaacttttctttttgagggctgtggtgaatggatgaacgtacatcgtaaaactgacaaaatattttaaaaatatataaaacacaaaattaaaataaagttgctggtcagtcttagtgttttacagtatttgggaaaacaactgttacagttttattgctctgagtaactgacaaagcagaaactattcagtttttgtagtaaaggcgtcacatgcaaacaaacaaaatgaatgaaacagtcaaatggtttgcctcattctccaagagccacaactcaagctgaactgtgaaagtggtttaacactgtatcctaggcgatcttttttcctccttctgtttatttttttgtttgttttatttatagtctgatttaaaacaatcagattcaagttggttaattttagttatgtaacaacctgacatgatggaggaaaacaacctttaaagggattgtgtctatggtttgattcacttagaaattttattttcttataacttaagtgcaataaaatgtgttttttcatgtta

SEQ ID NO: 942 - protein, 627 aa, Homo sapiens
MCVPRSGLILSCICLYCGVLLPVLLPNLPFLTCLSMSTLESVTYLPEKGLYCQRLPSSRTHGGTESLKGKNTENMGFYGTLKMIFYKMKRKLDHGSEVRSFSLGKKPCKVSEYTSTTGLVPCSATPTTFGDLRAANGQGQQRRRITSVQPPTGLQEWLKMFQSWSGPEKLLALDELIDSCEPTQVKHMMQVIEPQFQRDFISLLPKELALYVLSFLEPKDLLQAAQTCRYWRILAEDNLLWREKCKEEGIDEPLHIKRRKVIKPGFIHSPWKSAYIRQHRIDTNWRRGELKSPKVLKGHDDHVITCLQFCGNRIVSGSDDNTLKVWSAVTGKCLRTLVGHTGGVWSSQMRDNIIISGSTDRTLKVWNAETGECIHTLYGHTSTVRCMHLHEKRVVSGSRDATLRVWDIETGQCLHVLMGHVAAVRCVQYDGRRVVSGAYDFMVKVWDPETETCLHTLQGHTNRVYSLQFDGIHVVSGSLDTSIRVWDVETGNCIHTLTGHQSLTSGMELKDNILVSGNADSTVKIWDIKTGQCLQTLQGPNKHQSAVTCLQFNKNFVITSSDDGTVKLWDLKTGEFIRNLVTLESGGSGGVVWRIRASNTKLVCAVGSRNGTEETKLLVLDFDVDMK

SEQ ID NO: 943 - DNA, 3896 bp, Homo sapiens
ccttccgcagctgccgcttcagtccgaaggaggaagggaaccaacccactttctcggcgccgcggctcttttctaaaagtaatgtgaaaacctttgcatcttctgatagtctagccaaggtccaagaagtagcaagctggcttttggaaatgaatcaggaactgctctctgtgggcagcaaaagacgacgaactggaggctctctgagaggtaacccttcctcaagccaggtagatgaagaacagatgaatcgtgtggtagaggaggaacagcaacagcaactcagacaacaagaggaggagcacactgcaaggaatggtgaagttgttggagtagaacctagacctggaggccaaaatgattcccagcaaggacagttggaagaaaacaataatagatttatttcggtagatgaggactcctcaggaaaccaagaagaacaagaggaagatgaagaacatgctggtgaacaagatgaggaggatgaggaggaggaggagatggaccaggagagtgacgattttgatcagtctgatgatagtagcagagaagatgaacatacacatactaacagtgtcacgaactccagtagtattgtggacctgcccgttcaccaactctcctccccattctatacaaaaacaacaaaaatgaaaagaaagttggaccatggttctgaggtccgctctttttctttgggaaagaaaccatgcaaagtctcagaatatacaagtaccactgggcttgtaccatgttcagcaacaccaacaacttttggggacctcagagcagccaatggccaagggcaacaacgacgccgaattacatctgtccagccacctacaggcctccaggaatggctaaaaatgtttcagagctggagtggaccagagaaattgcttgctttagatgaactcattgatagttgtgaaccaacacaagtaaaacatatgatgcaagtgatagaaccccagtttcaacgagacttcatttcattgctccctaaagagttggcactctatgtgctttcattcctggaacccaaagacctgctacaagcagctcagacatgtcgctactggagaattttggctgaagacaaccttctctggagagagaaatgcaaagaagaggggattgatgaaccattgcacatcaagagaagaaaagtaataaaaccaggtttcatacacagtccatggaaaagtgcatacatcagacagcacagaattgatactaactggaggcgaggagaactcaaatctcctaaggtgctgaaaggacatgatgatcatgtgatcacatgcttacagttttgtggtaaccgaatagttagtggttctgatgacaacactttaaaagtttggtcagcagtcacaggcaaatgtctgagaacattagtgggacatacaggtggagtatggtcatcacaaatgagagacaacatcatcattagtggatctacagatcggacactcaaagtgtggaatgcagagactggagaatgtatacacaccttatatgggcatacttccactgtgcgttgtatgcatcttcatgaaaaaagagttgttagcggttctcgagatgccactcttagggtttgggatattgagacaggccagtgtttacatgttttgatgggtcatgttgcagcagtccgctgtgttcaatatgatggcaggagggttgttagtggagcatatgattttatggtaaaggtgtgggatccagagactgaaacctgtctacacacgttgcaggggcatactaatagagtctattcattacagtttgatggtatccatgtggtgagtggatctcttgatacatcaatccgtgtttgggatgtggagacagggaattgcattcacacgttaacagggcaccagtcgttaacaagtggaatggaactcaaagacaatattcttgtctctgggaatgcagattctacagttaaaatctgggatatcaaaacaggacagtgtttacaaacattgcaaggtcccaacaagcatcagagtgctgtgacctgtttacagttcaacaagaactttgtaattaccagctcagatgatggaactgtaaaactatgggacttgaaaacgggtgaatttattcgaaacctagtcacattggagagtggggggagtgggggagttgtgtggcggatcagagcctcaaacacaaagctggtgtgtgcagttgggagtcggaatgggactgaagaaaccaagctgctggtgctggactttgatgtggacatgaagtgaagagcagaaaagatgaatttgtccaattgtgtagacgatatactccctgcccttccccctgcaaaaagaaaaaaagaaaagaaaaagaaaaaaatcccttgttctcagtggtgcaggatgttggcttggggcaacagattgaaaagacctacagactaagaaggaaaagaagaagagatgacaaaccataactgacaagagaggcgtctgctgtctcatcacataaaaggcttcacttttgactgagggcagctttgcaaaatgagactttctaaatcaaaccaggtgcaattatttctttattttcttctccagtggtcattgggcagtgttaatgctgaaacatcattacagattctgctagcctgttcttttaccactgacagctagacacctagaaaggaactgcaataatatcaaaacaagtactggttgactttctaattagagagcatctgcaacaaaaagtcatttttctggagtggaaaagcttaaaaaaattactgtgaattgtttttgtacagttatcatgaaaagcttttttttttttttttttgccaaccattgccaatgtcaatcaatcacagtattagcctctgttaatctatttactgttgcttccatatacattcttcaatgcatatgttgctcaaaggtggcaagttgtcctgggttctgtgagtcctgagatggatttaattcttgatgctggtgctagaagtaggtcttcaaatatgggattgttgtcccaaccctgtactgtactcccagtggccaaacttatttatgctgctaaatgaaagaaagaaaaaagcaaattatttttttttattttttttctgctgtgacgttttagtcccagactgaattccaaatttgctctagtttggttatggaaaaaagactttttgccactgaaacttgagccatctgtgcctctaagaggctgagaatggaagagtttcagataataaagagtgaagtttgcctgcaagtaaagaattgagagtgtgtgcaaagcttattttcttttatctgggcaaaaattaaaacacattccttggaacagagctattacttgcctgttctgtggagaaacttttctttttgagggctgtggtgaatggatgaacgtacatcgtaaaactgacaaaatattttaaaaatatataaaacacaaaattaaaataaagttgctggtcagtcttagtgttttacagtatttgggaaaacaactgttacagttttattgctctgagtaactgacaaagcagaaactattcagtttttgtagtaaaggcgtcacatgcaaacaaacaaaatgaatgaaacagtcaaatggtttgcctcattctccaagagccacaactcaagctgaactgtgaaagtggtttaacactgtatcctaggcgatcttttttcctccttctgtttatttttttgtttgttttatttatagtctgatttaaaacaatcagattcaagttggttaattttagttatgtaacaacctgacatgatggaggaaaacaacctttaaagggattgtgtctatggtttgattcacttagaaattttattttcttataacttaagtgcaataaaatgtgttttttcatgtta

SEQ ID NO: 944 - protein, 707 aa, Homo sapiens
MNQELLSVGSKRRRTGGSLRGNPSSSQVDEEQMNRVVEEEQQQQLRQQEEEHTARNGEVVGVEPRPGGQNDSQQGQLEENNNRFISVDEDSSGNQEEQEEDEEHAGEQDEEDEEEEEMDQESDDFDQSDDSSREDEHTHTNSVTNSSSIVDLPVHQLSSPFYTKTTKMKRKLDHGSEVRSFSLGKKPCKVSEYTSTTGLVPCSATPTTFGDLRAANGQGQQRRRITSVQPPTGLQEWLKMFQSWSGPEKLLALDELIDSCEPTQVKHMMQVIEPQFQRDFISLLPKELALYVLSFLEPKDLLQAAQTCRYWRILAEDNLLWREKCKEEGIDEPLHIKRRKVIKPGFIHSPWKSAYIRQHRIDTNWRRGELKSPKVLKGHDDHVITCLQFCGNRIVSGSDDNTLKVWSAVTGKCLRTLVGHTGGVWSSQMRDNIIISGSTDRTLKVWNAETGECIHTLYGHTSTVRCMHLHEKRVVSGSRDATLRVWDIETGQCLHVLMGHVAAVRCVQYDGRRVVSGAYDFMVKVWDPETETCLHTLQGHTNRVYSLQFDGIHVVSGSLDTSIRVWDVETGNCIHTLTGHQSLTSGMELKDNILVSGNADSTVKIWDIKTGQCLQTLQGPNKHQSAVTCLQFNKNFVITSSDDGTVKLWDLKTGEFIRNLVTLESGGSGGVVWRIRASNTKLVCAVGSRNGTEETKLLVLDFDVDMK

SEQ ID NO: 945 - DNA, 3007 bp, Homo sapiens
gcccggagagccgcatctattggcagctttgttattgatcagaaactgctcgccgccgacttggcttccagtctggctgcgggcaacccttgagttttcgcctctgtcctgtcccccgaactgacaggtgctcccagcaacttgctggggacttctcgccgctcccccgcgtccccaccccctcattcctccctcgccttcacccccacccccaccacttcgccacagctcaggatttgtttaaaccttgggaaactggttcaggtccaggttttgctttgatccttttcaaaaactggagacacagaagagggctctaggaaaaagttttggatgggattatgtggaaactaccctgcgattctctgctgccagagcaggctcggcgcttccaccccagtgcagccttcccctggcggtggtgaaagagactcgggagtcgctgcttccaaagtgcccgccgtgagtgagctctcaccccagtcagccaaatgagcctcttcgggcttctcctgctgacatctgccctggccggccagagacaggggactcaggcggaatccaacctgagtagtaaattccagttttccagcaacaaggaacagaacggagtacaagatcctcagcatgagagaattattactgtgtctactaatggaagtattcacagcccaaggtttcctcatacttatccaagaaatacggtcttggtatggagattagtagcagtagaggaaaatgtatggatacaacttacgtttgatgaaagatttgggcttgaagacccagaagatgacatatgcaagtatgattttgtagaagttgaggaacccagtgatggaactatattagggcgctggtgtggttctggtactgtaccaggaaaacagatttctaaaggaaatcaaattaggataagatttgtatctgatgaatattttccttctgaaccagggttctgcatccactacaacattgtcatgccacaattcacagaagctgtgagtccttcagtgctacccccttcagctttgccactggacctgcttaataatgctataactgcctttagtaccttggaagaccttattcgatatcttgaaccagagagatggcagttggacttagaagatctatataggccaacttggcaacttcttggcaaggcttttgtttttggaagaaaatccagagtggtggatctgaaccttctaacagaggaggtaagattatacagctgcacacctcgtaacttctcagtgtccataagggaagaactaaagagaaccgataccattttctggccaggttgtctcctggttaaacgctgtggtgggaactgtgcctgttgtctccacaattgcaatgaatgtcaatgtgtcccaagcaaagttactaaaaaataccacgaggtccttcagttgagaccaaagaccggtgtcaggggattgcacaaatcactcaccgacgtggccctggagcaccatgaggagtgtgactgtgtgtgcagagggagcacaggaggatagccgcatcaccaccagcagctcttgcccagagctgtgcagtgcagtggctgattctattagagaacgtatgcgttatctccatccttaatctcagttgtttgcttcaaggacctttcatcttcaggatttacagtgcattctgaaagaggagacatcaaacagaattaggagttgtgcaacagctcttttgagaggaggcctaaaggacaggagaaaaggtcttcaatcgtggaaagaaaattaaatgttgtattaaatagatcaccagctagtttcagagttaccatgtacgtattccactagctgggttctgtatttcagttctttcgatacggcttagggtaatgtcagtacaggaaaaaaactgtgcaagtgagcacctgattccgttgccttgcttaactctaaagctccatgtcctgggcctaaaatcgtataaaatctggatttttttttttttttttgctcatattcacatatgtaaaccagaacattctatgtactacaaacctggtttttaaaaaggaactatgttgctatgaattaaacttgtgtcgtgctgataggacagactggatttttcatatttcttattaaaatttctgccatttagaagaagagaactacattcatggtttggaagagataaacctgaaaagaagagtggccttatcttcactttatcgataagtcagtttatttgtttcattgtgtacatttttatattctccttttgacattataactgttggcttttctaatcttgttaaatatatctatttttaccaaaggtatttaatattcttttttatgacaacttagatcaactatttttagcttggtaaatttttctaaacacaattgttatagccagaggaacaaagatgatataaaatattgttgctctgacaaaaatacatgtatttcattctcgtatggtgctagagttagattaatctgcattttaaaaaactgaattggaatagaattggtaagttgcaaagactttttgaaaataattaaattatcatatcttccattcctgttattggagatgaaaataaaaagcaacttatgaaagtagacattcagatccagccattactaacctattccttttttggggaaatctgagcctagctcagaaaaacataaagcaccttgaaaaagacttggcagcttcctgataaagcgtgctgtgctgtgcagtaggaacacatcctatttattgtgatgttgtggttttattatcttaaactctgttccatacacttgtataaatacatggatatttttatgtacagaagtatgtctcttaaccagttcacttattgtactctggcaatttaaaagaaaatcagtaaaatattttgcttgtaaaatgcttaatatcgtgcctaggttatgtggtgactatttgaatcaaaaatgtattgaatcatcaaataaaagaatgtggctattttggggagaaaatt

SEQ ID NO: 946 - protein, 345 aa, Homo sapiens
MSLFGLLLLTSALAGQRQGTQAESNLSSKFQFSSNKEQNGVQDPQHERIITVSTNGSIHSPRFPHTYPRNTVLVWRLVAVEENVWIQLTFDERFGLEDPEDDICKYDFVEVEEPSDGTILGRWCGSGTVPGKQISKGNQIRIRFVSDEYFPSEPGFCIHYNIVMPQFTEAVSPSVLPPSALPLDLLNNAITAFSTLEDLIRYLEPERWQLDLEDLYRPTWQLLGKAFVFGRKSRVVDLNLLTEEVRLYSCTPRNFSVSIREELKRTDTIFWPGCLLVKRCGGNCACCLHNCNECQCVPSKVTKKYHEVLQLRPKTGVRGLHKSLTDVALEHHEECDCVCRGSTGG

SEQ ID NO: 947 - DNA, 2649 bp, Homo sapiens
ctgggacgcagctgcccccgctcggcgcccgctgcacccttagcagccactgccacctgggcccggagcctccacgatctcgcccggcgattgtgggcaggggcgcctccggatcgatcttctgaaattcaagttttcaagatgaagtttttattgacaactgcctttttaattttaatttccttgtgggtggaagaagcctattctaaggaaaagtcttcaaagaaagggaaggggaaaaagaagcagtatctatgcccatctcagcagtcagcagaggaccttgcccgagtacctgccaactccactagcaatatcttgaacaggttattggtcagttatgatcccaggataagaccaaacttcaaaggcattcctgttgatgtagtagtcaacatttttattaacagttttggatccattcaagaaacaacaatggactatagagttaacatcttcctgagacaaaaatggaatgaccccaggctgaagctccccagtgattttaggggttcagatgcactgacagtggatccaacaatgtacaagtgtttatggaaacctgatttattttttgcaaatgaaaaaagtgccaattttcatgatgtgacccaggaaaacatcctcctctttatttttcgtgatggagatgtccttgtcagcatgaggttatctattactctttcatgccctttggacttgacattgtttcccatggatacacaacgttgcaagatgcaactggagagctttggttacacaactgatgatttacgatttatctggcagtcaggagatcctgtgcaattagaaaaaattgccttgcctcaatttgatatcaaaaaggaagatattgaatatggtaactgtacaaaatactataaaggcacgggctactacacatgcgtggaagtcatcttcaccctgaggaggcaggtcggcttttacatgatgggggtctacgccccaaccctgctcattgttgttctctcctggctttccttctggatcaacccggacgcgagtgctgccagagtgcccctgggtatcttctcagtcctcagcttggcctctgagtgcacaacccttgccgctgagcttcccaaagtttcctatgtgaaggctcttgatgtttggcttattgcttgccttctctttgggtttgcttccctggtggagtatgcagttgtccaggtgatgctgaacaaccccaaaagggttgaagctgaaaaagccagaattgctaaggctgagcaagcagatggaaaaggtggaaatgtggctaaaaagaatactgtgaatggaacagggactcctgttcatattagcactttgcaggttggtgagaccagatgcaaaaaagtttgtacttctaagtctgatctgagatctaatgacttcagcattgttggaagcttaccaagagattttgaactatccaattatgactgctatggaaaacccattgaagttaacaacggacttgggaaatctcaggctaagaacaacaagaagcctccccctgcgaaacctgttattccaacagcagcaaagcgaattgatctttatgcaagagcattgtttcctttctgcttcttgttcttcaatgttatatattggtctatatatttatgataaatcttttccatttgtacaaaataaaattccatttcattgtgacctactcctttcataaatgccaatctgtgagaacttttgaattttcatagcaacattgcattttggatgccatttgattgtaataaaactgtggcaccttaattttgaatggcagcatgatcatgtaatatctgtgctctaataacgatgtatatatgtatagtgaacatattgcttagtaacaaatgaaggacaagcatactacataatataatccatacaattctcttcagttagtgtaaactgcaaatactacagataattctgataataaaatgatatgcacgctgaatcctgctatggtcaccattctaatgtatgtagtatttcaaatttccttccttgtaactttcaaagaaagccatcttattcttgtaattttagatggtattatcacagatttaaaaaggttgtattacatattgtttaaactttgtaagtagaaatatatctgttataattatacaggctctgtggagaaataaagttcaaaatatattaatttgtaaaatcagctcgttttaaagtgtgcttgtgttgtcaaaaatatcagatagtaatacacagtgagcatttttaaacaaagggaaacctatatttatgtaactgtatactgaattctgacaaaataaaaaaagataccttattgacgaaatatttaggataaacaaaattctatttaatccaccttaaaacctaaatgtattttcatggatttcatttgttggtacatattacacaaaacattgtgccttaaaatgagtcatacatcttttaaattggaatgcagtaatagatatgtgattttacatcatttttaagaaaccaaggggaagtaataagttgaaaaagaaatccataactattaaaagattttaacttttttattttattaaaatgcttgcatattttaagtaaaattaaaaaaaaaaaaaaaaaaaaaaaaaaaaaaaaaaaaaaaaaaaaaaa

SEQ ID NO: 948 - protein, 497 aa, Homo sapiens
MKFLLTTAFLILISLWVEEAYSKEKSSKKGKGKKKQYLCPSQQSAEDLARVPANSTSNILNRLLVSYDPRIRPNFKGIPVDVVVNIFINSFGSIQETTMDYRVNIFLRQKWNDPRLKLPSDFRGSDALTVDPTMYKCLWKPDLFFANEKSANFHDVTQENILLFIFRDGDVLVSMRLSITLSCPLDLTLFPMDTQRCKMQLESFGYTTDDLRFIWQSGDPVQLEKIALPQFDIKKEDIEYGNCTKYYKGTGYYTCVEVIFTLRRQVGFYMMGVYAPTLLIVVLSWLSFWINPDASAARVPLGIFSVLSLASECTTLAAELPKVSYVKALDVWLIACLLFGFASLVEYAVVQVMLNNPKRVEAEKARIAKAEQADGKGGNVAKKNTVNGTGTPVHISTLQVGETRCKKVCTSKSDLRSNDFSIVGSLPRDFELSNYDCYGKPIEVNNGLGKSQAKNNKKPPPAKPVIPTAAKRIDLYARALFPFCFLFFNVIYWSIYL

SEQ ID NO: 949 - DNA, 5644 bp, Homo sapiens
aggagagagggagaagagagcgcgagagagggtgagtgtgtgtgagtgcatgggagggtgctgaatattccgagacactgggaccacagcggcagctccgctgaaaactgcattcagccagtcctccggacttctggagcggggacagggcgcagggcatcagcagccaccagcaggacctgggaaatagggattcttctgcctccacttcaggttttagcagcttggtgctaaattgctgtctcaaaatgcagaggatctaatttgcagaggaaaacagccaaagaaggaagaggaggaaaaggaaaaaaaaaggggtatattgtggatgctctacttttcttggaaatgcaaaagattatgcatatttctgtcctcctttctcctgttttatggggactgatttttggtgtctcttctaacagcatacagataggggggctatttcctaggggcgccgatcaagaatacagtgcatttcgagtagggatggttcagttttccacttcggagttcagactgacaccccacatcgacaatttggaggtggcaaacagcttcgcagtcactaatgctttctgctcccagttttcgagaggagtctatgctatttttggattttatgacaagaagtctgtaaataccatcacatcattttgcggaacactccacgtctccttcatcactcccagcttcccaacagatggcacacatccatttgtcattcagatgagacccgacctcaaaggagctctccttagcttgattgaatactatcaatgggacaagtttgcatacctctatgacagtgacagaggcttatcaacactgcaagctgtgctggattctgctgctgaaaagaaatggcaagtgactgctatcaatgtgggaaacattaacaatgacaagaaagatgagatgtaccgatcactttttcaagatctggagttaaaaaaggaacggcgtgtaattctggactgtgaaagggataaagtaaacgacattgtagaccaggttattaccattggaaaacatgttaaagggtaccactacatcattgcaaatctgggatttactgatggagacctattaaaaatccagtttggaggtgcaaatgtctctggatttcagatagtggactatgatgattcgttggtatctaaatttatagaaagatggtcaacactggaagaaaaagaataccctggagctcacacaacaacaattaagtatacttctgctctgacctatgatgccgttcaagtgatgactgaagccttccgcaacctaaggaagcaaagaattgaaatctcccgaagggggaatgcaggagactgtctggcaaacccagcagtgccctggggacaaggtgtagaaatagaaagggccctcaaacaggttcaggttgaaggtctctcaggaaatataaagtttgaccagaatggaaaaagaataaactatacaattaacatcatggagctcaaaactaatgggccccggaagattggctactggagtgaagtggacaaaatggttgttacccttactgagctcccttctggaaatgacacctctgggcttgagaataagactgttgttgtcaccacaattttggaatctccgtatgttatgatgaagaaaaatcatgaaatgcttgaaggcaatgagcgctatgagggctactgtgttgacctggctgcagaaatcgccaaacattgtgggttcaagtacaagttgacaattgttggtgatggcaagtatggggccagggatgcagacacgaaaatttggaatgggatggttggagaacttgtatatgggaaagctgatattgcaattgctccattaactattacccttgtgagagaagaggtgattgacttctcaaagcccttcatgagcctcgggatatctatcatgatcaagaagcctcagaagtccaaaccaggagtgttttcctttcttgatcctttagcctatgagatctggatgtgcattgtttttgcctacattggggtcagtgtagttttattcctggtcagcagatttagcccctacgagtggcacactgaggagtttgaagatggaagagaaacacaaagtagtgaatcaactaatgaatttgggatttttaatagtctctggttttccttgggtgcctttatgcggcaaggatgcgatatttcgccaagatccctctctgggcgcattgttggaggtgtgtggtggttctttaccctgatcataatctcctcctacacggctaacttagctgccttcctgactgtagagaggatggtgtctcccatcgaaagtgctgaggatctttctaagcaaacagaaattgcttatggaacattagactctggctccactaaagagtttttcaggagatctaaaattgcagtgtttgataaaatgtggacctacatgcggagtgcggagccctctgtgtttgtgaggactacggccgaaggggtggctagagtgcggaagtccaaagggaaatatgcctacttgttggagtccacgatgaacgagtacattgagcaaaggaagccttgcgacaccatgaaagttggtggaaacctggattccaaaggctatggcatcgcaacacctaaaggatcctcattaagaaccccagtaaatcttgcagtattgaaactcagtgagcaaggcgtcttagacaagctgaaaaacaaatggtggtacgataaaggtgaatgtggagccaaggactctggaagtaaggaaaagaccagtgccctcagtctgagcaacgttgctggagtattctacatccttgtcgggggccttggtttggcaatgctggtggctttgattgagttctgttacaagtcaagggccgaggcgaaacgaatgaaggtggcaaagaatgcacagaatattaacccatcttcctcgcagaattcacagaattttgcaacttataaggaaggttacaacgtatatggcatcgaaagtgttaaaatttaggggatgaccttgaatgatgccatgaggaacaaggcaaggctgtcaattacaggaagtactggagaaaatggacgtgttatgactccagaatttcccaaagcagtgcatgctgtcccttacgtgagtcctggcatgggaatgaatgtcagtgtgactgatctctcgtgattgataagaaccttttgagtgccttacacaatggttttcttgtgtgtttattgtcaaagtggtgagaggcatccagtatcttgaagacttttctttcagccaagaattcttaaatatgtggagttcatcttgaattgtaaggaatgattaattaaaacacaacatctttttctactcgagttacagacaaagcgtggtggacatgcacagctaacatggaagtactataatttacctgaagtctttgtacagacaacaaacctgtttctgcagccactattgttagtctcttgattcataatgacttaagcacacttgacatcaactgcatcaagatgtgacatgttttataaaaaaaggaaaaaaaacatttaaaactaaaaaatatttttaggtattttcacaaacaaactggcttttaaataaatttgcttccatattggttgaataagacaaaaacaattaaactgagtgggaagtgaataaaaaaaggctttaggtatcgattccatatttttcaaagccaaatatgtaaatgctaaggaaagtaaacaaagaggagattccaatcttgtaatttaatattgttattaaaactttaatgtatcctattctttaacatttggtgttaatataaaattacttggcaatgcttgacatttgaaataaacatttttctattgttttattgcaagtggtccaattaattttgcttagctacagtttggtcataaatcaagtgagtttaaagacactaccaagttgttaggtgcccagagaaaatttctcccttttaaaaaggccaggtgatttttcaaatgtaatcttgcccccaaagtaatatctgaatatctttttgacatgtctaaatatatatatatataaagaaatatttgttaacacaaaagcatttgatctatgtagataaatgctaatagatttaaaaagctaatattaacaaataccagaatacgtgaagttccatttttaaagtgtttgagcttacagaagagaaacattcattttaaatgaagtaaaaaatgccttgaaagtaattctttagatagttgcccattgattaaattccaaaaactaaatatgtttttagctttaaaattataaaagctgtcataaactttatatattatgaattttaaaatatgtttgagtctcctgcaatatagtttcatcccattgacatcaattaaaaataaccctaatatattatttttatatttattcctcaggtggaatggctattttaatatgcccagtgtggataaaatgtcacatttctgtaacttttgactaaagagcctatatttatctagttaatgaatttaaaggatctatctttcccttcataaaatacctcttatttccattaaagccccccaagtttaattaatttaggattttgaatgattattgacatccaatagttatttttaatatttgtattcttgttatttctggaagaaagcctttgtgtagcacttggtattttgcaaagtgcttttaaaacattcttacttaccgtatttcatagaagggaaggaaaaatgtaaggtttaacagtaagcacttgcattgaacatggaggcatgtggtatcatgatattcttcactaaatttagctgtccctaatcacagatcctaaggtaatataatataattttagtgcatttctcctcatcaggaatgctggaggtgcattttaagttttaataataagtgctagaatgaccaaattgcagactaattgtttccatattgtacttaaaatgagtttttaaaagtgaaaaagaaatgactatatacaatcaatgctatttattgtacctctgggcctactcttctaaaaattgtagcttatcgatttttctctgtcaagcttgaactaatgtaaataattgaaataatgtaaagttatattttcatgtttttatagatacaacatgacaagaatacataatgtaagagtatttcaactatggataatgttgattggataatgcacatctcagttacaagcagtactcatagtttaatatccatgtaacggtgcatcaatatattgctatataaatatgtctgtgtgcatataagtgaaaagtggtcaaacaagagtgatgacagctgtctaaaggtttttttattcattttatataaaaactgttatggaaagaccaaaatgtttatgaactattcttatgtaaatttacaattgtcctttactgtacttttttgtttacagtatagtaccttattttctgctgtgttaagtgggtgtcaaactccaagaagacatacactttctataacttctattgaagatattggaatttccaatttttcatgtgtactatgtcagaaaatgctttcgattttatttttaaatctaacatcggatggcttttccggagtgttgtaaaaacttcaatcatacataaaacatgttcttacaaaaggcaaa

SEQ ID NO: 950 - protein, 883 aa, Homo sapiens
MQKIMHISVLLSPVLWGLIFGVSSNSIQIGGLFPRGADQEYSAFRVGMVQFSTSEFRLTPHIDNLEVANSFAVTNAFCSQFSRGVYAIFGFYDKKSVNTITSFCGTLHVSFITPSFPTDGTHPFVIQMRPDLKGALLSLIEYYQWDKFAYLYDSDRGLSTLQAVLDSAAEKKWQVTAINVGNINNDKKDEMYRSLFQDLELKKERRVILDCERDKVNDIVDQVITIGKHVKGYHYIIANLGFTDGDLLKIQFGGANVSGFQIVDYDDSLVSKFIERWSTLEEKEYPGAHTTTIKYTSALTYDAVQVMTEAFRNLRKQRIEISRRGNAGDCLANPAVPWGQGVEIERALKQVQVEGLSGNIKFDQNGKRINYTINIMELKTNGPRKIGYWSEVDKMVVTLTELPSGNDTSGLENKTVVVTTILESPYVMMKKNHEMLEGNERYEGYCVDLAAEIAKHCGFKYKLTIVGDGKYGARDADTKIWNGMVGELVYGKADIAIAPLTITLVREEVIDFSKPFMSLGISIMIKKPQKSKPGVFSFLDPLAYEIWMCIVFAYIGVSVVLFLVSRFSPYEWHTEEFEDGRETQSSESTNEFGIFNSLWFSLGAFMRQGCDISPRSLSGRIVGGVWWFFTLIIISSYTANLAAFLTVERMVSPIESAEDLSKQTEIAYGTLDSGSTKEFFRRSKIAVFDKMWTYMRSAEPSVFVRTTAEGVARVRKSKGKYAYLLESTMNEYIEQRKPCDTMKVGGNLDSKGYGIATPKGSSLRTPVNLAVLKLSEQGVLDKLKNKWWYDKGECGAKDSGSKEKTSALSLSNVAGVFYILVGGLGLAMLVALIEFCYKSRAEAKRMKVAKNAQNINPSSSQNSQNFATYKEGYNVYGIESVKI

SEQ ID NO: 951 - DNA, 3021 bp, Homo sapiens
aagagggaggggtctgtgcgcccgcagagtcgccaggcgccctgcgagttgtctccgctgggaggggcgaggctgtcacttgccagggcgcgaggagcctcagcgcggcttggagaacttggccccgcgcagcgtctggtcactcgctctcctctggggactgcagagaagcaggacctcgggccatggattctactgaagaaaggtagccatggaagagaatatggaagagggacagacacaaaaagggtgttttgaatgctgtatcaaatgcctggggggcattccctatgcctctctgattgccaccatcctgctctatgcgggtgttgccctgttctgtggctgcggtcatgaagcgctttctggaactgtcaacattctgcaaacctactttgagatggcaagaactgctggagacacactggatgtttttaccatgattgacatctttaagtatgtgatctacggcatcgcagctgcgttctttgtgtatggcattttgctgatggtggaaggtttcttcacaactggggccatcaaagatctctatggggatttcaaaatcaccacttgtggcagatgtgtgagcgcttggttcattatgctgacatatcttttcatgttggcctggctgggagtcacggctttcacctcactgccagtttacatgtacttcaatctgtggaccatctgccggaacaccacattagtggagggagcaaatctctgcttggaccttcgtcagtttggaattgtgacaattggagaggaaaagaaaatttgtactgtctctgagaatttcttgaggatgtgcgaatctactgagctgaacatgaccttccacttgtttattgtggcacttgctggagctggggcagcagtcattgctatggttcactaccttatggttctgtctgccaactgggcctatgtgaaagacgcctgccggatgcagaagtatgaagacatcaagtcgaaggaagagcaagagcttcatgacatccactctactcgctccaaagagcggctcaatgcatacacataaatgcatcttcctgttctttctaccatttgaatgcattggtgtttaactaagggccatccaaccatccaacctttaaaaaacaaaacgaaagtgcttctcatcaatgatatgtaaggtgacttatgaatcacctgagtacaattctttgttgtttagcacttaaatttcccaatttattaaattgatgtaaatcagatcttttctacaagctcctatccagccttttttttgaaatttctcaaactcatttactagttctgtaaaatcaaagatactaacattgtcaaatgcaaagatttgtttgatttttaaccacttcccatgtgttatacataacaccttttgcattatttcttatgttttgaaaagaaaatagctttttatactttttagttttgatttcggtaactagtttaactacaggtaaccttcaaagggaccattgtacattatgaacaatagatagagattacatcttgatgactcttgaaatatggaaattttgtctgaagatcagtggccatattactgtaggccctggttcatgttttcatcaatctaaggtgcaatttctaaatttgtaagagtaggtttaaaaaaaaaagtgcttcttatctttgttaacattgtacttttccttgatgttcttaaaaggtatttccctcagattactcatgtttatgttgtgagcatgtagaaacagtaatgctaatgcatggctagttgcctttttaagattgtgacaccaggcttaccttttaaagtttagtatatagagacaattttaatggaaataactactgtagactattgaagaatgatctctttgtgatttaagaagtggctggattggaacttttaatatgctaatgtggaaaattaattacctttatgaaggtggtttattacaaataagcacactaacccctcggaagttgttttacctactttaaaagttttaatggattgcacctctgtaaactattcctaaaatgtgtatgatatatttgaaaaggcttccattaatataatagctttgcttgcagccttccaatctatgttggtttacctgtagtgttttataaagtgtggtcagaggcccctatagaatgtattgtttgaaagtgtagtgatatatttgtgtttttatttcaagtaagtcattttaaccgaatgttcattcatattcatttataaaaagtacctgtatcaaaggaattttaacaaagagcaatcagtattattggaccaaatttggtgtttgttttcaccttgacgctcttcttttcattatttctaatgctacaagaatgctgtaaagtgtcttctaaaatgatgtagcctgacaagacatttttttcagtgtataaaactaggtagtattgtgcactgatttgaccattgtgaaatcctttctcagtgtaactgcatttctaataaaaatttattgagtgaaacaatctttgtacaatgactagtcatgcatcatcagtaattttacaagttcttgtagtaggtagggggtactactagggatatctgtggcatgattatgcattccgtagtattatttaattaatttggggttcattttgcttccttttctttatgcttagattatcttactggttcaacatttttctgatatatgcagtattacagatattcagcaaaagtattaatgggcttctttaaattctatattatagtatttcagttccgtgtcttaacagtttgtgataatttctaaaactgtcttttcaacttatgtaatgatgttgacacttttggcttttatttctggtattagagtttgtattttcacagagtgctttgtagcaggcattacaattaatctgttttgtacataaatgtgccaacagcttgatggtggcgtttttgaaatgtagaacagagtgcttgcaaaatgtaataaatacacttgtgtactttgtgtacttattattaaaaaa

SEQ ID NO: 952 - protein, 278 aa, Homo sapiens
MEENMEEGQTQKGCFECCIKCLGGIPYASLIATILLYAGVALFCGCGHEALSGTVNILQTYFEMARTAGDTLDVFTMIDIFKYVIYGIAAAFFVYGILLMVEGFFTTGAIKDLYGDFKITTCGRCVSAWFIMLTYLFMLAWLGVTAFTSLPVYMYFNLWTICRNTTLVEGANLCLDLRQFGIVTIGEEKKICTVSENFLRMCESTELNMTFHLFIVALAGAGAAVIAMVHYLMVLSANWAYVKDACRMQKYEDIKSKEEQELHDIHSTRSKERLNAYT

SEQ ID NO: 953 - DNA, 3614 bp, Homo sapiens
atctctcaggcttagagctttatactcactcctttgacagccacgcttctatttctttttaaatctcaaaggtgtgggattacaagtcctgtcttagtaataaacttttgcagataaaccctgagatggtataactgcatcctttcttggcaccttaaatcaaattaactaaatacttagtgaggagagaaaaggaaaacacagtttttttgcaacgtatctgactgggtgagaagccactgctgcagcataaagaaccgacgggaatctgggctttcccactctggaatgaaggggggaattacgggttggtggtcggcttcatgttaggaggacacccctccatctgttcacagctcagcctgtttccaatttaaagcccagatttcaatacaaacctcaatttcttttccccattttaaatgcaaagcaagacttgtgaatcatagtgtctctgctcctgggattcagaccaaatttccccccaaaattctcaggctatttgtttgaatacctgcttacagtggtacacaatgggcagctttgagaagaaaaattgataatcttcacggaagagtaatttgaatgaaattacacttgacagcctgtctccaagcaaacaagaggaacgagggagcctgagctaagctctgaggacttgcccaagccactgctgttggagcttcccaggaaaaaaaaaaaaaaaaaaaaaaaaaaaaaaaaaaaaaaaacaccagtttttccaacatctaattgagcttttgattaattccgtgtaccagattctactgaagaaaggtagccatggaagagaatatggaagagggacagacacaaaaagggtgttttgaatgctgtatcaaatgcctggggggcattccctatgcctctctgattgccaccatcctgctctatgcgggtgttgccctgttctgtggctgcggtcatgaagcgctttctggaactgtcaacattctgcaaacctactttgagatggcaagaactgctggagacacactggatgtttttaccatgattgacatctttaagtatgtgatctacggcatcgcagctgcgttctttgtgtatggcattttgctgatggtggaaggtttcttcacaactggggccatcaaagatctctatggggatttcaaaatcaccacttgtggcagatgtgtgagcgcttggttcattatgctgacatatcttttcatgttggcctggctgggagtcacggctttcacctcactgccagtttacatgtacttcaatctgtggaccatctgccggaacaccacattagtggagggagcaaatctctgcttggaccttcgtcagtttggaattgtgacaattggagaggaaaagaaaatttgtactgtctctgagaatttcttgaggatgtgcgaatctactgagctgaacatgaccttccacttgtttattgtggcacttgctggagctggggcagcagtcattgctatggttcactaccttatggttctgtctgccaactgggcctatgtgaaagacgcctgccggatgcagaagtatgaagacatcaagtcgaaggaagagcaagagcttcatgacatccactctactcgctccaaagagcggctcaatgcatacacataaatgcatcttcctgttctttctaccatttgaatgcattggtgtttaactaagggccatccaaccatccaacctttaaaaaacaaaacgaaagtgcttctcatcaatgatatgtaaggtgacttatgaatcacctgagtacaattctttgttgtttagcacttaaatttcccaatttattaaattgatgtaaatcagatcttttctacaagctcctatccagccttttttttgaaatttctcaaactcatttactagttctgtaaaatcaaagatactaacattgtcaaatgcaaagatttgtttgatttttaaccacttcccatgtgttatacataacaccttttgcattatttcttatgttttgaaaagaaaatagctttttatactttttagttttgatttcggtaactagtttaactacaggtaaccttcaaagggaccattgtacattatgaacaatagatagagattacatcttgatgactcttgaaatatggaaattttgtctgaagatcagtggccatattactgtaggccctggttcatgttttcatcaatctaaggtgcaatttctaaatttgtaagagtaggtttaaaaaaaaaagtgcttcttatctttgttaacattgtacttttccttgatgttcttaaaaggtatttccctcagattactcatgtttatgttgtgagcatgtagaaacagtaatgctaatgcatggctagttgcctttttaagattgtgacaccaggcttaccttttaaagtttagtatatagagacaattttaatggaaataactactgtagactattgaagaatgatctctttgtgatttaagaagtggctggattggaacttttaatatgctaatgtggaaaattaattacctttatgaaggtggtttattacaaataagcacactaacccctcggaagttgttttacctactttaaaagttttaatggattgcacctctgtaaactattcctaaaatgtgtatgatatatttgaaaaggcttccattaatataatagctttgcttgcagccttccaatctatgttggtttacctgtagtgttttataaagtgtggtcagaggcccctatagaatgtattgtttgaaagtgtagtgatatatttgtgtttttatttcaagtaagtcattttaaccgaatgttcattcatattcatttataaaaagtacctgtatcaaaggaattttaacaaagagcaatcagtattattggaccaaatttggtgtttgttttcaccttgacgctcttcttttcattatttctaatgctacaagaatgctgtaaagtgtcttctaaaatgatgtagcctgacaagacatttttttcagtgtataaaactaggtagtattgtgcactgatttgaccattgtgaaatcctttctcagtgtaactgcatttctaataaaaatttattgagtgaaacaatctttgtacaatgactagtcatgcatcatcagtaattttacaagttcttgtagtaggtagggggtactactagggatatctgtggcatgattatgcattccgtagtattatttaattaatttggggttcattttgcttccttttctttatgcttagattatcttactggttcaacatttttctgatatatgcagtattacagatattcagcaaaagtattaatgggcttctttaaattctatattatagtatttcagttccgtgtcttaacagtttgtgataatttctaaaactgtcttttcaacttatgtaatgatgttgacacttttggcttttatttctggtattagagtttgtattttcacagagtgctttgtagcaggcattacaattaatctgttttgtacataaatgtgccaacagcttgatggtggcgtttttgaaatgtagaacagagtgcttgcaaaatgtaataaatacacttgtgtactttgtgtacttattattaaaaaa

SEQ ID NO: 954 - protein, 278 aa, Homo sapiens; identical to SEQ ID NO: 952

SEQ ID NO: 955 - DNA, 2962 bp, Homo sapiens
aagagggaggggtctgtgcgcccgcagagtcgccaggcgccctgcgagttgtctccgctgggaggggcgaggctgtcacttgccagggcgcgaggagcctcagcgcggcttggagaacttggccccgcgcagcgtctggtcactcgctctcctctggggactgcagagaagcaggacctcgggccatggggtgttttgaatgctgtatcaaatgcctggggggcattccctatgcctctctgattgccaccatcctgctctatgcgggtgttgccctgttctgtggctgcggtcatgaagcgctttctggaactgtcaacattctgcaaacctactttgagatggcaagaactgctggagacacactggatgtttttaccatgattgacatctttaagtatgtgatctacggcatcgcagctgcgttctttgtgtatggcattttgctgatggtggaaggtttcttcacaactggggccatcaaagatctctatggggatttcaaaatcaccacttgtggcagatgtgtgagcgcttggttcattatgctgacatatcttttcatgttggcctggctgggagtcacggctttcacctcactgccagtttacatgtacttcaatctgtggaccatctgccggaacaccacattagtggagggagcaaatctctgcttggaccttcgtcagtttggaattgtgacaattggagaggaaaagaaaatttgtactgtctctgagaatttcttgaggatgtgcgaatctactgagctgaacatgaccttccacttgtttattgtggcacttgctggagctggggcagcagtcattgctatggttcactaccttatggttctgtctgccaactgggcctatgtgaaagacgcctgccggatgcagaagtatgaagacatcaagtcgaaggaagagcaagagcttcatgacatccactctactcgctccaaagagcggctcaatgcatacacataaatgcatcttcctgttctttctaccatttgaatgcattggtgtttaactaagggccatccaaccatccaacctttaaaaaacaaaacgaaagtgcttctcatcaatgatatgtaaggtgacttatgaatcacctgagtacaattctttgttgtttagcacttaaatttcccaatttattaaattgatgtaaatcagatcttttctacaagctcctatccagccttttttttgaaatttctcaaactcatttactagttctgtaaaatcaaagatactaacattgtcaaatgcaaagatttgtttgatttttaaccacttcccatgtgttatacataacaccttttgcattatttcttatgttttgaaaagaaaatagctttttatactttttagttttgatttcggtaactagtttaactacaggtaaccttcaaagggaccattgtacattatgaacaatagatagagattacatcttgatgactcttgaaatatggaaattttgtctgaagatcagtggccatattactgtaggccctggttcatgttttcatcaatctaaggtgcaatttctaaatttgtaagagtaggtttaaaaaaaaaagtgcttcttatctttgttaacattgtacttttccttgatgttcttaaaaggtatttccctcagattactcatgtttatgttgtgagcatgtagaaacagtaatgctaatgcatggctagttgcctttttaagattgtgacaccaggcttaccttttaaagtttagtatatagagacaattttaatggaaataactactgtagactattgaagaatgatctctttgtgatttaagaagtggctggattggaacttttaatatgctaatgtggaaaattaattacctttatgaaggtggtttattacaaataagcacactaacccctcggaagttgttttacctactttaaaagttttaatggattgcacctctgtaaactattcctaaaatgtgtatgatatatttgaaaaggcttccattaatataatagctttgcttgcagccttccaatctatgttggtttacctgtagtgttttataaagtgtggtcagaggcccctatagaatgtattgtttgaaagtgtagtgatatatttgtgtttttatttcaagtaagtcattttaaccgaatgttcattcatattcatttataaaaagtacctgtatcaaaggaattttaacaaagagcaatcagtattattggaccaaatttggtgtttgttttcaccttgacgctcttcttttcattatttctaatgctacaagaatgctgtaaagtgtcttctaaaatgatgtagcctgacaagacatttttttcagtgtataaaactaggtagtattgtgcactgatttgaccattgtgaaatcctttctcagtgtaactgcatttctaataaaaatttattgagtgaaacaatctttgtacaatgactagtcatgcatcatcagtaattttacaagttcttgtagtaggtagggggtactactagggatatctgtggcatgattatgcattccgtagtattatttaattaatttggggttcattttgcttccttttctttatgcttagattatcttactggttcaacatttttctgatatatgcagtattacagatattcagcaaaagtattaatgggcttctttaaattctatattatagtatttcagttccgtgtcttaacagtttgtgataatttctaaaactgtcttttcaacttatgtaatgatgttgacacttttggcttttatttctggtattagagtttgtattttcacagagtgctttgtagcaggcattacaattaatctgttttgtacataaatgtgccaacagcttgatggtggcgtttttgaaatgtagaacagagtgcttgcaaaatgtaataaatacacttgtgtactttgtgtacttattattaaaaaa

SEQ ID NO: 956 - protein, 267 aa, Homo sapiens
MGCFECCIKCLGGIPYASLIATILLYAGVALFCGCGHEALSGTVNILQTYFEMARTAGDTLDVFTMIDIFKYVIYGIAAAFFVYGILLMVEGFFTTGAIKDLYGDFKITTCGRCVSAWFIMLTYLFMLAWLGVTAFTSLPVYMYFNLWTICRNTTLVEGANLCLDLRQFGIVTIGEEKKICTVSENFLRMCESTELNMTFHLFIVALAGAGAAVIAMVHYLMVLSANWAYVKDACRMQKYEDIKSKEEQELHDIHSTRSKERLNAYT

SEQ ID NO: 957 - DNA, 7378 bp, Homo sapiens
gcggggagggtccgcgcgttggtggtgctcgcctcgcagctgcgcccgccggcttcagcaccttccgctgtccgccgctgcagccgcctcctcctccaggtgctgactattctgatgccgagtttccaattgccttgattaaagtagaaacattctatggcttggatgacttacatttcaaattggtttgagcaagatgattggtatgaaggactacaaagagcaaacatgtcccaggtaaggcaagtgggattgctggctgctggatgtcagccatggaacaaggatgtatgtgctgccagtggagacaggtttgcatattgtgcgaccctggctatctatatttatcagttggatcaccgttataatgaattcaaacttcacgcaattatgtctgaacataaaaaaacaatcacagcaatttcttggtgtccacataatcctgatctgtttgcaagtggcagtactgataatttagtgatcatttggaatgttgcagaacaaaaagtcattgctaaactcgacagtacaaaagggatccctgcttctcttagttggtgctggaatgcagaggatgtggtggcatttgtttcccacagaggcccactgttcatttggaccatctcaggaccagatagtggagtgattgtacacaaagatgctcatagcttcttgtctgatatctgtatgttcagatggcatacacaccaaaaggggaaagttgtgtttggtcatattgatggaagtctatcaatttttcatccaggtaataaaaatcagaaacatgttttgagaccagaatctcttgaagggacagatgaagaggatccagttacggccttggaatgggacccactatctactgattatcttctagtggttaatttgcattatggaattcgcctggtagattctgaatcactttcttgcataacaacatttaatcttcccagtgcagcagcttctgtacagtgcttagcctgggttcccagtgctcctgggatgtttataactggagattctcaagtgggtgttttacgcatttggaatgtttcaagaacaacacctattgataatcttaaattaaagaaaacaggatttcactgcttacatgtacttaattctcctccaagaaaaaagttttcagtccaatctccaaccaaaaatcattatacatcctcaacaagcgaagcagttccacccccaactttaacacagaatcaagcattttctcttcctcctggtcatgcagtgtgttgtttcttggatggtggagttggactttatgatatgggagctaagaagtgggattttcttagagacttgggacatgtggaaactatctttgactgcaaattcaaacctgacgatcctaatcttttagcaacagcttcatttgatggcactataaaagtctgggatataaacacattaacagcagtgtacacatccccgggtaatgaaggtgttatttattccctttcttgggctccaggtggtttaaattgtattgctgggggaacttcccgaaatggtgcttttatttggaatgttcaaaagggcaaaattatacaacgatttaatgagcatggaacaaatggaatattctgcattgcctggagtcataaagattctaaaagaatagcaacctgcagcagtgatggtttctgtattattcgaacaattgatggtaaagtgctacacaaatataaacatccagctgcagtgtttggttgtgattggagccaaaacaataaagacatgatagccactggctgtgaagacacaaatgttcgtgtttattatgtagccaccagctcagatcaaccattgaaagtatttagtgggcatacagcaaaagtgtttcatgttaaatggtctcctctgagagagggaattctttgcagtggttctgatgatggtaccgttcgaatctgggattatactcaggatgcttgcatcaatattcttaatggacacactgcacctgtgagaggattaatgtggaatactgagattccatatctgctcatatctggcagctgggactatactataaaagtatgggacactcgagaaggaacttgtgtggatactgtgtatgatcacggtgcagatgtatatggtttaacctgccatcccagtcgccccttcactatggcctcttgctcccgtgactctacagtgagactctggtcattaacagccttagtcactcctgtacaaataaatattctggcagacagatcttgggaagaaattattgggaacactgattatgctatagaaccaggcactcctcctctactgtgtggtaaagtgtcaagagatattagacaggaaatagaaaaactaactgctaattctcaagtgaaaaaactaagatggttctcagaatgtttatctcctccaggtggcagtgacaatttatggaacttggttgctgtgataaaaggacaggatgatagcttacttcctcagaactactgcaaaggaataatgcacttgaaacatctgattaaatttagaacatctgaagctcaagaactaacaacagtcaagatgtctaaatttggtggtggtattggtgtacctgctaaagaggaaagactgaaggaagctgctgaaatccacttgagattaggacaaattcagagatactgtgaacttatggttgaacttggagagtgggacaaagccctgtcaattgcaccaggagtctctgtgaaatactggaagaagttaatgcagaggagagctgaccaattaatccaggaagataaggatgatgtcattccatactgcatagccattggtgatgtgaaaaagctagtccattttttcatgtcaagaggtcagcttaaagaagctctgcttgttgcacaggctgcttgtgaaggaaatatgcagcccttacatgtttccgtgcctaaaggagcttcatattctgatgatatctacaaggaagactttaatgaactcctgcacaaagtcagtaaagaactggcagaatggtattttcaagatggtcgagcagtactagccgcatgttgccatcttgccatagataatattgagcttgctatggcatacctgattcgcggaaatgaactggagttggcagtctgtgtgggcacagtactaggagagtctgcagcaccagcaacccactatgccttagaattactggcgagaaagtgcatgatgatttcagtatgctttccatgtgttggatacagtgtccccttttgttacgttaacaggaatttggcagctgatcttcttctgatgattcctgataatgaactacatttaataaaactctgtgctttctacccaggatgtactgaagagataaatgaccttcatgataagtgtaagctacccacagtggaagaatgtatgcagttagctgagacagcccgtgcagatgacaatatatttgaaactgtaaaatattacttgttaagtcaagaacctgaaaaagcccttcctattggtattagctttgttaaagaatacatcagtagctcagactggactttggataccatataccctgttcttgacctactgagctatattcgtactgaaaaattactcttgcatacgtgtactgaagctcgaaatgagttgctgatattatgtggttacattggtgcattactggctatcagaagacagtaccaaagcattgttccagcactttatgagtacacaagtcagctattaaaacgtcgggaggtgtcagtacctttaaaaattgaatatctttctgaggaattggatgcatggagagcttgcacacagtccaccaacagatcattagaagactctccgtatacacccccttctgattcacaaagaatgatttatgcaactttattaaagagactaaaagaagagtcactgaaaggaattattggaccagattatgtgactggatcaaatcttccaagtcattctgatattcacatttcttgtcttacgggattaaaaatccagggccctgtgtttttccttgaagacgggaaatctgctatctccttgaatgatgctttgatgtgggcaaaggtgaatccattctcacctttagggactggaatacgactcaatccattctgatagaagatttttgtccatgcttgatttttttttttaaagaaaaactttcatgggttagcattaccttaatctttgttgctcaagtgccagaggttgggagaaggattgcaggttgggagaggtgggaaatagcagtgaattttagtcattaacttcaaaatatatatatatatataatttaaaggaaaaataggtgcctcctttataaacagtaatagctacgtttgggaaggaggaaacatttaaattataaaggactgaataatctaaaaagcatataaaagtttcacacagcataaaagataccaaaatatcatatggttgaaatattgaaacatattaaattgtgcaacacctagaatagtgctagacatacagtaagtacttaatggatatttgaatgattgaatatcttgaaatgttgaaatgtaaggtgtgcacagtgatcttcaacttaacaaacacttacgttctcctttataaaatgcatagtaaaccactaacgttagctgttttaataaaagttttcagttataagtttagtaaatattaataaatggatacacattcaaaatacttttaaaaaaaagaaaatgttaccagtttttttatctgaagtttaactgtcccattgtaaaggtgtaagttatataggcttgaaaaaaattggcgggtaaaaatcacaaaatgcagtcgaatatatatatgaaaacttgcattaggtgataaagtgactattttaagagattcagcatgcatggatattagttttgattaatgtgtacaataatttacacagtatactctagtcaatttatgttaactttatttaaaacacaatttatttggccgggcacggtggctcacacctgtaatctcagcactttggcaggccaaggcaggtggatcacctgaggtcaggagttcatgaccagcctggccagcatggtaaaaccctgtctccactaaaaatacaaaaattagccaggcatggtggcgggcacctgtaatcccagttacttgggaagctgaggcaggagaatcccttgaacctgggaggcagaggttccagtgagccaagatcgcaccactgcactccagcctgggcaacaaagagcgaaactctgtctcaaaaaacaaaccaacaaaaaccacaattgatttgatgaaaattagttttaagtaaatgtttgtaaatagatattggttgaatttttggatatattatgttgatttaacttttaaaatgttgtttaaaagtgtgaagctatgaaaagcctgataatgtgactacagatatttcagttggactagaattctgactttgaaacttattaaattaatgcatactggaagtactttgatactcaagttgtttcacaagatttataatatagatggttttgtttgactaaagaataatctcatataactagaatacttgtggcttttattatctttaaacttgttgcatttaaaatatttttaaaaccttcttaacaaaacttcttaaaactggaaaaaatatatattatgtatctatgtatcatatttatcacatgaccacttttgattccttaaaaagacattacaggcttaaattccattttattaaaaaaaaaaaattgcctgtaatcccagcacttcaggaggccgagatgggcagatcttgaggtcggtagatggagaccatcctggccaacatggtgaaaccctgtctctactaaaaatacaaaaattagctgggtgtggtggtgtgtacctgtagtcccagctacccaggaagctaaggcaggagaatcgcttgaatccaggaggcggaggttgcagtgagctgagatcgcactactgcactccagcctgggcgacagagcaagaccaccatctccaaaaattatatatataaaaataattaatattatagaagagaatatacacaactcagagatgcaatggataatataaaaagagtacctgagatgtatttttttaaactcttagagatatctgtaactcaaatttttcttaggtgaggaggattattaactggcacatatgtactaaaaacccctcacttaaaaatggcagtctcaatcctactgtcattctttttattttaaaataaataaataagcctatctttttgtgcttacatacttaaaaggatatcattaagtatataaacaatcattacttctgtatttttaatgaatgcaggaaaataatatttttatgtataaaagatgaagaaaaaattttgcaagtctttaagcacataaatacaacagaatagccacccaatttctgtctgaaatctaaattggatggatttgaccatcattctattatctttgatttctacaatgtctatatcttattacctataactattaatttttcatagaattataaatgtcatttgactatgtcaatctgtatatattgtaccttaatatgaaaaacaaattttttaattcataaaagtatttttattagatttcatatgcatgaaacccaagcaaattatatgaatttattttactatttgaaaatgttcatattaccaataatgtggacaaattactttgcaggtttaaatatgcctctgtaaaggaagagtctcattagacaatgatttttaaagcattggaaaaatattttgcctgtaaaagttagtaactaggtggttcacaaaattacaacatcaaaatagttacatcttgtgaaaatatatgatttttatgtcaatcaagacaaatgaaatatatatgtatgtgtatatatatacatgtatgtatgaaatatatatatgtgcgtgtgtgtgtgtatatatatatatatatatatatatttctatgaaattgtccagatgtgttcaggaacatgattgcattagagcaatgactgtattttgttgtccttataacatttatattatttcagttttaagtcaaaaggtattctgaatataataaaagcctcacaaattatttgtaaaatttagtagttcatatttagtatatcagtaatatagaagacatctttatagtcaactcttaattaatgcttattgtaccaaatctttgagatatttgtacataaatgaaatatgtactttcatgctaaaattatatatcatgactgtgctataatttggcatgtcattatctagatttatatgtatgtacgtatttcaggtccttgaaattttaataaatattacagttaaatcctgaaaaaaaaaaaaaaaaaa

SEQ ID NO: 958 - protein, 1322 aa, Homo sapiens
MAWMTYISNWFEQDDWYEGLQRANMSQVRQVGLLAAGCQPWNKDVCAASGDRFAYCATLAIYIYQLDHRYNEFKLHAIMSEHKKTITAISWCPHNPDLFASGSTDNLVIIWNVAEQKVIAKLDSTKGIPASLSWCWNAEDVVAFVSHRGPLFIWTISGPDSGVIVHKDAHSFLSDICMFRWHTHQKGKVVFGHIDGSLSIFHPGNKNQKHVLRPESLEGTDEEDPVTALEWDPLSTDYLLVVNLHYGIRLVDSESLSCITTFNLPSAAASVQCLAWVPSAPGMFITGDSQVGVLRIWNVSRTTPIDNLKLKKTGFHCLHVLNSPPRKKFSVQSPTKNHYTSSTSEAVPPPTLTQNQAFSLPPGHAVCCFLDGGVGLYDMGAKKWDFLRDLGHVETIFDCKFKPDDPNLLATASFDGTIKVWDINTLTAVYTSPGNEGVIYSLSWAPGGLNCIAGGTSRNGAFIWNVQKGKIIQRFNEHGTNGIFCIAWSHKDSKRIATCSSDGFCIIRTIDGKVLHKYKHPAAVFGCDWSQNNKDMIATGCEDTNVRVYYVATSSDQPLKVFSGHTAKVFHVKWSPLREGILCSGSDDGTVRIWDYTQDACINILNGHTAPVRGLMWNTEIPYLLISGSWDYTIKVWDTREGTCVDTVYDHGADVYGLTCHPSRPFTMASCSRDSTVRLWSLTALVTPVQINILADRSWEEIIGNTDYAIEPGTPPLLCGKVSRDIRQEIEKLTANSQVKKLRWFSECLSPPGGSDNLWNLVAVIKGQDDSLLPQNYCKGIMHLKHLIKFRTSEAQELTTVKMSKFGGGIGVPAKEERLKEAAEIHLRLGQIQRYCELMVELGEWDKALSIAPGVSVKYWKKLMQRRADQLIQEDKDDVIPYCIAIGDVKKLVHFFMSRGQLKEALLVAQAACEGNMQPLHVSVPKGASYSDDIYKEDFNELLHKVSKELAEWYFQDGRAVLAACCHLAIDNIELAMAYLIRGNELELAVCVGTVLGESAAPATHYALELLARKCMMISVCFPCVGYSVPFCYVNRNLAADLLLMIPDNELHLIKLCAFYPGCTEEINDLHDKCKLPTVEECMQLAETARADDNIFETVKYYLLSQEPEKALPIGISFVKEYISSSDWTLDTIYPVLDLLSYIRTEKLLLHTCTEARNELLILCGYIGALLAIRRQYQSIVPALYEYTSQLLKRREVSVPLKIEYLSEELDAWRACTQSTNRSLEDSPYTPPSDSQRMIYATLLKRLKEESLKGIIGPDYVTGSNLPSHSDIHISCLTGLKIQGPVFFLEDGKSAISLNDALMWAKVNPFSPLGTGIRLNPF

SEQ ID NO: 959 - DNA, 7255 bp, Homo sapiens
gcggggagggtccgcgcgttggtggtgctcgcctcgcagctgcgcccgccggcttcagcaccttccgctgtccgccgctgcagccgcctcctcctccaggcaaacatgtcccaggtaaggcaagtgggattgctggctgctggatgtcagccatggaacaaggatgtatgtgctgccagtggagacaggtttgcatattgtgcgaccctggctatctatatttatcagttggatcaccgttataatgaattcaaacttcacgcaattatgtctgaacataaaaaaacaatcacagcaatttcttggtgtccacataatcctgatctgtttgcaagtggcagtactgataatttagtgatcatttggaatgttgcagaacaaaaagtcattgctaaactcgacagtacaaaagggatccctgcttctcttagttggtgctggaatgcagaggatgtggtggcatttgtttcccacagaggcccactgttcatttggaccatctcaggaccagatagtggagtgattgtacacaaagatgctcatagcttcttgtctgatatctgtatgttcagatggcatacacaccaaaaggggaaagttgtgtttggtcatattgatggaagtctatcaatttttcatccaggtaataaaaatcagaaacatgttttgagaccagaatctcttgaagggacagatgaagaggatccagttacggccttggaatgggacccactatctactgattatcttctagtggttaatttgcattatggaattcgcctggtagattctgaatcactttcttgcataacaacatttaatcttcccagtgcagcagcttctgtacagtgcttagcctgggttcccagtgctcctgggatgtttataactggagattctcaagtgggtgttttacgcatttggaatgtttcaagaacaacacctattgataatcttaaattaaagaaaacaggatttcactgcttacatgtacttaattctcctccaagaaaaaagttttcagtccaatctccaaccaaaaatcattatacatcctcaacaagcgaagcagttccacccccaactttaacacagaatcaagcattttctcttcctcctggtcatgcagtgtgttgtttcttggatggtggagttggactttatgatatgggagctaagaagtgggattttcttagagacttgggacatgtggaaactatctttgactgcaaattcaaacctgacgatcctaatcttttagcaacagcttcatttgatggcactataaaagtctgggatataaacacattaacagcagtgtacacatccccgggtaatgaaggtgttatttattccctttcttgggctccaggtggtttaaattgtattgctgggggaacttcccgaaatggtgcttttatttggaatgttcaaaagggcaaaattatacaacgatttaatgagcatggaacaaatggaatattctgcattgcctggagtcataaagattctaaaagaatagcaacctgcagcagtgatggtttctgtattattcgaacaattgatggtaaagtgctacacaaatataaacatccagctgcagtgtttggttgtgattggagccaaaacaataaagacatgatagccactggctgtgaagacacaaatgttcgtgtttattatgtagccaccagctcagatcaaccattgaaagtatttagtgggcatacagcaaaagtgtttcatgttaaatggtctcctctgagagagggaattctttgcagtggttctgatgatggtaccgttcgaatctgggattatactcaggatgcttgcatcaatattcttaatggacacactgcacctgtgagaggattaatgtggaatactgagattccatatctgctcatatctggcagctgggactatactataaaagtatgggacactcgagaaggaacttgtgtggatactgtgtatgatcacggtgcagatgtatatggtttaacctgccatcccagtcgccccttcactatggcctcttgctcccgtgactctacagtgagactctggtcattaacagccttagtcactcctgtacaaataaatattctggcagacagatcttgggaagaaattattgggaacactgattatgctatagaaccaggcactcctcctctactgtgtggtaaagtgtcaagagatattagacaggaaatagaaaaactaactgctaattctcaagtgaaaaaactaagatggttctcagaatgtttatctcctccaggtggcagtgacaatttatggaacttggttgctgtgataaaaggacaggatgatagcttacttcctcagaactactgcaaaggaataatgcacttgaaacatctgattaaatttagaacatctgaagctcaagaactaacaacagtcaagatgtctaaatttggtggtggtattggtgtacctgctaaagaggaaagactgaaggaagctgctgaaatccacttgagattaggacaaattcagagatactgtgaacttatggttgaacttggagagtgggacaaagccctgtcaattgcaccaggagtctctgtgaaatactggaagaagttaatgcagaggagagctgaccaattaatccaggaagataaggatgatgtcattccatactgcatagccattggtgatgtgaaaaagctagtccattttttcatgtcaagaggtcagcttaaagaagctctgcttgttgcacaggctgcttgtgaaggaaatatgcagcccttacatgtttccgtgcctaaaggagcttcatattctgatgatatctacaaggaagactttaatgaactcctgcacaaagtcagtaaagaactggcagaatggtattttcaagatggtcgagcagtactagccgcatgttgccatcttgccatagataatattgagcttgctatggcatacctgattcgcggaaatgaactggagttggcagtctgtgtgggcacagtactaggagagtctgcagcaccagcaacccactatgccttagaattactggcgagaaagtgcatgatgatttcagtatgctttccatgtgttggatacagtgtccccttttgttacgttaacaggaatttggcagctgatcttcttctgatgattcctgataatgaactacatttaataaaactctgtgctttctacccaggatgtactgaagagataaatgaccttcatgataagtgtaagctacccacagtggaagaatgtatgcagttagctgagacagcccgtgcagatgacaatatatttgaaactgtaaaatattacttgttaagtcaagaacctgaaaaagcccttcctattggtattagctttgttaaagaatacatcagtagctcagactggactttggataccatataccctgttcttgacctactgagctatattcgtactgaaaaattactcttgcatacgtgtactgaagctcgaaatgagttgctgatattatgtggttacattggtgcattactggctatcagaagacagtaccaaagcattgttccagcactttatgagtacacaagtcagctattaaaacgtcgggaggtgtcagtacctttaaaaattgaatatctttctgaggaattggatgcatggagagcttgcacacagtccaccaacagatcattagaagactctccgtatacacccccttctgattcacaaagaatgatttatgcaactttattaaagagactaaaagaagagtcactgaaaggaattattggaccagattatgtgactggatcaaatcttccaagtcattctgatattcacatttcttgtcttacgggattaaaaatccagggccctgtgtttttccttgaagacgggaaatctgctatctccttgaatgatgctttgatgtgggcaaaggtgaatccattctcacctttagggactggaatacgactcaatccattctgatagaagatttttgtccatgcttgatttttttttttaaagaaaaactttcatgggttagcattaccttaatctttgttgctcaagtgccagaggttgggagaaggattgcaggttgggagaggtgggaaatagcagtgaattttagtcattaacttcaaaatatatatatatatataatttaaaggaaaaataggtgcctcctttataaacagtaatagctacgtttgggaaggaggaaacatttaaattataaaggactgaataatctaaaaagcatataaaagtttcacacagcataaaagataccaaaatatcatatggttgaaatattgaaacatattaaattgtgcaacacctagaatagtgctagacatacagtaagtacttaatggatatttgaatgattgaatatcttgaaatgttgaaatgtaaggtgtgcacagtgatcttcaacttaacaaacacttacgttctcctttataaaatgcatagtaaaccactaacgttagctgttttaataaaagttttcagttataagtttagtaaatattaataaatggatacacattcaaaatacttttaaaaaaaagaaaatgttaccagtttttttatctgaagtttaactgtcccattgtaaaggtgtaagttatataggcttgaaaaaaattggcgggtaaaaatcacaaaatgcagtcgaatatatatatgaaaacttgcattaggtgataaagtgactattttaagagattcagcatgcatggatattagttttgattaatgtgtacaataatttacacagtatactctagtcaatttatgttaactttatttaaaacacaatttatttggccgggcacggtggctcacacctgtaatctcagcactttggcaggccaaggcaggtggatcacctgaggtcaggagttcatgaccagcctggccagcatggtaaaaccctgtctccactaaaaatacaaaaattagccaggcatggtggcgggcacctgtaatcccagttacttgggaagctgaggcaggagaatcccttgaacctgggaggcagaggttccagtgagccaagatcgcaccactgcactccagcctgggcaacaaagagcgaaactctgtctcaaaaaacaaaccaacaaaaaccacaattgatttgatgaaaattagttttaagtaaatgtttgtaaatagatattggttgaatttttggatatattatgttgatttaacttttaaaatgttgtttaaaagtgtgaagctatgaaaagcctgataatgtgactacagatatttcagttggactagaattctgactttgaaacttattaaattaatgcatactggaagtactttgatactcaagttgtttcacaagatttataatatagatggttttgtttgactaaagaataatctcatataactagaatacttgtggcttttattatctttaaacttgttgcatttaaaatatttttaaaaccttcttaacaaaacttcttaaaactggaaaaaatatatattatgtatctatgtatcatatttatcacatgaccacttttgattccttaaaaagacattacaggcttaaattccattttattaaaaaaaaaaaattgcctgtaatcccagcacttcaggaggccgagatgggcagatcttgaggtcggtagatggagaccatcctggccaacatggtgaaaccctgtctctactaaaaatacaaaaattagctgggtgtggtggtgtgtacctgtagtcccagctacccaggaagctaaggcaggagaatcgcttgaatccaggaggcggaggttgcagtgagctgagatcgcactactgcactccagcctgggcgacagagcaagaccaccatctccaaaaattatatatataaaaataattaatattatagaagagaatatacacaactcagagatgcaatggataatataaaaagagtacctgagatgtatttttttaaactcttagagatatctgtaactcaaatttttcttaggtgaggaggattattaactggcacatatgtactaaaaacccctcacttaaaaatggcagtctcaatcctactgtcattctttttattttaaaataaataaataagcctatctttttgtgcttacatacttaaaaggatatcattaagtatataaacaatcattacttctgtatttttaatgaatgcaggaaaataatatttttatgtataaaagatgaagaaaaaattttgcaagtctttaagcacataaatacaacagaatagccacccaatttctgtctgaaatctaaattggatggatttgaccatcattctattatctttgatttctacaatgtctatatcttattacctataactattaatttttcatagaattataaatgtcatttgactatgtcaatctgtatatattgtaccttaatatgaaaaacaaattttttaattcataaaagtatttttattagatttcatatgcatgaaacccaagcaaattatatgaatttattttactatttgaaaatgttcatattaccaataatgtggacaaattactttgcaggtttaaatatgcctctgtaaaggaagagtctcattagacaatgatttttaaagcattggaaaaatattttgcctgtaaaagttagtaactaggtggttcacaaaattacaacatcaaaatagttacatcttgtgaaaatatatgatttttatgtcaatcaagacaaatgaaatatatatgtatgtgtatatatatacatgtatgtatgaaatatatatatgtgcgtgtgtgtgtgtatatatatatatatatatatatatttctatgaaattgtccagatgtgttcaggaacatgattgcattagagcaatgactgtattttgttgtccttataacatttatattatttcagttttaagtcaaaaggtattctgaatataataaaagcctcacaaattatttgtaaaatttagtagttcatatttagtatatcagtaatatagaagacatctttatagtcaactcttaattaatgcttattgtaccaaatctttgagatatttgtacataaatgaaatatgtactttcatgctaaaattatatatcatgactgtgctataatttggcatgtcattatctagatttatatgtatgtacgtatttcaggtccttgaaattttaataaatattacagttaaatcctgaaaaaaaaaaaaaaaaaa

SEQ ID NO: 960 - protein, 1298 aa, Homo sapiens
MSQVRQVGLLAAGCQPWNKDVCAASGDRFAYCATLAIYIYQLDHRYNEFKLHAIMSEHKKTITAISWCPHNPDLFASGSTDNLVIIWNVAEQKVIAKLDSTKGIPASLSWCWNAEDVVAFVSHRGPLFIWTISGPDSGVIVHKDAHSFLSDICMFRWHTHQKGKVVFGHIDGSLSIFHPGNKNQKHVLRPESLEGTDEEDPVTALEWDPLSTDYLLVVNLHYGIRLVDSESLSCITTFNLPSAAASVQCLAWVPSAPGMFITGDSQVGVLRIWNVSRTTPIDNLKLKKTGFHCLHVLNSPPRKKFSVQSPTKNHYTSSTSEAVPPPTLTQNQAFSLPPGHAVCCFLDGGVGLYDMGAKKWDFLRDLGHVETIFDCKFKPDDPNLLATASFDGTIKVWDINTLTAVYTSPGNEGVIYSLSWAPGGLNCIAGGTSRNGAFIWNVQKGKIIQRFNEHGTNGIFCIAWSHKDSKRIATCSSDGFCIIRTIDGKVLHKYKHPAAVFGCDWSQNNKDMIATGCEDTNVRVYYVATSSDQPLKVFSGHTAKVFHVKWSPLREGILCSGSDDGTVRIWDYTQDACINILNGHTAPVRGLMWNTEIPYLLISGSWDYTIKVWDTREGTCVDTVYDHGADVYGLTCHPSRPFTMASCSRDSTVRLWSLTALVTPVQINILADRSWEEIIGNTDYAIEPGTPPLLCGKVSRDIRQEIEKLTANSQVKKLRWFSECLSPPGGSDNLWNLVAVIKGQDDSLLPQNYCKGIMHLKHLIKFRTSEAQELTTVKMSKFGGGIGVPAKEERLKEAAEIHLRLGQIQRYCELMVELGEWDKALSIAPGVSVKYWKKLMQRRADQLIQEDKDDVIPYCIAIGDVKKLVHFFMSRGQLKEALLVAQAACEGNMQPLHVSVPKGASYSDDIYKEDFNELLHKVSKELAEWYFQDGRAVLAACCHLAIDNIELAMAYLIRGNELELAVCVGTVLGESAAPATHYALELLARKCMMISVCFPCVGYSVPFCYVNRNLAADLLLMIPDNELHLIKLCAFYPGCTEEINDLHDKCKLPTVEECMQLAETARADDNIFETVKYYLLSQEPEKALPIGISFVKEYISSSDWTLDTIYPVLDLLSYIRTEKLLLHTCTEARNELLILCGYIGALLAIRRQYQSIVPALYEYTSQLLKRREVSVPLKIEYLSEELDAWRACTQSTNRSLEDSPYTPPSDSQRMIYATLLKRLKEESLKGIIGPDYVTGSNLPSHSDIHISCLTGLKIQGPVFFLEDGKSAISLNDALMWAKVNPFSPLGTGIRLNPF

SEQ ID NO: 961 - DNA, 1233 bp, Homo sapiens
gcgctgaggtctcgccccataagactccgccccgccccacgaggccgcgccgccagcaataaggcccagccccgccttctgctgttgccgcagcaacccagaaagcgtcatggctgccgccggccaggaaaaagggtatttgacacagactgcggcagccctagacaagtcaccgtcactttcgccacagctagcagctcccatccgagggaggcctaagaagtgtctggtctatccgcatgcgccgaagagctcccgcttgtctcgttccgttctgcgttggcttcagggtctggatctcagcttcttccccaggaacatcaacagagatttttcaaatggcttcctaattgcagaaatattctgtatatattacccctgggaacttgaattatcatcctttgaaaacgggacctctttaaaagtcaagttggataactgggcacagttggagaagttcctggcaagaaaaaaatttaaattacctaaagaactaatccatggaacaattcattgtaaagctggagtgcctgaaatattgatagaagaggtttacactttattaacacatcgagaaattaaaagtatccaggatgactttgtgaatttcacggactatagctaccagatgcgtttacccctggtttccaggtctacagtttcgaagtctattaaagataacattaggttatcagaattactaagcaatcccaacatgctgaccaatgaacttaaagcggagttcctcatccttttacatatgttgcaaagaaaattaggcagaaaattgaatccagaatggtttgatgtgaaaccaacagtgggagaagttactctcaatcaccttcctgcccaagcctctgggcgcagatataatttaaaagttaaaagaggaagagttgtccctgttttaccaaatataggtagtggtggcagttcacatagagaaatacatgtgaagcaagctggacaacattcttattactctgctatgaaacctatcagaaacatggacaagaaaccttgaaaagcacctgtcaaatggctttgaagaagtgatgccaccatctctagccataataaagaaacagaatcacctagtattggatgtatttcaataataaatagagtggtgtcttttccataattgtgttaaagaacatttcttttccattcaatttgtttattaaactcctatgccaggcattgttgaaaatacaaaattaaataaat

SEQ ID NO: 962 - protein, 305 aa, Homo sapiens
MAAAGQEKGYLTQTAAALDKSPSLSPQLAAPIRGRPKKCLVYPHAPKSSRLSRSVLRWLQGLDLSFFPRNINRDFSNGFLIAEIFCIYYPWELELSSFENGTSLKVKLDNWAQLEKFLARKKFKLPKELIHGTIHCKAGVPEILIEEVYTLLTHREIKSIQDDFVNFTDYSYQMRLPLVSRSTVSKSIKDNIRLSELLSNPNMLTNELKAEFLILLHMLQRKLGRKLNPEWFDVKPTVGEVTLNHLPAQASGRRYNLKVKRGRVVPVLPNIGSGGSSHREIHVKQAGQHSYYSAMKPIRNMDKKP

SEQ ID NO: 963 - DNA, 2929 bp, Homo sapiens
agattcttctgcagcaatgtcggtgttagaagaaaatcggccgtttgctcaacaattatccaatgtctactttacaatactttcgctgttctgttttaagctttttgtgaaaatcagccttgccatcctcagtcatttctacatagtgaaaggcaaccgcaaggaagcggcaaggatagcagctgaattttatggagtaacccaaggacaaggttcctgggcagatcgatcaccactacatgaagcagcaagtcaaggtcgccttcttgctctgagaacattattatcacagggttataatgtaaatgcagtaaccttagaccatgtcaccccattgcacgaagcctgccttggagatcacgtggcatgtgccagaactctgctggaagcaggagctaatgtaaatgcaatcacgatagatggcgtgactccgttattcaacgcatgctcccaaggcagtccaagctgtgcagagctgcttctggagtatggtgccaaagcccagctggagtcatgtcttccatccccaacgcatgaggccgccagtaaaggtcaccatgaatgtcttgacatcctgatatcctggggcatagatgttgaccaagaaattcctcatttgggaactcctctctatgtagcttgtatgtcacagcaattccattgcatctggaagcttctttatgctggtgctgacgtacagaaaggcaaatattgggatactccattacatgctgctgctcaacaatccagcacagaaattgtaaacttactgctagaatttggagcagatatcaatgccaaaaatacagagcttctgcgacctatagatgtagctacgtctagcagtatggtggaaaggatattgcttcaacatgaagctaccccaagctctctttaccaactttgccgactctgtatccgaagctacataggaaaaccaagattgcaccttatcccacaactccagctgccaacgttactgaagaatttcttacagtatcgataaaacagtaaagtaattctaaataccttgaaaatcaaaatttctatttcttttgcttaaggaatagttcatataaaaatatgctaaagataggataaaagtgagtgtgagatcacccagggaagcagtaaaatatcaattttcattttaagtgtattagtactattgttttatcatttatgctgtctttggattatagcatatttataatatctattttttgttatttcaatataccctcttgtttattcaggaaaaaataataaagtcactatcttatgttttcttttggattggaaagaaataaagctcctagtaaagttattcatattatatttaaaaaggtctatgttcttcaactaatgggttaactttttaattttggctattgtaattggctaacttgttactgatattgacataaaatatgaatatggcttagcaaagagcaactaatatgttttctgaaaccaggatgatgctcattcaggaaatccactatgttgaatgtccactggtcattagaatgaacacttcataaagataaattgcccccctctcccccacttacccctggcaaaggactcacaagtcacttctcttctccatagtacatggacttgttacagaaaagtgataggatgaaaggtcaatactgccctctcaccctgagatatttagaacattacacaccttctaaggctatgttaagactgcctccttctcaggagtagcccctgatgatctcttatcaaggcggttatatgcatattactccagccttcttccatttcagaaattgtcaatagctagtgatacttggacttaagaaaatgaactatatatctaattaacaaacaggccctggatcatattccggggatcatcacatcagtccaaggatataaaaaaatggaagattaaaaactcaaattgtggagtttttaaagagtgggtgccacttaacacattggagaccttaaaaaatgtatatagagaacttaatcgcactgtttctaattctttttacacaaaacaagggcttagagtatactgtatttgcaagtaatagcaagagagtattgtataaaagaagatattactaagctagtcctctgcaagggtaaatactatgtttattctcttcagctttaactatacttgagtgcaataaaaaacttaataaaattttatgcctgttttgtaattcagggcctattatgattttagaaataagataatcaacgtacaactctttgtaaaacaaaagcaactttgggtgagttttatagatttattaaattttgataaagtaaatattttgaccactattttcaacaacccagggcttattttcttctgacttcttggctaacttccagactatgggaaaataaattatgattgtatgtgacccccagatcactaagcttgcattttggcagaaagaaaaaaaatcagttgtgatttaaaacgtttgttgagattttcaaacatagaaataaagctgtagcatattcactaaacaatgttttatatgaggatagggacctttaaatatgtgttttatagaatatctcacacatttgtaatggataacgtgcattaaaatggagttcttattatagaataacctggttaaacagatattaaagctgcttttgggtaaaacaggtttccaccagtattttccctgagctagaggagaagtcttagattttaagagtaatacaacccatctatcttattagtcttgtgccaataagagaagtaaatatcaaacattaaaatggtcactttacaatttcagtatgtctgtaccttgtatcttagcttgagtatgattgtcttatcaaagtagtgttctaactttaatgtattgtatgtttgttattatattaaagtgtgattattattcattggaat

SEQ ID NO: 964 - protein, 329 aa, Homo sapiens
MSVLEENRPFAQQLSNVYFTILSLFCFKLFVKISLAILSHFYIVKGNRKEAARIAAEFYGVTQGQGSWADRSPLHEAASQGRLLALRTLLSQGYNVNAVTLDHVTPLHEACLGDHVACARTLLEAGANVNAITIDGVTPLFNACSQGSPSCAELLLEYGAKAQLESCLPSPTHEAASKGHHECLDILISWGIDVDQEIPHLGTPLYVACMSQQFHCIWKLLYAGADVQKGKYWDTPLHAAAQQSSTEIVNLLLEFGADINAKNTELLRPIDVATSSSMVERILLQHEATPSSLYQLCRLCIRSYIGKPRLHLIPQLQLPTLLKNFLQYR

SEQ ID NO: 965 - DNA, 1544 bp, Homo sapiens
gcgctcccggaacgcgcgcaccgcagacggcgcggatcgcagggagccggtccgccgccggaacgggagcctgggtgtgcgtgtggagtccggactcgtgggagacgatcgcgatgaacacggtgctgtcgcgggcgaactcactgttcgccttctcgctgagcgtgatggcggcgctcaccttcggctgcttcatcaccaccgccttcaaagacaggagcgtcccggtgcggctgcacgtctcgcggatcatgctaaaaaatgtagaagatttcactggacctagagaaagaagtgatctgggatttatcacatttgatataactgctgatctagagaatatatttgattggaatgttaagcagttgtttctttatttatcagcagaatattcaacaaaaaataatgctctgaaccaagttgtcctatgggacaagattgttttgagaggtgataatccgaagctgctgctgaaagatatgaaaacaaaatattttttctttgacgatggaaatggtctcaagggaaacaggaatgtcactttgaccctgtcttggaacgtcgtaccaaatgctggaattctacctcttgtgacaggatcaggacacgtatctgtcccatttccagatacatatgaaataacgaagagttattaaattattctgaatttgaaacaacatatttttatacttaatgaattgtatctcattaatctcttcccttacatcttcatgtattgttggtttgttttttggttttgggttttttttttttttttttggtataagaactaacatcaaaaggcctgtttaaagggaaaggttaatgggctacttaatattatgaacaaaacaaaaaaacaaggctgccacagtggaatattatcttacaagaataagaactacataaaacagatttgtaaaaaatacatatttgaagtattccctgtatttccattattctttatggaatataaagtaagcatgaaaggtagttaaaactttcaggtgcctgtagagtcataataactgtattttatgccttgcattcacgcaaattcacattggatgtgatttaaaagtagacattctctttttcctcttttaggatatgtttgattactggaaaattaatatggttatttgttagaagtctggtttataaaaaagccaaaagtgatggaatttattccatttgtcttaggaaggcccataatacttgtttttcttacatgtgactagcaactttctccacttaaagactaaatacctctttatatgatgtaaattattctaattcattttaaaatcttttaggtcagcaaaatgtgtgtcttcagtgctttctctaaaaacgttcctttatagctttgtacttttttttttagcgttgccattgaaagttaaaatgtttgcatggtttaccctctgagttatgtttcttctagtgagcatgcctgctgtcactaagtgaattatttactactttttgtaggtctatattttaataattattgggataataataaaaaaaaaaaaaaaaaa

SEQ ID NO: 966 - protein, 180 aa, Homo sapiens
MNTVLSRANSLFAFSLSVMAALTFGCFITTAFKDRSVPVRLHVSRIMLKNVEDFTGPRERSDLGFITFDITADLENIFDWNVKQLFLYLSAEYSTKNNALNQVVLWDKIVLRGDNPKLLLKDMKTKYFFFDDGNGLKGNRNVTLTLSWNVVPNAGILPLVTGSGHVSVPFPDTYEITKSY

SEQ ID NO: 967 - DNA, 984 bp, Homo sapiens
atgtcagacaagctcaaggaacgcaaagtgagtcggctgagcccaaatggcacttgcgccctggtggtggaggcatctgactcaccgacccgccacttgggtggaccgatggcagggaagtgcccgcacgggactttgagtgtggaggaatctcgagtgagaacccccgtttctcataaagtgatagaaaagcggaggagggacaggatcaaccgctgcttgaacgagctgggcaagacagtgcccatggccttggcgaagcagggcgaacctcaggaggctctggcgcagatccgcagccgcgtccgctcgctggtcctctccagcgccacagtgcccgaccagcaggcgctgggccgctgcgaggggcccttcctccttttgcagagttccgggaagctggagaaggcggagatcctcgagatgaccgttcagtacctgagagcactgcactccgctgattttccccggggaagggaaaaagcagaacttctagcggagtttgccaactacttccactatggctaccacgagtgcatgaagaacctggtgcattacctcaccacggtggagcggatggagaccaaggacacgaagtacgcgcgcatcctcgccttcttgcagtccaaggcccgcctgggcgcggagcccgcctttccgccgctgggttcgctcccggagccggatttctcctatcagctgcaccctgcggggcccgaattcgctggtcacagcccgggcgaggccgctgtgttcccgcagggctctggtgccgggcctttcccctggccgcctggcgcggcccgcagccccgcgctgccctacctgcccagcgcgccagtgccgctcgctagcccagcgcagcagcacagccccttcctgacaccggtgcagggcctggaccggcattacctcaacctgatcggccacgcgcaccccaacgcccttaacctgcacacgccccagcaccccccggtgctctga

SEQ ID NO: 968 - protein, 327 aa, Homo sapiens
MSDKLKERKVSRLSPNGTCALVVEASDSPTRHLGGPMAGKCPHGTLSVEESRVRTPVSHKVIEKRRRDRINRCLNELGKTVPMALAKQGEPQEALAQIRSRVRSLVLSSATVPDQQALGRCEGPFLLLQSSGKLEKAEILEMTVQYLRALHSADFPRGREKAELLAEFANYFHYGYHECMKNLVHYLTTVERMETKDTKYARILAFLQSKARLGAEPAFPPLGSLPEPDFSYQLHPAGPEFAGHSPGEAAVFPQGSGAGPFPWPPGAARSPALPYLPSAPVPLASPAQQHSPFLTPVQGLDRHYLNLIGHAHPNALNLHTPQHPPVL

SEQ ID NO: 969 - DNA, 8192 bp, Homo sapiens
ctgggcggccgggcgcggggagagggcgcgggagcggctcgtgcggcaggtaccatgcggacgcgcgagcccggcgagggccccggcaggcccggtccctgctcgggggcgcgctgagacggcgggtgagctccacgagagcgccgtcgccacttcgggccaactttgcgattcccgacagttaagcaatggggagacatttggctttgctcctgcttctgctccttctcttccaacattttggagacagtgatggcagccaacgacttgaacagactcctctgcagtttacacacctcgagtacaacgtcaccgtgcaggagaactctgcagctaagacttatgtggggcatcctgtcaagatgggtgtttacattacacatccagcgtgggaagtaaggtacaaaattgtttccggagacagtgaaaacctgttcaaagctgaagagtacattctcggagacttttgctttctaagaataaggaccaaaggaggaaatacagctattcttaatagagaagtgaaggatcactacacattgatagtgaaagcacttgaaaaaaatactaatgtggaggcgcgaacaaaggtcagggtgcaggtgctggatacaaatgacttgagaccgttattctcacccacctcatacagcgtttctttacctgaaaacacagctataaggaccagtatcgcaagagtcagcgccacggatgcagacataggaaccaacggggaattttactacagttttaaagatcgaacagatatgtttgctattcacccaaccagtggtgtgatagtgttaactggtagacttgattacctagagaccaagctctatgagatggaaatcctcgctgcggaccgtggcatgaagttgtatgggagcagtggcatcagcagcatggccaagctaacggtgcacatcgaacaggccaatgaatgtgctccggtgataacagcagtgacattgtcaccatcagaactggacagggacccagcatatgcaattgtgacagtggatgactgcgatcagggtgccaatggtgacatagcatctttaagcatcgtggcaggtgaccttctccagcagtttagaacagtgaggtcctttccagggagtaaggagtataaagtcaaagccatcggtggcattgattgggacagtcatcctttcggctacaatctcacactacaggctaaagataaaggaactccgccccagttctcttctgttaaagtcattcacgtgacttctccacagttcaaagccgggccagtcaagtttgaaaaggatgtttacagagcagaaataagtgaatttgctcctcccaacacacctgtggtcatggtaaaggccattcctgcttattcccatttgaggtatgtttttaaaagtacacctggaaaagctaaattcagtttaaattacaacactggtctcatttctattttagaaccagttaaaagacagcaggcagcccattttgaacttgaagtaacaacaagtgacagaaaagcgtccaccaaggtcttggtgaaagtcttaggtgcaaatagcaatccccctgaatttacccagacagcgtacaaagctgcttttgatgagaacgtgcccattggtactactgtcatgagcctgagtgccgtagaccctgatgagggtgagaacgggtacgtgacatacagtatcgcaaatttaaatcatgtgccgtttgcgattgaccatttcactggtgccgtgagtacgtcagaaaacctggactacgaactgatgcctcgggtttatactctgaggattcgtgcatcagactggggcttgccgtaccgccgggaagtcgaagtccttgctacaattactctcaataacttgaatgacaacacacctttgtttgagaaaataaattgtgaagggacaattcccagagatctaggcgtgggagagcaaataaccactgtttctgctattgatgcagatgaacttcagttggtacagtatcagattgaagctggaaatgaactggatttctttagtttaaaccccaactcgggggtattgtcattaaagcgatcgctaatggatggcttaggtgcaaaggtgtctttccacagtctgagaatcacagctacagatggagaaaattttgccacaccattatatatcaacataacagtggctgccagtcacaagctggtaaacttgcagtgtgaagagactggtgttgccaaaatgctggcagagaagctcctgcaggcaaataaattacacaaccagggagaggtggaggatattttcttcgattctcactctgtcaatgctcacataccgcagtttagaagcactcttccgactggtattcaggtaaaggaaaaccagcctgtgggttccagtgtaattttcatgaactccactgaccttgacactggcttcaatggaaaactggtctatgctgtttctggaggaaatgaggatagttgcttcatgattgatatggaaacaggaatgctgaaaattttatctcctcttgaccgtgaaacaacagacaaatacaccctgaatattaccgtctatgaccttgggataccccagaaggctgcgtggcgtcttctacatgtcgtggttgtcgatgccaatgataatccacccgagtttttacaggagagctattttgtggaagtgagtgaagacaaggaggtacatagtgaaatcatccaggttgaagccacagataaagacctggggcccaacggacacgtgacgtactcaattgttacagacacagacacattttcaattgacagcgtgacgggtgttgttaacatcgcacgccctctggatcgagagctgcagcatgagcactccttaaagattgaggccagggaccaagccagagaagagcctcagctgttctccactgtcgttgtgaaagtatcactagaagatgttaatgacaacccacctacatttattccacctaattatcgtgtgaaagtccgagaggatcttccagaaggaaccgtcatcatgtggttagaagcccacgatcctgatttaggtcagtctggtcaggtgagatacagccttctggaccacggagaaggaaacttcgatgtggataaactcagtggagcagttaggatcgtccagcagttggactttgagaagaagcaagtgtataatctcactgtgagggccaaagacaagggaaagccagtttctctgtcttctacttgctatgttgaagttgaggtggttgatgtgaatgagaacctgcacccacccgtgttttccagctttgtggaaaaggggacagtgaaagaagatgcacctgttggttcattggtaatgacggtgtcggctcatgatgaggacgccagaagagatggggagatccgatactccattagagatggctctggcgttggtgttttcaaaataggtgaagagacaggtgtcatagagacgtcagatcgactggaccgtgaatcgacctcccattattggctaacagtctttgcaaccgatcagggtgtcgtgcctctttcatcgttcatagagatctacatagaggttgaggatgtcaatgacaatgcaccacagacatcagagcctgtttattacccagaaatcatggaaaattctcctaaagatgtatctgtggtccagatcgaggcatttgatccagattcgagctctaatgacaagctcatgtacaaaattacaagtggaaatccacaaggattcttttcaatacatcctaaaacaggtctcatcacaactacgtcaaggaagctagaccgagaacagcaagatgaacacatattagaggttactgtgacagacaatggtagtccccccaaatcaaccattgcaagagtcattgtgaaaatccttgatgaaaatgacaacaaacctcagtttctgcaaaagttctacaaaatcagactccctgagcgggaaaagccagaccgagaaagaaatgccagacgggagccgctctatcacgtcatagccaccgacaaggatgagggccccaatgcagaaatctcctacagcatcgaagacgggaatgagcatggcaaatttttcatcgaaccgaaaactggagtggtttcgtccaagaggttttcagcagctggagaatatgatattctttcaattaaggcagttgacaatggtcgccctcaaaagtcatcaaccaccagactccatattgaatggatctccaagcccaaaccgtccctggagcccatttcatttgaagaatcattttttacctttactgtgatggaaagtgaccccgttgctcacatgattggagtaatatctgtggagcctcctggcatacccctttggtttgacatcactggtggcaactacgacagtcacttcgatgtggacaagggaactggaaccatcattgttgccaaacctcttgatgcagaacagaagtcaaactacaacctcacagtcgaggctacagatggaaccaccactatcctcactcaggtattcatcaaagtaatagacacaaatgaccatcgtcctcagttttctacatcaaagtatgaagttgttattcctgaagatacagcgccagaaacagaaattttgcaaatcagtgctgtggatcaggatgagaaaaacaaactaatctacactctgcagagcagtagagatccactgagtctcaagaaatttcgtcttgatcctgcaaccggctctctctatacttctgagaaactggatcatgaagctgttcaccagcacaccctcacggtcatggtacgagatcaagatgtgcctgtaaaacgcaactttgcaaggattgtggtcaatgtcagcgacacgaatgaccacgccccgtggttcaccgcttcctcctacaaagggcgggtttatgaatcggcagccgttggctcagttgtgttgcaggtgacggctctggacaaggacaaagggaaaaatgctgaagtgctgtactcgatcgagtcaggaaatattggaaattcttttatgattgatcctgtcttgggctctattaaaactgccaaagaattagatcgaagtaaccaagcggagtatgatttaatggtaaaagctacagataagggcagtccaccaatgagtgaaataacttctgtgcgtatctttgtcacaattgctgacaacgcctctccgaagtttacatcaaaagaatattctgttgaacttagtgaaactgtcagcattgggagtttcgttgggatggttacagcccatagtcaatcatcagtggtgtatgaaataaaagatggaaatacaggtgatgcttttgatattaatccacattctggaactatcatcactcagaaagccctggactttgaaactttgcccatttacacattgataatacaaggaactaacatggctggtttgtccactaatacaacggttctagttcacttgcaggatgagaatgacaacgcgccagtttttatgcaggcagaatatacaggactcattagtgaatcagcctcaattaacagcgtggtcctaacagacaggaatgtcccactggtgattcgagcagctgatgctgataaagactcaaatgctttgcttgtatatcacattgttgaaccatctgtacacacatattttgctattgattctagcactggtgctattcatacagtactaagtctggactatgaagaaacaagtatttttcactttaccgtccaagtgcatgacatgggaaccccacgtttatttgctgagtatgcagcgaatgtaacagtacatgtaattgacattaatgactgcccccctgtgtttgccaagccattatatgaagcatctcttttgttaccaacatacaaaggagtaaaagtcatcacagtaaatgctacagatgctgattcaagtgcattctcacagttgatttactccatcaccgaaggcaacatcggggagaagttttctatggactacaagactggtgctctcactgtccaaaacacaactcagttaagaagccgctacgagctaaccgttagagcttccgatggcagatttgccggccttacctctgtcaaaattaatgtgaaagaaagcaaagaaagtcacctaaagtttacccaggatgtctactctgcggtagtgaaagagaattccaccgaggccgaaacattagctgtcattactgctattgggaatccaatcaatgagcctttgttttatcacatcctcaacccagatcgcagatttaaaataagccgcacttcaggagttctgtcaaccactggcacgcccttcgatcgtgagcagcaggaggcgtttgatgtggttgtagaagtgacagaggaacataagccttctgcagtggcccacgttgtcgtgaaggtcattgtagaagaccaaaatgataatgcgccggtgtttgtcaaccttccctactacgccgttgttaaagtggacactgaggtgggccatgtcattcgctatgtcactgctgtagacagagacagtggcagaaacggggaagtgcattactacctcaaggaacatcatgaacactttcaaattggacccttgggtgaaatttcactgaaaaagcaatttgagcttgacaccttaaataaagaatatcttgttacagtggttgcaaaagatggagggaacccggccttttcagcggaagttatcgttccgatcactgtcatgaataaagccatgcctgtgtttgaaaaacctttctacagtgcagagattgcagagagcatccaggtgcacagccctgtggtccacgtgcaggctaacagcccggaaggcctgaaagtgttctacagcatcacagacggagaccctttcagccagttcactattaacttcaatactggagttatcaatgtcatagctcctctggactttgaggcccacccggcatataagctgagcatacgcgcaactgactccttgacgggcgctcatgctgaagtatttgtggacatcatagtagacgacatcaatgataaccctcctgtgtttgctcagcagtcttatgcggtgaccctgtctgaggcatctgtaattggaacgtctgttgttcaagttagagccaccgattctgattcagaaccaaatagaggaatctcataccagatgtttgggaatcacagcaagagtcatgatcattttcatgtagacagcagcactggcctcatctcactactcagaaccctggattacgagcagtcccggcagcacacgatttttgtgagggcagttgatggtggtatgcccacgctgagcagtgatgtgattgtcacggtggacgttaccgacctcaatgataatccaccactctttgaacaacagatttatgaagccagaattagcgagcacgcccctcatgggcatttcgtgacctgtgtaaaagcctatgatgcagacagttcagacatagacaagttgcagtattccattctgtctggcaatgatcataaacattttgtcattgacagtgcaacagggattatcaccctctcaaacctgcaccggcacgccctgaagccattttacagtcttaacctgtcagtgtctgatggagtttttagaagttccacccaggttcatgtaactgtaattggaggcaatttgcacagtcctgctttccttcagaacgaatatgaagtggaactagctgaaaacgctcccctacataccctggtgatggaggtgaaaactacggatggggattctggtatttatggtcacgttacttaccatattgtaaatgactttgccaaagacagattttacataaatgagagaggacagatatttactttggaaaaacttgatcgagaaaccccggcggagaaagtgatctcagtccgtttaatggctaaggatgctggaggaaaagttgctttctgcaccgtgaatgtcatccttacagatgacaatgacaatgcaccacaatttcgagcaaccaaatacgaagtgaatatcgggtccagtgctgctaaagggacttcagtcgttaaagttcttgcaagtgatgccgatgagggctccaatgccgacatcacctatgccattgaagcagactctgaaagtgtaaaagagaatttggaaattaacaaactgtccggcgtaatcactacaaaggagagcctcattggcttggaaaatgaattc

SEQ ID NO: 970 - protein, 4588 aa, Homo sapiens
MGRHLALLLLLLLLFQHFGDSDGSQRLEQTPLQFTHLEYNVTVQENSAAKTYVGHPVKMGVYITHPAWEVRYKIVSGDSENLFKAEEYILGDFCFLRIRTKGGNTAILNREVKDHYTLIVKALEKNTNVEARTKVRVQVLDTNDLRPLFSPTSYSVSLPENTAIRTSIARVSATDADIGTNGEFYYSFKDRTDMFAIHPTSGVIVLTGRLDYLETKLYEMEILAADRGMKLYGSSGISSMAKLTVHIEQANECAPVITAVTLSPSELDRDPAYAIVTVDDCDQGANGDIASLSIVAGDLLQQFRTVRSFPGSKEYKVKAIGGIDWDSHPFGYNLTLQAKDKGTPPQFSSVKVIHVTSPQFKAGPVKFEKDVYRAEISEFAPPNTPVVMVKAIPAYSHLRYVFKSTPGKAKFSLNYNTGLISILEPVKRQQAAHFELEVTTSDRKASTKVLVKVLGANSNPPEFTQTAYKAAFDENVPIGTTVMSLSAVDPDEGENGYVTYSIANLNHVPFAIDHFTGAVSTSENLDYELMPRVYTLRIRASDWGLPYRREVEVLATITLNNLNDNTPLFEKINCEGTIPRDLGVGEQITTVSAIDADELQLVQYQIEAGNELDFFSLNPNSGVLSLKRSLMDGLGAKVSFHSLRITATDGENFATPLYINITVAASHKLVNLQCEETGVAKMLAEKLLQANKLHNQGEVEDIFFDSHSVNAHIPQFRSTLPTGIQVKENQPVGSSVIFMNSTDLDTGFNGKLVYAVSGGNEDSCFMIDMETGMLKILSPLDRETTDKYTLNITVYDLGIPQKAAWRLLHVVVVDANDNPPEFLQESYFVEVSEDKEVHSEIIQVEATDKDLGPNGHVTYSIVTDTDTFSIDSVTGVVNIARPLDRELQHEHSLKIEARDQAREEPQLFSTVVVKVSLEDVNDNPPTFIPPNYRVKVREDLPEGTVIMWLEAHDPDLGQSGQVRYSLLDHGEGNFDVDKLSGAVRIVQQLDFEKKQVYNLTVRAKDKGKPVSLSSTCYVEVEVVDVNENLHPPVFSSFVEKGTVKEDAPVGSLVMTVSAHDEDARRDGEIRYSIRDGSGVGVFKIGEETGVIETSDRLDRESTSHYWLTVFATDQGVVPLSSFIEIYIEVEDVNDNAPQTSEPVYYPEIMENSPKDVSVVQIEAFDPDSSSNDKLMYKITSGNPQGFFSIHPKTGLITTTSRKLDREQQDEHILEVTVTDNGSPPKSTIARVIVKILDENDNKPQFLQKFYKIRLPEREKPDRERNARREPLYHVIATDKDEGPNAEISYSIEDGNEHGKFFIEPKTGVVSSKRFSAAGEYDILSIKAVDNGRPQKSSTTRLHIEWISKPKPSLEPISFEESFFTFTVMESDPVAHMIGVISVEPPGIPLWFDITGGNYDSHFDVDKGTGTIIVAKPLDAEQKSNYNLTVEATDGTTTILTQVFIKVIDTNDHRPQFSTSKYEVVIPEDTAPETEILQISAVDQDEKNKLIYTLQSSRDPLSLKKFRLDPATGSLYTSEKLDHEAVHQHTLTVMVRDQDVPVKRNFARIVVNVSDTNDHAPWFTASSYKGRVYESAAVGSVVLQVTALDKDKGKNAEVLYSIESGNIGNSFMIDPVLGSIKTAKELDRSNQAEYDLMVKATDKGSPPMSEITSVRIFVTIADNASPKFTSKEYSVELSETVSIGSFVGMVTAHSQSSVVYEIKDGNTGDAFDINPHSGTIITQKALDFETLPIYTLIIQGTNMAGLSTNTTVLVHLQDENDNAPVFMQAEYTGLISESASINSVVLTDRNVPLVIRAADADKDSNALLVYHIVEPSVHTYFAIDSSTGAIHTVLSLDYEETSIFHFTVQVHDMGTPRLFAEYAANVTVHVIDINDCPPVFAKPLYEASLLLPTYKGVKVITVNATDADSSAFSQLIYSITEGNIGEKFSMDYKTGALTVQNTTQLRSRYELTVRASDGRFAGLTSVKINVKESKESHLKFTQDVYSAVVKENSTEAETLAVITAIGNPINEPLFYHILNPDRRFKISRTSGVLSTTGTPFDREQQEAFDVVVEVTEEHKPSAVAHVVVKVIVEDQNDNAPVFVNLPYYAVVKVDTEVGHVIRYVTAVDRDSGRNGEVHYYLKEHHEHFQIGPLGEISLKKQFELDTLNKEYLVTVVAKDGGNPAFSAEVIVPITVMNKAMPVFEKPFYSAEIAESIQVHSPVVHVQANSPEGLKVFYSITDGDPFSQFTINFNTGVINVIAPLDFEAHPAYKLSIRATDSLTGAHAEVFVDIIVDDINDNPPVFAQQSYAVTLSEASVIGTSVVQVRATDSDSEPNRGISYQMFGNHSKSHDHFHVDSSTGLISLLRTLDYEQSRQHTIFVRAVDGGMPTLSSDVIVTVDVTDLNDNPPLFEQQIYEARISEHAPHGHFVTCVKAYDADSSDIDKLQYSILSGNDHKHFVIDSATGIITLSNLHRHALKPFYSLNLSVSDGVFRSSTQVHVTVIGGNLHSPAFLQNEYEVELAENAPLHTLVMEVKTTDGDSGIYGHVTYHIVNDFAKDRFYINERGQIFTLEKLDRETPAEKVISVRLMAKDAGGKVAFCTVNVILTDDNDNAPQFRATKYEVNIGSSAAKGTSVVKVLASDADEGSNADITYAIEADSESVKENLEINKLSGVITTKESLIGLENEFFTFFVRAVDNGSPSKESVVLVYVKILPPEMQLPKFSEPFYTFTVSEDVPIGTEIDLIRAEHSGTVLYSLVKGNTPESNRDESFVIDRQSGRLKLEKSLDHETTKWYQFSILARCTQDDHEMVASVDVSIQVKDANDNSPVFESSPYEAFIVENLPGGSRVIQIRASDADSGTNGQVMYSLDQSQSVEVIESFAINMETGWITTLKELDHEKRDNYQIKVVASDHGEKIQLSSTAIVDVTVTDVNDSPPRFTAEIYKGTVSEDDPQGGVIAILSTTDADSEEINRQVTYFITGGDPLGQFAVETIQNEWKVYVKKPLDREKRDNYLLTITATDGTFSSKAIVEVKVLDANDNSPVCEKTLYSDTIPEDVLPGKLIMQISATDADIRSNAEITYTLLGSGAEKFKLNPDTGELKTSTPLDREEQAVYHLLVRATDGGGRFCQASIVLTLEDVNDNAPEFSADPYAITVFENTEPGTLLTRVQATDADAGLNRKILYSLIDSADGQFSINELSGIIQLEKPLDRELQAVYTLSLKAVDQGLPRRLTATGTVIVSVLDINDNPPVFEYREYGATVSEDILVGTEVLQVYAASRDIEANAEITYSIISGNEHGKFSIDSKTGAVFIIENLDYESSHEYYLTVEATDGGTPSLSDVATVNVNVTDINDNTPVFSQDTYTTVISEDAVLEQSVITVMADDADGPSNSHIHYSIIDGNQGSSFTIDPVRGEVKVTKLLDRETISGYTLTVQASDNGSPPRVNTTTVNIDVSDVNDNAPVFSRGNYSVIIQENKPVGFSVLQLVVTDEDSSHNGPPFFFTIVTGNDEKAFEVNPQGVLLTSSAIKRKEKDHYLLQVKVADNGKPQLSSLTYIDIRVIEESIYPPAILPLEIFITSSGEEYSGGVIGKIHATDQDVYDTLTYSLDPQMDNLFSVSSTGGKLIAHKKLDIGQYLLNVSVTDGKFTTVADITVHIRQVTQEMLNHTIAIRFANLTPEEFVGDYWRNFQRALRNILGVRRNDIQIVSLQSSEPHPHLDVLLFVEKPGSAQISTKQLLHKINSSVTDIEEIIGVRILNVFQKLCAGLDCPWKFCDEKVSVDESVMSTHSTARLSFVTPRHHRAAVCLCKEGRCPPVHHGCEDDPCPEGSECVSDPWEEKHTCVCPSGRFGQCPGSSSMTLTGNSYVKYRLTENENKLEMKLTMRLRTYSTHAVVMYARGTDYSILEIHHGRLQYKFDCGSGPGIVSVQSIQVNDGQWHAVALEVNGNYARLVLDQVHTASGTAPGTLKTLNLDNYVFFGGHIRQQGTRHGRSPQVGNGFRGCMDSIYLNGQELPLNSKPRSYAHIEESVDVSPGCFLTATEDCASNPCQNGGVCNPSPAGGYYCKCSALYIGTHCEISVNPCSSKPCLYGGTCVVDNGGFVCQCRGLYTGQRCQLSPYCKDEPCKNGGTCFDSLDGAVCQCDSGFRGERCQSDIDECSGNPCLHGALCENTHGSYHCNCSHEYRGRHCEDAAPNQYVSTPWNIGLAEGIGIVVFVAGIFLLVVVFVLCRKMISRKKKHQAEPKDKHLGPATAFLQRPYFDSKLNKNIYSDIPPQVPVRPISYTPSIPSDSRNNLDRNSFEGSAIPEHPEFSTFNPESVHGHRKAVAVCSVAPNLPPPPPSNSPSDSDSIQKPSWDFDYDTKVVDLDPCLSKKPLEEKPSQPYSARESLSEVQSLSSFQSESCDDNGYHWDTSDWMPSVPLPDIQEFPNYEVIDEQTPLYSADPNAIDTDYYPGGYDIESDFPPPPEDFPAADELPPLPPEFSNQFESIHPPRDMPAAGSLGSSSRNRQRFNLNQYLPNFYPLDMSEPQTKGTGENSTCREPHAPYPPGYQRHFEAPAVESMPMSVYASTASCSDVSACCEVESEVMMSDYESGDDGHFEEVTIPPLDSQQHTEV

SEQ ID NO: 971 - DNA, 1065 bp, Homo sapiens
atgacgtctgtatcacttctgctcgaaagtgtccagctgcccattccctctgagatgacgtctgtatccctcctgctcgaaagcatccagctgcccattccctctgaagtgacgtctgtatcactcctgctcgaaagcgtccagctgcccattccctctaaagtgacgtctgtatcactcctgctcgaaagtgtccagctgcccattccctctaaagtgacgtctgtatcacttctgctcgaaagtgtccagctgcccattccctctaaagtgacgtctgtatcactcctgctcgaaagcgtccagctgcccattccctctaaagtgacgtctgtatccctcctgctcgaaagtgtccagctgcccattccctctaaagtgacgtctgtatcactcctgctcgaaagtgtccagctgcccattccctctaaagtgacgtctgtatcacttctgctcgaaagtgtccagctgcccattccctctgaagtgacgtctgtatcactcctgctcgaaagtgtccagctgcccattccctctgaagtgacgtctgtatcactcctgctcgaaagtgtccagctgcccattccctctgaaatgacgtctgtatcactcctgctcgaaagtgtccagctgcccattccctctaaagtgacgtctgtatcacttctgctcgaaagtgtccagctgcccattccctctaaagtgacgtctgtatcacttctgctcgaaagtgtccagctgcccattccctctgaagtgacgtctgtatcactcctgctcgaaagtgtccagctgcccattccctctgaagtgacgtctgtatcacttctgctcgaaagtgtccagctgcccgttccctctaaagtgacgtctgtatcacttctgctcgaaagtgtccagctgcccgttccctctgaaatgacatctgtatcacttctgctcgaaagtgtccagctgcccgttccctctgaaatgacgtctgtatcactcctgctcgaaagcatccagctgcccattccctctgaaatgacatctccatcactcctgcttgaaagctctctctga

SEQ ID NO: 972 - protein, 354 aa, Homo sapiens
MTSVSLLLESVQLPIPSEMTSVSLLLESIQLPIPSEVTSVSLLLESVQLPIPSKVTSVSLLLESVQLPIPSKVTSVSLLLESVQLPIPSKVTSVSLLLESVQLPIPSKVTSVSLLLESVQLPIPSKVTSVSLLLESVQLPIPSKVTSVSLLLESVQLPIPSEVTSVSLLLESVQLPIPSEVTSVSLLLESVQLPIPSEMTSVSLLLESVQLPIPSKVTSVSLLLESVQLPIPSKVTSVSLLLESVQLPIPSEVTSVSLLLESVQLPIPSEVTSVSLLLESVQLPVPSKVTSVSLLLESVQLPVPSEMTSVSLLLESVQLPVPSEMTSVSLLLESIQLPIPSEMTSPSLLLESSL

SEQ ID NO: 973 - DNA, 1030 bp, Homo sapiens
tgcagagtgtggagcgtggagcgccgggactgtgcacgcttgaccggaagcccagaccagtgcggtcctagccagagagaaaggacatttgccaacaatgagacacgaagcgcccatgcagatggcctctgcccaagatgccaggtacggccagaaagactcctctgatcagaactttgactacatgttcaaattactcatcatcggcaatagcagtgtggggaaaacatcttttctattccgttatgcagatgactcctttacatctgcattcgtcagcacagttgggatcgatttcaaagtaaaaactgtattcaaaaatgaaaagagaatcaagcttcagatttgggacacagcaggccaggaaagatacaggactatcaccacagcctattatcgtggagccatgggctttattttaatgtatgacattacaaatgaagaatccttcaatgcagtacaagattggtcaactcaaatcaaaacatactcttgggacaatgcccaagttattctggttgggaacaagtgtgacatggaagacgagcgggtcatctcaactgagcgaggtcaacatttaggagaacagcttgggtttgagttttttgaaacaagtgccaaggacaacattaatgtcaagcagacatttgagcgccttgtggatatcatctgcgacaaaatgtcagagagtttggagactgatcctgccatcactgctgcaaagcagaacacgagactcaaggaaactcctcctccaccgcagcccaactgtgcctgctagtgtccccgtgcacacaggcagctccagggggctctggttgccaacaaacagcatttgtaaatggtctattagccttcatttatactgcctaacaattatttgaaggaataaattgatgtcaatggctcgtacgcattcaattcttgggagctttcctgtttaatatgtggcaaatatgtgatcttaaatttataaggactatccatctataaacatctggtacctgcaaaaaaaaaaaaaaaaaaaaaa

SEQ ID NO: 974 - protein, 227 aa, Homo sapiens
MRHEAPMQMASAQDARYGQKDSSDQNFDYMFKLLIIGNSSVGKTSFLFRYADDSFTSAFVSTVGIDFKVKTVFKNEKRIKLQIWDTAGQERYRTITTAYYRGAMGFILMYDITNEESFNAVQDWSTQIKTYSWDNAQVILVGNKCDMEDERVISTERGQHLGEQLGFEFFETSAKDNINVKQTFERLVDIICDKMSESLETDPAITAAKQNTRLKETPPPPQPNCAC

SEQ ID NO: 975 - DNA, 5876 bp, Homo sapiens
ggaattcatctgtaaaaatcactacatgtaacgtaggagacaagaaaaatattaatgacagaagatctgcgaacatgatgcacgtgaataattttccctttagaaggcattcctggatatgttttgatgtggacaatggcacatctgcgggacggagtcccttggatcccatgaccagcccaggatccgggctaattctccaagcaaattttgtccacagtcaacgacgggagtccttcctgtatcgatccgacagcgattatgacctctctccaaagtctatgtcccggaactcctccattgccagtgatatacacggagatgacttgattgtgactccatttgctcaggtcttggccagtctgcgaactgtacgaaacaactttgctgcattaactaatttgcaagatcgagcacctagcaaaagatcacccatgtgcaaccaaccatccatcaacaaagccaccataacagaggaggcctaccagaaactggccagcgagaccctggaggagctggactggtgtctggaccagctagagaccctacagaccaggcactccgtcagtgagatggcctccaacaagtttaaaaggatgcttaatcgggagctcacccatctctctgaaatgagtcggtctggaaatcaagtgtcagagtttatatcaaacacattcttagataagcaacatgaagtggaaattccttctccaactcagaaggaaaaggagaaaaagaaaagaccaatgtctcagatcagtggagtcaagaaattgatgcacagctctagtctgactaattcaagtatcccaaggtttggagttaaaactgaacaagaagatgtccttgccaaggaactagaagatgtgaacaaatggggtcttcatgttttcagaatagcagagttgtctggtaaccggcccttgactgttatcatgcacaccatttttcaggaacgggatttattaaaaacatttaaaattccagtagatactttaattacatatcttatgactctcgaagaccattaccatgctgatgtggcctatcacaacaatatccatgctgcagatgttgtccagtctactcatgtgctattatctacacctgctttggaggctgtgtttacagatttggagattcttgcagcaatttttgccagtgcaatacatgatgtagatcatcctggtgtgtccaatcaatttctgatcaatacaaactctgaacttgccttgatgtacaatgattcctcagtcttagagaaccatcatttggctgtgggctttaaattgcttcaggaagaaaactgtgacattttccagaatttgaccaaaaaacaaagacaatctttaaggaaaatggtcattgacatcgtacttgcaacagatatgtcaaaacacatgaatctactggctgatttgaagactatggttgaaactaagaaagtgacaagctctggagttcttcttcttgataattattccgataggattcaggttcttcagaatatggtgcactgtgcagatctgagcaacccaacaaagcctctccagctgtaccgccagtggacggaccggataatggaggagttcttccgccaaggagaccgagagagggaacgtggcatggagataagccccatgtgtgacaagcacaatgcttccgtggaaaaatcacaggtgggcttcatagactatattgttcatcccctctgggagacatgggcagacctcgtccaccctgacgcccaggatattttggacactttggaggacaatcgtgaatggtaccagagcacaatccctcagagcccctctcctgcacctgatgacccagaggagggccggcagggtcaaactgagaaattccagtttgaactaactttagaggaagatggtgagtcagacacggaaaaggacagtggcagtcaagtggaagaagacactagctgcagtgactccaagactctttgtactcaagactcagagtctactgaaattccccttgatgaacaggttgaagaggaggcagtaggggaagaagaggaaagccagcctgaagcctgtgtcatagatgatcgttctcctgacacgtaacagtgcaaaaactttcatgccttttttttttttaagtagaaaaattgtttccaaagtgcatgtcacatgccacaaccacggtcacacctcactgtcatctgccaggacgtttgttgaacaaaactgaccttgactactcagtccagcgctcaggaatatcgtaaccagttttttcacctccatgtcatccgagcaaggtggacatcttcacgaacagcgtttttaacaagatttcagcttggtagagctgacaaagcagataaaatctactccaaattattttcaagagagtgtgactcatcaggcagcccaaaagtttattggacttggggtttctattcctttttatttgtttgcaatattttcagaagaaaggcattgcacagagtgaacttaatggacgaagcaacaaatatgtcaagaacaggacatagcacgaatctgttaccagtaggaggaggatgagccacagaaattgcataattttctaatttcaagtcttcctgatacatgactgaatagtgtggttcagtgagctgcactgacctctacattttgtatgatatgtaaaacagattttttgtagagcttacttttattattaaatgtattgaggtattatatttaaaaaaaactatgttcagaacttcatctgccactggttatttttttctaaggagtaacttgcaagttttcagtacaaatctgtgctacactggataaaaatctaatttatgaattttacttgcaccttatagttcatagcaattaactgatttgtagtgattcattgtttgttttatataccaatgacttccatattttaaaagagaaaaacaactttatgttgcaggaaaccctttttgtaagtctttattatttactttgcattttgtttcactctttccagataagcagagttgctcttcaccagtgtttttcttcatgtgcaaagtgactatttgttctataatacttttatgtgtgttatatcaaatgtgtcttaagcttcatgcaaactcagtcatcagttcgtgttgtctgaagcaagtgggaaatatataaatacccagtagctaaaatggtcagtcttttttagatgttttcctacttagtatctcctaataacgttttgctgtgtcactagatgttcatttcacaagtgcatgtctttctaataatccacacatttcatgctctaataatccacacatttcatgctcatttttattgtttttacagccagttatagcaagaaaaaggtttttccccttgtgctgctttataatttagcgtgtgtctgaaccttatccatgtttgctagatgaggtcttgtcaaatatatcactaccattgtcaccggtgaaaagaaacaggtagttaagttagggttaacattcatttcaaccacgaggttgtatatcatgactagcttttactcttggtttacagagaaaagttaaacaaccaactaggcagtttttaagaatattaacaatatattaacaaacaccaatacaactaatcctatttggttttaatgatttcaccatgggattaagaactatatcaggaacatccctgagaaacggctttaagtgtagcaactactcttccttaatggacagccacataacgtgtaggaagtcctttatcacttatcctcgatccataagcatatcttgcagaggggaactacttctttaaacacatggagggaaagaagatgatgccactggcaccagagggttagtactgtgatgcatcctaaaatatttattatattggtaaaaattctggttaaataaaaaattagagatcactcttggctgatttcagcaccaggaactgtattacagttttagagattaattcctagtgtttacctgattatagcagttggcatcatggggcatttaattctgactttatccccacgtcagccttaataaagtcttctttaccttctctatgaagactttaaagcccaaataatcatttttcacattgatattcaagaattgagatagatagaagccaaagtgggtatctgacaagtggaaaatcaaacgtttaagaagaattacaactctgaaaagcatttatatgtggaacttctcaaggagcctcctggggactggaaagtaagtcatcagccaggcaaatgactcatgctgaagagagtccccatttcagtcccctgagatctagctgatgcttagatcctttgaaataaaaattatgtctttataactctgatcttttacataaagcagaagaggaatcaactagttaattgcaaggtttctactctgtttcctctgtaaagatcagatggtaatctttcaaataagaaaaaaataaagacgtatgtttgaccaagtagtttcacaagaatatttgggaacttgtttcttttaattttatttgtccctgagtgaagtctagaaagaaaggtaaagagtctagagtttattcctctttccaaaacattctcattcctctcctccctacacttagtatttcccccacagagtgcctagaatcttaataatgaataaaataaaaagcagcaatatgtcattaacaaatccagacctgaaagggtaaagggtttataactgcactaataaagagaggctctttttttttcttccagtttgttggtttttaatggtaccgtgttgtaaagatacccactaatggacaatcaaattgcagaaaaggctcaatatccaagagacagggactaatgcactgtacaatctgcttatccttgcccttctctcttgccaaagtgtgcttcagaaatatatactgctttaaaaaagaataaaagaatatccttttacaagtggctttacatttcctaaaatgccataagaaaatgcaatatctgggtactgtatggggaaaaaaatgtccaagtttgtgtaaaaccagtgcatttcagcttgcaagttactgaacacaataatgctgttttaattttgttttatatcagttaaaattcacaataatgtagatagaacaaattacagacaaggaaagaaaaaacttgaatgaaatggattttacagaaagctttatgataatttttgaatgcattatttattttttgtgccatgcattttttttctcaccaaatgaccttacctgtaatacagtcttgtttgtctgtttacaaccatgtatttattgcaatgtacatactgtaatgttaattgtaaattatctgttcttattaaaacatcatcccatgatggggtggtgttgatatatttggaaactcttggtgagagaatgaatggtgtgtatacatactctgtacatttttcttttctcctgtaatatagtcttgtcaccttagagcttgtttatggaagattcaagaaaactataaaatacttaaagatatataaatttaaaaaaacatagctgcaggtctttggtcccagggctgtgccttaactttaaccaatattttcttctgttttgctgcatttgaaaggtaacagtggagctagggctgggcattttacatccaggcttttaattgattagaattctgccaataggtggattttacaaaaccacagacaacctctgaaagattctgagacccttttgagacagaagctcttaagtacttcttgccagggagcagcactgcatgtgtgatggttgtttgccatctgttgatcaggaactacttcagctacttgcatttgattatttcctttttttttttttttaactcggaaacacaactgggggaat

SEQ ID NO: 976 - protein, 673 aa, Homo sapiens
MMHVNNFPFRRHSWICFDVDNGTSAGRSPLDPMTSPGSGLILQANFVHSQRRESFLYRSDSDYDLSPKSMSRNSSIASDIHGDDLIVTPFAQVLASLRTVRNNFAALTNLQDRAPSKRSPMCNQPSINKATITEEAYQKLASETLEELDWCLDQLETLQTRHSVSEMASNKFKRMLNRELTHLSEMSRSGNQVSEFISNTFLDKQHEVEIPSPTQKEKEKKKRPMSQISGVKKLMHSSSLTNSSIPRFGVKTEQEDVLAKELEDVNKWGLHVFRIAELSGNRPLTVIMHTIFQERDLLKTFKIPVDTLITYLMTLEDHYHADVAYHNNIHAADVVQSTHVLLSTPALEAVFTDLEILAAIFASAIHDVDHPGVSNQFLINTNSELALMYNDSSVLENHHLAVGFKLLQEENCDIFQNLTKKQRQSLRKMVIDIVLATDMSKHMNLLADLKTMVETKKVTSSGVLLLDNYSDRIQVLQNMVHCADLSNPTKPLQLYRQWTDRIMEEFFRQGDRERERGMEISPMCDKHNASVEKSQVGFIDYIVHPLWETWADLVHPDAQDILDTLEDNREWYQSTIPQSPSPAPDDPEEGRQGQTEKFQFELTLEEDGESDTEKDSGSQVEEDTSCSDSKTLCTQDSESTEIPLDEQVEEEAVGEEEESQPEACVIDDRSPDT

SEQ ID NO: 977 - DNA, 3624 bp, Homo sapiens
cagacagcccattttttcttatgataaagacggcatttggctcatgagcaaggtggcaagatcatcaagtgagtcagacgtgcagctctgggaaacagaagaggatgacatgacagaaggtgatttagggtatggcctcggaaggaaacctggtgggatttatgaaatagaattttcacataggtctagaaaaagatcagatggaaagaactttagccctcctccatttccgagaaagggagaagaaagaaatgaagcgagttttcagtattccaagcataagagccagcaagatacattccctcaagtgtccagaatttccaattacagacgacaaagtagcactgtagattcgaattcagaattgtcaaatgaagaattaaggcaatgtcttaatgaaactttagaggaggtagaaatgttaaaaactgaacttgaggcatctcaaagacaactcagaggtaaagaggaagcattgaaaattcttcaaagcatggcaatactgggcaaagccacaagtcatacgcaggcagtgcttcaaaaaactatggaacaaaacagatccttggagaaggaaataaatgccttgcagtgggaaatagaatttgatcataatagatttaaaaatatagaggaatcttggatccaaaaatatgacaggctaaactgtgaaaatgcagtcctcaaagagaatttgaaagtgaaaacagaagaaattaaaatgctgaagtctgacaatgcagttttgaatcaacggtatttggaggccctcgccatgcttgatatcaaacagcagaagatggctcaggaaaacatgtgctgtgataaaagtggctttgcagaggcttcaggtcttgagcttgcggtcctcggagcctgcctttgtcatgggcccggagggaacccctgttcttgtgccagaatggcagcatccactcggaaactgcttcttcagctcaaacaagagttggaaattttgcagaagagtaaagaagaagcttacgtgatggcagatgctttcagaattgcatttgagcaacaattaatgagaaaaaatgaccaggcactacaattgacacaaatggataaaatgcataaaaaagcaacaaaatggatgaattggaagcaccttaaagaggatggatttccatcaccaaggagtaagaagaccttcgggcagagactgttgggtatgctcccttcagaaaacagttctaagaggatggaagaccaggacagtcctcaagaggtccttaagatgctcatagatttgcttaatgataaagaagaagctttggctcatcaaagaaaagttagctacatgcttgctcgggcattggaagacaaagacactgcttcaaacgagaataaagaaaaaaatcctataaaagagaatttccctttcaacaacccctggcgtaagacttcagaattctctgttttgggtgatcctatacattcaagtgtctgcattttaaattctgtgggctgcatttgttcaatccagcactctcaaatagatccaaactatagaactcttaaaagatcccattctttgccatcaagtatcatattttaaagacaagccagttgaaattggaactgagagttgtttatatcgagatactttgaaaaatgattttgtaaattttgctgcatcttgagaagttgtatgtttcctaggtatttctaaattttaggaggtcacttaaatcaaatattttctacattttctttttcttcttttgagatggagtcttgctctgtcacccaggttggagtgcagtggtgtgatctcggttcactgcaacctccgcctcccggttcaagcaattctcctgcctcagcctcccgagtaactcggattacaggcatgtgccaccacgcccagctaatttttgtatttttagtagagacggggttttaccatgttagccaggctgatcttgaactcctgacctcaagtgatccgcctgccttggcctccgaaagtgctgggattacaggcgtgagccaccacacccagcctattttctacattttctacaagaaattagtattctgtgttgacattttatttataaattacattactgtatttataaattacattacaggctgggcatggtggctcatgcttataaatcccagcactttgggaggccaaggtgggtgggtcacctgaggctggagttcaagaccagtctgaccaacatggagaaaccccatctctactaaaaatacaaaaaattagctaggcctagtggcgcatgcctgtaatcccagctacttgggaggctgaggtaggagaatcgcttgaacctgggaggcgggggttgtggtaagccgagactgtgtcattgcactccagcctgggcgacaagagcgaaactctgtctcaaaaaaaaaaaaaaacacattacagtgtttgccaacatcctaaaacaaaaaataatgatttttgggaaaaacaaaaaattatttaactattttgattgactatagggatcttagcttggctaaatcaacaatatagcaatgtatcttaatgctctaaaaagtaacaatacctaggactgactgaatgttaatttctggaattcatttatcttgttttatttgccttgttcagtatttttcatttaccatatgaagtttagaaataacaatttccttaagttaacttcaataagacagttttgatggtgggaccttggcagaagtatattgagtcagtgccggctgcgttcatggcttcttgtcagggtagtaacattttgcaaccaaatctgcacagatttgtagccaagtctacaaagtgcttaacagctcttttcattgcatcctgtgagatggttgtgatgatccaggaaatggggtctcaggaatctgaagaagctgcctgagccaaggtgatttctaggagtttttttgtttgtggtatgtgaattggggtgtgtgggggtggggtgtgtgtgtagacagggtcccactgtgttgctcaggctggtgccaaactcctggcctcaagggatcctcctgcctcagcctctcaaagtgctgggattacaggcataaaccacaactcaataaaaaagtttttaaaaatttacaaagctcatatttgatccagctaggattttaccctgtacatttgtatttcttgtaggctggcgcacagatatcttaaatggctactaattgctgctgtgtatgaaaacaaatggctatcaaggccgggtgcagtggcttacagatctggtctgaatctcaagtccagaccagtccagagttcaagaccagcctgggcaacatggtgaaaccccatctatacaaaaactcggcaaggcatggtggcatgcacctgttgtcccagctactcaggggctgaggcaggaggatggcatgagcccaggagcttgaggctgcagtgagctgtgattgtgccactgcactccagcctgagtgacagagtgagacccccatctccaaaagaaaaggctatcaatacaaaagtttatctaaattactgtacagctatacaatggaatactctacaaaatggagagatccataagataaagcaaatgaataaagcaaaatgcatgtgttgacaaaaaaaaa

SEQ ID NO: 978 - protein, 511 aa, Homo sapiens
MSKVARSSSESDVQLWETEEDDMTEGDLGYGLGRKPGGIYEIEFSHRSRKRSDGKNFSPPPFPRKGEERNEASFQYSKHKSQQDTFPQVSRISNYRRQSSTVDSNSELSNEELRQCLNETLEEVEMLKTELEASQRQLRGKEEALKILQSMAILGKATSHTQAVLQKTMEQNRSLEKEINALQWEIEFDHNRFKNIEESWIQKYDRLNCENAVLKENLKVKTEEIKMLKSDNAVLNQRYLEALAMLDIKQQKMAQENMCCDKSGFAEASGLELAVLGACLCHGPGGNPCSCARMAASTRKLLLQLKQELEILQKSKEEAYVMADAFRIAFEQQLMRKNDQALQLTQMDKMHKKATKWMNWKHLKEDGFPSPRSKKTFGQRLLGMLPSENSSKRMEDQDSPQEVLKMLIDLLNDKEEALAHQRKVSYMLARALEDKDTASNENKEKNPIKENFPFNNPWRKTSEFSVLGDPIHSSVCILNSVGCICSIQHSQIDPNYRTLKRSHSLPSSIIF

SEQ ID NO: 979 - DNA, 1199 bp, Homo sapiens
cccaggaaagcttgaaggcagagatagactcacgtctctaagacatatacataatatagccgcaaccgcggcggccttactttcccggagctgcatccccttttaggcgaagagcggaggcgaccagggactaccctaggtgaaagggcagccacctggccctacccgggctcaacgccgagcctctcggaggtacggcctcccggggaccttccagactggtcggcgcaagcgaagggcggggaccaccgaaggagtgtgtgacttaggcatccagcgcactgcctgacccgaagtaccgacccgagttatgcccaccctccaactttgcgacggaaatgtgtcatcgaaagccaggtacaccaggggttggaaaaaccacactaggcaaagaacttgcgtcaaaatcaggactgaaatacattaatgtgggtgatttagctcgagaagagcaattgtatgatggctatgatgaagagtatgactgtcccattttagatgaagacagagtagttgatgagttagataaccaaatgagagaaggtggagttattgttgattaccatggttgtgatttcttccctgaacgctggtttcatatagtttttgtgctgagaacagataccaatgtattgtacgaaagacttgaaacaaggggttataatgagaagaaactaacagacaatattcagtgtgagatttttcaagttctttatgaagaagccacagcatcctacaaggaagaaatcgtgcatcagctgcccagtaataaaccagaagagctagaaaataatgtagatcagatcttgaaatggattgagcagtggatcaaagatcataactcttgacttataaggctagctacttaataatcactcttgttgatatctctgccgacatcatagaaattgttcaagtgtcagtaacactttattaaaatcatgttgcagaaccagcaggtggatagtatataggtttatgcctgtgtttctttttctccatgagaaagctaaacatgaaatataatgaatatagtattattaaggattgagacaaaaactgtgattttaatacttaaattgctaaagaataaataaatctgacaaaatgggtggatatcttttaagtttattacagaaaaaaatgcagatgatctcttaaaataaaactaaagataaagcaaaaaaaaaaaaaaaaaa

SEQ ID NO: 980 - protein, 169 aa, Homo sapiens
MCHRKPGTPGVGKTTLGKELASKSGLKYINVGDLAREEQLYDGYDEEYDCPILDEDRVVDELDNQMREGGVIVDYHGCDFFPERWFHIVFVLRTDTNVLYERLETRGYNEKKLTDNIQCEIFQVLYEEATASYKEEIVHQLPSNKPEELENNVDQILKWIEQWIKDHNS

SEQ ID NO: 981 - DNA, 1482 bp, Homo sapiens
cccaggaaagcttgaaggcagagatagactcacgtctctaagacatatacataatatagccgcaaccgcggcggccttactttcccggagctgcatccccttttaggcgaagagcggaggcgaccagggactaccctaggtgaaagggcagccacctggccctacccgggctcaacgccgagcctctcggaggtacggcctcccggggaccttccagactggtcggcgcaagcgaagggcggggaccaccgaaggagtgtgtgacttaggcatccagcgcactgcctgacccgaagtaccgacccgagttatgcccaccctccaactttgcgacggaaatgtgtcatcgaaagccaggtacaccaggggttggaaaaaccacactaggcaaagaacttgcgtcaaaatcaggactgaaatacattaatgtgggtgatttagctcgagaagtctgatcatcggatatcatggagtctggcaagacggcttctcccaagagcatgccgaaagatgcacagatgatggcacaaatcctgaaggatatggggattacagaatatgagccaagagttataaatcagatgttggagtttgccttccgatatgtgaccacaattctagatgatgcaaaaatttattcaagccatgctaagaaagctactgttgatgcagatgatgtgcgattggcaatccagtgccgcgctgatcagtcttttacctctcctcccccaagagattttttattagatattgcaaggcaaagaaatcaaacccctttgccattgatcaagccatattcaggtcctaggttgccacctgatagatactgcttaacagctccaaactataggctgaaatctttacagaaaaaggcatcaacttctgcgggaagaataacagtcccgcggttaagtgttggttcagttactagcagaccaagtactcccacactaggcacaccaaccccacagaccatgtctgtttcaactaaagtagggactcccatgtccctcacaggtcaaaggtttacagtacagatgcctacttctcagtctccagctgtaaaagcttcaattcctgcaacctcagcagttcagaatgttctgattaatccatcattaatcgggtccaaaaacattcttattaccactaatatgatgtcatcacaaaatactgccaatgaatcatcaaatgcattgaaaagaaaacgtgaagatgatgatgatgacgatgatgatgatgatgactatgataatctgtaatctagccttgctgaatgtaacatgtatacttggtcttgaattcattgtactgatattaaacatgcatgctggatgttttcaagttgtgttttagaaaactaataataatgagtaaacacagttaccatacttttcaattgaaatgaaggtttttcatcagccttaaaagtgtaagaaaaataaagttgtcattcattcgaaaaaaaaaaaaaaaaaaaaa

SEQ ID NO: 982 - protein, 264 aa, Homo sapiens
MESGKTASPKSMPKDAQMMAQILKDMGITEYEPRVINQMLEFAFRYVTTILDDAKIYSSHAKKATVDADDVRLAIQCRADQSFTSPPPRDFLLDIARQRNQTPLPLIKPYSGPRLPPDRYCLTAPNYRLKSLQKKASTSAGRITVPRLSVGSVTSRPSTPTLGTPTPQTMSVSTKVGTPMSLTGQRFTVQMPTSQSPAVKASIPATSAVQNVLINPSLIGSKNILITTNMMSSQNTANESSNALKRKREDDDDDDDDDDDYDNL

SEQ ID NO: 983 - DNA, 1245 bp, Homo sapiens
gtgggcttttgctgccgcccgccccttccggctcctccctgtagagcaaagggcacgtgagcgaggcgcccgaagccgtcgcggcggggaccatgttgcttccgaacatcctgctcaccggtacaccaggggttggaaaaaccacactaggcaaagaacttgcgtcaaaatcaggactgaaatacattaatgtgggtgatttagctcgagaagtctgatcatcggatatcatggagtctggcaagacggcttctcccaagagcatgccgaaagatgcacagatgatggcacaaatcctgaaggatatggggattacagaatatgagccaagagttataaatcagatgttggagtttgccttccgatatgtgaccacaattctagatgatgcaaaaatttattcaagccatgctaagaaagctactgttgatgcagatgatgtgcgattggcaatccagtgccgcgctgatcagtcttttacctctcctcccccaagagattttttattagatattgcaaggcaaagaaatcaaacccctttgccattgatcaagccatattcaggtcctaggttgccacctgatagatactgcttaacagctccaaactataggctgaaatctttacagaaaaaggcatcaacttctgcgggaagaataacagtcccgcggttaagtgttggttcagttactagcagaccaagtactcccacactaggcacaccaaccccacagaccatgtctgtttcaactaaagtagggactcccatgtccctcacaggtcaaaggtttacagtacagatgcctacttctcagtctccagctgtaaaagcttcaattcctgcaacctcagcagttcagaatgttctgattaatccatcattaatcgggtccaaaaacattcttattaccactaatatgatgtcatcacaaaatactgccaatgaatcatcaaatgcattgaaaagaaaacgtgaagatgatgatgatgacgatgatgatgatgatgactatgataatctgtaatctagccttgctgaatgtaacatgtatacttggtcttgaattcattgtactgatattaaacatgcatgctggatgttttcaagttgtgttttagaaaactaataataatgagtaaacacagttaccatacttttcaattgaaatgaaggtttttcatcagccttaaaagtgtaagaaaaataaagttgtcattcattcgaaaaaaaaaaaaaaaaaaaaa

SEQ ID NO: 984 - protein, 264 aa, Homo sapiens; identical to SEQ ID NO: 982

SEQ ID NO: 985 - DNA, 962 bp, Homo sapiens
gtgggcttttgctgccgcccgccccttccggctcctccctgtagagcaaagggcacgtgagcgaggcgcccgaagccgtcgcggcggggaccatgttgcttccgaacatcctgctcaccggtacaccaggggttggaaaaaccacactaggcaaagaacttgcgtcaaaatcaggactgaaatacattaatgtgggtgatttagctcgagaagagcaattgtatgatggctatgatgaagagtatgactgtcccattttagatgaagacagagtagttgatgagttagataaccaaatgagagaaggtggagttattgttgattaccatggttgtgatttcttccctgaacgctggtttcatatagtttttgtgctgagaacagataccaatgtattgtacgaaagacttgaaacaaggggttataatgagaagaaactaacagacaatattcagtgtgagatttttcaagttctttatgaagaagccacagcatcctacaaggaagaaatcgtgcatcagctgcccagtaataaaccagaagagctagaaaataatgtagatcagatcttgaaatggattgagcagtggatcaaagatcataactcttgacttataaggctagctacttaataatcactcttgttgatatctctgccgacatcatagaaattgttcaagtgtcagtaacactttattaaaatcatgttgcagaaccagcaggtggatagtatataggtttatgcctgtgtttctttttctccatgagaaagctaaacatgaaatataatgaatatagtattattaaggattgagacaaaaactgtgattttaatacttaaattgctaaagaataaataaatctgacaaaatgggtggatatcttttaagtttattacagaaaaaaatgcagatgatctcttaaaataaaactaaagataaagcaaaaaaaaaaaaaaaaaa

SEQ ID NO: 986 - protein, 172 aa, Homo sapiens
MLLPNILLTGTPGVGKTTLGKELASKSGLKYINVGDLAREEQLYDGYDEEYDCPILDEDRVVDELDNQMREGGVIVDYHGCDFFPERWFHIVFVLRTDTNVLYERLETRGYNEKKLTDNIQCEIFQVLYEEATASYKEEIVHQLPSNKPEELENNVDQILKWIEQWIKDHNS

SEQ ID NO: 987 - DNA, 3164 bp, Homo sapiens
acctgtataccttttgaaacgtcacagtctctaatcgtgaacgatttggggcggagggctgaacaatgtgttttctagtgtgtcgaggtgtttataggctatgtgtgcctccaaactgtaaagtagtccagtatactttccaatgtataagtttgtagaccttaaacttttcttctggctaacttaaaatcgttgaattcactagtttgcataaacatttaagaatttgaaaacacggttgaaaaacagtgttaccaagaaattttgtaataacatgttcaaatgaagacaaaaattttacagtttaagacttaaattcttcgtccacagcaagtgaattcatggtattttacttttttgggaaatactggaaatgaagacctgcaactgtaatttgaaataaggaaaactttaattttcagtataaaaattgctcaaatagaattgcctgattttaatgacaaaagtatatgggagtccacatttatgtaagaaatgaaactataaaatgtataaataatttgcaaatcagaattgctgtcgaaagttttactataatgaaagatattttcatactctcaaaaatatagaggaaaggggccaagattatagtaccagtcacaatcttttgatgaggacgaaatgaatcaggtaacagactgggttgacccatcatttgatgattttctagagtgtagtggcgtctctactattactgccacatcattaggtgtgaataactcaagtcatagaagaaaaaatgggccttctacattagaaagcagcagatttccagcgagaaaaagaggaaatctatcttccttagaacagatttatggtttagaaaattcaaaagaatatctgtctgaaaatgaaccatgggtggataaatataaaccagaaactcagcatgaacttgctgtgcataaaaagaaaattgaagaagtcgaaacctggttaaaagctcaagttttagaaaggcaaccaaaacagggtggatctattttattaataacaggtcctcctggatgtggaaagacaacgaccttaaaaatactatcaaaggagcatggtattcaagtacaagagtggattaatccagttttaccagacttccaaaaagatgatttcaaggggatgtttaatactgaatcaagcttccatatgtttccctatcagtctcagatagcagttttcaaagagtttctactaagagcgacaaagtataacaagttacaaatgcttggagatgatctgagaactgataagaagataattctggttgaagatttacctaaccagttttatcgggattctcatactttacatgaagttctaaggaagtatgtgaggattggtcgatgtcctcttatatttataatctcggacagtctcagtggagataataatcaaaggttattgtttcccaaagaaattcaggaagagtgttctatctcaaatattagtttcaaccctgtggcaccaacaattatgatgaaatttcttaatcgaatagtgactatagaagctaacaagaatggaggaaaaattactgtccctgacaaaacttctctagagttgctctgtcagggatgttctggtgatatcagaagtgcaataaacagcctccagttttcttcttcaaaaggagaaaacaacttacggccaaggaaaaaaggaatgtctttaaaatcagatgctgtgctgtcaaaatcaaaacgaagaaaaaaacctgatagggtttttgaaaatcaagaggtccaagctattggtggcaaagatgtttctctgtttctcttcagagctttggggaaaattctatattgtaaaagagcatctttaacagaattagactcacctcggttgccctctcatttatcagaatatgaacgggatacattacttgttgaacctgaggaggtagtagaaatgtcacacatgcctggagacttatttaatttatatcttcaccaaaactacatagatttcttcatggaaattgatgatattgtgagagccagtgaatttctgagttttgcagatatcctcagtggtgactggaatacacgctctttactcagggaatatagcacatctatagctacgagaggtgtgatgcattccaacaaagcccgaggatatgctcattgccaaggaggaggatcaagttttcgacccttgcacaaacctcagtggtttctaataaataaaaagtatcgggaaaattgcctggcagcaaaagcactttttcctgacttctgcctaccagctttatgcctccaaactcagctattgccataccttgctctactaaccattccaatgagaaatcaagctcagatttcttttatccaagatattggaaggctccctctgaagcgacactttggaagattgaaaatggaagccctgactgacagggaacatggaatgatagaccctgacagcggagatgaagcccagcttaatggaggacattctgcagaggaatctctgggtgaacccactcaagccactgtgccggaaacctggtctcttcctttgagtcagaatagtgccagtgaactgcctgctagccagccccagcccttttcagcccaaggagacatggaagaaaacataataatagaagactacgagagtgatgggacatagaagccagcctgctaatcagattgctacttcacagcttcatttttgtttcattcagtggtacttcagcagagttaatatgcttttctgatgaattacacaacagtttgttaattcttcattcttgtagtatttcatcacaagaaacctactcttctgtcatcttgaagtaaatagaagatcaagccttcaaatctcttaattttttcggtatttattaaatctgtgagtggtttaaggagcggtcagtgtgtataaagtgtgtttgaacattatgccaaatatcaagatgtgaaggactaattcaggatgcaaaaacgttattggggggttgtaaatatcaactattcaacagtttaggatgcaattacgagtgtaaactgtgtgccttatttacactttattgtctcccgcttctcagatagttttgatgtgttgtacagtggaatatcttagatactttttggaaagtatttacataagttatatcacaattaaaatgttgaatttaa

SEQ ID NO: 988 - protein, 670 aa, Homo sapiens
MNQVTDWVDPSFDDFLECSGVSTITATSLGVNNSSHRRKNGPSTLESSRFPARKRGNLSSLEQIYGLENSKEYLSENEPWVDKYKPETQHELAVHKKKIEEVETWLKAQVLERQPKQGGSILLITGPPGCGKTTTLKILSKEHGIQVQEWINPVLPDFQKDDFKGMFNTESSFHMFPYQSQIAVFKEFLLRATKYNKLQMLGDDLRTDKKIILVEDLPNQFYRDSHTLHEVLRKYVRIGRCPLIFIISDSLSGDNNQRLLFPKEIQEECSISNISFNPVAPTIMMKFLNRIVTIEANKNGGKITVPDKTSLELLCQGCSGDIRSAINSLQFSSSKGENNLRPRKKGMSLKSDAVLSKSKRRKKPDRVFENQEVQAIGGKDVSLFLFRALGKILYCKRASLTELDSPRLPSHLSEYERDTLLVEPEEVVEMSHMPGDLFNLYLHQNYIDFFMEIDDIVRASEFLSFADILSGDWNTRSLLREYSTSIATRGVMHSNKARGYAHCQGGGSSFRPLHKPQWFLINKKYRENCLAAKALFPDFCLPALCLQTQLLPYLALLTIPMRNQAQISFIQDIGRLPLKRHFGRLKMEALTDREHGMIDPDSGDEAQLNGGHSAEESLGEPTQATVPETWSLPLSQNSASELPASQPQPFSAQGDMEENIIIEDYESDGT

SEQ ID NO: 989 - DNA, 3076 bp, Homo sapiens
gaggccgtacctccgagaggctcggcgttgagcccgggtagggccaggtggctgccctttcacctagggtagtccctggtcgcctccgctcttcgcccaaaaggggatgcagctccgggaaacaagtgaattcatggtattttacttttttgggaaatactggaaatgaagacctgcaactgtaatttgaaataaggaaaactttaattttcagtataaaaattgctcaaatagaattgcctgattttaatgacaaaaggtgaattatagtttaatgtactgcaagtcctaaactacggatgggaactattacagtttataatgtcaaaaacttttcttagaccaaaggtatcttccacaaagtatatgggagtccacatttatgtaagaaatgaaactataaaatgtataaataatttgcaaatcagaattgctgtcgaaagttttactataatgaaagatattttcatactctcaaaaatatagaggaaaggggccaagattatagtaccagtcacaatcttttgatgaggacgaaatgaatcaggtaacagactgggttgacccatcatttgatgattttctagagtgtagtggcgtctctactattactgccacatcattaggtgtgaataactcaagtcatagaagaaaaaatgggccttctacattagaaagcagcagatttccagcgagaaaaagaggaaatctatcttccttagaacagatttatggtttagaaaattcaaaagaatatctgtctgaaaatgaaccatgggtggataaatataaaccagaaactcagcatgaacttgctgtgcataaaaagaaaattgaagaagtcgaaacctggttaaaagctcaagttttagaaaggcaaccaaaacagggtggatctattttattaataacaggtcctcctggatgtggaaagacaacgaccttaaaaatactatcaaaggagcatggtattcaagtacaagagtggattaatccagttttaccagacttccaaaaagatgatttcaaggggatgtttaatactgaatcaagcttccatatgtttccctatcagtctcagatagcagttttcaaagagtttctactaagagcgacaaagtataacaagttacaaatgcttggagatgatctgagaactgataagaagataattctggttgaagatttacctaaccagttttatcgggattctcatactttacatgaagttctaaggaagtatgtgaggattggtcgatgtcctcttatatttataatctcggacagtctcagtggagataataatcaaaggttattgtttcccaaagaaattcaggaagagtgttctatctcaaatattagtttcaaccctgtggcaccaacaattatgatgaaatttcttaatcgaatagtgactatagaagctaacaagaatggaggaaaaattactgtccctgacaaaacttctctagagttgctctgtcagggatgttctggtgatatcagaagtgcaataaacagcctccagttttcttcttcaaaaggagaaaacaacttacggccaaggaaaaaaggaatgtctttaaaatcagatgctgtgctgtcaaaatcaaaacgaagaaaaaaacctgatagggtttttgaaaatcaagaggtccaagctattggtggcaaagatgtttctctgtttctcttcagagctttggggaaaattctatattgtaaaagagcatctttaacagaattagactcacctcggttgccctctcatttatcagaatatgaacgggatacattacttgttgaacctgaggaggtagtagaaatgtcacacatgcctggagacttatttaatttatatcttcaccaaaactacatagatttcttcatggaaattgatgatattgtgagagccagtgaatttctgagttttgcagatatcctcagtggtgactggaatacacgctctttactcagggaatatagcacatctatagctacgagaggtgtgatgcattccaacaaagcccgaggatatgctcattgccaaggaggaggatcaagttttcgacccttgcacaaacctcagtggtttctaataaataaaaagtatcgggaaaattgcctggcagcaaaagcactttttcctgacttctgcctaccagctttatgcctccaaactcagctattgccataccttgctctactaaccattccaatgagaaatcaagctcagatttcttttatccaagatattggaaggctccctctgaagcgacactttggaagattgaaaatggaagccctgactgacagggaacatggaatgatagaccctgacagcggagatgaagcccagcttaatggaggacattctgcagaggaatctctgggtgaacccactcaagccactgtgccggaaacctggtctcttcctttgagtcagaatagtgccagtgaactgcctgctagccagccccagcccttttcagcccaaggagacatggaagaaaacataataatagaagactacgagagtgatgggacatagaagccagcctgctaatcagattgctacttcacagcttcatttttgtttcattcagtggtacttcagcagagttaatatgcttttctgatgaattacacaacagtttgttaattcttcattcttgtagtatttcatcacaagaaacctactcttctgtcatcttgaagtaaatagaagatcaagccttcaaatctcttaattttttcggtatttattaaatctgtgagtggtttaaggagcggtcagtgtgtataaagtgtgtttgaacattatgccaaatatcaagatgtgaaggactaattcaggatgcaaaaacgttattggggggttgtaaatatcaactattcaacagtttaggatgcaattacgagtgtaaactgtgtgccttatttacactttattgtctcccgcttctcagatagttttgatgtgttgtacagtggaatatcttagatactttttggaaagtatttacataagttatatcacaattaaaatgttgaatttaaaaaaaaaaaaaaaaaa

SEQ ID NO: 990 - protein, 670 aa, Homo sapiens; identical to SEQ ID NO: 988

SEQ ID NO: 991 - DNA, 2633 bp, Homo sapiens
gtgaattatagtttaatgtactgcaagtcctaaactacggatgggaactattacagtttataatgtcaaaaacttttcttagaccaaaggtatcttccacaaaggtaacagactgggttgacccatcatttgatgattttctagagtgtagtggcgtctctactattactgccacatcattaggtgtgaataactcaagtcatagaagaaaaaatgggccttctacattagaaagcagcagatttccagcgagaaaaagaggaaatctatcttccttagaacagatttatggtttagaaaattcaaaagaatatctgtctgaaaatgaaccatgggtggataaatataaaccagaaactcagcatgaacttgctgtgcataaaaagaaaattgaagaagtcgaaacctggttaaaagctcaagttttagaaaggcaaccaaaacagggtggatctattttattaataacaggtcctcctggatgtggaaagacaacgaccttaaaaatactatcaaaggagcatggtattcaagtacaagagtggattaatccagttttaccagacttccaaaaagatgatttcaaggggatgtttaatactgaatcaagcttccatatgtttccctatcagtctcagatagcagttttcaaagagtttctactaagagcgacaaagtataacaagttacaaatgcttggagatgatctgagaactgataagaagataattctggttgaagatttacctaaccagttttatcgggattctcatactttacatgaagttctaaggaagtatgtgaggattggtcgatgtcctcttatatttataatctcggacagtctcagtggagataataatcaaaggttattgtttcccaaagaaattcaggaagagtgttctatctcaaatattagtttcaaccctgtggcaccaacaattatgatgaaatttcttaatcgaatagtgactatagaagctaacaagaatggaggaaaaattactgtccctgacaaaacttctctagagttgctctgtcagggatgttctggtgatatcagaagtgcaataaacagcctccagttttcttcttcaaaaggagaaaacaacttacggccaaggaaaaaaggaatgtctttaaaatcagatgctgtgctgtcaaaatcaaaacgaagaaaaaaacctgatagggtttttgaaaatcaagaggtccaagctattggtggcaaagatgtttctctgtttctcttcagagctttggggaaaattctatattgtaaaagagcatctttaacagaattagactcacctcggttgccctctcatttatcagaatatgaacgggatacattacttgttgaacctgaggaggtagtagaaatgtcacacatgcctggagacttatttaatttatatcttcaccaaaactacatagatttcttcatggaaattgatgatattgtgagagccagtgaatttctgagttttgcagatatcctcagtggtgactggaatacacgctctttactcagggaatatagcacatctatagctacgagaggtgtgatgcattccaacaaagcccgaggatatgctcattgccaaggaggaggatcaagttttcgacccttgcacaaacctcagtggtttctaataaataaaaagtatcgggaaaattgcctggcagcaaaagcactttttcctgacttctgcctaccagctttatgcctccaaactcagctattgccataccttgctctactaaccattccaatgagaaatcaagctcagatttcttttatccaagatattggaaggctccctctgaagcgacactttggaagattgaaaatggaagccctgactgacagggaacatggaatgatagaccctgacagcggagatgaagcccagcttaatggaggacattctgcagaggaatctctgggtgaacccactcaagccactgtgccggaaacctggtctcttcctttgagtcagaatagtgccagtgaactgcctgctagccagccccagcccttttcagcccaaggagacatggaagaaaacataataatagaagactacgagagtgatgggacatagaagccagcctgctaatcagattgctacttcacagcttcatttttgtttcattcagtggtacttcagcagagttaatatgcttttctgatgaattacacaacagtttgttaattcttcattcttgtagtatttcatcacaagaaacctactcttctgtcatcttgaagtaaatagaagatcaagccttcaaatctcttaattttttcggtatttattaaatctgtgagtggtttaaggagcggtcagtgtgtataaagtgtgtttgaacattatgccaaatatcaagatgtgaaggactaattcaggatgcaaaaacgttattggggggttgtaaatatcaactattcaacagtttaggatgcaattacgagtgtaaactgtgtgccttatttacactttattgtctcccgcttctcagatagttttgatgtgttgtacagtggaatatcttagatactttttggaaagtatttacataagttatatcacaattaaaatgttgaatttaaaaaaaaaaaaaaaaaa

SEQ ID NO: 992 - protein, 681 aa, Homo sapiens
MSKTFLRPKVSSTKVTDWVDPSFDDFLECSGVSTITATSLGVNNSSHRRKNGPSTLESSRFPARKRGNLSSLEQIYGLENSKEYLSENEPWVDKYKPETQHELAVHKKKIEEVETWLKAQVLERQPKQGGSILLITGPPGCGKTTTLKILSKEHGIQVQEWINPVLPDFQKDDFKGMFNTESSFHMFPYQSQIAVFKEFLLRATKYNKLQMLGDDLRTDKKIILVEDLPNQFYRDSHTLHEVLRKYVRIGRCPLIFIISDSLSGDNNQRLLFPKEIQEECSISNISFNPVAPTIMMKFLNRIVTIEANKNGGKITVPDKTSLELLCQGCSGDIRSAINSLQFSSSKGENNLRPRKKGMSLKSDAVLSKSKRRKKPDRVFENQEVQAIGGKDVSLFLFRALGKILYCKRASLTELDSPRLPSHLSEYERDTLLVEPEEVVEMSHMPGDLFNLYLHQNYIDFFMEIDDIVRASEFLSFADILSGDWNTRSLLREYSTSIATRGVMHSNKARGYAHCQGGGSSFRPLHKPQWFLINKKYRENCLAAKALFPDFCLPALCLQTQLLPYLALLTIPMRNQAQISFIQDIGRLPLKRHFGRLKMEALTDREHGMIDPDSGDEAQLNGGHSAEESLGEPTQATVPETWSLPLSQNSASELPASQPQPFSAQGDMEENIIIEDYESDGT

SEQ ID NO: 993 - DNA, 2666 bp, Homo sapiens
caagtgaattcatggtattttacttttttgggaaatactggaaatgaagacctgcaactgtaatttgaaataaggaaaactttaattttcagtataaaaattgctcaaatagaattgcctgattttaatgacaaaaggtaacagactgggttgacccatcatttgatgattttctagagtgtagtggcgtctctactattactgccacatcattaggtgtgaataactcaagtcatagaagaaaaaatgggccttctacattagaaagcagcagatttccagcgagaaaaagaggaaatctatcttccttagaacagatttatggtttagaaaattcaaaagaatatctgtctgaaaatgaaccatgggtggataaatataaaccagaaactcagcatgaacttgctgtgcataaaaagaaaattgaagaagtcgaaacctggttaaaagctcaagttttagaaaggcaaccaaaacagggtggatctattttattaataacaggtcctcctggatgtggaaagacaacgaccttaaaaatactatcaaaggagcatggtattcaagtacaagagtggattaatccagttttaccagacttccaaaaagatgatttcaaggggatgtttaatactgaatcaagcttccatatgtttccctatcagtctcagatagcagttttcaaagagtttctactaagagcgacaaagtataacaagttacaaatgcttggagatgatctgagaactgataagaagataattctggttgaagatttacctaaccagttttatcgggattctcatactttacatgaagttctaaggaagtatgtgaggattggtcgatgtcctcttatatttataatctcggacagtctcagtggagataataatcaaaggttattgtttcccaaagaaattcaggaagagtgttctatctcaaatattagtttcaaccctgtggcaccaacaattatgatgaaatttcttaatcgaatagtgactatagaagctaacaagaatggaggaaaaattactgtccctgacaaaacttctctagagttgctctgtcagggatgttctggtgatatcagaagtgcaataaacagcctccagttttcttcttcaaaaggagaaaacaacttacggccaaggaaaaaaggaatgtctttaaaatcagatgctgtgctgtcaaaatcaaaacgaagaaaaaaacctgatagggtttttgaaaatcaagaggtccaagctattggtggcaaagatgtttctctgtttctcttcagagctttggggaaaattctatattgtaaaagagcatctttaacagaattagactcacctcggttgccctctcatttatcagaatatgaacgggatacattacttgttgaacctgaggaggtagtagaaatgtcacacatgcctggagacttatttaatttatatcttcaccaaaactacatagatttcttcatggaaattgatgatattgtgagagccagtgaatttctgagttttgcagatatcctcagtggtgactggaatacacgctctttactcagggaatatagcacatctatagctacgagaggtgtgatgcattccaacaaagcccgaggatatgctcattgccaaggaggaggatcaagttttcgacccttgcacaaacctcagtggtttctaataaataaaaagtatcgggaaaattgcctggcagcaaaagcactttttcctgacttctgcctaccagctttatgcctccaaactcagctattgccataccttgctctactaaccattccaatgagaaatcaagctcagatttcttttatccaagatattggaaggctccctctgaagcgacactttggaagattgaaaatggaagccctgactgacagggaacatggaatgatagaccctgacagcggagatgaagcccagcttaatggaggacattctgcagaggaatctctgggtgaacccactcaagccactgtgccggaaacctggtctcttcctttgagtcagaatagtgccagtgaactgcctgctagccagccccagcccttttcagcccaaggagacatggaagaaaacataataatagaagactacgagagtgatgggacatagaagccagcctgctaatcagattgctacttcacagcttcatttttgtttcattcagtggtacttcagcagagttaatatgcttttctgatgaattacacaacagtttgttaattcttcattcttgtagtatttcatcacaagaaacctactcttctgtcatcttgaagtaaatagaagatcaagccttcaaatctcttaattttttcggtatttattaaatctgtgagtggtttaaggagcggtcagtgtgtataaagtgtgtttgaacattatgccaaatatcaagatgtgaaggactaattcaggatgcaaaaacgttattggggggttgtaaatatcaactattcaacagtttaggatgcaattacgagtgtaaactgtgtgccttatttacactttattgtctcccgcttctcagatagttttgatgtgttgtacagtggaatatcttagatactttttggaaagtatttacataagttatatcacaattaaaatgttgaatttaaaaaaaaaaaaaaaaaa

SEQ ID NO: 994 - protein, 505 aa, Homo sapiens
MFNTESSFHMFPYQSQIAVFKEFLLRATKYNKLQMLGDDLRTDKKIILVEDLPNQFYRDSHTLHEVLRKYVRIGRCPLIFIISDSLSGDNNQRLLFPKEIQEECSISNISFNPVAPTIMMKFLNRIVTIEANKNGGKITVPDKTSLELLCQGCSGDIRSAINSLQFSSSKGENNLRPRKKGMSLKSDAVLSKSKRRKKPDRVFENQEVQAIGGKDVSLFLFRALGKILYCKRASLTELDSPRLPSHLSEYERDTLLVEPEEVVEMSHMPGDLFNLYLHQNYIDFFMEIDDIVRASEFLSFADILSGDWNTRSLLREYSTSIATRGVMHSNKARGYAHCQGGGSSFRPLHKPQWFLINKKYRENCLAAKALFPDFCLPALCLQTQLLPYLALLTIPMRNQAQISFIQDIGRLPLKRHFGRLKMEALTDREHGMIDPDSGDEAQLNGGHSAEESLGEPTQATVPETWSLPLSQNSASELPASQPQPFSAQGDMEENIIIEDYESDGT

SEQ ID NO: 995 - DNA, 2592 bp, Homo sapiens
caagtgaattcatggtattttacttttttgggaaatactggaaatgaagacctgcaactgtaatttgaaataaggaaaactttaattttcagtataaaaattgctcaaatagaattgcctgattttaatgacaaaagtatatgggagtccacatttatgtaagaaatgaaactataaaatgtataaataatttgcaaatcagaattgctgtcgaaagttttactataatgaaagatattttcatactctcaaaaatatagaggaaaggggccaagattatagtaccagtcacaatcttttgatgaggacgaaatgaatcagcatgaacttgctgtgcataaaaagaaaattgaagaagtcgaaacctggttaaaagctcaagttttagaaaggcaaccaaaacagggtggatctattttattaataacaggtcctcctggatgtggaaagacaacgaccttaaaaatactatcaaaggagcatggtattcaagtacaagagtggattaatccagttttaccagacttccaaaaagatgatttcaaggggatgtttaatactgaatcaagcttccatatgtttccctatcagtctcagatagcagttttcaaagagtttctactaagagcgacaaagtataacaagttacaaatgcttggagatgatctgagaactgataagaagataattctggttgaagatttacctaaccagttttatcgggattctcatactttacatgaagttctaaggaagtatgtgaggattggtcgatgtcctcttatatttataatctcggacagtctcagtggagataataatcaaaggttattgtttcccaaagaaattcaggaagagtgttctatctcaaatattagtttcaaccctgtggcaccaacaattatgatgaaatttcttaatcgaatagtgactatagaagctaacaagaatggaggaaaaattactgtccctgacaaaacttctctagagttgctctgtcagggatgttctggtgatatcagaagtgcaataaacagcctccagttttcttcttcaaaaggagaaaacaacttacggccaaggaaaaaaggaatgtctttaaaatcagatgctgtgctgtcaaaatcaaaacgaagaaaaaaacctgatagggtttttgaaaatcaagaggtccaagctattggtggcaaagatgtttctctgtttctcttcagagctttggggaaaattctatattgtaaaagagcatctttaacagaattagactcacctcggttgccctctcatttatcagaatatgaacgggatacattacttgttgaacctgaggaggtagtagaaatgtcacacatgcctggagacttatttaatttatatcttcaccaaaactacatagatttcttcatggaaattgatgatattgtgagagccagtgaatttctgagttttgcagatatcctcagtggtgactggaatacacgctctttactcagggaatatagcacatctatagctacgagaggtgtgatgcattccaacaaagcccgaggatatgctcattgccaaggaggaggatcaagttttcgacccttgcacaaacctcagtggtttctaataaataaaaagtatcgggaaaattgcctggcagcaaaagcactttttcctgacttctgcctaccagctttatgcctccaaactcagctattgccataccttgctctactaaccattccaatgagaaatcaagctcagatttcttttatccaagatattggaaggctccctctgaagcgacactttggaagattgaaaatggaagccctgactgacagggaacatggaatgatagaccctgacagcggagatgaagcccagcttaatggaggacattctgcagaggaatctctgggtgaacccactcaagccactgtgccggaaacctggtctcttcctttgagtcagaatagtgccagtgaactgcctgctagccagccccagcccttttcagcccaaggagacatggaagaaaacataataatagaagactacgagagtgatgggacatagaagccagcctgctaatcagattgctacttcacagcttcatttttgtttcattcagtggtacttcagcagagttaatatgcttttctgatgaattacacaacagtttgttaattcttcattcttgtagtatttcatcacaagaaacctactcttctgtcatcttgaagtaaatagaagatcaagccttcaaatctcttaattttttcggtatttattaaatctgtgagtggtttaaggagcggtcagtgtgtataaagtgtgtttgaacattatgccaaatatcaagatgtgaaggactaattcaggatgcaaaaacgttattggggggttgtaaatatcaactattcaacagtttaggatgcaattacgagtgtaaactgtgtgccttatttacactttattgtctcccgcttctcagatagttttgatgtgttgtacagtggaatatcttagatactttttggaaagtatttacataagttatatcacaattaaaatgttgaatttaaaaaaaaaaaaaaaaaa

SEQ ID NO: 996 - protein, 584 aa, Homo sapiens
MNQHELAVHKKKIEEVETWLKAQVLERQPKQGGSILLITGPPGCGKTTTLKILSKEHGIQVQEWINPVLPDFQKDDFKGMFNTESSFHMFPYQSQIAVFKEFLLRATKYNKLQMLGDDLRTDKKIILVEDLPNQFYRDSHTLHEVLRKYVRIGRCPLIFIISDSLSGDNNQRLLFPKEIQEECSISNISFNPVAPTIMMKFLNRIVTIEANKNGGKITVPDKTSLELLCQGCSGDIRSAINSLQFSSSKGENNLRPRKKGMSLKSDAVLSKSKRRKKPDRVFENQEVQAIGGKDVSLFLFRALGKILYCKRASLTELDSPRLPSHLSEYERDTLLVEPEEVVEMSHMPGDLFNLYLHQNYIDFFMEIDDIVRASEFLSFADILSGDWNTRSLLREYSTSIATRGVMHSNKARGYAHCQGGGSSFRPLHKPQWFLINKKYRENCLAAKALFPDFCLPALCLQTQLLPYLALLTIPMRNQAQISFIQDIGRLPLKRHFGRLKMEALTDREHGMIDPDSGDEAQLNGGHSAEESLGEPTQATVPETWSLPLSQNSASELPASQPQPFSAQGDMEENIIIEDYESDGT

SEQ ID NO: 997 - DNA, 2972 bp, Homo sapiens
gaggccgtacctccgagaggctcggcgttgagcccgggtagggccaggtggctgccctttcacctagggtagtccctggtcgcctccgctcttcgcccaaaaggggatgcagctccgggaaacaagtgaattcatggtattttacttttttgggaaatactggaaatgaagacctgcaactgtaatttgaaataaggaaaactttaattttcagtataaaaattgctcaaatagaattgcctgattttaatgacaaaagtatatgggagtccacatttatgtaagaaatgaaactataaaatgtataaataatttgcaaatcagaattgctgtcgaaagttttactataatgaaagatattttcatactctcaaaaatatagaggaaaggggccaagattatagtaccagtcacaatcttttgatgaggacgaaatgaatcaggtaacagactgggttgacccatcatttgatgattttctagagtgtagtggcgtctctactattactgccacatcattaggtgtgaataactcaagtcatagaagaaaaaatgggccttctacattagaaagcagcagatttccagcgagaaaaagaggaaatctatcttccttagaacagatttatggtttagaaaattcaaaagaatatctgtctgaaaatgaaccatgggtggataaatataaaccagaaactcagcatgaacttgctgtgcataaaaagaaaattgaagaagtcgaaacctggttaaaagctcaagttttagaaaggcaaccaaaacagggtggatctattttattaataacaggtcctcctggatgtggaaagacaacgaccttaaaaatactatcaaaggagcatggtattcaagtacaagagtggattaatccagttttaccagacttccaaaaagatgatttcaaggggatgtttaatactgaatcaagcttccatatgtttccctatcagtctcagatagcagttttcaaagagtttctactaagagcgacaaagtataacaagttacaaatgcttggagatgatctgagaactgataagaagataattctggttgaagatttacctaaccagttttatcgggattctcatactttacatgaagttctaaggaagtatgtgaggattggtcgatgtcctcttatatttataatctcggacagtctcagtggagataataatcaaaggttattgtttcccaaagaaattcaggaagagtgttctatctcaaatattagtttcaaccctgtggcaccaacaattatgatgaaatttcttaatcgaatagtgactatagaagctaacaagaatggaggaaaaattactgtccctgacaaaacttctctagagttgctctgtcagggatgttctggtgatatcagaagtgcaataaacagcctccagttttcttcttcaaaaggagaaaacaacttacggccaaggaaaaaaggaatgtctttaaaatcagatgctgtgctgtcaaaatcaaaacgaagaaaaaaacctgatagggtttttgaaaatcaagaggtccaagctattggtggcaaagatgtttctctgtttctcttcagagctttggggaaaattctatattgtaaaagagcatctttaacagaattagactcacctcggttgccctctcatttatcagaatatgaacgggatacattacttgttgaacctgaggaggtagtagaaatgtcacacatgcctggagacttatttaatttatatcttcaccaaaactacatagatttcttcatggaaattgatgatattgtgagagccagtgaatttctgagttttgcagatatcctcagtggtgactggaatacacgctctttactcagggaatatagcacatctatagctacgagaggtgtgatgcattccaacaaagcccgaggatatgctcattgccaaggaggaggatcaagttttcgacccttgcacaaacctcagtggtttctaataaataaaaagtatcgggaaaattgcctggcagcaaaagcactttttcctgacttctgcctaccagctttatgcctccaaactcagctattgccataccttgctctactaaccattccaatgagaaatcaagctcagatttcttttatccaagatattggaaggctccctctgaagcgacactttggaagattgaaaatggaagccctgactgacagggaacatggaatgatagaccctgacagcggagatgaagcccagcttaatggaggacattctgcagaggaatctctgggtgaacccactcaagccactgtgccggaaacctggtctcttcctttgagtcagaatagtgccagtgaactgcctgctagccagccccagcccttttcagcccaaggagacatggaagaaaacataataatagaagactacgagagtgatgggacatagaagccagcctgctaatcagattgctacttcacagcttcatttttgtttcattcagtggtacttcagcagagttaatatgcttttctgatgaattacacaacagtttgttaattcttcattcttgtagtatttcatcacaagaaacctactcttctgtcatcttgaagtaaatagaagatcaagccttcaaatctcttaattttttcggtatttattaaatctgtgagtggtttaaggagcggtcagtgtgtataaagtgtgtttgaacattatgccaaatatcaagatgtgaaggactaattcaggatgcaaaaacgttattggggggttgtaaatatcaactattcaacagtttaggatgcaattacgagtgtaaactgtgtgccttatttacactttattgtctcccgcttctcagatagttttgatgtgttgtacagtggaatatcttagatactttttggaaagtatttacataagttatatcacaattaaaatgttgaatttaaaaaaaaaaaaaaaaaa

SEQ ID NO: 998 - protein, 670 aa, Homo sapiens; identical to SEQ ID NO: 988

SEQ ID NO: 999 - DNA, 3010 bp, Homo sapiens
gcaacgcccgcgagggtcggctcccggggcgctgacaaccgcctcgtggccctcggccggcctctgaagagggcagtgaggggcccccacctgggcgcccgatgcccagagcactctgcgcccccagcctgccccagcccagtccctcccggccgcgcgccctgaccgcaagtgaattcatggtattttacttttttgggaaatactggaaatgaagacctgcaactgtaatttgaaataaggaaaactttaattttcagtataaaaattgctcaaatagaattgcctgattttaatgacaaaagtatatgggagtccacatttatgtaagaaatgaaactataaaatgtataaataatttgcaaatcagaattgctgtcgaaagttttactataatgaaagatattttcatactctcaaaaatatagaggaaaggggccaagattatagtaccagtcacaatcttttgatgaggacgaaatgaatcaggtaacagactgggttgacccatcatttgatgattttctagagtgtagtggcgtctctactattactgccacatcattaggtgtgaataactcaagtcatagaagaaaaaatgggccttctacattagaaagcagcagatttccagcgagaaaaagaggaaatctatcttccttagaacagatttatggtttagaaaattcaaaagaatatctgtctgaaaatgaaccatgggtggataaatataaaccagaaactcagcatgaacttgctgtgcataaaaagaaaattgaagaagtcgaaacctggttaaaagctcaagttttagaaaggcaaccaaaacagggtggatctattttattaataacaggtcctcctggatgtggaaagacaacgaccttaaaaatactatcaaaggagcatggtattcaagtacaagagtggattaatccagttttaccagacttccaaaaagatgatttcaaggggatgtttaatactgaatcaagcttccatatgtttccctatcagtctcagatagcagttttcaaagagtttctactaagagcgacaaagtataacaagttacaaatgcttggagatgatctgagaactgataagaagataattctggttgaagatttacctaaccagttttatcgggattctcatactttacatgaagttctaaggaagtatgtgaggattggtcgatgtcctcttatatttataatctcggacagtctcagtggagataataatcaaaggttattgtttcccaaagaaattcaggaagagtgttctatctcaaatattagtttcaaccctgtggcaccaacaattatgatgaaatttcttaatcgaatagtgactatagaagctaacaagaatggaggaaaaattactgtccctgacaaaacttctctagagttgctctgtcagggatgttctggtgatatcagaagtgcaataaacagcctccagttttcttcttcaaaaggagaaaacaacttacggccaaggaaaaaaggaatgtctttaaaatcagatgctgtgctgtcaaaatcaaaacgaagaaaaaaacctgatagggtttttgaaaatcaagaggtccaagctattggtggcaaagatgtttctctgtttctcttcagagctttggggaaaattctatattgtaaaagagcatctttaacagaattagactcacctcggttgccctctcatttatcagaatatgaacgggatacattacttgttgaacctgaggaggtagtagaaatgtcacacatgcctggagacttatttaatttatatcttcaccaaaactacatagatttcttcatggaaattgatgatattgtgagagccagtgaatttctgagttttgcagatatcctcagtggtgactggaatacacgctctttactcagggaatatagcacatctatagctacgagaggtgtgatgcattccaacaaagcccgaggatatgctcattgccaaggaggaggatcaagttttcgacccttgcacaaacctcagtggtttctaataaataaaaagtatcgggaaaattgcctggcagcaaaagcactttttcctgacttctgcctaccagctttatgcctccaaactcagctattgccataccttgctctactaaccattccaatgagaaatcaagctcagatttcttttatccaagatattggaaggctccctctgaagcgacactttggaagattgaaaatggaagccctgactgacagggaacatggaatgatagaccctgacagcggagatgaagcccagcttaatggaggacattctgcagaggaatctctgggtgaacccactcaagccactgtgccggaaacctggtctcttcctttgagtcagaatagtgccagtgaactgcctgctagccagccccagcccttttcagcccaaggagacatggaagaaaacataataatagaagactacgagagtgatgggacatagaagccagcctgctaatcagattgctacttcacagcttcatttttgtttcattcagtggtacttcagcagagttaatatgcttttctgatgaattacacaacagtttgttaattcttcattcttgtagtatttcatcacaagaaacctactcttctgtcatcttgaagtaaatagaagatcaagccttcaaatctcttaattttttcggtatttattaaatctgtgagtggtttaaggagcggtcagtgtgtataaagtgtgtttgaacattatgccaaatatcaagatgtgaaggactaattcaggatgcaaaaacgttattggggggttgtaaatatcaactattcaacagtttaggatgcaattacgagtgtaaactgtgtgccttatttacactttattgtctcccgcttctcagatagttttgatgtgttgtacagtggaatatcttagatactttttggaaagtatttacataagttatatcacaattaaaatgttgaatttaaaaaaaaaa

SEQ ID NO: 1000 - protein, 670 aa, Homo sapiens; identical to SEQ ID NO: 988

SEQ ID NO: 1001 - DNA, 2842 bp, Homo sapiens
gaggccgtacctccgagaggctcggcgttgagcccgggtagggccaggtggctgccctttcacctagggtagtccctggtcgcctccgctcttcgcccaaaaggggatgcagctccgggaaatatatgggagtccacatttatgtaagaaatgaaactataaaatgtataaataatttgcaaatcagaattgctgtcgaaagttttactataatgaaagatattttcatactctcaaaaatatagaggaaaggggccaagattatagtaccagtcacaatcttttgatgaggacgaaatgaatcaggtaacagactgggttgacccatcatttgatgattttctagagtgtagtggcgtctctactattactgccacatcattaggtgtgaataactcaagtcatagaagaaaaaatgggccttctacattagaaagcagcagatttccagcgagaaaaagaggaaatctatcttccttagaacagatttatggtttagaaaattcaaaagaatatctgtctgaaaatgaaccatgggtggataaatataaaccagaaactcagcatgaacttgctgtgcataaaaagaaaattgaagaagtcgaaacctggttaaaagctcaagttttagaaaggcaaccaaaacagggtggatctattttattaataacaggtcctcctggatgtggaaagacaacgaccttaaaaatactatcaaaggagcatggtattcaagtacaagagtggattaatccagttttaccagacttccaaaaagatgatttcaaggggatgtttaatactgaatcaagcttccatatgtttccctatcagtctcagatagcagttttcaaagagtttctactaagagcgacaaagtataacaagttacaaatgcttggagatgatctgagaactgataagaagataattctggttgaagatttacctaaccagttttatcgggattctcatactttacatgaagttctaaggaagtatgtgaggattggtcgatgtcctcttatatttataatctcggacagtctcagtggagataataatcaaaggttattgtttcccaaagaaattcaggaagagtgttctatctcaaatattagtttcaaccctgtggcaccaacaattatgatgaaatttcttaatcgaatagtgactatagaagctaacaagaatggaggaaaaattactgtccctgacaaaacttctctagagttgctctgtcagggatgttctggtgatatcagaagtgcaataaacagcctccagttttcttcttcaaaaggagaaaacaacttacggccaaggaaaaaaggaatgtctttaaaatcagatgctgtgctgtcaaaatcaaaacgaagaaaaaaacctgatagggtttttgaaaatcaagaggtccaagctattggtggcaaagatgtttctctgtttctcttcagagctttggggaaaattctatattgtaaaagagcatctttaacagaattagactcacctcggttgccctctcatttatcagaatatgaacgggatacattacttgttgaacctgaggaggtagtagaaatgtcacacatgcctggagacttatttaatttatatcttcaccaaaactacatagatttcttcatggaaattgatgatattgtgagagccagtgaatttctgagttttgcagatatcctcagtggtgactggaatacacgctctttactcagggaatatagcacatctatagctacgagaggtgtgatgcattccaacaaagcccgaggatatgctcattgccaaggaggaggatcaagttttcgacccttgcacaaacctcagtggtttctaataaataaaaagtatcgggaaaattgcctggcagcaaaagcactttttcctgacttctgcctaccagctttatgcctccaaactcagctattgccataccttgctctactaaccattccaatgagaaatcaagctcagatttcttttatccaagatattggaaggctccctctgaagcgacactttggaagattgaaaatggaagccctgactgacagggaacatggaatgatagaccctgacagcggagatgaagcccagcttaatggaggacattctgcagaggaatctctgggtgaacccactcaagccactgtgccggaaacctggtctcttcctttgagtcagaatagtgccagtgaactgcctgctagccagccccagcccttttcagcccaaggagacatggaagaaaacataataatagaagactacgagagtgatgggacatagaagccagcctgctaatcagattgctacttcacagcttcatttttgtttcattcagtggtacttcagcagagttaatatgcttttctgatgaattacacaacagtttgttaattcttcattcttgtagtatttcatcacaagaaacctactcttctgtcatcttgaagtaaatagaagatcaagccttcaaatctcttaattttttcggtatttattaaatctgtgagtggtttaaggagcggtcagtgtgtataaagtgtgtttgaacattatgccaaatatcaagatgtgaaggactaattcaggatgcaaaaacgttattggggggttgtaaatatcaactattcaacagtttaggatgcaattacgagtgtaaactgtgtgccttatttacactttattgtctcccgcttctcagatagttttgatgtgttgtacagtggaatatcttagatactttttggaaagtatttacataagttatatcacaattaaaatgttgaatttaaaaaaaaaaaaaaaaaaaaaaaaa

SEQ ID NO: 1002 - protein, 670 aa, Homo sapiens; identical to SEQ ID NO: 988

SEQ ID NO: 1003 - DNA, 2282 bp, Homo sapiens
cagagtcctgggcagcgtgcgcgctcttcctggcggctgcgcaggtgtgaaaatcacaaatgtcaaatgatggaagatccaggaatcgggacaggcgctacgatgaggtcccaagcgacctgccctatcaagataccaccataagaacccacccaattcttcatgacagtgagcgggcagtgagcgctgatcccttgccaccaccccctctcccattacagccaccattcggcccagacttctactcaagtgacacagaagaaccagctatagcgccagatctcaaaccagtaaggcgctttgtccctgactcctggaagaactttttcagagggaagaaaaaggaccccgaatgggataagccggtgtctgatatcaggtacatctccgatggagtggagtgttcaccaccagcctctccagcaagaccaaaccaccgttcgcccctcaactcctgcaaagatccctacggagggtcagaaggaacctttagttcccggaaagaggctgacgcagtgtttccccgggatccctatggatctctagaccgacacacacaaacagttcgaacatacagtgagaaggtggaggagtataacctgagatactcctacatgaagtcgtgggcaggcctgctgagaatactgggtgtggtggagctgcttttgggggccggtgtctttgcttgtgtcacagcttacattcacaaggacagtgagtggtacaacttgtttggatattcacaaccgtatggcatgggaggcgttggtggattgggcagtatgtatgggggctattactacactggccctaagaccccttttgtactcgtggttgctggattagcttggatcaccaccattattattctggttcttggcatgtccatgtattaccggaccattcttctggactctaattggtggcccctaactgaatttggaattaacgttgccttgtttattttgtatatggccgcagccatagtctatgtgaatgataccaaccgaggtggcctctgctactatccgttatttaatacaccagtgaatgcagtgttctgccgggtagaaggaggacagatagctgcaatgatcttcctgtttgtcaccatgatagtttatctcattagtgctttggtttgcctaaagttatggaggcatgaggcagctcggagacatagagaatatatggaacaacaggagataaatgagccatcattgtcatcgaaaaggaaaatgtgtgaaatggccaccagtggtgacagacaaagagactcagaagttaatttcaaggaactgagaacagcaaaaatgaaacctgaactactgagtggacacatccccccaggccacattcctaaacctatcgtgatgcccgactatgtggcaaaataccctgtgattcagacagatgatgagcgagaacgctataaagctgtgttccaagaccagttttcagagtacaaagagctgtctgcagaagttcaggctgtcctgaggaagtttgatgagctggatgcagtgatgagcagattgccacatcattcggaaagccgacaggaacatgagagaatttcaagaatccatgaagagtttaagaaaaaaaagaatgatcctacatttctggaaaaaaaagaacgctgtgattacctaaagaataaactttctcacataaagcaaagaattcaagaatatgataaagtaatgaattgggatgtacaaggttattcttaacgcttatttgaaaccactttatttttttattttattttatttttttgagatgaagtctcgctctgttacccaggctggaatgcagtggcacaatctcggctcactgcaacctccacctcccgggttcaagcaattctcctgttcaagcaattagcctccccagtagctgggattacaggcgtgcgctgccacaccccgctaatttttgtatttttagtagagacgaggtttcaccatgttggtcaggctgggaaactactttttttaaaaaatagcaagtttactatttatttactgcctttttaatgctagcctctgtggtagagaagcaagcgcttcccaaatcagcttccaattggtttaaccagtatgcaacattaaagattttactcagacatctttaaacgaaaaaaaaaaaaaaaaaaaaaaaaaaaaaaaaaaaaaaaaaaaaaaaaaaaaaaaaaaaaaaaaaaaaaaaaaaaaaaaaaaaaaaaaaaaaaaaaaaaaaaaaaaaaaaaaaaaaaaaaaaaaaaaaaaaaaaaaaaa

SEQ ID NO: 1004 - protein, 558 aa, Homo sapiens
MSNDGRSRNRDRRYDEVPSDLPYQDTTIRTHPILHDSERAVSADPLPPPPLPLQPPFGPDFYSSDTEEPAIAPDLKPVRRFVPDSWKNFFRGKKKDPEWDKPVSDIRYISDGVECSPPASPARPNHRSPLNSCKDPYGGSEGTFSSRKEADAVFPRDPYGSLDRHTQTVRTYSEKVEEYNLRYSYMKSWAGLLRILGVVELLLGAGVFACVTAYIHKDSEWYNLFGYSQPYGMGGVGGLGSMYGGYYYTGPKTPFVLVVAGLAWITTIIILVLGMSMYYRTILLDSNWWPLTEFGINVALFILYMAAAIVYVNDTNRGGLCYYPLFNTPVNAVFCRVEGGQIAAMIFLFVTMIVYLISALVCLKLWRHEAARRHREYMEQQEINEPSLSSKRKMCEMATSGDRQRDSEVNFKELRTAKMKPELLSGHIPPGHIPKPIVMPDYVAKYPVIQTDDERERYKAVFQDQFSEYKELSAEVQAVLRKFDELDAVMSRLPHHSESRQEHERISRIHEEFKKKKNDPTFLEKKERCDYLKNKLSHIKQRIQEYDKVMNWDVQGYS

SEQ ID NO: 1005 - DNA, 2385 bp, Homo sapiens
gataccggtttcagagtcctgggcagcgtgcgcgctcttcctggcggctgcgcaggtgtgaaaatcacaaatgtcaaatgatggaagatccaggaatcgggacaggcgctacgatgaggtcccaagcgacctgccctatcaagataccaccataagaacccacccaattcttcatgacagtgagcgggcagtgagcgctgatcccttgccaccaccccctctcccattacagccaccattcggcccagacttctactcaagtgacacagaagaaccagctatagcgccagatctcaaaccagtaaggcgctttgtccctgactcctggaagaactttttcagagggaagaaaaaggaccccgaatgggataagccggtgtctgatatcaggtacatctccgatggagtggagtgttcaccaccagcctctccagcaagaccaaaccaccgttcgcccctcaactcctgcaaagatccctacggagggtcagaaggaacctttagttcccggaaagaggctgacgcagtgtttccccgggatccctatggatctctagaccgacacacacaaacagttcgaacatacagtgagaaggtggaggagtataacctgagatactcctacatgaagtcgtgggcaggcctgctgagaatactgggtgtggtggagctgcttttgggggccggtgtctttgcttgtgtcacagcttacattcacaaggacagtgagtggtacaacttgtttggatattcacaaccgtatggcatgggaggcgttggtggattgggcagtatgtatgggggctattactacactggccctaagaccccttttgtactcgtggttgctggattagcttggatcaccaccattattattctggttcttggcatgtccatgtattaccggaccattcttctggactctaattggtggcccctaactgaatttggaattaacgttgccttgtttattttgtatatggccgcagccatagtctatgtgaatgataccaaccgaggtggcctctgctactatccgttatttaatacaccagtgaatgcagtgttctgccgggtagaaggaggacagatagctgcaatgatcttcctgtttgtcaccatgatagtttatctcattagtgctttggtttgcctaaagttatggaggcatgaggcagctcggagacatagagaatatatggaacaacaggagataaatgagccatcattgtcatcgaaaaggaaaatgtgtgaaatggccaccagtggtgacagacaaagagactcagaagttaatttcaaggaactgagaacagcaaaaatgaaacctgaactactgagtggacacatccccccacgcccagctaatttttttgtatttttagtagagatggggtttcaccgtgttagccaggatgatctcgatctcctgacctcatgatccacccgcctcagcctcccaaagtgttgggattacaggcgtgagtcaccgcgcccagctggtattgcttttctattccctttggacatacatgctacagtcccacaatgtagcatttccttggaaactccctttttttttttttttgagatggagtttcgctcttgttgcccaggctggagtacagtggtatgatcttggctcactgcagcctctgcctcctgggttcaagcgattctcctgcctctgcctcccaagtagctgggattacaggcacccaccaccatgcccagctaattttttgtatttttagtagagacaggatttcactatgttggccaggttggtctcaagctcctgacctcagatgatctaccagcctcggccttctgaagtgctgggattcaggtgtgagccactgtgcccagcagggatgcttcatctttctaagaattatcttggctttggactttattcataaatgttttatttctgttagtatgaacaatagactgccttaacaaagtttttttttaaacaaaatcgttcttgttggattttattcagcagcatctatcatgtagataaattcccaggtgtagcattacagcttctgactaatatagctgccattcagacaattaatgttcaaagagttttctaaagtgataaaaccaaagaaaagcatgtggaaaagcagaagcttagaaagttgtggtcactgaatgcactccctggtttttatttgtcagtgaaatctttatgcattcattgttaatattttaattccatggctttgtaggctgtgctgtgtctgaaggggtaacacctagggaaacatgaggccccttatgggaccccccaaatggaacaacttcactttctcttttatgtattgagccctgtgttaacatttcacttaagaagagcaccagtgcttt

SEQ ID NO: 1006 - protein, 457 aa, Homo sapiens
MSNDGRSRNRDRRYDEVPSDLPYQDTTIRTHPILHDSERAVSADPLPPPPLPLQPPFGPDFYSSDTEEPAIAPDLKPVRRFVPDSWKNFFRGKKKDPEWDKPVSDIRYISDGVECSPPASPARPNHRSPLNSCKDPYGGSEGTFSSRKEADAVFPRDPYGSLDRHTQTVRTYSEKVEEYNLRYSYMKSWAGLLRILGVVELLLGAGVFACVTAYIHKDSEWYNLFGYSQPYGMGGVGGLGSMYGGYYYTGPKTPFVLVVAGLAWITTIIILVLGMSMYYRTILLDSNWWPLTEFGINVALFILYMAAAIVYVNDTNRGGLCYYPLFNTPVNAVFCRVEGGQIAAMIFLFVTMIVYLISALVCLKLWRHEAARRHREYMEQQEINEPSLSSKRKMCEMATSGDRQRDSEVNFKELRTAKMKPELLSGHIPPRPANFFVFLVEMGFHRVSQDDLDLLTS

SEQ ID NO: 1007 - DNA, 2648 bp, Homo sapiens
gcctctctccatcagacaccccaaggttccatccgaagcaggcggagcaccgaacgcaccccggggtggtcagggacccccatccgtgctgccccctaggagcccgcgcctctcctctgcgccccgcctctcgggccgcaacatcgcgcggttcctttaacagcgcgctggcagggtgtgggaagcaggaccgcgtcctcccgccccctcccatccgagtttcaggtgaattggtcaccgagggaggaggccgacacaccacacctacactcccgcgtccacctctccctccctgcttcctctggcggaggcggcaggaaccgagagccaggtccagagcgccgaggagccggtctaggacgcagcagattggtttatcttggaagctaaagggcattgctcatcctgaagatcagctgaccattgacaatcagccatgtcatccaggcctcttgaaagtccacctccttacaggcctgatgaattcaaaccgaatcattatgcaccaagcaatgacatatatggtggagagatgcatgttcgaccaatgctctctcagccagcctactctttttacccagaagatgaaattcttcacttctacaaatggacctctcctccaggagtgattcggatcctgtctatgctcattattgtgatgtgcattgccatctttgcctgtgtggcctccacgcttgcctgggacagaggctatggaacttcccttttaggaggtagtgtaggctacccttatggaggaagtggctttggtagctacggaagtggctatggctatggctatggttatggctatggctacggaggctatacagacccaagagcagcaaagggcttcatgttggccatggctgccttttgtttcattgccgcgttggtgatctttgttaccagtgttataagatctgaaatgtccagaacaagaagatactacttaagtgtgataatagtgagtgctatcctgggcatcatggtgtttattgccacaattgtctatataatgggagtgaacccaactgctcagtcttctggatctctatatggttcacaaatatatgccctctgcaaccaattttatacacctgcagctactggactctacgtggatcagtatttgtatcactactgtgttgtggatccccaggaggccattgccattgtactggggttcatgattattgtggcttttgctttaataattttctttgctgtgaaaactcgaagaaagatggacaggtatgacaagtccaatattttgtgggacaaggaacacatttatgatgagcagccccccaatgtcgaggagtgggttaaaaatgtgtctgcaggcacacaggacgtgccttcacccccatctgactatgtggaaagagttgacagtcccatggcatactcttccaatggcaaagtgaatgacaagcggttttatccagagtcttcctataaatccacgccggttcctgaagtggttcaggagcttccattaacttcgcctgtggatgacttcaggcagcctcgttacagcagcggtggtaactttgagacaccttcaaaaagagcacctgcaaagggaagagcaggaaggtcaaagagaacagagcaagatcactatgagacagactacacaactggcggcgagtcctgtgatgagctggaggaggactggatcagggaatatccacctatcacttcagatcaacaaagacaactgtacaagaggaattttgacactggcctacaggaatacaagagcttacaatcagaacttgatgagatcaataaagaactctcccgtttggataaagaattggatgactatagagaagaaagtgaagagtacatggctgctgctgatgaatacaatagactgaagcaagtgaagggatctgcagattacaaaagtaagaagaatcattgcaagcagttaaagagcaaattgtcacacatcaagaagatggttggagactatgatagacagaaaacatagaaggctgatgccaagttgtttgagaaattaagtatctgacatctctgcaatcttctcagaaggcaaatgactttggaccataaccccggaagccaaacctctgtgagcatcacaaagttttggttgctttaacatcatcagtattgaagcattttataaatcgcttttgataatcaactgggctgaacactccaattaaggattttatgctttaaacattggttcttgtattaagaatgaaatactgtttgaggtttttaagccttaaaggaaggttctggtgtgaactaaactttcacaccccagacgatgtcttcatacctacatgtatttgtttgcataggtgatctcatttaatcctctcaaccacctttcagataactgttatttataatcacttttttccacataaggaaactgggttcctgcaatgaagtctctgaagtgaaactgcttgtttcctagcacacacttttggttaagtctgttttatgacttcattaataataaattccctggcctttcatattttagctactatatatgtgatgatctaccagcctccctattttttttctgttatataaatggttaaaagaggtttttcttaaataataaagatcatgtaaaagtaaaaaaaaaa

SEQ ID NO: 1008 - protein, 522 aa, Homo sapiens
MSSRPLESPPPYRPDEFKPNHYAPSNDIYGGEMHVRPMLSQPAYSFYPEDEILHFYKWTSPPGVIRILSMLIIVMCIAIFACVASTLAWDRGYGTSLLGGSVGYPYGGSGFGSYGSGYGYGYGYGYGYGGYTDPRAAKGFMLAMAAFCFIAALVIFVTSVIRSEMSRTRRYYLSVIIVSAILGIMVFIATIVYIMGVNPTAQSSGSLYGSQIYALCNQFYTPAATGLYVDQYLYHYCVVDPQEAIAIVLGFMIIVAFALIIFFAVKTRRKMDRYDKSNILWDKEHIYDEQPPNVEEWVKNVSAGTQDVPSPPSDYVERVDSPMAYSSNGKVNDKRFYPESSYKSTPVPEVVQELPLTSPVDDFRQPRYSSGGNFETPSKRAPAKGRAGRSKRTEQDHYETDYTTGGESCDELEEDWIREYPPITSDQQRQLYKRNFDTGLQEYKSLQSELDEINKELSRLDKELDDYREESEEYMAAADEYNRLKQVKGSADYKSKKNHCKQLKSKLSHIKKMVGDYDRQKT

SEQ ID NO: 1009 - DNA, 6748 bp, Homo sapiens
ttatatggtttggctctgtccgcacccaaatctcatcttgaattgtaacaattcccatgtgtcaagggtggggccaggtggagataactgaatcatggaggcagtttcccccatgctgttctcatggtagtgaataagtctcatgaggtctgatggttttataaatggatgttcccctgcacatgctctctcctgcccaccatgtctgactaaattttgtatttttactagagacgggctttcactatgttggccaggctggcctccaactcctgatctcgtgatccgtccaccccgacctcccaaagtgctaggatcataggcataagccaccacacccggcctcttttttttctttttcttttttttatctggagactgagttttgcactcgttgcccaggctggagtgcaatggtgcgatctcagctcactgcagtctccacctcagcaggagagcaggaatcttcagtgatccacgggcaaatatgcagccattgtgggcacctgttcctcccgcgacctttgtgcccacgtctctccctccagtacctactgcacgaccccccacgtccgcctcctgccattgccagcaggtgccttgcgcgggtacctggctgcgcttattcatccattatggtcgctctgtcactggtgccattatgtgctcacatgcccactccctcaggtttagaagtcgcgttgcccggcaacagaacaatctgctggcttagcctttggccaagttggcagctggacgaggacgctcagagcccagctcttgagagttcaagtatccgacagttccccactgctcccaggagcggttacccgggcactctgtgcccctcattcctgtttgggccaaggccgaggacctgcgagtagggctcagttgcctggagccccttcagcccatcccccagttcactttgcttgtgggatctccccgttgctcctgcccctggactgagtggcaggccatcctacaaacacccgcacactcgacatcagtggtgtcaagacaactctaagaaggttttccgtgatcctgcaagacctgtgttccatcctggtgattctgtcttcaacttcactgcacaggtaccacagtaagccagtgctgtgtgctctgagttccagggcatcccccagctcagccactacactgagcacaaggactctgtggggcccaggagcaggtagtcacccctttggggtccacaacacccggctgtccccagacttgtgtccagggaagatagtgttgagggccctcaaggagagcggggcagggatgcctgagcagcacaaggaccccagagtccaagaaaatcctgatgatcagagaacggtccccgaggtcaccggggatgcacggtctgcattttggcccctgcgggacaatggaggcccctctccctttgtgcccaggcccgggcctctgcagacagacctccacgcccagagctcagaaatcagatataaccacacatcccagacatcctggacgagctcgagcaccaaacgaaatgccatctccagctcctacagctccacgggaggcttgccggggctaaagcagaggagggggccagcctcatcccgctgccagctgaccctcagttactcaaagacagtgagtgaggacaggcctcaggctgtctcttcgggtcacacacggtgtgaaaagggggcagatacagcaccagggcagacaatcgccccaacgggtggctcccccagatcccaggactctaggccccgtagacgcaagattcccctgctgccacgcaggcgaggggagcctttgatgctgccacctcccttagagctggggtaccgggtcacggctgaagacctgcacctggaaaaagagaaggcattccagcgcatcaacagtgcactgcacgttgaggacaaggccatctcggactgcagaccctcacggccttcccacactttgtcctcacttgcaacaggggcttcgggtgggcctcccgtttctaaagcacccactatggatgcacagcaggacagacccaagtcccaagactgcctgggcctagtggcccccctagcatctgcagcagaggtccccgctacagctcccgtgtctgggaagaagcacagaccaccaggacccctgttctcctcctcagatccccttccggccaactcttcccactcccgggactcagcccaggtcacctcgatgattcctgtccccttgacagctgcaagcagggatgccggcatgagaagaacaaggtcggctcctgcagctgccgcagcagcccctcccccctccacattgaaccccacgtcggggtcactactcaatgcagtggatggaggcccctcacatttcttggcctcagccacagctgcagcacgtgtccagaggtcagaagtgagatataaccagagatcccagacctcccggaccagatcgtgcctcaaacgaaatgccagctccagctcccacagctctacggaaggcctccaggaagtaaagcggaggagggggccagcctcatcccactgccagctggcccacagttcctcaaacacagtgagtgaggatggacctcaggctgtctcttcgggtcaccgctgtgaaaacaaggcaggtacagcaccagggcagacacttgcccccaggggtggctcccccagatcccaggcctctaggccccacatcaacactgcactgcacgttgaggacaaggccatctcggactgcagaccctcacgaccttcccacactttgtcctcacttgcaacagaggcttcgggtgggcctcccgtttctaaagcacccactatggacgcacagcaggacagacccaagtcccaagactgcctgggcctagtggcccccctagcatctgctgcagaggtcccctctacagctcccgtgtctgggaagaagcacagaccaccaggacccctgttctcctcctcagatccccttcctgccacctcttcccactcccgggactcagcccaggtcacctcgctgattcctgccaccttcacagctgcaagcagggatgccggcatgagaagaacaaggtcggctcctgcagctgccgcagcagcccctcccccctccacattgaacaacacgtcggggtcactactcaatgcagtggatggaggcccctcacatttcttggcctcagccacagctgcagcacgtgcccagaggtcagaagtgagatataaccagagatcccagacctcccggaccagatcctgcctcaaacgaaatgccagctccagctccagctcccacagctctacggaaggcctccaggaactaaagcggaggagggggccagcctcatcccactgccagctggcccacagttccccaaacacagtgagtgaggacggacctcaggctgtctcttcgggtcaccgctgtgaaaacaaggcaggtacagcaccagggcagacactcgcccccaggggaggctcccccagatcccaggcctctaggccccacatcaacagtgcactgcacgttgaggacaaggccatctcggactgcagaccctcacggccttcccacactttgtcctcacttgcaacaggggcttcgggtgggcctcccgtttctaaagcacccactatggacgcacagcaggacagacccaagtcccaagactgcctgggcctagtggcccccctagcatctgctgaagaggtcccctctacagctcccgtgtctgggaagaagcacagaccaccaggacccctgttctcctcctcagatccccttcctgccacctcttcccactcccgggactcagcccaggtcacctcgctgattcctgccaccttcacagctgcaagcagggatgccggcatgagaagaacaaggcctggcacctcggctcctgcagctgccgcagcagcccttcccccctccacattgaaccccacgtcggggtcgctactcaatgcagtggatggaggcccctcacatttcttggcctcagccacagctgcagcacgtgcccagaggtcagaagtgagatataaccagagatcccagacctcccggaccagatcctgcctcaaacgaaatgccagctccagctcccacagctctacggaaggcctccaggaagtaaagcggaggagggggccagcctcatcccactgccagctggcccacagttcctcaaacacagtgagtgaggacggacctcaggctgtctcttcgggtcaccgctgtgaaaacaaggcaggtacagcaccagggcagacacttgcccccaggggtggctcccccagatcccaggcctctaggccccgcatcaacactgcactgcacgttgaggacaaggccatctcggactgcagaccctcacggccttcccacactttgtcctcacttgcaacaggggcttcgggtgggcctcccgtttctaaagcacccactatggatgcacagcaggacagacccaagtcccaagactgcctgggcctactggcccccctagcatctgctgcagaggtctcctctacagctcccatgtctgggaagaagcacagaccaccaggacccctgttctcctcctcagatccccttcctgccacctcttcccactccggggactcagcccaggacacctcgctgattcctgcccccttcacacctgcaagcagggatgccggcatcagaagaatgtttcgtgttcgaaattgtttgaggggtttgggtttatttttgttggttttttcttttttttttttgcttacgtgggcatccttcagcttttaataatctgaaaaattgtatttacccattgtcaatgtgtataaattaatctcagtcaattttatacaataaaaggtgaacttttatccatcaaacaataatttaacaaaaaatgtaccggaagaagaatgttcattacaaatataggaaacataaatattaccaaatattggcaagcactaaaatgttcagaaatataagtctattacagttatagctctctcaagcaaaaaaacagcagagaaaaacttagttttcctgaggggctatttatttacttagggatttgttaaaaggtcaaatggggtcacacagaatactaagaagagctgttcacccaggcctcactaagaactcttcttcatgcagtagctatataggaatatgacaactgctcctacgacccaaagaggaactacagcaactactctttagcatctgttgctcccaactctgctttgcaattatatgactcaagcattctggctccgttaactattactgctgttactcccaagtaaattccctctaaaaaataaaaatttttaaagctgtaatttaagctctctgctgcctcatgacttcaattccatcagagttacgcattgtttcctctgtacatctttgctctgcttccattgctaattccctagtaaagtgttgtatattcaaagttccaaagaaacagaatatccaagacatcaccaatcatccaaaacacagtgtaggaggccacagttaagagaagcaagaccattagctctttttataggctcgagaacaacaggatgctttggtcctgtatcagcaggacgctttttgggtagatcctactgccaccctactatcgggtagatcctactgtcaccctagctatgggcacatgtcagagtcccatgtaataaaggagacaaaaggaaaccaccacgagtataaactaagaaaagtactccaaggtttctaagaatggagctgtataactcactttgccccgtttgttacttctccacggtacttaccaccacctattacatatattttgtttatagtcagtcttcccccattagaatgaaagttccgtgaggataggactatacagtcagccctcagtatccatgggggactggtttcaggatctcctgagggtaacaaaggatactcaagtccctgatataaaatgacatagtatttgcacatcacctttgcacatcctcccatatacttcatatcaactctagatcactcataatatccgatgtaaatgtcatgcaaatagttattgtactatattgtgtaaggaataaggacaagaaaaaagtctgtacatgttcagtacagacgcaatttttttttccaatatttccaatccttggttgccttaacggatgtagaacccaggaataagttctggtgtcctattgcatagtaggatgagtatagttaacaataacatattatatatttgaaaatagccagaagagtagattttgaattttctccctacagaaaaatcattatgcaaattaccctgatttgatcattacacattgagtacatgtattaaaacatcacattctaccccatatatatgtacagttattatgtgtccataaaaatttaatgtcaatgtgtgaaataaaatgaaaaaataaaaatttttaaagctgtaattatctccatctggtaggaatatatacaatctgaaataaaaaatatatttgtaattgttaggacaaaatagattatacattaagtctgcaaattataaattataaaattctcacagaacctgaaaaattattgatactgttaaatatttaaaaagctgtccttggagagaaagaaacctatcagatttacatcaacaagtgtaatatgtcagcctattaccatctgctacagactgcatgtttgtgttccctcaaaattcatatgataggcccggcgcggtggc

SEQ ID NO: 1010 - protein, 1166 aa, Homo sapiens
MPEQHKDPRVQENPDDQRTVPEVTGDARSAFWPLRDNGGPSPFVPRPGPLQTDLHAQSSEIRYNHTSQTSWTSSSTKRNAISSSYSSTGGLPGLKQRRGPASSRCQLTLSYSKTVSEDRPQAVSSGHTRCEKGADTAPGQTIAPTGGSPRSQDSRPRRRKIPLLPRRRGEPLMLPPPLELGYRVTAEDLHLEKEKAFQRINSALHVEDKAISDCRPSRPSHTLSSLATGASGGPPVSKAPTMDAQQDRPKSQDCLGLVAPLASAAEVPATAPVSGKKHRPPGPLFSSSDPLPANSSHSRDSAQVTSMIPVPLTAASRDAGMRRTRSAPAAAAAAPPPSTLNPTSGSLLNAVDGGPSHFLASATAAARVQRSEVRYNQRSQTSRTRSCLKRNASSSSHSSTEGLQEVKRRRGPASSHCQLAHSSSNTVSEDGPQAVSSGHRCENKAGTAPGQTLAPRGGSPRSQASRPHINTALHVEDKAISDCRPSRPSHTLSSLATEASGGPPVSKAPTMDAQQDRPKSQDCLGLVAPLASAAEVPSTAPVSGKKHRPPGPLFSSSDPLPATSSHSRDSAQVTSLIPATFTAASRDAGMRRTRSAPAAAAAAPPPSTLNNTSGSLLNAVDGGPSHFLASATAAARAQRSEVRYNQRSQTSRTRSCLKRNASSSSSSHSSTEGLQELKRRRGPASSHCQLAHSSPNTVSEDGPQAVSSGHRCENKAGTAPGQTLAPRGGSPRSQASRPHINSALHVEDKAISDCRPSRPSHTLSSLATGASGGPPVSKAPTMDAQQDRPKSQDCLGLVAPLASAEEVPSTAPVSGKKHRPPGPLFSSSDPLPATSSHSRDSAQVTSLIPATFTAASRDAGMRRTRPGTSAPAAAAAALPPSTLNPTSGSLLNAVDGGPSHFLASATAAARAQRSEVRYNQRSQTSRTRSCLKRNASSSSHSSTEGLQEVKRRRGPASSHCQLAHSSSNTVSEDGPQAVSSGHRCENKAGTAPGQTLAPRGGSPRSQASRPRINTALHVEDKAISDCRPSRPSHTLSSLATGASGGPPVSKAPTMDAQQDRPKSQDCLGLLAPLASAAEVSSTAPMSGKKHRPPGPLFSSSDPLPATSSHSGDSAQDTSLIPAPFTPASRDAGIRRMFRVRNCLRGLGLFLLVFSFFFLLTWASFSF

SEQ ID NO: 1011 - DNA, 5763 bp, Homo sapiens
gcgcaaggcacctgctggcaatggcaggaggcggacgtggggggtcgtgcagtaggtactggagggagagacgtgggcacaaaggtcgcgggaggaacaggtgcccacaatggctgcatatttgcccgtggatcactgaagattcctgctctcctgctgaggtggagactgcagtgagctgagatcgcaccattgcactccagcctgggcaacgagtgcaaaactcagtctccagataaaaaaaagaaaaagaaaaaaaagaggccgggtgtggtggcttatgcctatgatcctagcactttgggaggtcggggtggacggatcacgagatcaggagttggaggccagcctggccaacatagtgaaagcccgtctctagtaaaaatacaaaatttagtcagacatggtgggcaggagagagcatgtgcaggggaacatccatttataaaaccatcagacctcatgagacttattcactaccatgagaacagcatgggggaaactgcctccatgattcagttatctccacctggccccacccttgacacatgggaattgttacaattcaagatgagatttgggtgcggacagagccaaaccatataattcttccccggcccctcccaaatctcatgtcctcatatttcaaaagcaatcatgccttcccctaagtcccccaaactcttatttcagcattaactcaaaattccatagtccaaagtctcatctgagacaaggcaagtcccttccacctatgagcctgtaaaatcaaaagcaagttagttattttctagatacacagggatacaggcattgggtaaatacactcgtttcaaatgggagaaattggccaaagcgaaagagctacaggccccatgcaagtccaaaacccagcaggcaaatcttaaagctccaaaatgacctcctttgactccatgtgtcacatctaggtgatgcaagaagtgggttcccagggtcttgggcagccccgcccctgtggctttgcagggtacagccccccttctggctgcattgagtgtctgcagcttttccaggcacacagtgcaagctgtcagtggatctaccattctggggtctggaggatggtggcccttttctcacagctctgcttggcagtaccccagtggggactctgtgtgggagctccaaccccatatttccctttgacactgtcctagcagaggttatccatgagggcccccccctcccctcccccccacagcaaacttttgcctggatttccaggcattttcatacatcttctgaaatgtaggcggaggttcatgaacgttaattcttgactttggtgcatctgcaggcttaacaccacctagaacctgaaaggcttggaacttgcaccctctgaagccatggcctgaggtgtaccttggccccttttacctatggcaggagcagctgggatgcagggccccaagttcctaggctgcacacagcagggggttctggacccacaaaaccatttttccttctaagcctcctggcctgtgatgggagggtctgctgtgagggtctctaacatgccctggagacatttgccccattgtcttggtgattaacatttggctcctcattacttatgcaaatttctacaacccagtctcctgagaaaatagatttttcttttctgttgcatcatcaggctacaaattttctgaacttttatgctctgcttcttctcgaatgctttgctgcttagaaatttcttctgtcagataccttcaatcatctctctcaagttcaaagttccacagatctgtagggaactctagaaagaaattcttattttccctctttcccgcctatcttatgcccgtttctaatacaggtgcacaatgcctgcagtgtctttgcatagtaagagtgactttactccatttcccaacaaattcctcatctccctctgagaccacctccgcctggaccttgttgtccatatcactattaacattttggtcaaagccattcaacaagtctctaggaagttccaaactttcccacattttcctatcctcttctgagccttccaaactgttccagcctctccctgttacccatttccaaagttgcttccacattttcgggtatctttacagcagcaccccactctactggtatcaacttattgtattagtctgttctcacaccgcaaataaagacatacctgagactgggtaatttataaaggaaagaggttgaattgactcacagttctgcatggctggggaggcctcacaatcatggtggaaggcaaggaggtgcaaaagcatgtctcacatagtggcaggcaggagagagcatgtgcaggggagctcccatttataaaaccatcagatctcatgagacttagtcactaccgcgagaacagtatggggggaaccatccccatgattcagttatctgcacccggccccacccttgacacgtgggaattattacaatgcaagggctggtgaattaccagatctccgtcaagtgcagtaaccagttcaagttggaagtgtgtcttttgaatgcagaaaacaaagtcgtggacaaccaggctgggacccagggccagctgaaggtgctgggtgccaacctctggtggccgtacctgatgcacgaacaccccgcctacctgtactcgtgggaggatggtgattgctcacaccaaagccttggacccctcccagcctgtgacctttgtgaccaactccacctacgcagcagacaagggggctctgtatgtggatgtgatccgtgtgaacagctactactcttggtatcgcaactacgggcacctggagttgattcagctgcagctggccgcccagtttgagaattggtgtaagacatcacaatcccattattcagagcgcgtatggagtggaaacgcttgtagggtttcaccaggatccacctctgatgttcagtgaagaggaccggaaaagtctgctagagcagtaccatctgggtctggatcaaaaacgcagaaaatacgtggttggagagctcatctggaattttgccgatttcatgactaaccagtccaaggatgaaggaaaaactggacctcattatggatttacttttgggatacactcattattccagaggagggtaaaaggctgagaagcttaagacttgctataattctgtgagagagctataaaagtctgctcagaaacattataacgtaaaatggacagagaaggacaatgagatatttaatttgccacggcaaagccattgctgtgaagaatggataatatatgtcaatggtaatatatgaagaaataacacagatggagctggcttgaaatcctcttgtttatggcagtacatatcgtttatgattcaaaaaatatagcccatttccaaaaacctgcaacaaagagatactttctcaggtgtcagtttcttggtcgggaatgaaaatagtgccaacctgtgataccttcactctaattttactttctgaggaagttttctgtaatagttatttggtgataattattaatactggtgagaaaatcaatgtaaaagaggagaaataacccacacaaccacatacaactaggaaatgatagatggatctgaaaaaaaaggatatgcactcttaacaagttcaacacccaagtactattgcaagtaccagctgtatttcatggaaaaaaaaaaaagaataactcaaaaggcagaacgaagagcctagaggtcagagatgagaggcatgaataattattcacaggcgttgaatataatcaaatgacttgcaacatttaccactgggattttaaaatgtggtggaccaatcattcttttagtctgtgcattttcccatttttttcaacaggaatgtctagagacattattcctgttttgccactgtatttttggtgaatgtgtagtaagtaactggcctctttagtatcacaaagctggatgaagaaaatgtggtacatatacaccatgaaatactatgccgccacaaaaaggaaatgagatcatgtcctctgcagggacatggatgaagctggaagccattatccttagcaaagtaacgcaggaacagaaaaccaaacaccacatgttgtctcttagaagtgggagctgaacgatgggctttgcagagattaaagcttcagaaaaaaatatgggaaaatatgttaaaatgttgacctgaaaatgaagtggatgactataaaactcttgagagaattagactttttgtagcagtttattacatgataataccttaaaggagatcacattcagtgacctgcgttgacagatgtgaatttcttcggagtaagaaatcctcagaggaaattacccagtatattcaaagctacaagggatttgttgacataacggtaatgtataacagcaatttttttctcaagtttttggattacctgtaagtgtctgactcagaagggcataggcattctttttatgtcatgggtttgatttctttcttcctttctcctttcattcccctggctcccatcttcaaagtgaaaaatatcacattcacttgctgacctagagcctttttctttttccagggctggcttctgacgggctctgcttgccttcctgatagtcttcccctttatgaatgaagccacttgccccagcttccctctgctgcccctatctgcaggcttgctaagatctcctgacctaggcgctgtcacccacagtgggctgcagagctggctcttcctagctggctaactatcctgaatcagtaaaaatttcctagtggagagtgatgggaaatcgaatccaaactggcttaaacaaaaatgagaatttattgattaacatgactcaggagaccagaactctatagagaacatggcctgacagtgggggaagagaggtgtttcctcaaaaagaaactgggtgcagctttcccagaagaatcagttgctcaatatataataccctgatgaatttagttaccattctatgtctcttacttcctcattcgtcaaagtacatctgtgatatttaaatgcaggtctgttttcaaggtcagtttccggaaacagtgaccctgagaaggcttcctcctgagtatgcataaacattcacagcttgcatgcgtgtgtgtgtgtgtgtgtgtgtgtgtgtgtatgtttgcttgcactgcataaaaacaattgcaacatcaacagaaataaaaattaaaggaataattctcctccgactctgccgttccatccagtgaaactcttcattctggggtaaagttccttcagttcttgttcatagataggtatatacttcataagtcaaacaatcaggctgggcgcagtagctcatgcctgtaatcccagccctttgggaggccgagctgggcagatcacttgagatcaggtgttcgagaccagcctcaagacctccaacatgggccgggtgcagtggctcacgtctgtaatcccagcactttgggaggccgagacggacggatgatgaggtcaggagatagagaccatcctggctaacatggtgaaaccccatctctactaaaaatacaaaaaaaaaaaaaaattagcccggcatggtggcaggcgcctgtggtcccagctactcgggaggctgaggcaggagaatggcgtgaacctgggaggcagagcttgtagtgagccaagtgccactgtgctccagcctggacgacagagcgagactctgtctcaaaaaaaaaaaaaaagaaaaaaaaaaaaaaaa

SEQ ID NO: 1012 - protein, 93 aa, Homo sapiens
MVIAHTKALDPSQPVTFVTNSTYAADKGALYVDVIRVNSYYSWYRNYGHLELIQLQLAAQFENWCKTSQSHYSERVWSGNACRVSPGSTSDVQ

SEQ ID NO: 1013 - DNA, 1912 bp, Homo sapiens
ccggcggctgttgtcgggcctccagcgggcggggccgttggcggagcagagcggaggcgcagccgggcggagggcccacgagggctcagccttcccggtcagcggtggtgacggtatcccagagtgccagagaaccgttgcttttccgagttgctcttcttccaggctccgttggtggtcggcatggcccgtggaaatcaacgagaacttgcccgccagaaaaacatgaagaaaacccaggaaattagcaagggaaagaggaaagaggatagcttgactgcctctcagagaaagcagagttctggaggccagaaatctgagagcaagatgtcagctgggccacacctccctctgaaggctccaagggagaatccttgctttcctcttccagctgctggtggctccaggtattacttggcttatggcagcataactcctatctctgcctttgtctttgtggtcttcttttctgtcttcttcccttctttttatgaggacttttgctgttggatttaggttccattctaacctaggatgatctcatttggaaatccttaatttcatctacaaaaactgttttcccaaataggtcacattcacgcatatcagatggacagatgtatcattttggggtccaccattcaacccactacaaggagttttttaaacaaaaataggaaacttagatgtaacttagcactttttttttttttttttgagatggagtctcactctgtcaccagactggagtgcagtggcgccatctcagctccatgcaacctctgcctcctgggttcaagcagttctcttgcctcagcctcctgggtagctgggattacaggcacgcgctgccacacccaggtaatttatttattttttttttgagacagagtctcgcactgttgcccaggctggactgcagtggcgtgatctctgctcactgcaacctccgcctcccgggttcaagcgattctccagcctcagcttcctgagtagatgggattacaggcgcctgccaccacgcccagctaatttttttgtattcttagtagagatggggtttcaccatgttggccaggctggtctccatctcctgacctcgtgattcacccgcctcggcctcccaaagtgctgggattacaggcgtgagtcacagcccccggccataatttagcactttaaaaaataatagccatgttgggccaggcgtggtggctcatgcctgtaatctgagcactttgggagaccaaggcgggtagatcccttgtgcccaggagttcaagaccagcctgggcaacatggcgaaaccccatttctactaaaaatacaaaaattagctggggcgaggggataggccgagttccgggtgtaagggggccattagggagagcagagcgaggcagctgatcttccggattgggggccttgcccggaagctggacctcacggagatgaaacggaagatgcacgaggatatgatctccatacagaactttctcatctacgtggccctgctgcgagtcactccatttatcttaaagaaattggacagcatatgaagattggacatcacatgtgaatgcatgatatgaagagcctggttacagtttctactgttctctgcaagtaaataggcccagaaaggtataagagactctttgaatggacataaaaattctgcttgttaagaacaagttgagctctggtaactgatcttaatagctaaaatataaaaatatttgggaagtctgaaatgaggtctcctggccctggtgtgcccttaatgcctgtgacagttggcctctgtgaatattggtataattgtaaataatgtcaaactccattttctagcaagtattaataattaagggaagtatgtctgaaatggcaaaaaaaaaaaaaaaaaaaaaaa

SEQ ID NO: 1014 - protein, 110 aa, Homo sapiens
MARGNQRELARQKNMKKTQEISKGKRKEDSLTASQRKQSSGGQKSESKMSAGPHLPLKAPRENPCFPLPAAGGSRYYLAYGSITPISAFVFVVFFSVFFPSFYEDFCCWI

SEQ ID NO: 1015 - DNA, 1621 bp, Homo sapiens
ccacaaatgtgggagggcgataaccactcgtagaaagcgtgagaagttactacaagcggtcctcccggccaccgtactgttccgctcccagaagccccgggcggcggaagtcgtcactcttaagaagggacggggccccacgctgcgcacccgcgggtttgctatggcgatgagcagcggcggcagtggtggcggcgtcccggagcaggaggattccgtgctgttccggcgcggcacaggccagagcgatgattctgacatttgggatgatacagcactgataaaagcatatgataaagctgtggcttcatttaagcatgctctaaagaatggtgacatttgtgaaacttcgggtaaaccaaaaaccacacctaaaagaaaacctgctaagaagaataaaagccaaaagaagaatactgcagcttccttacaacagtggaaagttggggacaaatgttctgccatttggtcagaagacggttgcatttacccagctaccattgcttcaattgattttaagagagaaacctgtgttgtggtttacactggatatggaaatagagaggagcaaaatctgtccgatctactttccccaatctgtgaagtagctaataatatagaacagaatgctcaagagaatgaaaatgaaagccaagtttcaacagatgaaagtgagaactccaggtctcctggaaataaatcagataacatcaagcccaaatctgctccatggaactcttttctccctccaccaccccccatgccagggccaagactgggaccaggaaagccaggtctaaaattcaatggcccaccaccgccaccgccaccaccaccaccccacttactatcatgctggctgcctccatttccttctggaccaccaataattcccccaccacctcccatatgtccagattctcttgatgatgctgatgctttgggaagtatgttaatttcatggtacatgagtggctatcatactggctattatatgggtttcagacaaaatcaaaaagaaggaaggtgctcacattccttaaattaaggagaaatgctggcatagagcagcactaaatgacaccactaaagaaacgatcagacagatctggaatgtgaagcgttatagaagataactggcctcatttcttcaaaatatcaagtgttgggaaagaaaaaaggaagtggaatgggtaactcttcttgattaaaagttatgtaataaccaaatgcaatgtgaaatattttactggactcttttgaaaaaccatctgtaaaagactggggtgggggtgggaggccagcacggtggtgaggcagttgagaaaatttgaatgtggattagattttgaatgatattggataattattggtaattttatggcctgtgagaagggtgttgtagtttataaaagactgtcttaatttgcatacttaagcatttaggaatgaagtgttagagtgtcttaaaatgtttcaaatggtttaacaaaatgtatgtgaggcgtatgtggcaaaatgttacagaatctaactggtggacatggctgttcattgtactgtttttttctatcttctatatgtttaaaagtatataataaaaatatttaattttttttta

SEQ ID NO: 1016 - protein, 294 aa, Homo sapiens
MAMSSGGSGGGVPEQEDSVLFRRGTGQSDDSDIWDDTALIKAYDKAVASFKHALKNGDICETSGKPKTTPKRKPAKKNKSQKKNTAASLQQWKVGDKCSAIWSEDGCIYPATIASIDFKRETCVVVYTGYGNREEQNLSDLLSPICEVANNIEQNAQENENESQVSTDESENSRSPGNKSDNIKPKSAPWNSFLPPPPPMPGPRLGPGKPGLKFNGPPPPPPPPPPHLLSCWLPPFPSGPPIIPPPPPICPDSLDDADALGSMLISWYMSGYHTGYYMGFRQNQKEGRCSHSLN

SEQ ID NO: 1017 - DNA, 1525 bp, Homo sapiens
ccacaaatgtgggagggcgataaccactcgtagaaagcgtgagaagttactacaagcggtcctcccggccaccgtactgttccgctcccagaagccccgggcggcggaagtcgtcactcttaagaagggacggggccccacgctgcgcacccgcgggtttgctatggcgatgagcagcggcggcagtggtggcggcgtcccggagcaggaggattccgtgctgttccggcgcggcacaggccagagcgatgattctgacatttgggatgatacagcactgataaaagcatatgataaagctgtggcttcatttaagcatgctctaaagaatggtgacatttgtgaaacttcgggtaaaccaaaaaccacacctaaaagaaaacctgctaagaagaataaaagccaaaagaagaatactgcagcttccttacaacagtggaaagttggggacaaatgttctgccatttggtcagaagacggttgcatttacccagctaccattgcttcaattgattttaagagagaaacctgtgttgtggtttacactggatatggaaatagagaggagcaaaatctgtccgatctactttccccaatctgtgaagtagctaataatatagaacagaatgctcaagagaatgaaaatgaaagccaagtttcaacagatgaaagtgagaactccaggtctcctggaaataaatcagataacatcaagcccaaatctgctccatggaactcttttctccctccaccaccccccatgccagggccaagactgggaccaggaaagataattcccccaccacctcccatatgtccagattctcttgatgatgctgatgctttgggaagtatgttaatttcatggtacatgagtggctatcatactggctattatatgggtttcagacaaaatcaaaaagaaggaaggtgctcacattccttaaattaaggagaaatgctggcatagagcagcactaaatgacaccactaaagaaacgatcagacagatctggaatgtgaagcgttatagaagataactggcctcatttcttcaaaatatcaagtgttgggaaagaaaaaaggaagtggaatgggtaactcttcttgattaaaagttatgtaataaccaaatgcaatgtgaaatattttactggactcttttgaaaaaccatctgtaaaagactggggtgggggtgggaggccagcacggtggtgaggcagttgagaaaatttgaatgtggattagattttgaatgatattggataattattggtaattttatggcctgtgagaagggtgttgtagtttataaaagactgtcttaatttgcatacttaagcatttaggaatgaagtgttagagtgtcttaaaatgtttcaaatggtttaacaaaatgtatgtgaggcgtatgtggcaaaatgttacagaatctaactggtggacatggctgttcattgtactgtttttttctatcttctatatgtttaaaagtatataataaaaatatttaattttttttta

SEQ ID NO: 1018 - protein, 262 aa, Homo sapiens
MAMSSGGSGGGVPEQEDSVLFRRGTGQSDDSDIWDDTALIKAYDKAVASFKHALKNGDICETSGKPKTTPKRKPAKKNKSQKKNTAASLQQWKVGDKCSAIWSEDGCIYPATIASIDFKRETCVVVYTGYGNREEQNLSDLLSPICEVANNIEQNAQENENESQVSTDESENSRSPGNKSDNIKPKSAPWNSFLPPPPPMPGPRLGPGKIIPPPPPICPDSLDDADALGSMLISWYMSGYHTGYYMGFRQNQKEGRCSHSLN

SEQ ID NO: 1019 - DNA, 1623 bp, Homo sapiens
ccacaaatgtgggagggcgataaccactcgtagaaagcgtgagaagttactacaagcggtcctcccggccaccgtactgttccgctcccagaagccccgggcggcggaagtcgtcactcttaagaagggacggggccccacgctgcgcacccgcgggtttgctatggcgatgagcagcggcggcagtggtggcggcgtcccggagcaggaggattccgtgctgttccggcgcggcacaggccagagcgatgattctgacatttgggatgatacagcactgataaaagcatatgataaagctgtggcttcatttaagcatgctctaaagaatggtgacatttgtgaaacttcgggtaaaccaaaaaccacacctaaaagaaaacctgctaagaagaataaaagccaaaagaagaatactgcagcttccttacaacagtggaaagttggggacaaatgttctgccatttggtcagaagacggttgcatttacccagctaccattgcttcaattgattttaagagagaaacctgtgttgtggtttacactggatatggaaatagagaggagcaaaatctgtccgatctactttccccaatctgtgaagtagctaataatatagaacagaatgctcaagagaatgaaaatgaaagccaagtttcaacagatgaaagtgagaactccaggtctcctggaaataaatcagataacatcaagcccaaatctgctccatggaactcttttctccctccaccaccccccatgccagggccaagactgggaccaggaaagccaggtctaaaattcaatggcccaccaccgccaccgccaccaccaccaccccacttactatcatgctggctgcctccatttccttctggaccaccaataattcccccaccacctcccatatgtccagattctcttgatgatgctgatgctttgggaagtatgttaatttcatggtacatgagtggctatcatactggctattatatgggttttagacaaaatcaaaaagaaggaaggtgctcacattccttaaattaaggagaaatgctggcatagagcagcactaaatgacaccactaaagaaacgatcagacagatctggaatgtgaagcgttatagaagataactggcctcatttcttcaaaatatcaagtgttgggaaagaaaaaaggaagtggaatgggtaactcttcttgattaaaagttatgtaataaccaaatgcaatgtgaaatattttactggactcttttgaaaaaccatctgtaaaagactgaggtgggggtgggaggccagcacggtggtgaggcagttgagaaaatttgaatgtggattagattttgaatgatattggataattattggtaattttatggcctgtgagaagggtgttgtagtttataaaagactgtcttaatttgcatacttaagcatttaggaatgaagtgttagagtgtcttaaaatgtttcaaatggtttaacaaaatgtatgtgaggcgtatgtggcaaaatgttacagaatctaactggtggacatggctgttcattgtactgtttttttctatcttctatatgtttaaaagtatataataaaaatatttaatttttttttaaa

SEQ ID NO: 1020 - protein, 294 aa, Homo sapiens; identical to SEQ ID NO: 1016

SEQ ID NO: 1021 - DNA, 1569 bp, Homo sapiens
ccacaaatgtgggagggcgataaccactcgtagaaagcgtgagaagttactacaagcggtcctcccggccaccgtactgttccgctcccagaagccccgggcggcggaagtcgtcactcttaagaagggacggggccccacgctgcgcacccgcgggtttgctatggcgatgagcagcggcggcagtggtggcggcgtcccggagcaggaggattccgtgctgttccggcgcggcacaggccagagcgatgattctgacatttgggatgatacagcactgataaaagcatatgataaagctgtggcttcatttaagcatgctctaaagaatggtgacatttgtgaaacttcgggtaaaccaaaaaccacacctaaaagaaaacctgctaagaagaataaaagccaaaagaagaatactgcagcttccttacaacagtggaaagttggggacaaatgttctgccatttggtcagaagacggttgcatttacccagctaccattgcttcaattgattttaagagagaaacctgtgttgtggtttacactggatatggaaatagagaggagcaaaatctgtccgatctactttccccaatctgtgaagtagctaataatatagaacagaatgctcaagagaatgaaaatgaaagccaagtttcaacagatgaaagtgagaactccaggtctcctggaaataaatcagataacatcaagcccaaatctgctccatggaactcttttctccctccaccaccccccatgccagggccaagactgggaccaggaaagccaggtctaaaattcaatggcccaccaccgccaccgccaccaccaccaccccacttactatcatgctggctgcctccatttccttctggaccaccaataattcccccaccacctcccatatgtccagattctcttgatgatgctgatgctttgggaagtatgttaatttcatggtacatgagtggctatcatactggctattatatggaaatgctggcatagagcagcactaaatgacaccactaaagaaacgatcagacagatctggaatgtgaagcgttatagaagataactggcctcatttcttcaaaatatcaagtgttgggaaagaaaaaaggaagtggaatgggtaactcttcttgattaaaagttatgtaataaccaaatgcaatgtgaaatattttactggactcttttgaaaaaccatctgtaaaagactgaggtgggggtgggaggccagcacggtggtgaggcagttgagaaaatttgaatgtggattagattttgaatgatattggataattattggtaattttatggcctgtgagaagggtgttgtagtttataaaagactgtcttaatttgcatacttaagcatttaggaatgaagtgttagagtgtcttaaaatgtttcaaatggtttaacaaaatgtatgtgaggcgtatgtggcaaaatgttacagaatctaactggtggacatggctgttcattgtactgtttttttctatcttctatatgtttaaaagtatataataaaaatatttaatttttttttaaa

SEQ ID NO: 1022 - protein, 282 aa, Homo sapiens
MAMSSGGSGGGVPEQEDSVLFRRGTGQSDDSDIWDDTALIKAYDKAVASFKHALKNGDICETSGKPKTTPKRKPAKKNKSQKKNTAASLQQWKVGDKCSAIWSEDGCIYPATIASIDFKRETCVVVYTGYGNREEQNLSDLLSPICEVANNIEQNAQENENESQVSTDESENSRSPGNKSDNIKPKSAPWNSFLPPPPPMPGPRLGPGKPGLKFNGPPPPPPPPPPHLLSCWLPPFPSGPPIIPPPPPICPDSLDDADALGSMLISWYMSGYHTGYYMEMLA

SEQ ID NO: 1023 - DNA, 1527 bp, Homo sapiens
ccacaaatgtgggagggcgataaccactcgtagaaagcgtgagaagttactacaagcggtcctcccggccaccgtactgttccgctcccagaagccccgggcggcggaagtcgtcactcttaagaagggacggggccccacgctgcgcacccgcgggtttgctatggcgatgagcagcggcggcagtggtggcggcgtcccggagcaggaggattccgtgctgttccggcgcggcacaggccagagcgatgattctgacatttgggatgatacagcactgataaaagcatatgataaagctgtggcttcatttaagcatgctctaaagaatggtgacatttgtgaaacttcgggtaaaccaaaaaccacacctaaaagaaaacctgctaagaagaataaaagccaaaagaagaatactgcagcttccttacaacagtggaaagttggggacaaatgttctgccatttggtcagaagacggttgcatttacccagctaccattgcttcaattgattttaagagagaaacctgtgttgtggtttacactggatatggaaatagagaggagcaaaatctgtccgatctactttccccaatctgtgaagtagctaataatatagaacagaatgctcaagagaatgaaaatgaaagccaagtttcaacagatgaaagtgagaactccaggtctcctggaaataaatcagataacatcaagcccaaatctgctccatggaactcttttctccctccaccaccccccatgccagggccaagactgggaccaggaaagataattcccccaccacctcccatatgtccagattctcttgatgatgctgatgctttgggaagtatgttaatttcatggtacatgagtggctatcatactggctattatatgggttttagacaaaatcaaaaagaaggaaggtgctcacattccttaaattaaggagaaatgctggcatagagcagcactaaatgacaccactaaagaaacgatcagacagatctggaatgtgaagcgttatagaagataactggcctcatttcttcaaaatatcaagtgttgggaaagaaaaaaggaagtggaatgggtaactcttcttgattaaaagttatgtaataaccaaatgcaatgtgaaatattttactggactcttttgaaaaaccatctgtaaaagactgaggtgggggtgggaggccagcacggtggtgaggcagttgagaaaatttgaatgtggattagattttgaatgatattggataattattggtaattttatggcctgtgagaagggtgttgtagtttataaaagactgtcttaatttgcatacttaagcatttaggaatgaagtgttagagtgtcttaaaatgtttcaaatggtttaacaaaatgtatgtgaggcgtatgtggcaaaatgttacagaatctaactggtggacatggctgttcattgtactgtttttttctatcttctatatgtttaaaagtatataataaaaatatttaatttttttttaaa

SEQ ID NO: 1024 - protein, 262 aa, Homo sapiens; identical to SEQ ID NO: 1018

SEQ ID NO: 1025 - DNA, 1473 bp, Homo sapiens
ccacaaatgtgggagggcgataaccactcgtagaaagcgtgagaagttactacaagcggtcctcccggccaccgtactgttccgctcccagaagccccgggcggcggaagtcgtcactcttaagaagggacggggccccacgctgcgcacccgcgggtttgctatggcgatgagcagcggcggcagtggtggcggcgtcccggagcaggaggattccgtgctgttccggcgcggcacaggccagagcgatgattctgacatttgggatgatacagcactgataaaagcatatgataaagctgtggcttcatttaagcatgctctaaagaatggtgacatttgtgaaacttcgggtaaaccaaaaaccacacctaaaagaaaacctgctaagaagaataaaagccaaaagaagaatactgcagcttccttacaacagtggaaagttggggacaaatgttctgccatttggtcagaagacggttgcatttacccagctaccattgcttcaattgattttaagagagaaacctgtgttgtggtttacactggatatggaaatagagaggagcaaaatctgtccgatctactttccccaatctgtgaagtagctaataatatagaacagaatgctcaagagaatgaaaatgaaagccaagtttcaacagatgaaagtgagaactccaggtctcctggaaataaatcagataacatcaagcccaaatctgctccatggaactcttttctccctccaccaccccccatgccagggccaagactgggaccaggaaagataattcccccaccacctcccatatgtccagattctcttgatgatgctgatgctttgggaagtatgttaatttcatggtacatgagtggctatcatactggctattatatggaaatgctggcatagagcagcactaaatgacaccactaaagaaacgatcagacagatctggaatgtgaagcgttatagaagataactggcctcatttcttcaaaatatcaagtgttgggaaagaaaaaaggaagtggaatgggtaactcttcttgattaaaagttatgtaataaccaaatgcaatgtgaaatattttactggactcttttgaaaaaccatctgtaaaagactgaggtgggggtgggaggccagcacggtggtgaggcagttgagaaaatttgaatgtggattagattttgaatgatattggataattattggtaattttatggcctgtgagaagggtgttgtagtttataaaagactgtcttaatttgcatacttaagcatttaggaatgaagtgttagagtgtcttaaaatgtttcaaatggtttaacaaaatgtatgtgaggcgtatgtggcaaaatgttacagaatctaactggtggacatggctgttcattgtactgtttttttctatcttctatatgtttaaaagtatataataaaaatatttaatttttttttaaa

SEQ ID NO: 1026 - protein, 250 aa, Homo sapiens
MAMSSGGSGGGVPEQEDSVLFRRGTGQSDDSDIWDDTALIKAYDKAVASFKHALKNGDICETSGKPKTTPKRKPAKKNKSQKKNTAASLQQWKVGDKCSAIWSEDGCIYPATIASIDFKRETCVVVYTGYGNREEQNLSDLLSPICEVANNIEQNAQENENESQVSTDESENSRSPGNKSDNIKPKSAPWNSFLPPPPPMPGPRLGPGKIIPPPPPICPDSLDDADALGSMLISWYMSGYHTGYYMEMLA

SEQ ID NO: 1027 - DNA, 6757 bp, Homo sapiens
ttatatggtttggctctgtccgcacccaaatctcatcttgaattgtaacaattcccatgtgtcaagggtggggccaggtggagataactgaatcatggaggcagtttcccccatgctgttctcatggtagtgaataagtctcatgaggtctgatggttttataaatggatgttcccctgcacatgctctctcctgcccaccatgtctgactaaattttgtatttttactagagacgggctttcactatgttggccaggctggcctccaactcctgatctcgtgatccgtccaccccgacctcccaaagtgctaggatcataggcataagccaccacacccggcctcttttttttctttttcttttttttatctggagactgagttttgcactcgttgcccaggctggagtgcaatggtgcgatctcagctcactgcagtctccacctcagcaggagagcaggaatcttcagtgatccacgggcaaatatgcagccattgtgggcacctgttcctcccgcgacctttgtgcccacgtctctccctccagtacctactgcacgaccccccacgtccgcctcctgccattgccagcaggtgccttgcgcgggtacctggctgtgcttattcatccattatggtcgctctgtcactggtgccattatgtgctcacatgcccactccctcaggtttagaagtcgcgttgcccggcaacagaacaatctgctggcttagcctttggccaagttggcagctggacgaggacgctcagagcccagctcttgagagttcaagtatccgacagttccccactgctcccaggagcggttacccgggcactctgtgcccctcattcctgtttgggccaaggccgaggacctgcgagtagggctcagttgcctggagccccttcagcccatcccccagttcactttgcttgtgggatctccccgttgctcctgcccctggactgagtggcaggccatcctacaaacacccggacactcgacatcactggtgtcaagacaactctaagaaggttttccgtgatcctgcaagacctgtgttccatcctggtgattccgtcttcaatttcactgcacaggtaccacagtaagccagtgctgtgtgctccgagttccagggcatcccccagcccagccactacactgagcacaaggactctgtggggcccaggagcaggtagtcacccctttggggtccacaacacccggctgtccccagacttgtgtccagggaagatagtgttgagggccctcaaggagagcggggcagggatgcctgagcaggacaaggaccccagagtccaagaaaatcctgatgatcagagaacggtccccgaggtcaccggggatgcacggtctgcattttggcccctgcgggacaatggaggcccctctccctttgtgcccaggcccgggcctctgcagacagacctccacgcccagagctcagaaatcagatataaccacacatcccagacatcctggacgagctcgagcaccaaacgaaatgccatctccagctcctacagctccacgggaggcttgccggggctaaagcagaggagggggccagcctcatcccgctgccagctgaccctcagttactcaaagacagtgagtgaggacaggcctcaggctgtctcttcgggtcacacacggtgtgaaaagggggcagatacagcaccagggcagacaatcgccccaacgggtggctcccccacatcccaggactctaggccccgtagacgcaagattcccctgctgccacgcaggcgaggggagcctttgatgctgccacatcgcttagagctggggtaccgggtcacggctgaagacctgcacctggaaaaagagaaggcattccagcgcatcaacagtgcactgcacgttgaggacaaggccatctcggactgcagaccctcacggccttcccacactttgtcctcacttgcaacaggggcttcgggtgggcctcccgtttctaaagcacccactatggatgcacagcaggacagacccaagtcccaagactgcctgggcctagtggcccccctagcatctgcagcagaggtccccgctacagctcccgtgtctgggaaaaagcacagaccaccaggacccctgttctccaactcagatccccttccggccaactcttcccactcccgggactcagcccaggtcacctcgatgattcctgtccccttgacagctgcaagcagggatgccggcatgagaagaacaaggtcggctcctgcagctgccgcagcagcccctcccccctccacattgaaccccacgtcggggtcactactcaatgcagtggatggaggcccctcacatttcttggcctcagccacagctgcagcacgtgtccagaggtcagaagtgagatataaccagagatcccagacctcccggaccagatcgtgcctcaaacgaaatgccagctccagctcccacagctctacggaaggcctcccgcaactaaagcggaggagggggccagcctcatcccactgccagctggcccacagttcctcaaacacagtgagtgaggatggacctcaggctgtctcttcgggtcaccgctgtgaaaacaaggcaggtacagcaccagggcagacacttgcccccaggggtggctcccccagatcccaggcctctaggccccacatcaacactgcactgcacgttgaggacaaggccatctcggactgcagaccctcacgaccttcccacactttgtcctcatttgcaacaggggcttcgggtgggcctcccgtttctaaagcacccactatggacgcacagcaggacagacccaagtcccaagactgcctgggcctagtggcccccctagcatctgctgcagaggtcccctctacagctcccgtgtctgggaagaagcacagaccaccaggacccctgttctcctcctcagatccccttcctgccacctcttcccactcccgggactcagcccaggtcacctcgctgattcctgccaccttcacagctgcaagcagggatgccggcatgagaagaacaaggtcggctcctgcagctgccgcagcagcccctcccccctccacattgaaccccacgtcggggtcactactcaatgcagtggatggaggcccctcacatttcttggcctcagccacagctgcagcacgtgcccagaggtcagaagtgagatataaccagagatcccagacctcccggaccagatcctgcctcaaacgaaatgccagctccagctccagctccagctcccacagctctacggaaggcctccaggaactaaagcggaggagggggccagcctcatcccactgccagctggcccacagttccccaaacacagtgagtgaggacggacctcaggctgtctcttcgggtcaccgctgtgaaaacaaggcaggtacagcaccagggcagacactcgcccccaggggtggctcccccagatcccaggcctctaggccccgcatcaacactgcactgcacgttgaggacaaggccatctcggactgcagaccctcacggccttcccacactttgtcctcacttgcaacaggggcttcgggtgggcctcccgtttctaaagcacccactatggatgcacagcagcacagacccaagtcccaagactgcctgggcctactggcccccctagcatctgctgcagaggtcccctctacagctcccgtgtctgggaagaagcacagaccaccaggacccctgttctcctcctcagatccccttcctgccacctcttaccactcacgggactcagcccaggtcacctcgctgattcccgcgcccttcacagctgcaagcagcgatgccggcatgagaagaacaaggcctggcacctcggctcctgcagctgcagcagcagcccctcccccctccacattgaaccccacgtcggggtcactactcaatgcagtggatggaagcccctcacatttcttggcctcagccacagctgcagcacgtgtccagaggtcagaagtgagatataaccagagatcccagacctcccggaccagatcctgcctccaaggaaatgccagctccagctcccacagctctacggaaggcctcccgcaactaaagcggaggagggggccagcctcatcccactgccagctggcccacagttcctcaaacacagtgagtgaggacggacctcaggctgtctcttcgggtcacacccgctgtgagaagaaggcaggtacagcaccagggcagacacttgcccccaggggtggctcccccagatcccaggcctctaggccccgcatcaacactgcactgcacgttgaggacaaggccatctcggactgcagaccctcacggccttcccacactttgtcctcacttgcaacaggggcttcgggtgggcctcccgtttctaaagcacccactatggatgcacagcaggacagacccaagtcccaagactgcctgggcctactggcccccctagcatctgctgcagaggtctcctctacagctcccatgtctgggaagaagcacagaccaccaggacccctgttctcctcctcagatccccttcctgccacctcttcccactccggggactcagcccaggacacctcgctgattcctgcccccttcacacctgcaagcagggatgccggcatcagaagaatgtttcgtgttcgaaattgtttgaggggtttgggtttatttttgttggttttttcttttttttttttgcttacgtgggcatccttcagcttttaataatctgaaaaattctatttacccattgtcaatgtgtataaattaatctcagtcaattttatacaataaaaggtgaacttttatccatcaaacaataatttaacaaaaaatgtaccggaagaagaatgttcattacaaatataggaaacataaatattaccaaatattggcaagcactaaaatgttcagaaatataagtctattacagttatagctctctcaagcaaaaaaacagcagagaaaaacttagttttcctgaggggctatttatttacttagggatttgttaaaaggtcaaatggggtcacacagaatactaagaagagctgttcacccaggcctcactaagaactcttcttcatgcagtagctatatagtaatatgacaactgctcctacgacccaaagaggaactacagcaactactctttagcatctgttgctcccaactctgctttgcaattatatgactcaagcattctggctccgttaactattactgctgttactcccaagtaaattccctctaaaaaataaaaatttttaaagctgtaatttaagctctctgctgcctcatgacttcaattccatcagagttacgcattgtttcctctgtacatctttgctctgcttccattgctaattccctagtaaagtgttgtatattcaaagttccaaagaaacagaatatccaagacatcaccaatcatccaaaacacagtgtaggaggccacagttaagagaagcaacaccattagctctttttataggctcgagaacaacaggatgctttggtcctgtatcagcaggatgctttttgggtagatcctactgccaccctactatcgggtagatcctactgtcaccctagctatgggcacatgtcagagtcccatgtaataaaggagacaaaaggaaaccaccacgagtataaactaagaaaagtactccaaggtttctaagaatggagctgtataactcactttgccccgtttgttacttctccacggtacttaccaccacctattacatatattttgtttatagtcagtcttcccccattagaatgaaagttccgtgaggataggactatacagtcagccctcagtatccatgggggactggtttcaggatctcctgagggtaacaaaggatactcaagtccctgatataaaatgacatagtatttgcacatcacctttgcacatcctcccatatacttcatatcaactctagatcactcataatatccgatgtaaatgtcatgcaaatagttattgtactatattgtgtaaggaataaggacaagaaaaaagtctgtacatgttcagtacagacgcaatttttttttccaatatttccaatccttggttgccttaacggatgtagaacccaggaataagttctggtgtcctattgcatagtaggatgagtatagttaacaataacatattatatatttgaaaatagccagaagagtagattttgaattttctccctacagaaaaatcattatgcaaattaccctgatttgatcattacacattgagtacatgtattaaaacatcacattctaccccatatatatgtacagttattatgtgtccataaaaatttaatgtcaatgtgtgaaataaaatgaaaaaataaaaatttttaaagctgtaattatctccatctggtaggaatatatacaatctgaaataaaaaatatatttgtaattgttaggacaaaatagattatacattaagtctgcaaattataaattataaaattctcacagaacctgaaaaattattgatactgttaaatatttaaaaagctgtccttggagagaaagaaacctatcagatttacatcaacaagtgtaatatgtcagcctattaccatctgctacagactgcatgtttgtgttccctcaaaattcatatgataggcccggcgcggtggc

SEQ ID NO: 1028 - protein, 1169 aa, Homo sapiens
MPEQDKDPRVQENPDDQRTVPEVTGDARSAFWPLRDNGGPSPFVPRPGPLQTDLHAQSSEIRYNHTSQTSWTSSSTKRNAISSSYSSTGGLPGLKQRRGPASSRCQLTLSYSKTVSEDRPQAVSSGHTRCEKGADTAPGQTIAPTGGSPTSQDSRPRRRKIPLLPRRRGEPLMLPHRLELGYRVTAEDLHLEKEKAFQRINSALHVEDKAISDCRPSRPSHTLSSLATGASGGPPVSKAPTMDAQQDRPKSQDCLGLVAPLASAAEVPATAPVSGKKHRPPGPLFSNSDPLPANSSHSRDSAQVTSMIPVPLTAASRDAGMRRTRSAPAAAAAAPPPSTLNPTSGSLLNAVDGGPSHFLASATAAARVQRSEVRYNQRSQTSRTRSCLKRNASSSSHSSTEGLPQLKRRRGPASSHCQLAHSSSNTVSEDGPQAVSSGHRCENKAGTAPGQTLAPRGGSPRSQASRPHINTALHVEDKAISDCRPSRPSHTLSSFATGASGGPPVSKAPTMDAQQDRPKSQDCLGLVAPLASAAEVPSTAPVSGKKHRPPGPLFSSSDPLPATSSHSRDSAQVTSLIPATFTAASRDAGMRRTRSAPAAAAAAPPPSTLNPTSGSLLNAVDGGPSHFLASATAAARAQRSEVRYNQRSQTSRTRSCLKRNASSSSSSSSHSSTEGLQELKRRRGPASSHCQLAHSSPNTVSEDGPQAVSSGHRCENKAGTAPGQTLAPRGGSPRSQASRPRINTALHVEDKAISDCRPSRPSHTLSSLATGASGGPPVSKAPTMDAQQHRPKSQDCLGLLAPLASAAEVPSTAPVSGKKHRPPGPLFSSSDPLPATSYHSRDSAQVTSLIPAPFTAASSDAGMRRTRPGTSAPAAAAAAPPPSTLNPTSGSLLNAVDGSPSHFLASATAAARVQRSEVRYNQRSQTSRTRSCLQGNASSSSHSSTEGLPQLKRRRGPASSHCQLAHSSSNTVSEDGPQAVSSGHTRCEKKAGTAPGQTLAPRGGSPRSQASRPRINTALHVEDKAISDCRPSRPSHTLSSLATGASGGPPVSKAPTMDAQQDRPKSQDCLGLLAPLASAAEVSSTAPMSGKKHRPPGPLFSSSDPLPATSSHSGDSAQDTSLIPAPFTPASRDAGIRRMFRVRNCLRGLGLFLLVFSFFFLLTWASFSF

SEQ ID NO: 1029 - DNA, 7564 bp, Homo sapiens
ttatatggtttggctctgtccgcacccaaatctcatcttgaattgtaacaattcccatgtgtcaagggtggggccaggtggagataactgaatcatggaggcagtttcccccatgctgttctcatggtagtgaataagtctcatgaggtctgatggttttataaatggatgttcccctgcacatgctctctcctgcccaccatgtctgactaaattttgtatttttactagagacgggctttcactatgttggccaggctggcctccaactcctgatctcgtgatccgtccaccccgacctcccaaagtgctaggatcataggcataagccaccacacccggcctcttttttttctttttcttttttttatctggagactgagttttgcactcgttgcccaggctggagtgcaatggtgcgatctcagctcactgcagtctccacctcagcaggagagcaggaatcttcagtgatccacgggcaaatatgcagccattgtgggcacctgttcctcccgcgacctttgtgcccacgtctctccctccagtacctactgcacgaccccccacgtccgcctcctgccattgccagcaggtgccttgcgcgggtacctggctgtgcttattcatccattatggtcgctctgtcactggtgccattatgtgctcacatgcccactccctcaggtttagaagtcgcgttgcccggcaacagaacaatctgctggcttagcctttggccaagttggcagctggacgaggacgctcagagcccagctcttgagagttcaagtatccgacagttccccactgctcccaggagcggttacccgggcactctgtgcccctcattcctgtttgggccaaggccgaggacctgcgagtagggctcagttgcctggagccccttcagcccatcccccagttcactttgcttgtgggatctccccgttgctcctgcccctggactgagtggcaggccatcctacaaacacccgcacactcgacatcagtggtgtcaagacaactctaagaaggttttccgtgatcctgcaagacctgtgttccatcctggtgattctgtcttcaatttcactgcacaggtaccacagtaagccagtgctgtgtgctccgagttccagggcatcccccagctcagccactacactgagcacaaggactctgtggggcccaggagcaggtagtcacccctttggggtccacaacacccggctgtccccagacttgtgtccagggaagatagtgttgagggccctcaaggagagcggggcagggatgcctgagcaggacaaggaccccagagtccaagaaaatcctgatgatcagagaacggtccccgaggtcaccggggatgcacggtctgcattttggcccctgcgggacaatggaggcccctctccctttgtgcccaggcccgggcctctgcagacagacctccacgcccagagctcagaaatcagatataaccacacatcccagacatcctggacgagctcgagcaccaaacgaaatgccatctccagctcctacagctccacgggaggcttgccggggctaaagcagaggagggggccagcctcatcccgctgccagctgaccctcagttactcaaagacagtgagtgaggacaggcctcaggctgtctcttcgggtcacacacggtgtgaaaagggggcagatacagcaccagggcagacaatcgccccaacgggtggctcccccagatcccaggactctaggccccgtagacgcaagattcccctgctgccacgcaggcgaggggagcctttgatgctgccacctcccttagagctggggtaccgggtcacggctgaagacctgcacctggaaaaagagacggcattccagcgcatcaacagtgcactgcacgttgaggacaaggccatcccggactgcagaccctcacggccttcccacactttgtcctcacttgcaacaggggcttcgggtgggcctcccgtttctaaagcacccactatggatgcacagcaggacagacccaagtcccaagactgcctgggcctagtggcccccctagcatctgctgcagaggtccccgctacagctcccgtgtctgggaagaagcacagaccaccaggacccctgttctcctcctcagatccccttcctgccaactcttcccactcccgggactcagcccaggtcacctcgatgattcctgcccccttcacagctgcaagcagggatgccggcatgagaagaacaaggtcggctcctgcagctgccgcagcagcccctcccccctccacattgaaccccacgtcggggtcactactcaatgcagtggatggaggcccctcacatttcttggcctcagccacagctgcagcacgtgcccagaggtcagaagtgagatataaccagagatcccagacctcccggaccagatcctgcctcaaacgaaatgccagctccagctcccacagctctacggaaggcctccaggaagtaaagcggaggagggggccagcctcatcccactgccagctggccctcagttcctcaaacacagtgagtgaggacggacctcaggctgtctcttcgggtcaccactgtgaaaacaaggcaggtacagcaccagggcagacacttgcccccaggggtggctcccccagatcccaggcctctaggccccacatcaacactgcactgcacgttgaggacaaggccatctcggactgcagaccctcacggccttcccacactttgtcctcacttgcaacaggggcttcgggtgggcctcccgtttctaaagcacccactatggatgcacagcaggacagacccaagtcccaagactccctgggcctactggcccccctagcatctgctgcagaggtcccctctacagctcccgtgtctgggaagaagcacagaccaccaggacccctgttctcctcctcagatccccttcctgccacctcttaccactcccgggacacagcacaggtcacctcgctgattcctgccaccttcacagctgcaagcagggatgccggcatgagaagaacaaggtcggctcctgcagctgccacagcagcccctcccccctccacattgaacaacacgtcggggtcactactcaatgcagtggatggaggcccctcacatttcttggcctcagccacagctgcagcacgtgcccagaggtcagaagtgagatataaccagagatcccagacctcccggaccagatcctgcctcaaacgaaatgccagctccagctccagctcccacagctctacggaaggcctccaggaactaaagcggaggagggggccagcctcatcccactgccagctggcccacagttcctcaaacacagtgagtgaggacggacctcaggctgtctcttcgggtcaccgctgtgaaaacaaggcaggtacagcaccagggcagacactcgcccccaggggaggctcccccagatcccaggcctctaggccccacatcaacagtgcactgtacgttgaggacaaggccatctcggactgcagaccctcacggccttcccacactttgtcctcacttgcaacaggggcttcgggtgggcctcccgtttctaaagcacccactatggacgcacagcaggacagacccaagtcccaagactgcctgggcctagtggcccccctagcatctgctgcagaggtcccctctacagctcccgtgtctgggaagaagcacagaccaccaggacccctgttctcctcctcagatccccttcctgccacctcttcccactcccgggactcagcccaggtcacctcgctgattcctgccaccttcacagctgcaagcagggatgccggcatgagaagaacaaggcctggcacctcggctcctgcagctgccgcagcagcccttcccccctccacattgaaccccacgtcggggtcgctactcaatgcagtggatggaggcccctcacatttcttggcctcagccacagctgcagcacgtgcccagaggtcagaagtgagatataaccagagatcccagacctcccggaccagatcctgcctcaaacgaaatgccagctccagctcccacagctctacggaaggcctccaggaactaaagcggaggagggggccagcctcatcccactgccagctggcccacagttcctcaaacacagtgagtgaggacggacctcaggctgtctcttcgggtcaccgctgtgaaaacaaggcaggtacagcaccagggcagacactcgcccccaggggtggctaccccagatcccaggcctctaggccccgcatcaacagtgcactgcacgttgaggacaaggccatctcggactgcagaccctcacggccttcccacactttgtcctcacttgcaacaggggcttcgggtgggcctcccgtttctaaagcacccactatggacgcacagcaggacagacccaagtcccaagactgcctgggcctactggcccccctagcatctgctgcagaggtctcctctacagctcccgtgtctgggaagaagcacagaccaccaggacccctgttctcctcctcagatccccttcctgccacctcttcccactcccgggactcagcccaggtcacctcgctgattcctgccaccttcacagctgcaagcagggatgccggcatgagaagaacaaggcctggcacctcggctcctgcagctgccgcagcagcccttcccccctccacattgaaccccacgtcggggtcgctactcaatgcagtggatggaggcccctcacatttcttggcctcagccacagctgcagcacgtgcccagaggtcagaagtgagatataaccagagatcccagacctcccggaccagatcctgcctcaaacgaaatgccagctccagctcccacagctctacggaaggcctccaggaactaaagcggaggagggggccagcctcatcccactgccagctggcccacagttcctcaaacacagtgagtgaggacggacctcaggctgtctcttcgggtcaccgctgtgaaaacaaggcaggtacagcaccagggcagacactcgcccccaggggtggctaccccagatcccaggcctctaggccccgcatcaacagtgcactgcacgttgaggacaaggccatctcggactgcagaccctcacggccttcccacactttgtcctcacttgcaacaggggcttcgggtgggcctcccgtttctaaagcacccactatggatgcacagcaggacagacccaagtcccaagactgcctgggcctactggcccccctagcatctgctgcagaggtctcctctacagctcccgtgtctgggaagaagcacagaccaccaggacccctgttctcctcctcagatccccttcctgccacctcttcccactccggggactcagcccaggacacctcgctgattcctgcccccttcacacctgcaagcagggatgccggcatcagaagaatgtttcgtgttcgaaactgtttgaggggtttgggtttatttttgttggttttttcttttttttttttgcttacgtgggcatccttcagcttttaataatctgaaaaattctatttacccattgtcaatgtgtataaattaatctcagtcaattttatacaataaaaggtgaacttttatccatcaaacaataatttaacaaaaaatgtaccggaagaagaatgttcattacaaatataggaaacataaatattaccaaatattggcaagcactaaaatgttcagaaatataagtctattacagttatagctctctcaagcaaaaaaacagcagagaaaaacttagttttcctgaggggctatttatttacttagggatttgttaaaaggtcaaatggggtcacacagaatactaagaagagctgttcacccaggcctcactaagaactcttcttcatgcagtagctatatagtaatatgacaactgctcctacgacccaaagaggaactacagcaactactctttagcatctgttgctcccaactctgctttgcaattatatgactcaagcattctggctccgttaactattactgctgttactcccaagtaaattccctctaaaaaataaaaatttttaaagctgtaatttaagctctctgctgcctcatgacttcaattccatcagagttacgcattgtttcctctgtacatctttgctctgcttccattgctaattccctagtaaagtgttgtatattcaaagttccaaagaaacagaatatccaagacatcaccaatcatccaaaacacagtgtaggaggccacagttaagagaagcaacaccattagctctttttataggctcgagaacaacaggatgctttggtcctgtatcagcaggacgctttttgggtagatcctactgccaccctactatcgggtagatcctactgtcaccctagctatgggcacatgtcagagtcccatgtaataaaggagacaaaaggaaaccaccacgagtataaactaagaaaagtactccaaggtttctaagaatggagctgtataactcactttgccccatttgttacttctccacggtacttaccaccacctattacatatattttgtttatagtcagtcttcccccattagaatgaaagttccgtgaggataggactatacagtcagccctcagtatccatgggggactggtttcaggatctcctgagggtaacaaaggatactcaagtccctgatataaaatgacatagtatttgcacatcacctttgcacatcctcccatatacttcatatcaactctagatcactcataatatccgatgtaaatgtcatgcaaatagttattgtactatattgtgtaaggaataaggacaagaaaaaagtctgtacatgttcagtacagacgcaatttttttttccaatatttccaatccttggttgccttaacggatgtagaacccaggaataagttctggtgtcctattgcatagtaggatgagtatagttaacaataacatattatatatttgaaaatagccagaagagtagattttgaattttctccctacagaaaaatcattatgcaaattaccctgatttgatcattacacattgagtacatgtattaaaacatcacattctaccccatatatatgtacagttattatgtgtccataaaaatttaatgtcaatgtgtgaaataaaatgaaaaaataaaaatttttaaagctgtaattatctccatctggtaggaatatatacaatctgaaataaaaaatatatttgtaattgttaggacaaaatagattatacgttaagtctgcaaattataaattataaaattctcacagaacctgaaaaattattgatactgttaaatatttaaaaagctgtccttggagagaaagaaacctatcagatttacatcaacaagtgtaatatgtcagcctattaccatctgctacagactgcatgtttgtgttccctcaaaattcatatgataggccgggcgcggtggc

SEQ ID NO: 1030 - protein, 1438 aa, Homo sapiens
MPEQDKDPRVQENPDDQRTVPEVTGDARSAFWPLRDNGGPSPFVPRPGPLQTDLHAQSSEIRYNHTSQTSWTSSSTKRNAISSSYSSTGGLPGLKQRRGPASSRCQLTLSYSKTVSEDRPQAVSSGHTRCEKGADTAPGQTIAPTGGSPRSQDSRPRRRKIPLLPRRRGEPLMLPPPLELGYRVTAEDLHLEKETAFQRINSALHVEDKAIPDCRPSRPSHTLSSLATGASGGPPVSKAPTMDAQQDRPKSQDCLGLVAPLASAAEVPATAPVSGKKHRPPGPLFSSSDPLPANSSHSRDSAQVTSMIPAPFTAASRDAGMRRTRSAPAAAAAAPPPSTLNPTSGSLLNAVDGGPSHFLASATAAARAQRSEVRYNQRSQTSRTRSCLKRNASSSSHSSTEGLQEVKRRRGPASSHCQLALSSSNTVSEDGPQAVSSGHHCENKAGTAPGQTLAPRGGSPRSQASRPHINTALHVEDKAISDCRPSRPSHTLSSLATGASGGPPVSKAPTMDAQQDRPKSQDSLGLLAPLASAAEVPSTAPVSGKKHRPPGPLFSSSDPLPATSYHSRDTAQVTSLIPATFTAASRDAGMRRTRSAPAAATAAPPPSTLNNTSGSLLNAVDGGPSHFLASATAAARAQRSEVRYNQRSQTSRTRSCLKRNASSSSSSHSSTEGLQELKRRRGPASSHCQLAHSSSNTVSEDGPQAVSSGHRCENKAGTAPGQTLAPRGGSPRSQASRPHINSALYVEDKAISDCRPSRPSHTLSSLATGASGGPPVSKAPTMDAQQDRPKSQDCLGLVAPLASAAEVPSTAPVSGKKHRPPGPLFSSSDPLPATSSHSRDSAQVTSLIPATFTAASRDAGMRRTRPGTSAPAAAAAALPPSTLNPTSGSLLNAVDGGPSHFLASATAAARAQRSEVRYNQRSQTSRTRSCLKRNASSSSHSSTEGLQELKRRRGPASSHCQLAHSSSNTVSEDGPQAVSSGHRCENKAGTAPGQTLAPRGGYPRSQASRPRINSALHVEDKAISDCRPSRPSHTLSSLATGASGGPPVSKAPTMDAQQDRPKSQDCLGLLAPLASAAEVSSTAPVSGKKHRPPGPLFSSSDPLPATSSHSRDSAQVTSLIPATFTAASRDAGMRRTRPGTSAPAAAAAALPPSTLNPTSGSLLNAVDGGPSHFLASATAAARAQRSEVRYNQRSQTSRTRSCLKRNASSSSHSSTEGLQELKRRRGPASSHCQLAHSSSNTVSEDGPQAVSSGHRCENKAGTAPGQTLAPRGGYPRSQASRPRINSALHVEDKAISDCRPSRPSHTLSSLATGASGGPPVSKAPTMDAQQDRPKSQDCLGLLAPLASAAEVSSTAPVSGKKHRPPGPLFSSSDPLPATSSHSGDSAQDTSLIPAPFTPASRDAGIRRMFRVRNCLRGLGLFLLVFSFFFLLTWASFSF

SEQ ID NO: 1031 - DNA, 6748 bp, Homo sapiens
ttatatggtttggctctgtccgcacccaaatctcatcttgaattgtaacaattcccatgtgtcaagggtggggccaggtggagataactgaatcatggaggcagtttcccccatgctgttctcatggtagtgaataagtctcatgaggtctgatggttttataaatggatgttcccctgcacatgctctctcctgcccaccatgtctgactaaattttgtatttttactagagacgggctttcactatgttggccaggctggcctccaactcctgatctcgtgatccgtccaccccgacctcccaaagtgctaggatcataggcataagccaccacacccggcctcttttttttctttttcttttttttatctggagactgagttttgcactcgttgcccaggctggagtgcaatggtgcgatctcagctcactgcagtctccacctcagcaggagagcaggaatcttcagtgatccacgggcaaatatgcagccattgtgggcacctgttcctcccgcgacctttgtgcccacgtctctccctccagtacctactgcacgaccccccacgtccgcctcctgccattgccagcaggtgccttgcgcgggtacctggctgtgcttattcatccattatggtcgctctgtcactggtgccattatgtgctcacatgcccactccctcaggtttagaagtcgcgttgcccggcaacagaacaatctgctggcttagcctttggccaagttggcagctggacgaggacgctcagagcccagctcttgagagttcaagtatccgacagttccccactgctcccaggagcggttacccgggcactctgtgcccctcattcctgtttgggccaaggccgaggacctgcgagtagggctcagttgcctggagccccttcagcccatcccccagttcactttgcttgtgggatctccccgttgctcctgcccctggactgagtggcaggccatcctacaaacacccgcacactcgacatcagtggtgtcaagacaactctaagaaggttttccgtgatcctgcaagacctgtgttccatcctggtgattctgtcttcaatttcactgcacaggtaccacagtaagccagtgctgtgtgctccgagttccagggcatcccccagctcagccactacactgagcacaaggactctgtggggcccaggagcaggtagtcacccctttggggtccacaacacccggctgtccccagacttgtgtccagggaagatagtgttgagggccctcaaggagagcggggcagggatgcctgagcaggacaaggaccccagagtccaagaaaatcctgatgatcagagaacggtccccgaggtcaccggggatgcacggtctgcattttggcccctgcgggacaatggaggcccctctccctttgtgcccaggcccgggcctctgcagacagacctccacgcccagagctcagaaatcagatataaccacacatcccagacatcctggacgagctcgagcaccaaacgaaatgccatctccagctcctacagctccacgggaggcttgccggggctaaagcagaggagggggccagcctcatcccgctgccagctgaccctcagttactcaaagacagtgagtgaggacaggcctcaggctgtctcttcgggtcacacacggtgtgaaaagggggcagatacagcaccagggcagacaatcgccccaacgggtggctcccccagatcccaggactctaggccccgtagacgcaagattcccctgctgccacgcaggcgaggggagcctttgatgctgccacctcccttagagctggggtaccgggtcacggctgaagacctgcacctggaaaaagagacggcattccagcgcatcaacagtgcactgcacgttgaggacaaggccatcccggactgcagaccctcacggccttcccacactttgtcctcacttgcaacaggggcttcgggtgggcctcccgtttctaaagcacccactatggatgcacagcaggacagacccaagtcccaagactgcctgggcctagtggcccccctagcatctgctgcagaggtccccgctacagctcccgtgtctgggaagaagcacagaccaccaggacccctgttctcctcctcagatccccttcctgccaactcttcccactcccgggactcagcccaggtcacctcgatgattcctgcccccttcacagctgcaagcagggatgccggcatgagaagaacaaggtcggctcctgcagctgccgcagcagcccctcccccctccacattgaaccccacgtcggggtcactactcaatgcagtggatggaggcccctcacatttcttggcctcagccacagctgcagcacgtgcccagaggtcagaagtgagatataaccagagatcccagacctcccggaccagatcctgcctcaaacgaaatgccagctccagctcccacagctctacggaaggcctccaggaagtaaagcggaggagggggccagcctcatcccactgccagctggccctcagttcctcaaacacagtgagtgaggacggacctcaggctgtctcttcgggtcaccactgtgaaaacaaggcaggtacagcaccagggcagacacttgcccccaggggtggctcccccagatcccaggcctctaggccccacatcaacactgcactgcacgttgaggacaaggccatctcggactgcagaccctcacggccttcccacactttgtcctcacttgcaacaggggcttcgggtgggcctcccgtttctaaagcacccactatggatgcacagcaggacagacccaagtcccaagactccctgggcctactggcccccctagcatctgctgcagaggtcccctctacagctcccgtgtctgggaagaagcacagaccaccaggacccctgttctcctcctcagatccccttcctgccacctcttaccactcccgggacacagcacaggtcacctcgctgattcctgccaccttcacagctgcaagcagggatgccggcatgagaagaacaaggtcggctcctgcagctgccacagcagcccctcccccctccacattgaacaacacgtcggggtcactactcaatgcagtggatggaggcccctcacatttcttggcctcagccacagctgcagcacgtgcccagaggtcagaagtgagatataaccagagatcccagacctcccggaccagatcctgcctcaaacgaaatgccagctccagctccagctcccacagctctacggaaggcctccaggaactaaagcggaggagggggccagcctcatcccactgccagctggcccacagttcctcaaacacagtgagtgaggacggacctcaggctgtctcttcgggtcaccgctgtgaaaacaaggcaggtacagcaccagggcagacactcgcccccaggggaggctcccccagatcccaggcctctaggccccacatcaacagtgcactgtacgttgaggacaaggccatctcggactgcagaccctcacggccttcccacactttgtcctcacttgcaacaggggcttcgggtgggcctcccgtttctaaagcacccactatggacgcacagcaggacagacccaagtcccaagactgcctgggcctagtggcccccctagcatctgctgcagaggtcccctctacagctcccgtgtctgggaagaagcacagaccaccaggacccctgttctcctcctcagatccccttcctgccacctcttcccactcccgggactcagcccaggtcacctcgctgattcctgccaccttcacagctgcaagcagggatgccggcatgagaagaacaaggcctggcacctcggctcctgcagctgccgcagcagcccttcccccctccacattgaaccccacgtcggggtcgctactcaatgcagtggatggaggcccctcacatttcttggcctcagccacagctgcagcacgtgcccagaggtcagaagtgagatataaccagagatcccagacctcccggaccagatcctgcctcaaacgaaatgccagctccagctcccacagctctacggaaggcctccaggaactaaagcggaggagggggccagcctcatcccactgccagctggcccacagttcctcaaacacagtgagtgaggacggacctcaggctgtctcttcgggtcaccgctgtgaaaacaaggcaggtacagcaccagggcagacactcgcccccaggggtggctaccccagatcccaggcctctaggccccgcatcaacagtgcactgcacgttgaggacaaggccatctcggactgcagaccctcacggccttcccacactttgtcctcacttgcaacaggggcttcgggtgggcctcccgtttctaaagcacccactatggatgcacagcaggacagacccaagtcccaagactgcctgggcctactggcccccctagcatctgctgcagaggtctcctctacagctcccgtgtctgggaagaagcacagaccaccaggacccctgttctcctcctcagatccccttcctgccacctcttcccactccggggactcagcccaggacacctcgctgattcctgcccccttcacacctgcaagcagggatgccggcatcagaagaatgtttcgtgttcgaaactgtttgaggggtttgggtttatttttgttggttttttcttttttttttttgcttacgtgggcatccttcagcttttaataatctgaaaaattctatttacccattgtcaatgtgtataaattaatctcagtcaattttatacaataaaaggtgaacttttatccatcaaacaataatttaacaaaaaatgtaccggaagaagaatgttcattacaaatataggaaacataaatattaccaaatattggcaagcactaaaatgttcagaaatataagtctattacagttatagctctctcaagcaaaaaaacagcagagaaaaacttagttttcctgaggggctatttatttacttagggatttgttaaaaggtcaaatggggtcacacagaatactaagaagagctgttcacccaggcctcactaagaactcttcttcatgcagtagctatatagtaatatgacaactgctcctacgacccaaagaggaactacagcaactactctttagcatctgttgctcccaactctgctttgcaattatatgactcaagcattctggctccgttaactattactgctgttactcccaagtaaattccctctaaaaaataaaaatttttaaagctgtaatttaagctctctgctgcctcatgacttcaattccatcagagttacgcattgtttcctctgtacatctttgctctgcttccattgctaattccctagtaaagtgttgtatattcaaagttccaaagaaacagaatatccaagacatcaccaatcatccaaaacacagtgtaggaggccacagttaagagaagcaacaccattagctctttttataggctcgagaacaacaggatgctttggtcctgtatcagcaggacgctttttgggtagatcctactgccaccctactatcgggtagatcctactgtcaccctagctatgggcacatgtcagagtcccatgtaataaaggagacaaaaggaaaccaccacgagtataaactaagaaaagtactccaaggtttctaagaatggagctgtataactcactttgccccatttgttacttctccacggtacttaccaccacctattacatatattttgtttatagtcagtcttcccccattagaatgaaagttccgtgaggataggactatacagtcagccctcagtatccatgggggactggtttcaggatctcctgagggtaacaaaggatactcaagtccctgatataaaatgacatagtatttgcacatcacctttgcacatcctcccatatacttcatatcaactctagatcactcataatatccgatgtaaatgtcatgcaaatagttattgtactatattgtgtaaggaataaggacaagaaaaaagtctgtacatgttcagtacagacgcaatttttttttccaatatttccaatccttggttgccttaacggatgtagaacccaggaataagttctggtgtcctattgcatagtaggatgagtatagttaacaataacatattatatatttgaaaatagccagaagagtagattttgaattttctccctacagaaaaatcattatgcaaattaccctgatttgatcattacacattgagtacatgtattaaaacatcacattctaccccatatatatgtacagttattatgtgtccataaaaatttaatgtcaatgtgtgaaataaaatgaaaaaataaaaatttttaaagctgtaattatctccatctggtaggaatatatacaatctgaaataaaaaatatatttgtaattgttaggacaaaatagattatacgttaagtctgcaaattataaattataaaattctcacagaacctgaaaaattattgatactgttaaatatttaaaaagctgtccttggagagaaagaaacctatcagatttacatcaacaagtgtaatatgtcagcctattaccatctgctacagactgcatgtttgtgttccctcaaaattcatatgataggccgggcgcggtggc

SEQ ID NO: 1032 - protein, 1166 aa, Homo sapiens
MPEQDKDPRVQENPDDQRTVPEVTGDARSAFWPLRDNGGPSPFVPRPGPLQTDLHAQSSEIRYNHTSQTSWTSSSTKRNAISSSYSSTGGLPGLKQRRGPASSRCQLTLSYSKTVSEDRPQAVSSGHTRCEKGADTAPGQTIAPTGGSPRSQDSRPRRRKIPLLPRRRGEPLMLPPPLELGYRVTAEDLHLEKETAFQRINSALHVEDKAIPDCRPSRPSHTLSSLATGASGGPPVSKAPTMDAQQDRPKSQDCLGLVAPLASAAEVPATAPVSGKKHRPPGPLFSSSDPLPANSSHSRDSAQVTSMIPAPFTAASRDAGMRRTRSAPAAAAAAPPPSTLNPTSGSLLNAVDGGPSHFLASATAAARAQRSEVRYNQRSQTSRTRSCLKRNASSSSHSSTEGLQEVKRRRGPASSHCQLALSSSNTVSEDGPQAVSSGHHCENKAGTAPGQTLAPRGGSPRSQASRPHINTALHVEDKAISDCRPSRPSHTLSSLATGASGGPPVSKAPTMDAQQDRPKSQDSLGLLAPLASAAEVPSTAPVSGKKHRPPGPLFSSSDPLPATSYHSRDTAQVTSLIPATFTAASRDAGMRRTRSAPAAATAAPPPSTLNNTSGSLLNAVDGGPSHFLASATAAARAQRSEVRYNQRSQTSRTRSCLKRNASSSSSSHSSTEGLQELKRRRGPASSHCQLAHSSSNTVSEDGPQAVSSGHRCENKAGTAPGQTLAPRGGSPRSQASRPHINSALYVEDKAISDCRPSRPSHTLSSLATGASGGPPVSKAPTMDAQQDRPKSQDCLGLVAPLASAAEVPSTAPVSGKKHRPPGPLFSSSDPLPATSSHSRDSAQVTSLIPATFTAASRDAGMRRTRPGTSAPAAAAAALPPSTLNPTSGSLLNAVDGGPSHFLASATAAARAQRSEVRYNQRSQTSRTRSCLKRNASSSSHSSTEGLQELKRRRGPASSHCQLAHSSSNTVSEDGPQAVSSGHRCENKAGTAPGQTLAPRGGYPRSQASRPRINSALHVEDKAISDCRPSRPSHTLSSLATGASGGPPVSKAPTMDAQQDRPKSQDCLGLLAPLASAAEVSSTAPVSGKKHRPPGPLFSSSDPLPATSSHSGDSAQDTSLIPAPFTPASRDAGIRRMFRVRNCLRGLGLFLLVFSFFFLLTWASFSF

SEQ ID NO: 1033 - DNA, 6133 bp, Homo sapiens
tgcatgaagacaaaaggtcctgtgctcacctgggacccttctggacgttgccctgtgtacctcttcgactgcctgttcatctacgacgaaccccgggtattgaccccagacaacaatgccacttcatattggggacttcgtctgggattccaaggtgcattcattgcaaagttccttaaatattttctcactgcttcctactaaaggacggacagagcatttgttcttcagccacatactttccttccactggccagcattctcctctattagactagaactgtggataaacctcagaaaatggccacccagcagaaagcctctgacgagaggatctcccagtttgatcacaatttgctgccagagctgtctgctcttctgggcctagatgcagttcagttggcaaaggaactagaagaagaggagcagaaggagcgagcaaaaatgcagaaaggctacaactctcaaatgcgcagtgaagcaaaaaggttaaagacttttgtgacttatgagccgtacagctcatggataccacaggagatggcggccgctgggttttacttcactggggtaaaatctgggattcagtgcttctgctgtagcctaatcctctttggtgccggcctcacgagactccccatagaagaccacaagaggtttcatccagattgtgggttccttttgaacaaggatgttggtaacattgccaagtacgacataagggtgaagaatctgaagagcaggctgagaggaggtaaaatgaggtaccaagaagaggaggctagacttgcgtccttcaggaactggccattttatgtccaagggatatccccttgtgtgctctcagaggctggctttgtctttacaggtaaacaggacacggtacagtgtttttcctgtggtggatgtttaggaaattgggaagaaggagatgatccttggaaggaacatgccaaatggttccccaaatgtgaatttcttcggagtaagaaatcctcagaggaaattacccagtatattcaaagctacaagggatttgttgacataacgggagaacattttgtgaattcctgggtccagagagaattacctatggcatcagcttattgcaatgacagcatctttgcttacgaagaactacggctggactcttttaaggactggccccgggaatcagctgtgggagttgcagcactggccaaagcaggtcttttctacacaggtataaaggacatcgtccagtgcttttcctgtggagggtgtttagagaaatggcaggaaggtgatgacccattagacgatcacaccagatgttttcccaattgtccatttctccaaaatatgaagtcctctgcggaagtgactccagaccttcagagccgtggtgaactttgtgaattactggaaaccacaagtgaaagcaatcttgaagattcaatagcagttggtcctatagtgccagaaatggcacagggtgaagcccagtggtttcaagaggcaaagaatctgaatgagcagctgagagcagcttataccagcgccagtttccgccacatgtctttgcttgatatctcttccgatctggccacggaccacttgctgggctgtgatctgtctattgcttcaaaacacatcagcaaacctgtgcaagaacctctggtgctgcctgaggtctttggcaacttgaactctgtcatgtgtgtggagggtgaagctggaagtggaaagacggtcctcctgaagaaaatagcttttctgtgggcatctggatgctgtcccctgttaaacaggttccagctggttttctacctctcccttagttccaccagaccagacgaggggctggccagtatcatctgtgaccagctcctagagaaagaaggatctgttactgaaatgtgcatgaggaacattatccagcagttaaagaatcaggtcttattccttttagatgactacaaagaaatatgttcaatccctcaagtcataggaaaactgattcaaaaaaaccacttatcccggacctgcctattgattgctgtccgtacaaacagggccagggacatccgccgatacctagagaccattctagagatcaaagcatttcccttttataatactgtctgtatattacggaagctcttttcacataatatgactcgtctgcgaaagtttatggtttactttggaaagaaccaaagtttgcagaagatacagaaaactcctctctttgtggcggcgatctgtgctcattggtttcagtatccttttgacccatcctttgatgatgtggctgttttcaagtcctatatggaacgcctttccttaaggaacaaagcgacagctgaaattctcaaagcaactgtgtcctcctgtggtgagctggccttgaaagggtttttttcatgttgctttgagtttaatgatgatgatctcgcagaagcaggggttgatgaagatgaagatctaaccatgtgcttgatgagcaaatttacagcccagagactaagaccattctaccggtttttaagtcctgccttccaagaatttcttgcggggatgaggctgattgaactcctggattcagataggcaggaacatcaagatttgggactgtatcatttgaaacaaatcaactcacccatgatgactgtaagcgcctacaacaattttttgaactatgtctccagcctcccttcaacaaaagcagggcccaaaattgtgtctcatttgctccatttagtggataacaaagagtcattggagaatatatctgaaaatgatgactacttaaagcaccagccagaaatttcactgcagatgcagttacttaggggattgtggcaaatttgtccacaagcttacttttcaatggtttcagaacatttactggttcttgccctgaaaactgcttatcaaagcaacactgttgctgcgtgttctccatttgttttgcaattccttcaagggagaacactgactttgggtgcgcttaacttacagtactttttcgaccacccagaaagcttgtcattgttgaggagcatccacttcccaatacgaggaaataagacatcacccagagcacatttttcagttctggaaacatgttttgacaaatcacaggtgccaactatagatcaggactatgcttctgcctttgaacctatgaatgaatgggagcgaaatttagctgaaaaagaggataatgtaaagagctatatggatatgcagcgcagggcatcaccagaccttagtactggctattggaaactttctccaaagcagtacaagattccctgtctagaagtcgatgtgaatgatattgatgttgtaggccaggatatgcttgagattctaatgacagttttctcagcttcacagcgcatcgaactccatttaaaccacagcagaggctttatagaaagcatccgcccagctcttgagctgtctaaggcctctgtcaccaagtgctccataagcaagttggaactcagcgcagccgaacaggaactgcttctcaccctgccttccctggaatctcttgaagtctcagggacaatccagtcacaagaccaaatctttcctaatctggataagttcctgtgcctgaaagaactgtctgtggatctggagggcaatataaatgttttttcagtcattcctgaagaatttccaaacttccaccatatggagaaattattgatccaaatttcagctgagtatgatccttccaaactagtaaaattaattcaaaattctccaaaccttcatgttttccatctgaagtgtaacttcttttcggattttgggtctctcatgactatgcttgtttcctgtaagaaactcacagaaattaagttttcggattcattttttcaagccgtcccatttgttgccagtttgccaaattttatttctctgaagatattaaatcttgaaggccagcaatttcctgatgaggaaacatcagaaaaatttgcctacattttaggttctcttagtaacctggaagaattgatccttcctactggggatggaatttatcgagtggccaaactgatcatccagcagtgtcagcagcttcattgtctccgagtcctctcatttttcaagactttgaatgatgacagcgtggtggaaattgccaaagtagcaatcagtggaggtttccagaaacttgagaacctaaagctttcaatcaatcacaagattacagaggaaggatacagaaatttctttcaagcactggacaacatgccaaacttgcaggagttggacatctccaggcatttcacagagtgtatcaaagctcaggccacaacagtcaagtctttgagtcaatgtgtgttacgactaccaaggctcattagactgaacatgttaagttggctcttggatgcagatgatattgcattgcttaatgtcatgaaagaaagacatcctcaatctaagtacttaactattctccagaaatggatactgccgttctctccaatcattcagaaataaaagattcagctaaaaactgctgaatcaataatttgtcttggggcatattgaggatgtaaaaaaagttgttgattaatgctaaaaaccaaattatccaaaattattttattaaatattgcatacaaaagaaaatgtgtaaggcttgctaaaaaacaaaacaaaacaaaacacagtcctgcatactcaccaccaagctcaagaaataaatcatcaccaatacctttgaggtccctgagtaatccaccccagctaaaggcaaacccttcaatcaagtttatacagcaaaccctccattgtccatggtcaacagggaaggggttggggacaggtctgccaatctatctaaaagccacaatatggaagaagtattcaatttatataataaatggctaacttaacggttgaatcactttcatacatggatgaaacgggtttaacacaggatccacatgaatcttctgtgggccaagagatgttccttaatccttgtagaacctgttttctatattgaactagctttggtacagtagagttaacttactttccatttatccactgccaatataaagaggaaacaggggttagggaaaaatgacttcattccagaggcttctcagagttcaacatatgctataatttagaattttcttatgaatccactctacttgggtagaaaatattttatctctagtgattgcatattatttccatatcatagtatttcatagtattatatttgatatgagtgtctatatcaatgtcagtgtccagaatttcgttcctaccagttaagtagttttctgaacggccagaagaccattcgaaattcatgatactactataagttggtaaacaaccatacttttatcctcatttttattctcactaagaaaaaagtcaactcccctccccttgcccaagtatgaaatatagggacagtatgtatggtgtggtctcatttgtttagaaaaccacttatgactgggtgcggtggctcacacctgtaatcccagcactttgggaggctgaggcgggcgaatcatttgaggtgaggaattcgagaccagcctggccagcatggtgaaaccccatctctactaaaaatacaaaaattagccaggtgtggtggcacatgcctgtagtcccagccactagggcggctgagacgcaagacttgcttgaacccgggaggcagaggttgcagtgagccaagatggcgccactgcattccagcctgggcaacagagcaagaccctgtctgtctcaaaacaaaaaacaaaaccacttatattgctagctacattaagaatttctgaatatgttactgagcttgcttgtggtaaccatttataatatcagaaagtatatgtacaccaaaacatgttgaacatccatgttgtacaactgaaatataaataattttgtcaattatacctaaataaaactggaaaaaaatttctggaagtttatatctaaaaatgttaatagtgcgtacctctaggaagtgggcctggaagccattcttacttttcagtctctcccattctgtactgttttttgttttactttcgtgcctgcattatttttctatttaaaacaaaaataaatctagtttagcact

SEQ ID NO: 1034 - protein, 1403 aa, Homo sapiens
MATQQKASDERISQFDHNLLPELSALLGLDAVQLAKELEEEEQKERAKMQKGYNSQMRSEAKRLKTFVTYEPYSSWIPQEMAAAGFYFTGVKSGIQCFCCSLILFGAGLTRLPIEDHKRFHPDCGFLLNKDVGNIAKYDIRVKNLKSRLRGGKMRYQEEEARLASFRNWPFYVQGISPCVLSEAGFVFTGKQDTVQCFSCGGCLGNWEEGDDPWKEHAKWFPKCEFLRSKKSSEEITQYIQSYKGFVDITGEHFVNSWVQRELPMASAYCNDSIFAYEELRLDSFKDWPRESAVGVAALAKAGLFYTGIKDIVQCFSCGGCLEKWQEGDDPLDDHTRCFPNCPFLQNMKSSAEVTPDLQSRGELCELLETTSESNLEDSIAVGPIVPEMAQGEAQWFQEAKNLNEQLRAAYTSASFRHMSLLDISSDLATDHLLGCDLSIASKHISKPVQEPLVLPEVFGNLNSVMCVEGEAGSGKTVLLKKIAFLWASGCCPLLNRFQLVFYLSLSSTRPDEGLASIICDQLLEKEGSVTEMCMRNIIQQLKNQVLFLLDDYKEICSIPQVIGKLIQKNHLSRTCLLIAVRTNRARDIRRYLETILEIKAFPFYNTVCILRKLFSHNMTRLRKFMVYFGKNQSLQKIQKTPLFVAAICAHWFQYPFDPSFDDVAVFKSYMERLSLRNKATAEILKATVSSCGELALKGFFSCCFEFNDDDLAEAGVDEDEDLTMCLMSKFTAQRLRPFYRFLSPAFQEFLAGMRLIELLDSDRQEHQDLGLYHLKQINSPMMTVSAYNNFLNYVSSLPSTKAGPKIVSHLLHLVDNKESLENISENDDYLKHQPEISLQMQLLRGLWQICPQAYFSMVSEHLLVLALKTAYQSNTVAACSPFVLQFLQGRTLTLGALNLQYFFDHPESLSLLRSIHFPIRGNKTSPRAHFSVLETCFDKSQVPTIDQDYASAFEPMNEWERNLAEKEDNVKSYMDMQRRASPDLSTGYWKLSPKQYKIPCLEVDVNDIDVVGQDMLEILMTVFSASQRIELHLNHSRGFIESIRPALELSKASVTKCSISKLELSAAEQELLLTLPSLESLEVSGTIQSQDQIFPNLDKFLCLKELSVDLEGNINVFSVIPEEFPNFHHMEKLLIQISAEYDPSKLVKLIQNSPNLHVFHLKCNFFSDFGSLMTMLVSCKKLTEIKFSDSFFQAVPFVASLPNFISLKILNLEGQQFPDEETSEKFAYILGSLSNLEELILPTGDGIYRVAKLIIQQCQQLHCLRVLSFFKTLNDDSVVEIAKVAISGGFQKLENLKLSINHKITEEGYRNFFQALDNMPNLQELDISRHFTECIKAQATTVKSLSQCVLRLPRLIRLNMLSWLLDADDIALLNVMKERHPQSKYLTILQKWILPFSPIIQK

SEQ ID NO: 1035 - DNA, 1936 bp, Homo sapiens
ggtgagtccgcgtgtggaagtctgtgaggcgcagaggtggggcaggccgtctggctagctaggcggctgggagcgttttcgtggcggggaacggaggttgaattgccctgcctgggctcatagggaaggaggatgtgaaggagcttgtgaaggcagaggaagattattgaataataaaatacagttttgaaaaaaatggatgaagaacctgaaagaactaagcgatgggaaggaggctatgaaagaacatgggagattcttaaagaagatgaatctggatcacttaaagctacaatagaagacattctattcaaggcaaagagaaaaagagtatttgagcaccatggacaagttcgacttggaatgatgcgccacctttatgtggtagtagatggatcaagaacaatggaagaccaagatttaaagcctaatagactgacgtgtactttaaagttgttggaatactttgtagaggaatattttgatcaaaatcctattagtcagattggaataattgtaactaagagtaaaagagctgaaaaattgactgaactttcaggaaacccaagaaaacatataacgtctttgaagaaagctgtggatatgacctgccatggagagccatctctttataattccctaagcatagctatgcagactctaaaacacatgcctggacatacaagtcgagaagtactaatcatctttagcagccttacaacttgcgatccatctaatatttatgatctaatcaagaccctaaaggcagctaaaattagagtatctgttattggattgtctgcagaagttcgcgtttgcactgtacttgctcgtgaaactggtggcacgtaccatgttattttagatgaaagccattacaaagagttgctcacacatcatgttagtcctcctcctgctagctcaagttctgaatgctcacttattcgtatgggatttcctcagcacaccattgcttctttatctgaccaggatgcaaaaccctctttcagcatggcgcatttggatggcaatactgagccagggcttacattaggaggctatttctgcccacagtgtcgggcaaagtactgtgagctacctgttgaatgtaaaatctgtggtcttactttggtgtctgctccccacttggcacggtcttaccatcatttgtttcctttggatgcttttcaagaaattcccctagaagaatataatggagaaagattttgttatggatgtcagggggaattgaaagaccaacatgtttatgtttgtgctgtgtgccaaaatgttttctgtgtggactgtgatgtttttgttcatgattctctacactgttgccctggctgtattcataagattccagctccttcaggtgtttgattccagcatgtagtatacattgtatgtgttaaaaagaaatttgcaactgtgaataaaaggacttctttagaagaagcttcatttaaaacatgaaaggataatctgacttaagaaactttttgctaagaaaaggtaatattttattaaattttaaatttgtgttgtcacagaaatacctgaaattcagtagtacttcattcaattaattttgttttctattattttgagttatactgttttcaaagtcattatgcagtatgtataaacttataagaattaaattgatgtgataattttatgtttttataattaaatatagaatctttatgatttatgttaattcattaatttagtgtaagaagaaagttaagtctgaatgtaaattcagtgtaagatgaaaatttatcaatacttatgaaattaggctgggcgctgtggctcacacctgtaatcccaacactttgggaggctgaggtgggcagatcacttgaggtcaggagttcgagaccagcctggccaacatggtgaaaccccgtcactactaaaaatacaa

SEQ ID NO: 1036 - protein, 395 aa, Homo sapiens
MDEEPERTKRWEGGYERTWEILKEDESGSLKATIEDILFKAKRKRVFEHHGQVRLGMMRHLYVVVDGSRTMEDQDLKPNRLTCTLKLLEYFVEEYFDQNPISQIGIIVTKSKRAEKLTELSGNPRKHITSLKKAVDMTCHGEPSLYNSLSIAMQTLKHMPGHTSREVLIIFSSLTTCDPSNIYDLIKTLKAAKIRVSVIGLSAEVRVCTVLARETGGTYHVILDESHYKELLTHHVSPPPASSSSECSLIRMGFPQHTIASLSDQDAKPSFSMAHLDGNTEPGLTLGGYFCPQCRAKYCELPVECKICGLTLVSAPHLARSYHHLFPLDAFQEIPLEEYNGERFCYGCQGELKDQHVYVCAVCQNVFCVDCDVFVHDSLHCCPGCIHKIPAPSGV

SEQ ID NO: 1037 - DNA, 8192 bp, Homo sapiens
agttgcggcgtcctgtgagcgcggggatgctgggaggagggtgaaatttagccatcggtgtgtggcagggtcatgaaaaagcggcggcggcgggagagaggaggaggcggcggcggggcagtgaaactacggtagctgccccctgagctggtggtgtggctttgtggggagggcgtagttcctaatcccctttccgggcagccgccggggctcggggctgtgagcggccgtgaggctgcctccccgggccccctgcctccgccatgttccgcagggcacgccttagcgtgaagccgaatgtcaggcctggtgtaggcgccaggggctccacagcttccaatccccagcgtggacgggagtctcccaggccgccggatcctgccacggactctgcttccaagcccgcggagcccacagatgtgcccacagtcgatttcggtggagcggagccccaagaaaaggctcctaggagcagtactgaaaagactggtggtgacaatgatgttgaagaatccagtagatcttcctctactgtttcacagagaagaaagcgaatatcaagtacttctagcctggttaagtctagtgtcagtgttccttcagaatctcatcccttatctacaattaatcaagaggctccacagccaactgccacttcaacaaaagagaaacagccatgctcagacagataccgaatatacaaagcccagaaactgagggaaatgttaaaagaagaattgagaaaagagaagaaacaatggaaaaacaaatatgctataaatgaaagtcagaggccaccagatcgttcaaaaatgactatgagagacttcatatattatctaccagataataatccaatgacttcttcactggaacaagaaaagaaaactgaaaagccatcgactccagtccagacaagagagcaagaaggtaagagtactcctaatgctgaagataatgaaatggaagaagagacagatgatgggccattactggttcctcgagtaaaagtggcagaagatggttccattattttggatgaagaaagtttaactgtagaagttttaagaacaaaaggcccttgtgttgttgaagaaaatgaccccatatttgagcgcggttctacaactacatactccagctttaggaaaaactattactctaaaccatggtcaaataaagaaacagatatgttttttttagccatcagcatggtaggaactgacttttctatgatcggacaactttttcctcacagagcaaggatagaaattaagaataaatttaaacgggaagagaaaacaaatggatggagaatagacaaagcattccaggaaaagcgcccttttgacttcgatttttttgctcatttgcttcagaaagttcttgctgaagaagagaaaagaaaacaaaaatctgttaaaaatcacagtttaaaggagaagaaatccaccaaaccacggaaaaatgtaaaagtgaaaaaagttgcctgtgaaggagtgaataatgatccagatgagtctatgagttctagaatttcagacacggaaagatctcagaaggatgctcagacagttgaagaagagtctctgaccttatcaagggaggatgcagagcaggttgcattagaagtagacctaaatcaaaagaaaagaaggaggaagaagcaagatggagctaatgaactgggagtaaacaatcttttagaaaatgccactgttcaggcgggtccttctaaaggagaaaaacacaagaataaatgtcaggctataaggcctgagctaaaggaaggtgaatgcagtaaggagcagatgctttcctgcacacaaaacatagatggcattgtgggttttgcctccactgaaaaagttgagaaaagaactgaccccatcctttcattaagtaatcaacaagatgccacatcagtagcaactgagtcttcagaatcaagcacttcagatttgccttcattcgaagttggaattagagcattgtgtgaggtgaataatgctgagggtagttgtatagaagaaagaaatgttgacctaaaaaataattcactggaaattgatcaaacagaaaatgttaaaccaatgttgagaggtcgcttccaaagacctaaacccaatttgtcaagggctgggaagaaatcagttctttcacaaggcaaaacagagtcagagagcaagaattcacattcaaaaacttcagttgaaaagaaccacgtggaaaaagataaaatgaatacattggacattttgagaatggagactacagagagagagaatccagaagctgaaactgtatctgttttgggtgaaaaaaattgtctgcaggaagggagtcaactaaaggctttaagacctgtacaagtgaggggccgattgcaaaagccaaagccaaatgcaggtaaagctgctgaaagaaaagaaattctcatatcacaggaagaaattggggccaatgtagagaagaatgaaaatgaatcctgtgctgatagagatactcctcaacacatggaagatcaatcgcgtaaagattttgaagaggaagatgtcatattacagcctgagaaaaatgattcttttcaaaatgtgcagccagatgagcccaaggttcttaatgaatgtctaagcgttcaagagaataataaggcaaataaacttaaccaagtcccaattctaaggactcgatttcagaaaccaaagccaaatataggaagaggaactggaaggagagaaatttcctcaaaggaagaggtactagagaagattcttgtctctggggaaatggcggcagcattgagagaaactgtaagactagacacctcaccaaaggagatggtaccagcagagattaatactaaagaaatgcagtcagatttaaaagaaactggaagaagagccatttctcccagggagaagattctagatgtgattgatgacaccatagaaatggagacaggtctgaaagcaatgggaagagagatttgtctaagggagaagacgccagaggtgattgatgccactgaggaaatagacaaagatttggaagaagctggaagaagagaaatatccccacagaaaaatggcccagaggaggttaagcctctaggtgaagtggagacagatttgaaagcaactggaaatgagagttccccaagggagaagacaccagaggtgactgatgccactgaggaaatagacaaaaatttggaagaaactggaagaagaaaaatatccccaagggaaaatggcccagaggaggtcaagcctgtagatgaaatggagacagatttgaacgcaactggaagagagagttctccaagggagaagacaccagaggtgattgatgctactgaggaaatagatttggaagaaactgaaagagaagtatccccacaggaaaatggactagaggaggtcaagcctctaggtgaaatggagacggatttgaaagcaactggaagagacagtttcccaagggggaagacaccagaggtgattgatgccattgaggaaatagagatagatttggaagaaactgaaagagaaatatccccacaggaaaatggcctagaggaggttaagcctctaggtgaaatgcaaacagatttgaaagcaaccggaagggagatttccccaagggagaagacaccagaggtgattgatgccactgaggaaatagacaaagatctggaagaaactggaagaagagaaatatccccagaggaaaatggcccagaggaggtcaagcctgtagatgaaatggagacagacttgaaaacaactggaagagagggttcctcaagggagaagacacgagaggtgattgatgctgctgaggtaatagagacagatttggaagaaactgaaagagaaatatcgccacaggaaaatggcccagaggaggtcaagcctgtaggtaaaatggagacagatttgaaagaaattagagaagaaatttcccaaagggaaaaggtgctagcagagttcagtgctataagggaaaaggagattgatttgaaagaaactggaaaaagagacattcccatcatggagaaagtatcaggaaagatggctgttgttgaagaaatggaggcagatttgaaagaaactggaaaagaaaattttagagagagaggatctgaagagatctgtgttactgaggaaaaggtggcagaattgaaacaaactggaaaaacagacatttctccaagggaaaacgagctagaggagaccagtacctcaagacaaactgacacacatttaatgcagagcggtagcaatgacttcagtgctgtgccttcactagatattcagaacattagcagtgaagtactgtcgatgatgcatacacctgtagaagaaaaaagaaattctgaaaaagaagtatcaagtcacttcagtcatttcaagatttcttcacagactcatgaatctgataaaacagaagtccaggggattcaatctccagatgttccagagcagttttcagatattaatttaagcaaatctcttcctcaagaacagaagccacttgaaattaaaccagcaccttttgtgaggagccgattcaaaagaccaaaaccaaacttagcaagagcagctttgaagagagagactacagaatcagaaaaatatatatatgagaagaaatcagaaaccaagaaaatggagactattgtgatgcaagaaaataatgaacaaactgatactctcccttctcaacatgatgaagcttccctaatgatatcaagagaaaaagacacattaggtcacaggaatgaggaggctgtgatattgccatgtacacagactgaaaggaacctttcaccttcaaattcttgtgaacctaaagaggagtctcagtcagcaccagtccagaaaaatgactcagttgtttctgtggggactaataatgtaaacactttccagcaagaaatgaaggaaagtgttatccaaactgctcgacaagtaaggggccgacttcagagaccgagaccaaatataagaaagacaggacagaggcaaatagtagacaaaggtgaagccaaaggcataattaaggaaggaagaacgatattaccaaaagatgaaactgaaaagaaagtcttaactgtgtcaaattctcaaattgaaactgaaattgaagttccatcgtccgcagttccagaacacagaatgtatgaaaatcaaagtcaggtggttcttgtagaaaaccttcatgttaacaaaacaaatgaaacaatcagacatgaaaataaaccgtatgttcctagttcagcacaaatgacaagaaggaaattccaaaaggctaagccaaatttgggaagagcacacagtaagaaagaggaaccagttttagaaaaagtcacaacagatcagagcaaggaaggcaagccagaagatcatttgctgcagaaaggagcttccaacacccagctccttctaaaagaaaaagctgagcttctgacatctctggaggtttcagcaagaaaagattgtgtaggttccaaagagtctgctttggcaaaaatagatgcggaattagaagaagttggaccatcaagaagggttggagaggaaactgtaggagataattcaccatcttcagttgttgaagagcaatatctcaataaactaacaagctgtccacaaccgttaaacgaaacaagttactctaaaattgccctggatgggaaaacaactatctcttctacatctgagtatgagagaaatcgtggtgaaaggagaagtcataaaaagttcaaaccaaatgtcaccagaggtcgtggatcaaaacgagttcggggtaagacctctaagaaggaacctagagcttccaaggccatgctggtgactcttcgggcttcccaggaagaagatgatgatgctgacgattttgagtctgactatgaggaagaaagctatcatcttgctcccgaagaagtaaacaaagctccagtatttgtacctgttggtctcagatctcctgaacctgtttctgctcagattgaggaaacaatggaagagcttgaaataactgtgaatgtcccagatgtaggatgcatagctgttgttgaacatgagctaccaaacacagatgtgactactgaagaaatgaaacaagaagaaaatttgagtgtaccgtttgaaatgaccacaagtgaacatatccaagatgaaccaggtaccaatgatggaagcaccgaagctgcaataactttacttacaatgggagatctagtattgcagtcagagatcagtagtgaacagggtgatgtaggagtatgtataattcctcatgttcattcaaaggataaaagccatattccttctagcctagataatgtaaatcacaaaattgttcatgaatgtcaggaactttcttcacctgtcattactacatctcctgcatcatttgaagaaaacaagattgtattggaggaacaaagttccagagaagaaataagtttaatggagaaagtaaaggagaatgctacaccaaccaggaatacaatttctaaagtgaccagtaatttgagaataagaagtaggcttgctaagcctaaaccaaatcttgagaagactttagggaccaacaggcttgatgattatcaggaagtttccagtttgtgtgtaaccaaaggggcagaaatggaaactcaaagagaaacagagaaaaatgcttccaaagcaacagaattggaaaataaaaacctcggaccagttacaacagcagagaataaggatcagagcaaattggcatgtgtacatggtatcaaagggaccagtatttcttcagaagtaaacctaactgaaagaaacgaaaatcaagaagagagctctcaggaggttcacatgttgtcagttgctccagttgcttcctctgagacagggccctgcacacttggtttggataggggtcttggtgaaaattctgttgaagagccccagataaaggactctaaaggagacagtgtgcttacacttcctgtgccagagtatacaccaacaagtattccagaagtccaacaagagaatataatcaatcctcaagacctaacagtgaatctagttgctaatgtacctcaagatggagaagatgaacaagcctttattttaactctggtggaaatcccagccaatgcagtagaagaatttactgatgccactgcacagttcatgccaaaccctttactgccagctcccatattggtcaaatcagtgaataccgaagaaaggggtgacatgagtatttgtttaccagcaacttcagttggtcaagatgccatgggtttatctatttctggaagagataattctaaaaagccgcctgataatttggatcttgtatctaggaagagatttcaatgcaggcttgataaaaatgaccacattcctcctgccaaaaaacgttcactcactttaagagatgactgtcaagaatataccactgaggtgcactcaaaggaattaacaaatgtttttgaggaaacaggggagtctcacaagggacaagatatttttcttacctcaggaagcacactgacaactccagaacctcaaagacagcaagttgaagcagcttttcagagtagaggatctagatctcctgatgcatgcatggacaagaatgtgcctcagttacctcaggatgaaatgattgtgtctgataaggaagaaagaactgatgctgctcctaagtctcagcaaatggatagcagaacatcgtcttctaaagcctcactatccagacctggcagaagacccctgggatttttatctttaatatgctcaaagaatagtttggagtctgatgaacctatgcaagtccatagtaagaaacgcctaaaacctcttatacctggattaagaaagaaattgaaaagatctaatccattcaatgaaagccaggaaaaaaatcgagagtcctctgatctgcttccatctccaagtgttattactactcaatctgagaatattagcagctcagcaactcaggtttcttgtgatcagcccttactgaaagaaggatataaaagtgcccaaaagcgggcccctcaaggggaggcaaccacagtctctgaatatttcttcaatgatatcttcattgaagtggatgaaacagaataaaacaatcttttctctttttcttttttaaattaggtctaggatttccagagtcaa

SEQ ID NO: 1038 - protein, 2624 aa, Homo sapiens
MFRRARLSVKPNVRPGVGARGSTASNPQRGRESPRPPDPATDSASKPAEPTDVPTVDFGGAEPQEKAPRSSTEKTGGDNDVEESSRSSSTVSQRRKRISSTSSLVKSSVSVPSESHPLSTINQEAPQPTATSTKEKQPCSDRYRIYKAQKLREMLKEELRKEKKQWKNKYAINESQRPPDRSKMTMRDFIYYLPDNNPMTSSLEQEKKTEKPSTPVQTREQEGKSTPNAEDNEMEEETDDGPLLVPRVKVAEDGSIILDEESLTVEVLRTKGPCVVEENDPIFERGSTTTYSSFRKNYYSKPWSNKETDMFFLAISMVGTDFSMIGQLFPHRARIEIKNKFKREEKTNGWRIDKAFQEKRPFDFDFFAHLLQKVLAEEEKRKQKSVKNHSLKEKKSTKPRKNVKVKKVACEGVNNDPDESMSSRISDTERSQKDAQTVEEESLTLSREDAEQVALEVDLNQKKRRRKKQDGANELGVNNLLENATVQAGPSKGEKHKNKCQAIRPELKEGECSKEQMLSCTQNIDGIVGFASTEKVEKRTDPILSLSNQQDATSVATESSESSTSDLPSFEVGIRALCEVNNAEGSCIEERNVDLKNNSLEIDQTENVKPMLRGRFQRPKPNLSRAGKKSVLSQGKTESESKNSHSKTSVEKNHVEKDKMNTLDILRMETTERENPEAETVSVLGEKNCLQEGSQLKALRPVQVRGRLQKPKPNAGKAAERKEILISQEEIGANVEKNENESCADRDTPQHMEDQSRKDFEEEDVILQPEKNDSFQNVQPDEPKVLNECLSVQENNKANKLNQVPILRTRFQKPKPNIGRGTGRREISSKEEVLEKILVSGEMAAALRETVRLDTSPKEMVPAEINTKEMQSDLKETGRRAISPREKILDVIDDTIEMETGLKAMGREICLREKTPEVIDATEEIDKDLEEAGRREISPQKNGPEEVKPLGEVETDLKATGNESSPREKTPEVTDATEEIDKNLEETGRRKISPRENGPEEVKPVDEMETDLNATGRESSPREKTPEVIDATEEIDLEETEREVSPQENGLEEVKPLGEMETDLKATGRDSFPRGKTPEVIDAIEEIEIDLEETEREISPQENGLEEVKPLGEMQTDLKATGREISPREKTPEVIDATEEIDKDLEETGRREISPEENGPEEVKPVDEMETDLKTTGREGSSREKTREVIDAAEVIETDLEETEREISPQENGPEEVKPVGKMETDLKEIREEISQREKVLAEFSAIREKEIDLKETGKRDIPIMEKVSGKMAVVEEMEADLKETGKENFRERGSEEICVTEEKVAELKQTGKTDISPRENELEETSTSRQTDTHLMQSGSNDFSAVPSLDIQNISSEVLSMMHTPVEEKRNSEKEVSSHFSHFKISSQTHESDKTEVQGIQSPDVPEQFSDINLSKSLPQEQKPLEIKPAPFVRSRFKRPKPNLARAALKRETTESEKYIYEKKSETKKMETIVMQENNEQTDTLPSQHDEASLMISREKDTLGHRNEEAVILPCTQTERNLSPSNSCEPKEESQSAPVQKNDSVVSVGTNNVNTFQQEMKESVIQTARQVRGRLQRPRPNIRKTGQRQIVDKGEAKGIIKEGRTILPKDETEKKVLTVSNSQIETEIEVPSSAVPEHRMYENQSQVVLVENLHVNKTNETIRHENKPYVPSSAQMTRRKFQKAKPNLGRAHSKKEEPVLEKVTTDQSKEGKPEDHLLQKGASNTQLLLKEKAELLTSLEVSARKDCVGSKESALAKIDAELEEVGPSRRVGEETVGDNSPSSVVEEQYLNKLTSCPQPLNETSYSKIALDGKTTISSTSEYERNRGERRSHKKFKPNVTRGRGSKRVRGKTSKKEPRASKAMLVTLRASQEEDDDADDFESDYEEESYHLAPEEVNKAPVFVPVGLRSPEPVSAQIEETMEELEITVNVPDVGCIAVVEHELPNTDVTTEEMKQEENLSVPFEMTTSEHIQDEPGTNDGSTEAAITLLTMGDLVLQSEISSEQGDVGVCIIPHVHSKDKSHIPSSLDNVNHKIVHECQELSSPVITTSPASFEENKIVLEEQSSREEISLMEKVKENATPTRNTISKVTSNLRIRSRLAKPKPNLEKTLGTNRLDDYQEVSSLCVTKGAEMETQRETEKNASKATELENKNLGPVTTAENKDQSKLACVHGIKGTSISSEVNLTERNENQEESSQEVHMLSVAPVASSETGPCTLGLDRGLGENSVEEPQIKDSKGDSVLTLPVPEYTPTSIPEVQQENIINPQDLTVNLVANVPQDGEDEQAFILTLVEIPANAVEEFTDATAQFMPNPLLPAPILVKSVNTEERGDMSICLPATSVGQDAMGLSISGRDNSKKPPDNLDLVSRKRFQCRLDKNDHIPPAKKRSLTLRDDCQEYTTEVHSKELTNVFEETGESHKGQDIFLTSGSTLTTPEPQRQQVEAAFQSRGSRSPDACMDKNVPQLPQDEMIVSDKEERTDAAPKSQQMDSRTSSSKASLSRPGRRPLGFLSLICSKNSLESDEPMQVHSKKRLKPLIPGLRKKLKRSNPFNESQEKNRESSDLLPSPSVITTQSENISSSATQVSCDQPLLKEGYKSAQKRAPQGEATTVSEYFFNDIFIEVDETE

SEQ ID NO: 1039 - DNA, 2329 bp, Homo sapiens
aggacctgagctcagcttccgccccagccagggaagcggcaggggaaagcaccggctccaggccagcgtgggccgctctctcgctcggtgcccgccgccatgtgggccgtcctgaggttagccctgcggccgtgtgcccgcgcctctcccgccgggccgcgcgcctatcacggggactcggtggcctcgctgggcacccagccggacttgggctctgccctctaccaggagaactacaagcagatgaaagcactagtaaatcagctccatgaacgagtggagcatataaaactaggaggtggtgagaaagcccgagcacttcacatatcaagaggaaaactattgcccagagaaagaattgacaatctcatagacccagggtctccatttctggaattatcccagtttgcaggttaccagttatatgacaatgaggaggtgccaggaggtggcattattacaggcattggaagagtatcaggagtagaatgcatgattattgccaatgatgccaccgtcaaaggaggtgcctactacccagtgactgtgaaaaaacaattacgggcccaagaaattgccatgcaaaacaggctcccctgcatctacttagttgattcgggaggagcatacttacctcgacaagcagatgtgtttccagatcgagaccactttggccgtacattctataatcaggcaattatgtcttctaaaaatattgcacagatcgcagtggtcatgggctcctgcaccgcaggaggagcctatgtgcctgccatggctgatgaaaacatcattgtacgcaagcagggtaccattttcttggcaggaccccccttggttaaagcggcaactggggaagaagtatctgctgaggatcttggaggtgctgatcttcattgcagaaagtctggagtaagtgaccactgggctttggatgatcatcatgcccttcacttaactaggaaggttgtgaggaatctaaattatcagaagaaattggatgtcaccattgaaccttctgaagagcctttatttcctgctgatgaattgtatggaatagttggtgctaaccttaagaggagctttgatgtccgagaggtcattgctagaatcgtggatggaagcagattcactgagttcaaagccttttatggagacacattagttacaggatttgctcgaatatttgggtacccagtaggtatcgttggaaacaacggagttctcttttctgaatctgcaaaaaagggtactcactttgtccagttatgctgccaaagaaatattcctctgctgttccttcaaaacattactggatttatggttggtagagagtatgaagctgaaggaattgccaaggatggtgccaagatggtggccgctgtggcctgtgcccaagtgcctaagataaccctcatcattgggggctcctatggagccggaaactatgggatgtgtggcagagcgtatagcccaagatttctctacatttggccaaatgctcgtatctcagtgatgggaggagagcaggcagccaatgtgttggccacgataacaaaggaccaaagagcccgggaaggaaagcagttctccagtgctgatgaagcggctttaaaagagcccatcattaagaagtttgaagaggaaggaaacccttactattccagcgcaagggtatgggatgatgggatcattgatccagcagacaccagactggtcttgggtctcagttttagtgcagccctcaacgcaccaatagagaagactgacttcggtatcttcaggatgtaactggaataaaggatgttttctgttggacatgtactgaaaattaacacatgtagtagccttaaaattttagacttctcgaacatgaggctgttacagtaatttttttaacactgtgcattgtacttttctaccttaaaaaaatcagtgaggatatttatttaatgaacatcaattccttttaaattttcttagagaaatttctctgtggctcagttttaccacccataaagcggagacagtaatttatggttatcctttctgacccacaaagtatgaaaagttctgtaatctgtaaactcagttctgtaatctgtattattgagatgattaatataaagttgtattttcactgaaatgattgttttgctggttatgcttggtgatattttagcgggcttatttttgaaaggcatctgttacttcagttgcataaagtgccctcacactgctgtgcagccattaccaccattcatctccagaatttgttctcagtcccaaactgaaactataccattcaaacaacagcgctccccatttc

SEQ ID NO: 1040 - protein, 563 aa, Homo sapiens
MWAVLRLALRPCARASPAGPRAYHGDSVASLGTQPDLGSALYQENYKQMKALVNQLHERVEHIKLGGGEKARALHISRGKLLPRERIDNLIDPGSPFLELSQFAGYQLYDNEEVPGGGIITGIGRVSGVECMIIANDATVKGGAYYPVTVKKQLRAQEIAMQNRLPCIYLVDSGGAYLPRQADVFPDRDHFGRTFYNQAIMSSKNIAQIAVVMGSCTAGGAYVPAMADENIIVRKQGTIFLAGPPLVKAATGEEVSAEDLGGADLHCRKSGVSDHWALDDHHALHLTRKVVRNLNYQKKLDVTIEPSEEPLFPADELYGIVGANLKRSFDVREVIARIVDGSRFTEFKAFYGDTLVTGFARIFGYPVGIVGNNGVLFSESAKKGTHFVQLCCQRNIPLLFLQNITGFMVGREYEAEGIAKDGAKMVAAVACAQVPKITLIIGGSYGAGNYGMCGRAYSPRFLYIWPNARISVMGGEQAANVLATITKDQRAREGKQFSSADEAALKEPIIKKFEEEGNPYYSSARVWDDGIIDPADTRLVLGLSFSAALNAPIEKTDFGIFRM

SEQ ID NO: 1041 - DNA, 908 bp, Homo sapiens
ggttgacccgggccctcctccacacccccttccttcttcgcctcctccctctttcctgcacgggggctcgggctcactataaaaggtgggagcgcgtggtgccccagcaacgacgagtttcagaacgatggagagctcccgcgtgaggctgctgcccctcctgggcgccgccctgctgctgatgctacctctgttgggtacccgtgcccaggaggacgccgagctccagccccgagccctggacatctactctgccgtggatgatgcctcccacgagaaggagctgatcgaagcgctgcaagaagtcttgaagaagctcaagagtaaacgtgttcccatctatgagaagaagtatggccaagtccccatgtgtgacgccggtgagcagtgtgcagtgaggaaaggggcaaggatcgggaagctgtgtgactgtccccgaggaacctcctgcaattccttcctcctgaagtgcttatgaaggggcgtccattctcctccatacatccccatccctctactttccccagaggaccacaccttcctccctggagtttggcttaagcaacagataaagtttttattttcctctgaagggaaagggctcttttcctgctgtttcaaaaataaaagaacacattagatgttactgtgtgaagaataatgccttgtatggtgttgatacgtgtgtgaagtattcttattttatttgtctgacaaactcttgtgtacctttgtgtaaagaagggaagctttgtttgaaaattgtatttttgtatgtggcatggcagaatgaaaattagatctagctaatctcggtagatgtcattacaacctggaaaataaatcaccctaagtgacacaaattgaagcatgtacaaattatacataataaagtgtttttaataatt

SEQ ID NO: 1042 - protein, 116 aa, Homo sapiens
MESSRVRLLPLLGAALLLMLPLLGTRAQEDAELQPRALDIYSAVDDASHEKELIEALQEVLKKLKSKRVPIYEKKYGQVPMCDAGEQCAVRKGARIGKLCDCPRGTSCNSFLLKCL

SEQ ID NO: 1043 - DNA, 6250 bp, Homo sapiens
atagtaaaggtcggcccgcgcaagatggcggcccccttggaactcagttgctggggaggcggctggggactcccatcggttcacagcgagtccctggtggtgatggcttatgccaaattttctggtgcacccttgaaagtcaatgtgatagataacacctggagaggttcaaaaggcgatgtaccaattttgacaactgaagacgacatggtttctcagccagcaaaaatactaaactttttaagaaaacagaaatataatgctgattatgaactctcagcaaaacaaggggcagatacattggcttatattgctctcctcgaagagaagcttctccctgcagtgcttcacacattctgggttgagagtgacaattactttactgtgacaaagccatggtttgcttcacaaattccttttcctttgagtttgatcctgcctggaagaatgtctcagcaaatcttatcaagtcgtgcaggaacccatatgttaagaaaatgagctttgtagtcaaaagactcatctaatttgagctgagtggagctcagctgtgtttgacccacatcctcccaatttgttctgtatttaggtagttatttatacaagcgtctttaagtcattctaaatattttttcttgaaagttttaactaagtgagaaataaggtagtcttcaaaatcttggtcatctgtttggatgagggaaagtacctcatgagttgcacattacttctacaacagggtgtgtgtgtgtgtgtttgtgtgtgtcagtcatcttcaaaggcagattattagattccagcaatctgaaatctattattccagcagtctggaatctaaatatgttatattggaaatcatgactgtgagactttattgtcctctaggatggatgtatattggagaagggtggttagcacattcatcagacatctgcttatgctgtggtcaaggccagtcatttttaatttatatcagatttatatcagaccctccaaaaagtatttgaaatatattacagttataacgtacaagtacattacatgtatattacaagtatattacatgtaaaacaggacaatttaaaaattttaaattttaaagaattaaaaattttaaaaatttaaattaaaaaaattaaaaatttatagaaccatatcaacactgacagattctaaaattaagtagtaaatttaactccaagtttctccatgggcaaagtcaaaagataatgctaggttatgtcaatttttcttttcaacaaaactgctaatgtctattaggaagaaaaatgtgtttaaagttttacaggaacgtggagctcatgttcttctgatatgtagactttgataaagaagcatactgtaatgttttatgaactgaaattttaatcaaaaggggtcattttagaataacaagtattattcttttttagtagagggaatgactgtcaatatgatttatttgtttttgtgtcatccctactttgaactgccgttagccttacattctcactatagtccataatgcttccagatcaccttttctaagatgcaacatgtgagtttagtgagagtttatatgttgggttacttagttgagctatttatgtataagtaaatgagatgacaggaagctgtaactgagcacaaagtaccttagggagcagccacacatacaggaagctcttagaaaagaactttttttttttttttgagacagagtttcactcttgttgcccaggctggagtgcagtagcgcagtctcggctcactgcaacctctacctcctgggttcaagcaagtctcctgtctcagcctcccaagtagctgggattacaggcatgtgccaccatgcccagctaattttgttttttttttagtcgagacggggtttcaccatgttgctcaggctggtcttgaactcctgacctcaagtgattcacctgcctcggcctcccaaagtgctgggattacaggcgtgagccactgcgcccggccaaaaagaacattttgtcaatctgaacagagcacagaacattttttcagactgaacagactgttggaccagcctgtcatgatatgttttagataaagtttgagtgagttcattgggataaatggtccacaatcttaaacagaatactgtgagccaatgccttttggaagtaatggtggaggataatatgattaaagggaacatgcttgtgtttatttttgttggtagtatatgattagaaaaactagataattcccataagatgaagatcttccatgaacaaactaccatcaatcatccatcagattgattttttttttttttttaagtaacactaaagaagctgtaaagaacattgaaggtggtcattccttcaaaactgtgttttgaccacacaaggtgggcattaacaaaccaaatttcaacttaagtttgtttgtattatattgggggtgctgcgagactggagattttataaaagcaagcatttttatttccatttataatttctattcaatattgctagatatattaacatgaaggaatggggaagcttatttcaatcaaagctaaaattttcagaagtctgtaaaaatggaaaaacaccattgaaagaggcagaaacaggtaagggggatagtatcttagaaaacctgttggttaaggcagctgcatgtgataaaagtggtacttgaacttggtagtgtttccttagaacctcctccaaaaatatgcatttaccaggcttgttacaattttttgacagtttttcatcaactgtcaaaaacttcaacccttttaaaacctagatataaatgcttacatgtaaagaaaggaagctaagcagtgggtacctgggatctctctgaactatttttataacttcttgtgagtcttaagtatttcaaaataaaagtggttttaaagtaaattcatagattaaatgtatcattatctatatataaaccatgatttaaaactttaattttctaaacatagtattcaacttagttgaataaatatatgatagaagttaaatagaatttttatttcattcttaagaaaaactcatgtttgtaacaaatgatatctaaagatctattttgccttaccagaaaagaaaaaaaaaaccctaaaaccaaaaactccttttccctaggaagtcaaaaatgctgtgatttaaaatatctaattatatttttttctttctatggtagtggggtttacttctgaggataaaatattttgaaaaagctctgtcccttgacatggtagttctcccgtgccttgtacttgttctctctccatatgcacagtgtgacaagatgctcacctttaatgaagaaggtgtagcttttcgttttaagctgtaattgtctttgtcttgattggctatttttataactgaaatcctgagcaacagagataatttgggtggtaatgatcatcttttgtatatgttcttgatgttaagaaatattttttgctgccattcagctttgtggaatttatgtttacttttcaatattttcatatttcttaaccagattttaaagaaatttgttgttagttacgtgaaatcaaaggtcaggtcagtaagcccattatcctcaaacttgaagtttcgttggatgttcaaaatgctaatttttgcagagatataaggataaattagttttagtttgtgttcttaagggtttgcaaaataatttggctcccaaactcttgttggggtgtagtgtttgctaggagcccaggatacctgccctggacttaaattgtgattgaagtggagaggtactctaggaatttaaaaagacacaaaattatttttttccagactagtgtgccatggatttctgataagaattaacattcttgaacaaaggtatcagaaagggtaactcgagttgaaggtttgtgaatagaaggggaaatgtgatagaagattattcagaacaaaataagtagacaaaataacaaaagacaggaaaataagtctctttgtatccttattaatcatttgaaattatgctataatattttttaaaactcacctgtttggttctgggtgaagcagttcctgaaggagtgttttgtcagaatatattgttaggagaatagagggttctgtggccaagtaagtttgggaaatagtgggttagacaaagttgagttactgttggcctttcagacctttgatacgctaatgtgcattttaaatctccaagaagcacctctattttatacatcatttccctaatttattttaatatggatttcttgtttttgttttcttgagacggagtcttggtcttgtcacccaggctggagtgcagtggcacgatctcggctcactacaacctccgcctcccaggttcaagcgattctcctgcctcagcctcccaatttactgggattacaggcacctgccaccacgcccagctaatttttgtatttttagtagagatggggtttcaccatgttgaccaggctgattttgaactcctgacctcaggtgattctgcccgcctcaccctcccacagtgctggaattataggtatgagccactgtccccggccagatttttttaaaagtaggtatcttgtgggatttatgttctgagagatacacctaaggaaatgctgccctacagtgtttttgctagttcatactcattacaaaggtttcttgttgttgggtgcccctctagccagtggtagtaaaatgggaagagacaggtcaagactcccttggaccatggcattgagagagggatggctgtcggcatagatatgttggttatttaggcatttgtgagggaggcccctggctcttccagcctgtttccttaggatcccagttggccgggaacagctgtacaagggtctgctgaactggtggtttcagcagactacccagttcctaagcatccatgagacagagggaaccaacttgtatttccagaacaattttccaaaccttttctggctgtactttaaaagtgccaaaaaggcaatgggtgtttatgacactaaagtcacatacaagctagtatgatacatacatcatagaaagcttatagttgctcagtgacaaagcaaaggaagtttaatattttccagttttgttcattaccgaagacagtctacggttcatagttttcactaaattctaagcagattctatatcctaaaacatttaaacctcactaggcctgcgattttgagagggttagctaaatatgtttggtatcacttcagagtctaaaaccagattactaatcgtgtgtaaggaggcattttgtgtgtctttgcaatgtatacaattggattatttggaacaccattttgaatgtgtatttgagagaaagctcgcctgtgggttttgagttgtggtgtaatggtgaacatgtagccacgtgaaaggccgttggatctttgttctgattcttcagtcgtcttcttgcaaattcagagaaatgtcttttaatcatttcgtttacatatcccagatccttggaaatcatgaaaaataacttgccagagtttgcatcagccctcagtaagtcatgaaccatagagaaggtcatggggccatttattctttggaccactggctacttctgaagttctggcttccttctctctaggaggagtcgtgtattcaagcttttaagttaaatgcataaaaatgagttttacttctcttctgacttgatttttaattttatgaaatgggaaataatgtttttccatttttctgttcattttgaagtgggaatttgaggtgtttgtaatgtcatgttactgttctgaaagattgacagtaaagaagacaagaaatatatgtatgtagtatgcatattagttttgtcccaccaagcctatctttgaatggcaaacattttaaaaacatctgttctagttgcacaactactctagcttctttataaagtaaacaatcttaaagtaagcaatgttggccataatttcaatattctagccttgccgagtgtgaatatattttactcagagactatgtacaaatacactaaagtggtgatggtgatcaatattgtaaagaatttattctgataaatgagaaactggatataatgtcaaaatagctattttctcaataaaaatctcaaatctcaaaaaaaaaaaaaaaaaaaaaaaaaaaaaaaaaaaaaaaaaaaaaaaaaaaaaaaaaaaaaaagtaaaaaaaaaaaaaaaaaaaaaaaaaaaaaa

SEQ ID NO: 1044 - protein, 158 aa, Homo sapiens
MAAPLELSCWGGGWGLPSVHSESLVVMAYAKFSGAPLKVNVIDNTWRGSKGDVPILTTEDDMVSQPAKILNFLRKQKYNADYELSAKQGADTLAYIALLEEKLLPAVLHTFWVESDNYFTVTKPWFASQIPFPLSLILPGRMSQQILSSRAGTHMLRK

SEQ ID NO: 1045 - DNA, 3365 bp, Homo sapiens
ctggtccgtccaggctccttcccatcctcacacccgcgcctttctccctgcggccccggctcgctgctccagctgcccagctcttcccccgcccggccgcaccataaagcgcccggccgctgccgcggagcccagcagccagctccccagcaccgcacggcggggacgcgagcgcgcccccgacggcagcccggacgccgagcacgggtcacctgcggcgccggcccgggcgccgaccgaggttcaacgcacggcccggggacccccaggcggggccaacgccgccgtcgcccccggcctcgcggggagcaggaagagccaacatgctggccccgcgcggagccgccgtcctcctgctgcacctggtcctgcagcggtggctagcggcaggcgcccaggccaccccccaggtctttgaccttctcccatcttccagtcagaggctaaacccaggcgctctgctgccagtcctgacagaccccgccctgaatgatctctatgtgatttccaccttcaagctgcagactaaaagttcagccaccatcttcggtctttactcttcaactgacaacagtaaatattttgaatttactgtgatgggacgcttaaacaaagccatcctccgttacctgaagaacgatgggaaggtgcatttggtggttttcaacaacctgcagctggcagacggaaggcggcacaggatcctcctgaggctgagcaatttgcagcgaggggccggctccctagagctctacctggactgcatccaggtggattccgttcacaatctccccagggcctttgctggcccctcccagaaacctgagaccattgaattgaggactttccagaggaagccacaggacttcttggaagagctgaagctggtggtgagaggctcactgttccaggtggccagcctgcaagactgcttcctgcagcagagtgagccactggctgccacaggcacaggggactttaaccggcagttcttgggtcaaatgacacaattaaaccaactcctgggagaggtgaaggaccttctgagacagcaggttaaggaaacatcatttttgcgaaacaccatagctgaatgccaggcttgcggtcctctcaagtttcagtctccgaccccaagcacggtggtgcccccggctccccctgcaccgccaacacgcccacctcgtcggtgtgactccaacccatgtttccgaggtgtccaatgtaccgacagtagagatggcttccagtgtgggccctgccccgagggctacacaggaaacgggatcacctgtattgatgttgatgagtgcaaataccatccctgctacccgggcgtgcactgcataaatttgtctcctggcttcagatgtgacgcctgcccagtgggcttcacagggcccatggtgcagggtgttgggatcagttttgccaagtcaaacaagcaggtctgcactgacattgatgagtgtcgaaatggagcgtgcgttcccaactcgatctgcgttaatactttgggatcttaccgctgtgggccttgtaagccggggtatactggtgatcagataaggggatgcaaagcggaaagaaactgcagaaacccagagctgaacccttgcagtgtgaatgcccagtgcattgaagagaggcagggggatgtgacatgtgtgtgtggagtcggttgggctggagatggctatatctgtggaaaggatgtggacatcgacagttaccccgacgaagaactgccatgctctgccaggaactgtaaaaaggacaactgcaaatatgtgccaaattctggccaagaagatgcagacagagatggcattggcgacgcttgtgacgaggatgctgacggagatgggatcctgaatgagcaggataactgtgtcctgattcataatgtggaccaaaggaacagcgataaagatatctttggggatgcctgtgataactgcctgagtgtcttaaataacgaccagaaagacaccgatggggatggaagaggagatgcctgtgatgatgacatggatggagatggaataaaaaacattctggacaactgcccaaaatttcccaatcgtgaccaacgggacaaggatggtgatggtgtgggggatgcctgtgacagttgtcctgatgtcagcaaccctaaccagtctgatgtggataatgatctggttggggactcctgtgacaccaatcaggacagtgatggagatgggcaccaggacagcacagacaactgccccaccgtcattaacagtgcccagctggacaccgataaggatggaattggtgacgagtgtgatgatgatgatgacaatgatggtatcccagacctggtgccccctggaccagacaactgccggctggtccccaacccagcccaggaggatagcaacagcgacggagtgggagacatctgtgagtctgactttgaccaggaccaggtcatcgatcggatcgacgtctgcccagagaacgcagaggtcaccctgaccgacttcagggcttaccagaccgtggtcctggatcctgaaggggatgcccagatcgatcccaactgggtggtcctgaaccagggcatggagattgtacagaccatgaacagtgatcctggcctggcagtggggtacacagcttttaatggagttgacttcgaagggaccttccatgtgaatacccagacagatgatgactatgcaggctttatctttggctaccaagatagctccagcttctacgtggtcatgtggaagcagacggagcagacatattggcaagccaccccattccgagcagttgcagaacctggcattcagctcaaggctgtgaagtctaagacaggtccaggggagcatctccggaactccctgtggcacacgggggacaccagtgaccaggtcaggctgctgtggaaggactccaggaatgtgggctggaaggacaaggtgtcctaccgctggttcctacagcacaggccccaggtgggctacatcagggtacgattttatgaaggctctgagttggtggctgactctggcgtcaccatagacaccacaatgcgtggaggccgacttggcgttttctgcttctctcaagaaaacatcatctggtccaacctcaagtatcgctgcaatgacaccatccctgaggacttccaagagtttcaaacccagaatttcgaccgcttcgataattaaaccaaggaagcaatctgtaactgcttttcggaacactaaaaccatatatattttaacttcaattttctttagcttttaccaacccaaatatatcaaaacgttttatgtgaatgtggcaataaaggagaagagatcatttttaaaaaaaaaaaaaaa

SEQ ID NO: 1046 - protein, 961 aa, Homo sapiens
MLAPRGAAVLLLHLVLQRWLAAGAQATPQVFDLLPSSSQRLNPGALLPVLTDPALNDLYVISTFKLQTKSSATIFGLYSSTDNSKYFEFTVMGRLNKAILRYLKNDGKVHLVVFNNLQLADGRRHRILLRLSNLQRGAGSLELYLDCIQVDSVHNLPRAFAGPSQKPETIELRTFQRKPQDFLEELKLVVRGSLFQVASLQDCFLQQSEPLAATGTGDFNRQFLGQMTQLNQLLGEVKDLLRQQVKETSFLRNTIAECQACGPLKFQSPTPSTVVPPAPPAPPTRPPRRCDSNPCFRGVQCTDSRDGFQCGPCPEGYTGNGITCIDVDECKYHPCYPGVHCINLSPGFRCDACPVGFTGPMVQGVGISFAKSNKQVCTDIDECRNGACVPNSICVNTLGSYRCGPCKPGYTGDQIRGCKAERNCRNPELNPCSVNAQCIEERQGDVTCVCGVGWAGDGYICGKDVDIDSYPDEELPCSARNCKKDNCKYVPNSGQEDADRDGIGDACDEDADGDGILNEQDNCVLIHNVDQRNSDKDIFGDACDNCLSVLNNDQKDTDGDGRGDACDDDMDGDGIKNILDNCPKFPNRDQRDKDGDGVGDACDSCPDVSNPNQSDVDNDLVGDSCDTNQDSDGDGHQDSTDNCPTVINSAQLDTDKDGIGDECDDDDDNDGIPDLVPPGPDNCRLVPNPAQEDSNSDGVGDICESDFDQDQVIDRIDVCPENAEVTLTDFRAYQTVVLDPEGDAQIDPNWVVLNQGMEIVQTMNSDPGLAVGYTAFNGVDFEGTFHVNTQTDDDYAGFIFGYQDSSSFYVVMWKQTEQTYWQATPFRAVAEPGIQLKAVKSKTGPGEHLRNSLWHTGDTSDQVRLLWKDSRNVGWKDKVSYRWFLQHRPQVGYIRVRFYEGSELVADSGVTIDTTMRGGRLGVFCFSQENIIWSNLKYRCNDTIPEDFQEFQTQNFDRFDN

SEQ ID NO: 1047 - DNA, 1907 bp, Homo sapiens
ggctccgccgaggctgatcttcgttcaagtgtgagctgcggctgagcccagcgctcgaggcgcgaggcagccaggagggcccgtgcggcgcggggagccagcgagcgcgccttcggcattggccgccgcgatgtcagctcagtgctgtgcgggccagctggcctgctgctgtgggtctgcaggctgctctctctgctgtgattgctgccccaggattcggcagtccctcagcacccgcttcatgtacgccctctacttcattctggtcgtcgtcctctgctgcatcatgatgtcaacaaccgtggctcacaagatgaaagagcacattcctttttttgaagatatgtgtaaaggcattaaagctggtgacacctgtgagaagctggtgggatattctgccgtgtatagagtctgttttggaatggcttgtttcttctttatcttctgtctactgaccttgaaaatcaacaacagcaaaagttgtagagctcatattcacaatggcttttggttctttaaacttctgctgttgggggccatgtgctcaggagctttcttcattccagatcaggacacctttctgaacgcctggcgctatgtgggagccgtcggaggcttcctcttcattggcatccagctcctcctgctcgtggagtttgcacataagtggaacaagaactggacagcaggcacagccagtaacaagctgtggtacgcctccctggccctggtgacgctcatcatgtattccattgccactggaggcttggttttgatggcagtgttttatacacagaaagacagctgcatggaaaacaaaattctgctgggagtaaatggaggcctgtgcctgcttatatcattggtagccatctcaccctgggtccaaaatcgacagccacactcggggctcttacaatcaggggtcataagctgctatgtcacctacctcaccttctcagctctgtccagcaaacctgcagaagtagttctagatgaacatgggaaaaatgttacaatctgtgtgcctgactttggtcaagacctgtacagagatgaaaacttggtgactatactggggaccagcctcttaatcggatgtatcttgtattcatgtttgacatcaacaacaagatcgagttctgacgctctgcaggggcgatacgcagctcctgaattggagatagctcgctgttgtttttgcttcagtcctggtggagaggacactgaagagcagcagccggggaaggagggaccacgggtcatttatgacgagaagaaaggcaccgtctacatctactcctacttccacttcgtgttcttcctagcttccctgtatgtgatgatgaccgtcaccaactggttcaaccatgtaagaagtgcctttcacctcctgccatgattctgaggcctccccagccatgtggaactctgagaaacctgaacggactccatttggctccttcatttgcaagacatcaagggctccttacccacccccttcctcaaggaattaacttgtgcaagctgactcccagcacatcaaagaatgcaattaactgataacatgctgtggcaagctatgtccgcagttcccaggaatttgtccagttgatattaccctaagcccctgtgtttttgtctggttgatagcacccaaagcccagcgtctatcaccttgtgatggatttaaagcccctgcacctggaactgtttgctttcctgtaaccatttgtctttttaacttcttttgcctgttttacttctgtaagactgctacagctaggctccccctcccctctttaaaccaaagtataaaacaaaatctagccccttcttcagggccgagagaattttgagcactagccgtctctcggtcgctggctaataaaggactcctcaattcg

SEQ ID NO: 1048 - protein, 423 aa, Homo sapiens
MSAQCCAGQLACCCGSAGCSLCCDCCPRIRQSLSTRFMYALYFILVVVLCCIMMSTTVAHKMKEHIPFFEDMCKGIKAGDTCEKLVGYSAVYRVCFGMACFFFIFCLLTLKINNSKSCRAHIHNGFWFFKLLLLGAMCSGAFFIPDQDTFLNAWRYVGAVGGFLFIGIQLLLLVEFAHKWNKNWTAGTASNKLWYASLALVTLIMYSIATGGLVLMAVFYTQKDSCMENKILLGVNGGLCLLISLVAISPWVQNRQPHSGLLQSGVISCYVTYLTFSALSSKPAEVVLDEHGKNVTICVPDFGQDLYRDENLVTILGTSLLIGCILYSCLTSTTRSSSDALQGRYAAPELEIARCCFCFSPGGEDTEEQQPGKEGPRVIYDEKKGTVYIYSYFHFVFFLASLYVMMTVTNWFNHVRSAFHLLP

SEQ ID NO: 1049 - DNA, 1880 bp, Homo sapiens
ctttcccacccttcctccccacaaggctgtctgagatgccaccttccacctaaacatcatctcccaaattttaatccttaactttggtctctgacttctgcttgattccacagtctccacccacatttgcacaaaggaccatcacctgtccttcctggaatctctaaagttttctgctttccttctgtcctgatggccagctctgctaagtcagctgagatgcccaccatctccaaaacccttaaccctactcctgatcctcatcaagaatatctggaccctaggattaccattgccttattcgaaattggatcacattccccttcctcctggggctctctccctttcctaaagaatagcagccatcaagttacagaacaacagactgcacagaagtttaacaatctcttaaaagaaattaaagatattcttaaaaatatggcaggttttgaagagaagatcacagaagcaaaagaactttttgaggaaaccaatattactgaggatgtgtcagcccacaaagaaaatatcagaggacttgacaaaatcaatgaaatgttatcaacaaacctgcctgttagtttagccccagagaaagaagacaatgaaaagaaacaggagatgatattggaaaccaatattactgaggatgtgtcagcccacaaagaaaatatcagaggacttgacaaaatcaatgaaatgttatcaacaaacctgcctgttagtttagccccagagaaagaagacaatgaaaagaaacagcagatgataatggaaaaccagaactctgagaacaccgcacaagtttttgcaagagatttggtaaatcgtttagaagaaaaaaaagtccttaacgaaactcaacaaagtcaggaaaaagcaaaaaacagacttaatgttcaagaagaaactatgaaaattaggaacaacatggagcagttactacaggaagcagaacactggagtaaacaacatactgagctcagtaaactgataaaatcctatcagaaatctcagaaagacataagtgaaactcttggaaataatggagtcggtttccaaacccagccaaataatgaagtgtcggctaagcatgagctggaggaacaggtgaagaaactgagccatgacacctattcattgcagttgatggcagctttgctagagaatgaatgccaaatcttacagcagagagtagagattctcaaggaactccatcatcagaaacagggaactctgcaagagaagccaattcagataaactataaacaggacaagaaaaatcagaagccatcagaagcaaagaaagtagaaatgtataagcagaacaagcaagcaatgaagggtacattttggaaaaaagacagatcctgtagaagcctggatgtttgtcttaataagaaagcttgcaatacccagttcaatattcatgttgcaagaaaagctcttaggggaaaaatgaggtcagctagcagcctaagatagaaaataccaaaagcagatgaaaaggtgaatccttaaaaaactacatctgttacctccaacttgtcagtcatgatcaatcatcaaaccttgggcagatctgctggttcaaccaagaaagagctatagaataaggagattgacacttatattactcattacttcagcagttatgtaagtctggtctttaatgaccattgtgtctacatcaagttcataacttttcacctttacaatctgcttgttttttttgtaattattagatagacagcctagagtgagaagttaaaggtccaattaagttaagatctaaataaaaaccagaatacaagggaaaaaaaaaaaaaaaaaaaaaaaaaaaaaaaaaaaaaaaaaaaaaaaaaaaaaaaaaaaaaaaa

SEQ ID NO: 1050 - protein, 430 aa, Homo sapiens
MASSAKSAEMPTISKTLNPTPDPHQEYLDPRITIALFEIGSHSPSSWGSLPFLKNSSHQVTEQQTAQKFNNLLKEIKDILKNMAGFEEKITEAKELFEETNITEDVSAHKENIRGLDKINEMLSTNLPVSLAPEKEDNEKKQEMILETNITEDVSAHKENIRGLDKINEMLSTNLPVSLAPEKEDNEKKQQMIMENQNSENTAQVFARDLVNRLEEKKVLNETQQSQEKAKNRLNVQEETMKIRNNMEQLLQEAEHWSKQHTELSKLIKSYQKSQKDISETLGNNGVGFQTQPNNEVSAKHELEEQVKKLSHDTYSLQLMAALLENECQILQQRVEILKELHHQKQGTLQEKPIQINYKQDKKNQKPSEAKKVEMYKQNKQAMKGTFWKKDRSCRSLDVCLNKKACNTQFNIHVARKALRGKMRSASSLR

SEQ ID NO: 1051 - DNA, 1362 bp, Homo sapiens
gcggcggcaacatggcggacgtgataaatgtcagtgtgaacctggaggccttttcccaggccattagtgccatccaggcgctgcgctccagcgtgagcaggttgttcgactgcctgaaggatgggatgcggaacaaggagacgctggagggccgggagaaggccttcattgcgcacttccaggacaacttacattcggtcaaccgggacctcaatgagctggaacgtctgagcaatctggtaggcaagccatctgagaaccatcctcttcataacagtgggctgttaagcctggatcctgtgcaggacaaaactcctctctatagtcaactccttcaagcatataagtggtcaaacaagttgcagtaccatgcaggactagcatctggccttttaaatcagtagtcgttgaagcgttccgctaatcagatgggagtatctgccaaaagtagaccaaaggctcagcccacaactcttgtcctaccacctcaatatgttgatgatgtgatcagccgcattgacaggatgtttcctgaaatgtccatccacttatccagacccaatggaacatcagcaatgcttctggtgaccttgggaaaggtgttgaaagtgatcgtcatcatgcggagcctgttcattgatcgaacaatagtaaagggatataacgagaatgtctacacagaagatggcaagcttgatatatggtccaaatccaactatcaagtattccagaaggtgacagaccacgccaccacggccctgctccactatcagctgccccagatgccggatgtcgtagtccgatccttcatgacctggttaagaagttacataaagctgttccaggccccatgccagcactgcgggaagtttctgcaggacggccttcccccgacatggagggatttccgaaccctcgaagccttccatgacacctgccggcagtaagcccccacgctggccccagcgtgagaccccacccggcaacttcccagacactcaggaagcccacagaaggctcagctggttcctcactgcccagatgtgtacagccgctcctccctttcagcgccatgtgtgctgaggccactcttgaggagcagaccccccctgtggctgatgagactaattattcccactagccagtggactgaaggcaaagaagacttttctagaacctgatagaaggaagctgtgcagcatgctcctcgtccgtgtgtgtcggcagtgctggtgtcttgtcgtttccgcgagctattactagaatgagcccttgtgttcatgggtatcgtcatgcggggttcttgtgttttgtggggcttggggtttggtaacttatttttataagcaataaaccttttgt

SEQ ID NO: 1052 - protein, 311 aa, Homo sapiens
  misc_feature (131)..(131): Xaa can be any naturally occurring amino acid
MADVINVSVNLEAFSQAISAIQALRSSVSRLFDCLKDGMRNKETLEGREKAFIAHFQDNLHSVNRDLNELERLSNLVGKPSENHPLHNSGLLSLDPVQDKTPLYSQLLQAYKWSNKLQYHAGLASGLLNQXSLKRSANQMGVSAKSRPKAQPTTLVLPPQYVDDVISRIDRMFPEMSIHLSRPNGTSAMLLVTLGKVLKVIVIMRSLFIDRTIVKGYNENVYTEDGKLDIWSKSNYQVFQKVTDHATTALLHYQLPQMPDVVVRSFMTWLRSYIKLFQAPCQHCGKFLQDGLPPTWRDFRTLEAFHDTCRQ

SEQ ID NO: 1053 - DNA, 852 bp, Homo sapiens
gcggcggcaacatggcggacgtgataaatgtcagtgtgaacctggaggccttttcccaggccattagtgccatccaggcgctgcgctccagcgtgagcaggttgttcgactgcctgaaggatgggatgcggaacaaggagacgctggagggccgggagaaggccttcattgcgcacttccaggacaacttacattcggtcaaccgggacctcaatgagctggaacgtctgagcaatctggtaggcaagccatctgagaaccatcctcttcataacagtgggctgttaagcctggatcctgtgcaggacaaaactcctctctatagtcaactccttcaagcatataagtggtcaaacaagttgcagtaccatgcaggactagcatctggccttttaaatcagtagtcgttgaagcgttccgctaatcagatgggagtatctgccaaaagtagaccaaaggctcagcccacaactcttgtcctaccacctcaatatgttgatgatgtgatcagccgcattgacaggatgtttcctgaaatgtccatccacttatccagacccaatggaacatcagcaatgcttctgcttgatatatggtccaaatccaactatcaagtattccagaaggtgacagaccacgccaccacggccctgctccactatcagctgccccagatgccggatgtcgtagtccgatccttcatgacctggttaagaagttacataaagctgttccaggccccatgccagcactgcgggaagtttctgcaggacggccttcccccgacatggagggatttccgaaccctcgaagccttccatgacacctgccggcagtaagcccccacgctgg

SEQ ID NO: 1054 - protein, 275 aa, Homo sapiens
  misc_feature (131)..(131): Xaa can be any naturally occurring amino acid
MADVINVSVNLEAFSQAISAIQALRSSVSRLFDCLKDGMRNKETLEGREKAFIAHFQDNLHSVNRDLNELERLSNLVGKPSENHPLHNSGLLSLDPVQDKTPLYSQLLQAYKWSNKLQYHAGLASGLLNQXSLKRSANQMGVSAKSRPKAQPTTLVLPPQYVDDVISRIDRMFPEMSIHLSRPNGTSAMLLLDIWSKSNYQVFQKVTDHATTALLHYQLPQMPDVVVRSFMTWLRSYIKLFQAPCQHCGKFLQDGLPPTWRDFRTLEAFHDTCRQ

SEQ ID NO: 1055 - DNA, 6280 bp, Homo sapiens
gggactcccaggactcccggccggggtagctcttcactcctcagcgcgacgtcgtgtcgagttcccaaaaagctccgcaggggctgtagggaggcatacaagaattaaattctgaataagtctgcaggtaggatggacagttattttaaagcagctgtcagtgacttggacaaactccttgatgattttgaacagaacccagatgaacaagattatctccaagatgtacaaaatgcatatgattctaaccactgctcagtttcttcagagttggcttcctcacagcgaacttcattgctcccaaaagaccaagagtgcgttaatagttgtgcctcatcagaaacaagctatggaacaaatgagagttccctgaatgaaaaaacactcaagggacttacttctatacaaaatgaaaaaaatgtaacaggacttgatcttctttcttctgtggatggtggtacttcagatgaaatccagccgttatatatgggacgatgtagtaaacctatctgtgatctgataagtgacatgggtaacttagttcatgcaaccaatagtgaagaagatattaaaaaattattgccagatgattttaagtctaatgcagattccttgattggattggatttatcttcagtgtcagatactccctgtgtttcttcaacagaccatgatagtgatactgtcagagaacaacagaatgataccagttctgaattacaaaatagagaaatcggaggaatcaaagaattgggtataaaagtagatacaacactttcagattcctataattacagtggaacagaaaatttaaaagataaaaagatctttaatcagttagaatcaattgttgattttaacatgtcatctgctttgactcgacaaagttccaaaatgtttcatgccaaagacaagctacaacacaagagccagccatgtggattactaaaagatgttggcttagtaaaagaggaagtagatgtggcagtcataactgccgcagaatgtttaaaagaagagggcaagacaagtgctttgacctgcagccttccgaaaaatgaagatttatgcttaaatgattcaaattcaagagatgaaaatttcaaattacctgacttttcctttcaggaagataagactgttataaaacaatctgcacaagaagactcaaaaagtttagaccttaaggataatgatgtaatccaagattcctcttcagctttacatgtttccagtaaagatgtgccgtcctcattgtcctgtcttcctgcgtctgggtctatgagtggatcattaattgaaagtaaagcacggggtgattttttacctcagcatgaacataaagataatatacaagatgcagtgactatacatgaagaaatacagaacagtgttgttctaggtggggaaccattcaaagagaatgatcttttgaaacaggaaaaatgtaaaagcatactccttcagtcattaattgaagggatggaagacagaaagatagatcctgaccagacagtaatcagagctgagtctttggatggtggtgacaccagttctacagttgtagaatctcaagaggggctttctggcactcatgtcccagagtcttctgattgttgtgaaggttttattaatactttttcaagcaatgatatggatgggcaagacttagattactttaatattgatgaaggcgcaaaaagtggcccactaattagtgatgctgaacttgatgcctttctgacagaacagtatcttcagaccactaacataaagtcttttgaagaaaatgtaaatgactctaaatcgcaaatgaatcagatagatatgaaaggcttagatgatggaaacatcaataatatatatttcaatgcagaagcaggagctattggggaaagtcatggtattaatataatttgtgaaacagttgataaacaaaatacaatagaaaatggcctttctttaggagaaaaaagcactattccagttcaacaagggttacctaccagtaagtctgagattacaaatcaattatcagtctctgatattaacagtcaatctgttggaggggccagacctaagcaattgtttagccttccatcaagaacaaggagttcaaaggacctgaataagccagatgttccagatacaatagaaagtgaacccagcacagcagataccgttgttccaatcacttgtgctatagattctacagctgatccacaggttagcttcaactctaattacattgatatagaaagtaattctgaaggtggatctagtttcgtaactgcaaatgaagattctgtacctgaaaacacttgcaaagaaggcttggttttgggccagaaacagcctacttgggttcctgattcagaagctccaaactgtatgaactgccaagtcaaatttacttttaccaaacggcgacaccattgccgagcatgtgggaaagtattttgtggtgtctgttgtaataggaagtgtaaactgcaatatctagaaaaggaagcaagagtatgtgtagtctgctatgaaactattagtaaagctcaggcatttgaaaggatgatgagtccaactggttctaatcttaagtctaatcattctgatgaatgtactactgtccagcctcctcaggagaaccaaacatccagtataccttcaccagcaactttgccagtctcagcacttaaacaaccaggtgttgaaggactatgttccaaagaacagaagagagtatggtttgcagatggtatattgcccaatggtgaagttgcagatacaacaaaattatcatctggaagtaaaagatgttctgaagactttagtcctctctcacctgatgtgcctatgacagtaaacacagtggatcattcccattctactacagtggaaaagccaaacaatgagacaggagatattacaagaaatgagataattcagagtcctatttctcaggttccatcagtggaaaaattgtctatgaacacaggaaatgaggggttacctacttctggttcatttacactagatgatgatgtttttgcagaaactgaagaaccatctagtcctactggtgtcttagttaacagcaatttacctattgctagtatttcagattataggttactgtgtgatattaacaagtatgtctgcaataagattagtcttctacctaatgatgaggacagtttgcccccacttctggttgcatctggagaaaagggatcagtgcctgtagtagaagaacatccatctcatgagcagatcattttgcttcttgaaggtgaaggctttcatcctgttacatttgtcctaaatgctaatctactcgtgaatgtcaaattcatattttattcctcagacaaatattggtacttttcaaccaatggattgcatggcttgggacaggcagaaattattattctattgttatgtttgccaaatgaagatactattcctaaggacatcttcagactatttatcaccatatataaggatgctctaaaaggaaaatacatagaaaacttggacaatattacctttactgagagttttctcagtagcaaggatcacggaggattcctgtttattacacctacttttcagaaacttgatgatctctcattaccaagtaatccttttctttgtggaattcttatccagaagcttgagattccctgggcaaaggtttttcctatgcgtttaatgttgagattgggtgcagaatataaagcatatcctgctcctctaacaagcatcagaggccgaaaacctctttttggagaaataggacacactattatgaacttacttgttgaccttcgaaattaccagtataccttgcataatatagatcaactgttgattcatatggaaatgggaaaaagctgcataaaaataccacggaaaaagtacagtgatgtaatgaaagtactaaattcttccaatgagcatgtcattagcattggagcaagtttcagtacagaagcagattctcatctagtctgtatacagaatgatggaatttatgaaacacaggccaacagtaccactggccatcctagaaaagtgacaggtgcaagttttgtggtattcaatggagctctaaaaacatcttcaggatttcttgctaagtccagcatagttgaagatggcttaatggtacaaataactccagagaccatgaatggcttgcggctagctttacgagaacagaaagactttaaaattacatgtgggaaagttgatgcagtagacctgagagaatacgtggatatctgctgggtagatgctgaagaaaaaggaaacaaaggagttatcagttcagtggatggaatatcattacaaggatttccaagtgaaaaaataaaactggaagcagattttgaaaccgatgagaagattgtaaaatgtaccgaggtgttctactttctaaaggaccaggatttatctattttatcaacttcttatcagtttgcaaaagaaatagccatggcttgtagtgctgcgctgtgccctcacctgaaaactctaaaaagtaatgggatgaataaaattggactcagagtttccattgacactgatatggttgaatttcaggcaggatctgaaggccaacttctgcctcagcattatctaaatgatcttgatagtgctctgatacctgtgatccatggtgggacctccaactctagtttaccattagaaatagaattagtgtttttcattatagaacatcttttttagtgaaagaatgtgccatattacatattgcaacctaatttgttaaaactaactccagcactaaagctgaaatgccacaaacactaaaagtataaatatgtctgatttttgaaacacataagctttgctctttaggcaggaatgatcttttcaaatcattagcacaatatttaaatatctaaaaatttaagagatccatactttctgtagctttacaattaatttaagtactaaaaagacaaggatttcttttaagaaatttatagcatttactgtgttatttaaatgctaagccaaagtatctgcacttaggtatacctctttatgccaataatgattttaatgaaggctcttttcagatgtaaccttatgaaggaaatatctgctttgtgtatatgccagttagaatactggtttctaaagtctgtcaaattgtatttcagtggcacaaaaaccagttttgaggtcttagacttataattctttgaataaaactgataacttatttgtataattggagtggagacctacctccataattagataaactctttttggattataatcagaattttgccttttttcttctcaaattattacatatgtatgtattatatatccacatatatagttttccctgattaaatggatattaaaataattgcgggtgcttcaggactttttgcttctatatttaagtatattgtttttatagcaagaacatattctgaatgttttataaatctttaataatttatatgtaggtaatatttttgtatcacaatgcattatttttttcctcctttccttccaaactataccactgtatttaccacttctaagagtgactgacgacgggccagatgacccttgaagtagtcattatgtagcaataaatgaagcctgaaacaggtttttttacttccactttaatccttagaaatttcttggcaacttcgcatattttcattgacaccggtgtataagtataaatttaaatgaactaattacttttgcatattttaaattctttatatggtagttattttttataacaggatattaacataagttaaatcctatgtatttgaaattgttacagagctttcctctttacttcaaacagcaaaaaagtggggggcatattgtagtcctgtcatttaagttatgtaaaaaatttaatcattattttgatgctttaaacattctcatgtgtaatatatgtttttgtatcaaaaacactcatatatttcaagaaaaagaaattatgttaaatagccctgttttaagaaaaatatttatgaagcatctcaacttgaagatcaagtcaaagttataactcaggatctgaggtctcaagctaggagagactgagaattttaatcagtttgggcatatagtttggactgaatcacatctgtagtacttagccaaagacaatttggaggagaatatcagccttctggaagtagctacttcctgaacaatgtaaagtgtcgcagatattcaataaaatggcaacctgttaaaa

SEQ ID NO: 1056 - protein, 1539 aa, Homo sapiens
MDSYFKAAVSDLDKLLDDFEQNPDEQDYLQDVQNAYDSNHCSVSSELASSQRTSLLPKDQECVNSCASSETSYGTNESSLNEKTLKGLTSIQNEKNVTGLDLLSSVDGGTSDEIQPLYMGRCSKPICDLISDMGNLVHATNSEEDIKKLLPDDFKSNADSLIGLDLSSVSDTPCVSSTDHDSDTVREQQNDTSSELQNREIGGIKELGIKVDTTLSDSYNYSGTENLKDKKIFNQLESIVDFNMSSALTRQSSKMFHAKDKLQHKSQPCGLLKDVGLVKEEVDVAVITAAECLKEEGKTSALTCSLPKNEDLCLNDSNSRDENFKLPDFSFQEDKTVIKQSAQEDSKSLDLKDNDVIQDSSSALHVSSKDVPSSLSCLPASGSMSGSLIESKARGDFLPQHEHKDNIQDAVTIHEEIQNSVVLGGEPFKENDLLKQEKCKSILLQSLIEGMEDRKIDPDQTVIRAESLDGGDTSSTVVESQEGLSGTHVPESSDCCEGFINTFSSNDMDGQDLDYFNIDEGAKSGPLISDAELDAFLTEQYLQTTNIKSFEENVNDSKSQMNQIDMKGLDDGNINNIYFNAEAGAIGESHGINIICETVDKQNTIENGLSLGEKSTIPVQQGLPTSKSEITNQLSVSDINSQSVGGARPKQLFSLPSRTRSSKDLNKPDVPDTIESEPSTADTVVPITCAIDSTADPQVSFNSNYIDIESNSEGGSSFVTANEDSVPENTCKEGLVLGQKQPTWVPDSEAPNCMNCQVKFTFTKRRHHCRACGKVFCGVCCNRKCKLQYLEKEARVCVVCYETISKAQAFERMMSPTGSNLKSNHSDECTTVQPPQENQTSSIPSPATLPVSALKQPGVEGLCSKEQKRVWFADGILPNGEVADTTKLSSGSKRCSEDFSPLSPDVPMTVNTVDHSHSTTVEKPNNETGDITRNEIIQSPISQVPSVEKLSMNTGNEGLPTSGSFTLDDDVFAETEEPSSPTGVLVNSNLPIASISDYRLLCDINKYVCNKISLLPNDEDSLPPLLVASGEKGSVPVVEEHPSHEQIILLLEGEGFHPVTFVLNANLLVNVKFIFYSSDKYWYFSTNGLHGLGQAEIIILLLCLPNEDTIPKDIFRLFITIYKDALKGKYIENLDNITFTESFLSSKDHGGFLFITPTFQKLDDLSLPSNPFLCGILIQKLEIPWAKVFPMRLMLRLGAEYKAYPAPLTSIRGRKPLFGEIGHTIMNLLVDLRNYQYTLHNIDQLLIHMEMGKSCIKIPRKKYSDVMKVLNSSNEHVISIGASFSTEADSHLVCIQNDGIYETQANSTTGHPRKVTGASFVVFNGALKTSSGFLAKSSIVEDGLMVQITPETMNGLRLALREQKDFKITCGKVDAVDLREYVDICWVDAEEKGNKGVISSVDGISLQGFPSEKIKLEADFETDEKIVKCTEVFYFLKDQDLSILSTSYQFAKEIAMACSAALCPHLKTLKSNGMNKIGLRVSIDTDMVEFQAGSEGQLLPQHYLNDLDSALIPVIHGGTSNSSLPLEIELVFFIIEHLF

SEQ ID NO: 1057 - DNA, 1529 bp, Homo sapiens
cgtttggttccgcttcgctggcgcccgccgggctcttcccccgccgaggcctgtggtttgtggagtcgaatttccctgccaccagtgcccggttagcaggggcgccagcctgggcgcctgcgcggacggcgggcgtcgtcaccatggcagcatccgctggaggcccaggatcttggagtgaaaatatactggaatattttctgagaaatagccagattacagcagaagacggtgctgagatcacctggtatcatgcagctaaccacaaggcacaaacaaatgaggcactgaaaagtactgctcacatgatagaggctgatgtccttcttccaagtgatggatcagaacacagccagccaattatggcccatccccctgaaacaaacagtgataatactctacaggagtggctgactgaagttatgaaaagcaataaaggcatcaagctggatttcaaaagtctggcagttgtagaaccatccatgatgctcttggaaaatgtgaagaggcatctgaagcgtcctgtatggattaatgccgatattcttcctggtccaaatggaaatagcaaagtaatagatgcaaaaccatttttagacaccgtgacatccttctttccagacgtgacgttttccctgggttggacaacaggatggcatcctgagaaagtcaatgaagggtacagttggacaatggtgaaagagatggaatatatatgtaatgaactaagtcagcctgtaacgttccctgtcagagcagcattagtcaggcagtcttgttctcagttactttggctgttaaagaaatcaaacaggtacagcctgactatttggactggaaaaaatgataactattccgttgaagatttactttacattagagaccattttgacaaaaaacaagttttctatgacatcttggaaccacaaaaccatgaatttaaacaagccattggaatcaaagttaatctctaagaagaagattctcaattatttcctgtgttttggtttcataatccttctctccattggtctgaattaattaccatataaattatggttattgattgacgttccaagtcatctaatcaagaaacgtttattgtatgcttactctgtgggcatatgtccttataatagtgcacttacataaaagatttggaaagaagagatttatttacacacgtggcctagtctaataataattcaggaaaatgatactctgcaccccttcataaaaatagttttgataaactaaagatgattggcagaatccatatgtcataaaacaggtataaatcacatgtgcttggcacttgcattacagagattatgaaaaatatggtactcttttcctttttcctagaaaactggttattttagagataacaaaaaaggaagagggcttttaaaatgtttttaattttcacaggggtcagcagctgtctcatatcaagatctattaatccatttcctgaaactgtagattaaattagatagatctagaatttccatgtgattgagaagcat

SEQ ID NO: 1058 - protein, 276 aa, Homo sapiens
MAASAGGPGSWSENILEYFLRNSQITAEDGAEITWYHAANHKAQTNEALKSTAHMIEADVLLPSDGSEHSQPIMAHPPETNSDNTLQEWLTEVMKSNKGIKLDFKSLAVVEPSMMLLENVKRHLKRPVWINADILPGPNGNSKVIDAKPFLDTVTSFFPDVTFSLGWTTGWHPEKVNEGYSWTMVKEMEYICNELSQPVTFPVRAALVRQSCSQLLWLLKKSNRYSLTIWTGKNDNYSVEDLLYIRDHFDKKQVFYDILEPQNHEFKQAIGIKVNL

SEQ ID NO: 1059 - DNA, 3763 bp, Homo sapiens
attcgaggcgccgaggagccgaagaccacagctcagctcagacggcgccctagggccgcacagagggtcgggcagtgccggagagaggtttgaaagcgccgccgccaactcgacagcgcgtcccagcgccttgagctcgcttcctcctgctctcaggaaaaactgaggaaacgcgcctggttccaggggtcggcggggaccgtggagacgctgccagcatcctcaacagcttggaaatcccatcaccttggttccctgagacttggaggactagtaggaactgacagctggctgacagaaaacttatccagggagagaagagacaaaagtgaagtgtgaaattttgaataatgttttcagatgctttgcattcagaatagacctctgagttgggacccaagctgtcaactgatcccaaattcctaagttcctgacttgcaggtattgagttctaacctccgaagatggatgaaggtatggaaatttcaagtgaaggaaattccttgatcaaagcagtccatcagagccggcttcgcctcacaagacttttgctagaaggcggtgcctacattaatgagagcaacgaccgtggggaaacccctttaatgatcgcttgtaagaccaaacatgtcgatcaccagagtgtcagtaaagccaaaatggtgaaatacctgttagagaacaatgccgatcccaacatacaggacaaatctgggaaaacggctctgatgcatgcttgcttagaaaaagctggccctgaagttgtttccttgctcctcaagagtggggctgacctcagcttgcaagaccattctagttactcagctcttgtttatgctataaattcagaagatacagagaccctgaaagttcttcttagtgcttgcaaggcaaaagggaaagaggtcatcatcatcacaacagcaaagtcgccctgtgggaagcatactactaaacaatacttaaatatgcctcctgtggatatagatgggtgtcattccccagctacctgcaccactccttcagaaatagacatcaaaactgcctcatcgccactttcacattcttctgaaacggaactgacgctttttggctttaaagatcttgagcttgctggaagcaatgatgatacctgggacccaggttcccctgtgaggaaacctgcattggcccctaaggggcccaagctcccccacgctccaccctgggtcaagagtcccccattattaatgcaccagaacagagtggcttcattgcaagaggagctccaggatattacaccagaggaagaactatcctataaaaccaatgggctggcactttccaagcggttcatcactaggcaccaaagcattgatgtaaaagacactgcacatttgctaagagcctttgatcaggccagctcaaggaagatgtcatatgatgaaataaattgtcaatcttatctttcagaaggaaatcagcaatgcattgaagtccctgttgaccaggacccagattctaaccagacaatatttgcttccaccttaagaagtatagttcaaaaaagaaacttgggggcaaatcactacagctctgattcccagctctcagctggccttacccctccaacttcagaagacggcaaagcacttataggaaagaaaaagatcctctcaccatctccttcccaattgtcagagtccaaagaattgttggagaatatccccccaggtcccctgagcaggagaaatcatgcagttttagaagggcgaggttcaggagctttccctttagatcacagtgttacccaaaccagacaagggtttctcccacccttaaatgtaaattctcaccctcccatctcagatatcaatgtcaacaacaagatttgcagccttctttcttgtggtcaaaaagtgcttatgccaacagttccgattttccctaaagaattcaaaagtaagaaaatgttgttaaggagacaatcattgcaaactgaacaaattaagcaattagtaaacttctaggagatgggtataaaacacatcttcttcaaatgtttatatcagagaaacaaagaactagagaagaaatcttaaatgttcattcttttaaatctcgtgattggttagtccataatggctagatggattaaaatgtaatgtgatttgtactaggcgtcatgagcataaaaaataatacatagtttctgttaagggaattctctcaaacgaaaggaaagcgatttttctcaatgcttctaatatttaacaatctccatgtagtccaaatttgtcattaaaaaaaaatcaaagaaagaaggccacgtatgttggggtaatttttaaaaattttcagattggctaaatattttattaggaaacagttttcaagtcaataatttttttaacatttcatgttaataaatgagattgaaattttttatgatctctaaaccataaaagaaaacaccgacagctgtaaaatgttctaagataaaaaaactcgagctacaaagaaagaatgaactaattctttacaaatgttgactgaagatagataaaactctaattaaaaatttaaaaggttaaacactgtattagagtgggcaactaaaatattcgtggtgtcagtttaattagtgtcaaactggcaagtcagagttttacaacctactagtaatctatgccgggtcttgttgtttgtgcactgtgttttgctttgctttgttttggtttttaaacagacttacctgtaaagttatcttacggaattattctttctccatatcttttaaggaattattctttctccatatcatcttttaattcctgttattagttttggaagcttatccataagtttccaaagacaagatgatataaaagttaaaaagcattcctctttacttatatcaaattattcttgtctttcaaaaagaaccaaaaaaaaaaaattcatcatggataaaaactaagcgcttgccttcttttaaaaagaaaaactgatgattagattaggttagctaaaattaatagaggcagtagaaacttaatcacaaaatgtactaaatatttggcaatattaaacaatgcctttttatttctgatatgtagttattagacatttatatattaaggataacttccttagtgtgacattccaatcatttagtattttaggacctgtgaataacttccaacaaaattaatgaataccatattagtattataaaatattataaagtaataattatatcatctatataacttcaaagtatgatgtttatacaaagaatccttatttcagtctagcagcttaacaacaaaggataaatcagactatacaaaacctaagtgtattaatttgatgattgtcacgtacaactttctttgccttccaagtagaggtgatcctaacaattggcatgatgcttttcttggtaatttgatataagcaagttgtaatgtacatagtaattatttaattactgtggcttttattttaaaaagtaattagaggtttttccatttcatgtcttgaacaacattaatattaattacactagaaatattttttgattcagaacttagaattgtacctgatatttataggtatttaaatgctttctgcaagttaaatatcgagaaaagtacttgacttcaagttgtaaggatacaatttggaagggtatgtaaatagattagttcataaacaaaatggtatcaataaagattttaaatatcaaaaaaaaaaaaaaaaaagaaaaaaaaaaaaaaaa

SEQ ID NO: 1060 - protein, 514 aa, Homo sapiens
MDEGMEISSEGNSLIKAVHQSRLRLTRLLLEGGAYINESNDRGETPLMIACKTKHVDHQSVSKAKMVKYLLENNADPNIQDKSGKTALMHACLEKAGPEVVSLLLKSGADLSLQDHSSYSALVYAINSEDTETLKVLLSACKAKGKEVIIITTAKSPCGKHTTKQYLNMPPVDIDGCHSPATCTTPSEIDIKTASSPLSHSSETELTLFGFKDLELAGSNDDTWDPGSPVRKPALAPKGPKLPHAPPWVKSPPLLMHQNRVASLQEELQDITPEEELSYKTNGLALSKRFITRHQSIDVKDTAHLLRAFDQASSRKMSYDEINCQSYLSEGNQQCIEVPVDQDPDSNQTIFASTLRSIVQKRNLGANHYSSDSQLSAGLTPPTSEDGKALIGKKKILSPSPSQLSESKELLENIPPGPLSRRNHAVLEGRGSGAFPLDHSVTQTRQGFLPPLNVNSHPPISDINVNNKICSLLSCGQKVLMPTVPIFPKEFKSKKMLLRRQSLQTEQIKQLVNF

SEQ ID NO: 1061 - DNA, 3932 bp, Homo sapiens
tcccagacagaacctactatgtgcggcggcagctggggcgggaaggcgggagctgggggcgctgggggcgctgcggccgctgcggccgctgcagccgctgcagcgccagggtccacctggtcggctgcacctgtggaggaggaggtggatttcaggcttcccgtagactggaagaatcggctcaaaaccgcttgcctcgcaggggctgagctggaggcagcgaggccgcccgacgcaggcttccggcgagacatggcagggcaaggatggcagcccggcggcagggcctggcgaggagcgcgagcccgcggccgcagttcccaggcgtctgcgggcgcgagcacgccgcgaccctgcgtgcgccggggcgggggggcggggcctcgcctgcacaaatggggacgaggggggcggggcggccacaatttcgcgccaaacttgaccgcgcgttctgctgtaacgagcgggctcggaggtcctcccgctgctgtcatggttggttcgctaaactgcatcgtcgctgtgtcccagaacatgggcatcggcaagaacggggacctgccctggccaccgctcaggaatgaattcagatatttccagagaatgaccacaacctcttcagtagaaggtaaacagaatctggtgattatgggtaagaagacctggttctccattcctgagaagaatcgacctttaaagggtagaattaatttagttctcagcagagaactcaaggaacctccacaaggagctcattttctttccagaagtctagatgatgccttaaaacttactgaacaaccagaattagcaaataaagtagacatggtctggatagttggtggcagttctgtttataaggaagccatgaatcacccaggccatcttaaactatttgtgacaaggatcatgcaagactttgaaagtgacacgttttttccagaaattgatttggagaaatataaacttctgccagaatacccaggtgttctctctgatgtccaggaggagaaaggcattaagtacaaatttgaagtatatgagaagaatgattaatatgaaggtgttttctagtttaagttgttccccctccctctgaaaaaagtatgtatttttacattagaaaaggttttttgttgactttagatctataattatttctaagcaactagtttttattccccactactcttgtctctatcagataccatttatgagacattcttgctataactaagtgcttctccaagaccccaactgagtccccagcacctgctacagtgagctgccattccacacccatcacatgtggcactcttgccagtccttgacattgtcgggcttttcacatgttggtaatatttattaaagatgaagatccacatacccttcaactgagcagtttcactagtggaaataccaaaagcttcctacgtgtatatccagaggtttgtagataaatgttgccaccttgtttgtaacagtgaaaaattgaaaacaacctggaagtccagtgatgggaaaatgagtatgtttctgtcttagattggggaacccaaagcagattgcaagactgaaatttcagtgaaagcagtgtatttgctaggtcataccagaaatcatcaattgaggtacggagaaactgaactgagaaggtaagaaaagcaatttaaagtcagcgagcaggttctcattgataacaagctccatactgctgagatacagggaaatggaggggggaaagctggagtattgatcccgcccccctccttggttgtcagctccctgtcctgtgtgtgggcggaacatagtccagctgctctatagcaagtctcaggtgtttgcagtaagaagctgctggcatgcacgggaacagtgaatgccaaacacttaaagcaattcgatgtttaagtatgtaagttcttttttttttagacagcgtttcgctcttgttgcccaggctagcatgcaatggtgtgacctcggcttactgcaacctccgccttcccagattcaagcgattctcctgcctcaggctcccaagtagctaggaccaggtgcgcgccaccacgcccggctaatttttgtattttgtatttttagtagagatggggtttcaccatgttggtcaggctagtctcgaactcgtgaccgcaagcgattcacccacctcagcctcccaaagtgctgggattaccggcttgagccaccacacccggcacatcttcattctttttatgtagtaaaaagtataaggccacacatggtttatttgaagtattttataatttaaaaaaatacagaagcaggaaaaccaattataagttcaagtgagggatgatggttgcttgaaccaaagggttgcatgtagtaagaaattgtgatttaagatatattttaaagttataagtagcaggatattctgatggagtttgactttggttttgggcccagggagtttcagatgcctttgagaaatgaatgaagtagagagaaaataaaagaaaaaccagccaggcacagtggctcacacctgtaatcccagcgctttgggaggctaaggcaggcagatcacttgagaccagcttgggcaacatggcaaagccccatctctacaaaaaacacaaaaattagctgggcattgtggcgcacacctgtattcccatctagtcaggaagctgagatggaagaattaattgagcccacgagttcaaggctgcagtgagtcgtgattgtgccactgcactccagccggggtgacagaagagaccttgtctcgaaaaggaatctgaaaacaatggaaccatgccttcataattctagaaagttattttcaactgataaatctatattcacccaaataatcaagggtgaaggtaaaataatacatttttagacaagcaaagactcaggggttacctccatgtgccctttttagggaagctgttggagaaaatactccagcaaaatgaaggagtacacaaaccagagaatgacatgaatccagcaaataggatccaacacaggcaatattccagctatggagctagctttaaaaaggaacagtaaaaatattaatcggttagctgggtggaatggcccatgcctgtagtcccagctactcaggaggctcagcagcaggacgacttgagcccaagagttccagaccagcctggccaccttagtgagatcccttctcttaaaaataataacttattgccagatttggggcatttggaaagaagttcattgaagataaagcaaaagtaaaaaaaaaaaaaaaaaaaacaaggggaaagggttggttaggcaatcattctagggcagaaagaagtacaggataggaagagcataatacactgtttttctcaacaaggagcagtatgtacacagtcataatgatgtgactgcttagcccctaaatatggtaactactctgggacaatatgggaggaaaagtgaagattgtgatggtgtaagagctaaatcctcatctgtcatatccagaaatcactatataatatataataatgaaatgactaagttatgtgaggaaaaaaacagaagacattgctaaaagagttaaaagtcattgctctggagaattaggagggatggggcaggggactgttaggatgcattataaactgaaaagcctttttaaaattttatgtattaatatatgcattcacttgaaaaactaaaaaaaaacaataatttggaaaaacccatgaaggtaactaacggaaggaaaaactaagagaatgaaaagtatttgcctctggaaagaacaactggcaggactgttgttttcattgtaagacttttggagccatttaattgtacttaaccattttcatctatttctttaataagaacaattccatcttaataaagagttacacttgttaataagtaaaaaaaaaaaaaaa

SEQ ID NO: 1062 - protein, 187 aa, Homo sapiens
MVGSLNCIVAVSQNMGIGKNGDLPWPPLRNEFRYFQRMTTTSSVEGKQNLVIMGKKTWFSIPEKNRPLKGRINLVLSRELKEPPQGAHFLSRSLDDALKLTEQPELANKVDMVWIVGGSSVYKEAMNHPGHLKLFVTRIMQDFESDTFFPEIDLEKYKLLPEYPGVLSDVQEEKGIKYKFEVYEKND

SEQ ID NO: 1063 - DNA, 4146 bp, Homo sapiens
gaccactgagacgagcgggagcgcggagcagcagcctctgctgccctgactttttaagaaatctcaatgaactatttgtagagaatcactgatccggcctgcaagcattttgcacggcaaaaatatcgatcagtgttaagtgaagatcacattttatatgcgatcttgacttttttgtcttacattatatttttatagattttgttataaacatggtgctgggaaaggtgaagagtttgacaataagctttgactgtcttaatgacagcaatgtccctgtgtattctagtggggataccgtctcaggaagggtaaatttagaagttactggggaaatcagagtaaaatctcttaaaattcatgcaagaggacatgcgaaagtacgctggactgaatctagaaacgccggctccaatactgcctatacacagaattacactgaagaagtagagtatttcaaccataaagacatcttaattgggcacgaaagagatgatgataattccgaagaaggcttccacactattcattcaggaaggcatgaatatgcattcagcttcgagcttccacagacaccactcgctacctcattcgaaggccgacatggcagtgtgcgctattgggtgaaagccgaattgcacaggccttggctactaccagtaaaattaaagaaggaatttacagtctttgagcatatagatatcaacactccttcattactgtcaccccaagcaggcacaaaagaaaagacactctgttgctggttctgtacctcaggcccaatatccttaagtgccaaaattgaaaggaagggctataccccaggtgaatcaattcagatatttgctgagattgagaactgctcttcccgaatggtggtgccaaaggcagccatttaccaaacacaggccttctatgccaaagggaaaatgaaggaagtaaaacagcttgtggctaacttgcgtggggaatccttatcatctggaaagacagagacgtggaatggcaagttgctgaaaattccaccagtttctccctctatcctcgactgtagtataatccgcgtggaatattcactaatggtatatgtggatattcctggagctatggatttatttcttaatttgccacttgtcatcggtaccattcctctacatccatttggtagcagaacctcaagtgtaagcagtcagtgtagcatgaatatgaactggctcagtttatcacttcctgaaagacctgaagcaccacccagctatgcagaagtggtaacagaggaacaaaggcggaacaatcttgcaccagtgagtgcttgtgatgactttgagagagcccttcaaggaccactgtttgcatatatccaggagtttcgattcttgcctccacctctttattcagagattgatccaaatcctgatcagtcagcagatgatagaccatcctgcccctctcgttgaaggaacacttggttgaatcaagttgatgtgggttccgaactgtatctcttccggctgaggacagagaagtatcttggagacacgtttcagaggaagtggaattacttttgcccagaaaaatggcgaatacatgaaacaaccagtgatcatgctttagaagcctacagcaacattctgagactgctccaacatgcttgaagatctaagcttttctcttttaaaactggcacatactcagagcagtcttcttagcctatggtcgtacgtgtcaagacatcacgttgtaaagagggatgatttccttcttttgatttgaaaatttgcacatgctcaatgcttacattgtgcggttcgacgtcactacagcttctttttttttttttttttctatttttgccagactcttgatactcttaaaacttgtttgtggtcagcacaacaaggaacaaaacaaagctttgaaaaaactttaacatgaaaaaacgcactgacatttttttttatttaatatagcctggactttacctgcgtatgcacatgctcagaattgtctactaggctgactatgtatcacctcttcagcttggatccaattgtggatttatttacaaacatcaaatgccttcaagccaatcctttttgctgtatgttttgcagcctactgtagtagatacgcaacagataatgtgggaaaaaaagagataagaggaggaagctaataagagactgtcaagattgtataccttcttggtttcttttaagaatttgttgcctttctactattacagcaaagcagcattttgttactgactgcctaaaatcacttaatctcaggtgaacgcatcacttgccaaactgttggaatgctatttgtgttttgttgcactgtttttttcgtttgtttgtttgtttatttggttggctttttggagagggaaatttggaaacgggacatacacaaaagttacacacccacattccctttttatcatgacatacaagaagaaactagcagagctaagaatggagtgaagaaaggcagtatggcaggcaccagcaaagagttgagggctgttgctcttaaaaattattttttttattattattttgaaagtatggaagttttccattcactggggaaaggagggaaaagtgcatttatttttatacagagttacttaattacctccaaaacacatatgttggaaatcgcttttgctggtgcaaagtatattaatgagcaggaatacatacattgaggttatgaatagagagctcaatttgtacctttgctgtcttgctcaagcttggtatggcatgaaaactcgactttattccaaaagtaacttcaaaatttaaaatactagaacgtttgctgcgataaatcttttggatttttgtgtttttctaatgagaatactgtttttcattacctaaagaacaatttgctaaacatgagaaatcactcactttgattatgtatagattacataggaagaacaatcacatcagtaagttatagtttatattaaaggtaattttctgttggctcataacaaatataccagcattcatgatagcatttcagcattttccaaggtaccaagtgtacttattttgttgttgttgttgttgttgtattttagaaggaattcagctctgatgtttttaaagaaaaccagcatctctgatgttgcaacatacgtgtaaaatgggtgttacatctatcctgccatttaaccccacagttaataaagtggctgaaaataatagtagctctggcttggtgcttgacctggttaaatactgtcttaaagctcatacaaaacaaataggcttttccataagtggcctttaagaaaacatggaagacaattcatgtttgacaaatgctgacagggtgaagaaagcccagtgtaaaaatgaatcgcgttttaagtgattcggttaaagagtttgggctcccgtagcaaactaatactagataataaggaaatgggggtgaaatatttttttattgttgaatcattttgtgaatgtccccctcaaaaaaagctaatggaatatttggcataaagggcatttggtggttttatttttgtttgagggggattgtcagaaaatcccttttctctcttacgtctaactgactagggaacaattgttgatatgcatagcattggaatacttgtcattatatactcttacaaataacacatgaagcaagaatgaccaatattctgataattggcactggatcacaaaatgtgataaaactttaaatgtataaaactttatcaaataaagttttattttcccctttaaaatgtatttctttagaggcattacttttttaaaaatattggtcaattcctgacataagatgtgaggttcacagttgtattccagtattcaagatagattcctgatttttcaattaggaaaagtaaaatccaaaatgttagcaaaacaaagtgcaatattaaatgtttgctttatagattatattctatggctgtttgtaatttctctttttttccttttttatttggtgctgaatatgtccttgtaggctctgttttaagaaaacaatatgtgggaaatgatttaatttttcctattgctcttccttgtggaaaataaagtgttttgtttttttctgttttgtataaaaaaaaaaaaaaaaaaa

SEQ ID NO: 1064 - protein, 414 aa, Homo sapiens
MVLGKVKSLTISFDCLNDSNVPVYSSGDTVSGRVNLEVTGEIRVKSLKIHARGHAKVRWTESRNAGSNTAYTQNYTEEVEYFNHKDILIGHERDDDNSEEGFHTIHSGRHEYAFSFELPQTPLATSFEGRHGSVRYWVKAELHRPWLLPVKLKKEFTVFEHIDINTPSLLSPQAGTKEKTLCCWFCTSGPISLSAKIERKGYTPGESIQIFAEIENCSSRMVVPKAAIYQTQAFYAKGKMKEVKQLVANLRGESLSSGKTETWNGKLLKIPPVSPSILDCSIIRVEYSLMVYVDIPGAMDLFLNLPLVIGTIPLHPFGSRTSSVSSQCSMNMNWLSLSLPERPEAPPSYAEVVTEEQRRNNLAPVSACDDFERALQGPLFAYIQEFRFLPPPLYSEIDPNPDQSADDRPSCPSR

SEQ ID NO: 1065 - DNA, 4122 bp, Homo sapiens
aggaggcgacagctgccagccgaggaggcgcggcggagaggggactgcggtcagctgcgtccacttggggctgtgcggcggtcccgcgcccggcgatgttcccgggcactccctgagtagcggcagcttatcccccgcccgctagcccgccctggtccccggctcgctcgctggctggcgcggccccggccccgctctgcgtcggccccgccgcggtggaggcgcgcgagggggacgcggccggggatgagcggattgcgggtgaactcgccgccggggccccgcgaagccgtgagccgctgcttttctccgagtcgccgccctgcccttggatttgagatcatgtccatccacatcgtggcgctggggaacgagggggacacattccaccaggacaaccagccgtcggggcttatccgcacttacctggggagaagccctctggtctccggggacgagagcagcttgttgctgaacgcggccagcacggtcgcgcgtccggtgttcaccgagtatcaggccagtgcgtttgggaatgtcaagctggtggtccacgactgtcccgtctgggacatatttgacagtgattggtacacttctcgaaatctaattgggggcgctgacatcattgtgatcaaatacaacgttaatgacaagttttcattccatgaagtaaaggataattatattccagtgataaaaagagcattaaattcagttccagtaattattgctgctgttggtaccagacaaaatgaagagttaccttgtacatgcccactatgtacctcagacagagggagctgtgttagtacaactgaagggatccaacttgcaaaagaactaggagcaacctatcttgaactccacagccttgatgacttctacataggaaagtattttggaggagtgttggagtattttatgattcaagccttaaatcagaagacaagtgaaaaaatgaagaaaagaaaaatgagcaactcctttcatggaattagaccacctcaacttgaacaaccagaaaaaatgcctgtcttaaaggctgaagcgtcacattataactctgacttaaataacttgctgttctgctgccagtgtgtggacgtggtattttataaccccgatttaaagaaagttgtagaggcccacaagatcgttctctgcgctgtaagccatgttttcatgctgcttttcaatgtgaagagtcccactgacattcaggattccagtatcatccgaactacccaggatctttttgctataaacagagatactgcatttccaggtgctagccatgaatcttcaggcaacccaccattacgagtcattgttaaagacgccctcttctgttcttgtttatcagacatccttcgcttcatttattcaggtgcttttcagtgggaagaattggaagaagatatcaggaagaagttgaaagattctggggatgtttcaaatgtaatcgagaaagttaaatgcattttaaaaacaccaggaaagattaattgcctaaggaattgcaaaacctatcaagccagaaaacctttgtggttttataacacttccctcaagtttttccttaataagccgatgcttgccgatgttgtcttcgaaattcaaggtacgacagtgccagcccacagggccatcctggtggcccgttgtgaagtgatggcagccatgtttaatggtaattacatggaagcaaagagtgtcctgattcccgtttatggtgtttccaaagagactttcttgtcatttttagaatacctgtacacagactcctgctgcccagctggcatattccaggccatgtgtctcctgatctgtgccgagatgtaccaagtgtccagactgcagcacatctgtgagctgttcatcattacccagctgcagagcatgccaagcagggaactggcatccatgaaccttgatatagttgacctgcttaaaaaggccaagtttcaccactctgattgcctttcaacctggctacttcatttcattgctactaactacctcatcttcagtcaaaagcctgaatttcaggatctttcagtggaagaacgcagttttgttgaaaagcacagatggccgtcgaatatgtacttgaagcagcttgcggaatacaggaagtatattcactcccggaaatgtcgttgcttagtaatgtaacctggagcttttatacactacatttcttttttattattatgaagaatgggatacctccaggttccagtaaaattcttctgaccgaaaccaatgtgggtgttagaaaaattaccatatagcttaatatgtttattagttctctttggaaaaaaactaccactgtggtcttaaaagggaacaaaatataccataggctaaaactaaggctttcactctagaatgcaaagctgttttgcagctgttttcccttaaagatgtcctgttgctttagtgatatttagacccctctcagttaagaaatgcttagattaaaaaaaaaaaattacgtaggattaatacagaaatttaatcatgtctgattaattgctctattaaaataaggggcatttaaagacccagcataaccatttgtataatgagaaatctaggggaaaaccaatcagtccaacatgagattttaggaatagaaatttgccggccatttggaaagtgaaatgccacttagttctcaattgatgacagtgtttgaatcatcataaaaaaaatacctgcttttcatctggacaacccaattgagccactttatctccttttggcaatctgagtaggcggggaacctaggcagggctggctttcttagcgtgtaacttgtgtagcagcacagggcccacacttagaaggaccccacacttggttcaaggctctgctatagcggaaattcttaataatgtttgaagaagggccccatgatttcattttgtgctgagccctcaaaattatgtctgtttcgtggtgggaaatatcctatgttttcttgctcaaacacctttctctctgaaagcagaaaaaggcactgatataaagggaagagaaggaggctcaccggagggaagagaacatagtgaagattcccgcctttggggaggtctggaccacccagggcctccactgccaccttggctggcaagggagaaatgtgttgtgttgtcttagctttaaaacagtcacagttcttgctctatcatagatgaacaaatactttcttgatcattctgtaagaccaggaggttggtaagagtgactaaccagcctaactttaatacacatgtataaagatgttcacagagaaagatgctctgtagagaatttgctaccgaagttggctcaagaatttgtttttagtgttatttaccaagattaggacgtcagtggcttaaattctttgaattcttttcaaggactgcaagattatttgataaagagtagcatgaatcttgtgctctaatattacacagtaagttcaaagaaaggatgtaagtcaaagacttgttacatagagggaaaatggactgggatagaggacagactgatagtttctttctttcatatcacatgtatagagaaataattatatcagaaactcacaaacctagacatggaaaaacagattactgtctattgtcagcatcattttcatctgtaagtcactactggaatatatttttcttttaatttccagtgactttagaatacacacagtttttccgacttttcaaaaatttgattaaatggttttatagtataatattgggaccccataccgttagcccttgtatgtataccaacactgccaaagtaaaacattaggtcaggcatggtggctcaggcctgtaatcccagcattttgggaggctgaggcaagtggataacttgaggtcatgagttcgaaaccagcctggccaaaacagtgaaaccccgtctctactaaaaatacaaaattagccagatgtggtggcgcacacctgtaatcccagctactcaggaagctgaggcaggaaaatcgcttgaacctgggaggtggaagttgcagtgagccgagatcgcaccactgcactccagcctgggtgacaagagcgaaactccatcacaaaaaaaaaaaaaaaa

SEQ ID NO: 1066 - protein, 611 aa, Homo sapiens
MSIHIVALGNEGDTFHQDNQPSGLIRTYLGRSPLVSGDESSLLLNAASTVARPVFTEYQASAFGNVKLVVHDCPVWDIFDSDWYTSRNLIGGADIIVIKYNVNDKFSFHEVKDNYIPVIKRALNSVPVIIAAVGTRQNEELPCTCPLCTSDRGSCVSTTEGIQLAKELGATYLELHSLDDFYIGKYFGGVLEYFMIQALNQKTSEKMKKRKMSNSFHGIRPPQLEQPEKMPVLKAEASHYNSDLNNLLFCCQCVDVVFYNPDLKKVVEAHKIVLCAVSHVFMLLFNVKSPTDIQDSSIIRTTQDLFAINRDTAFPGASHESSGNPPLRVIVKDALFCSCLSDILRFIYSGAFQWEELEEDIRKKLKDSGDVSNVIEKVKCILKTPGKINCLRNCKTYQARKPLWFYNTSLKFFLNKPMLADVVFEIQGTTVPAHRAILVARCEVMAAMFNGNYMEAKSVLIPVYGVSKETFLSFLEYLYTDSCCPAGIFQAMCLLICAEMYQVSRLQHICELFIITQLQSMPSRELASMNLDIVDLLKKAKFHHSDCLSTWLLHFIATNYLIFSQKPEFQDLSVEERSFVEKHRWPSNMYLKQLAEYRKYIHSRKCRCLVM

SEQ ID NO: 1067 - DNA, 1328 bp, Homo sapiens
ccgcagcccatcggcatggctcaagagtttgtgaactgcaaaatccagcctgggaaggtggttgtgttcatcaagcccacctgcccgtactgcaggagggcccaagagatcctcagtcaattgcccatcaaacaagggcttctggaatttgtcgatatcacagccaccaaccacactaacgagattcaagattatttgcaacagctcacgggagcaagaacggtgcctcgagtctttattggtaaagattgtataggcggatgcagtgatctagtctctttgcaacagagtggggaactgctgacgcggctaaagcagattggagctctgcagtaaccacagaacaggccccatgctgacgtccctcctcaagagctggatggcattgcaaatgatgacagcacttctggtggatgaatttgggggcacaaacagcttttttcctcttttggctcagtatttaaaagtggaccaacttgctcttaatcacagggcaagaaggttgaccgggccatcttggttttcttctggatgagctctttggttttcagaagactgtgacaagttctggcccaggattcgctcactgaccctcaattgtcctctttggcatgcgtttcttactgttctccatgtgtcggcatgtctctacctctaagccagtgtttttcaactatgtttatccagactccttctccacaatgatgaatccacagttggttatctgctactgcccattagctaaaatcattttgctgcttgactttatggagtttgtattatgaaatcagtggtattttgaatgtgttctttctaactacatgcatctctccactcaactccaccccatcccatcccaccttgaaaatcgctgctctgaaccagtgttctccaccttgtcctccacacatctcataggaaatgttcaacaattctgtgaaaggtcacaggacccaattggagaaatcatatgaaaagcatagttggtcttggtgtcatatggatcagaggcacaagtgcagaggctgtggtcatgcggaacactctgttatttaagatggctatccagataatcctgaacactgtgtatttattttatttagactaccagcaaagattaaagcatgaaatgtaaaacatctgataaaacttacagccccctacaccaagagtgtatctgtgaaagagctcctacactttgaaaacttaagaatcccttatcatgaagtttgcctgttctagaattgtaagattgttaatttccttcaatctctagtgacaacacttaatttcttttctaataaaaaaaacctatagatgattcagtg

SEQ ID NO: 1068 - protein, 106 aa, Homo sapiens
MAQEFVNCKIQPGKVVVFIKPTCPYCRRAQEILSQLPIKQGLLEFVDITATNHTNEIQDYLQQLTGARTVPRVFIGKDCIGGCSDLVSLQQSGELLTRLKQIGALQ

SEQ ID NO: 1069 - DNA, 1799 bp, Homo sapiens
agaccacgaacccaccagaaggaagaaactccgaacacatctgaacatcagaaggaacaaactctggacacactgcctttaagaactgtaatactcaccgtgagggcccgcggcttcattcttgaagtcagtgagaccaagaacccaccaattccagacacagtgggatcacagagagagccaacagtccaggccatgacaagctggcacccagctctgcttcacatttgtccaactggcgtggctgtagctccttcctgcaaggcaatgctgaagaagctatggaagcaagaaggaagcatggattctaaaaactgacaacaaaccacttacccctattgctcttcttcctaaagctaaaggatcaaactgcatcacggaagctgcacacgatgacaccctgtctggaaagtttttgccagagggcaaaagactgcaagcagaatatccctttgccatttctcattcaggactggccgttgtctgaaagcaaacctcaaggacaggacttctggactccgcagccacttcaggctgctgctccatcgcatgaattccagcaggtggcgctgcaccccgcgcggacccggcttgcctctcggccccagggaggtcggttgatgagcagtcgggaagtgggtctgcgcgcaccccgctgcagctgtggcaaacgcaaacgatgacacacaggcttgacgagggcctttgtcagaagcaatggggatctggcgtcaccgcacaatggaaaacaaagtgcttctgcctggctggccagaatgcacgtttgctcactattgatgctggggcatttacaggcagaatgagttcatgtgaaatttcaggatctgccatgactcagattcactttctgtaaaccagagtcaacattacatttccctttactctgggccattccttgaatttttaggtcaccagttgtttttgtactaactgaagggatttgagtatttcacaagcaccttatttttattagcatttttagggcattaccaatttgggacggatctgtagtgtgagagattgttgtcactcttagctccaaacataggttgactttatatattatttacatgttcagaattatactgtgtagaaattcaaatgaaacttgcaaaatacttttctggcaggaagccctggagaggatcgttcatggaaacaaggatgacgactggggtaagaaatgcaggtgactcgtgagtggtcagggagtggaagagaagacggctggaaggttttagcattcagaaaaaaaatggagacaactagagttgatctgaagattatggcagaattcaatattgggggaaagaaacaagatgggggttagaaattagaaacagcagagctccacaggttggaaaggttggaaaggatttgagcaagagaacaagaaggagcctgctaatagcaccctgggtttacatcaagagaagcacctggagagaattaactcgggaggaggtgggggcatgggaaaccttttcatctccaagagcgggcaggaacagcagctggcctgaacttgaaggtacaccaggtagcttgcgtgggccaggagaaggtgattctcttctatgcctctctccaacgccctgcttctgatgctgctcctctacctgtattgaggggaagatacatccctaagaagttccctgaaccccattctttgttgtggctaactggtccccttggaatttttctactaattttcaattccccctctcacctggtgaaatcttgaatcttactgttcaataaaagttcttctaccgaaa

SEQ ID NO: 1070 - protein, 96 aa, Homo sapiens
MTPCLESFCQRAKDCKQNIPLPFLIQDWPLSESKPQGQDFWTPQPLQAAAPSHEFQQVALHPARTRLASRPQGGRLMSSREVGLRAPRCSCGKRKR

SEQ ID NO: 1071 - DNA, 3767 bp, Homo sapiens
gataagttggcgcgtcacctagacgtcagcctcttacctctcggacgtcccgtcccaggagcaaaactctagtgactttgggcccgcccccgtgagagtggagggcggccgatgagggcggttctgaagggaacaagaccaatgagacgagcccggggcggggcgcggggccggagggtggggcgggtggcggcggtggcagtccgaggtctggctccgcgcagtatatgacagtacgtcagcagcgggatggccctagcagtggcggcggctgcagaagcccaagcagccgcggccgcagtggaggctagagccggagcggcggcggcggcggcaccccggggagtttaagatggcggcgggggggacagggggcctgcgggaggagcagcgctatgggctgtcgtgcggacggctggggcaggacaacatcaccgtactgcatgtgaagctcaccgagacggcgatccgggcgctcgagacttaccagagccacaagaatttaattccttttcgaccttcaatccagttccaaggactccacgggcttgtcaaaattcccaaaaatgatcccctcaatgaagttcataactttaacttttatttgtcaaatgtgggcaaagacaaccctcagggcagctttgactgcatccagcaaacattctccagctctggagcctcccagctcaattgcctgggatttatacaagataaaattacagtgtgtgcaacaaacgactcgtatcagatgacacgagaaagaatgacccaggcagaggaggaatcccgcaaccgaagcacaaaagttatcaaacccggtggaccatatgtagggaaaagagtgcaaattcggaaagcacctcaagctgtttcagatacagttcctgagaggaaaaggtcaacccccatgaaccctgcaaatacaattcgaaagacacatagcagcagcaccatctctcagaggccatacagggacagggtgattcacttactggccctgaaggcctacaagaaaccggagctacttgctagactccagaaagatggtgtcaatcaaaaagacaagaactccctgggagcaattctgcaacaggtagccaatctgaattctaaggacctctcatataccttaaaggattatgtttttaaagagcttcaaagagactggcctggatacagtgaaatagacagacggtcattggagtcagtgctctctagaaaactaaatccgtctcagaatgctacaggcaccagccgttcagaatctcctgtatgttctagtagagatgctgtatcttctcctcagaaacggcttttggattcagagtttattgatcctttaatgaataaaaaagcccgaatatctcacctgacgaacagagtaccaccaacactaaatggtcatttgaatcccaccagtgaaaaatcggctgcaggcctcccactgccccctgcggctgctgccatccccacccctccaccgctgccttcaacctatctgcccatctcacatcctcctcagattgtaaattctaactccaactcccctagcactccagaaggccgggggactcaagacctacctgttgacagttttagtcaaaacgatagtatctatgaggaccagcaagacaaatatacctctaggacttctctggaaaccttaccccctggttccgttctactaaagtgtccaaagcctatggaagaaaaccattcaatgtctcacaaaaagtccaaaaagaagtctaaaaaacataaggaaaaggaccaaataaaaaagcacgacattgagactattgaggaaaaggaggaagatcttaagagagaagaggaaattgccaagctaaataactccagtccaaattccagtggaggagttaaagaggattgcactgcctccatggaaccttcagcaattgaactcccagattatttgataaaatatatcgctatcgtctcctatgagcaacgccagaattataaggatgacttcaatgcagagtatgatgagtacagagctttgcatgccaggatggagactgtagctagaagatttatcaaactagatgcacaaagaaagcgcctttctccaggctcaaaagagtatcagaatgttcatgaagaagtcttacaagaatatcagaagataaagcagtctagtcccaattaccatgaagaaaaatacagatgtgaatatcttcataacaagctggctcacatcaaaaggctaataggtgaatttgaccaacagcaagcagagtcatggtcctagaactctgcttggaccagaagatgtgaataaacttaagcttatttatttaaaattccaaatgagttgctctagattctaaaaaggtgaaactttggctgttgaaagtttcagtattagtaaacttgagttactttttcttttccattttactttgcttccctgcatttcgaagctgctctttctggtcctccccaccaccccacccccaagacttgtgtttgttaatagaaataatttttttaggtattggggatccattgtctatatttcaaatcagttttttttcctcaaaaacttgtgtttgttattagaaatgattttttagatattggggatccagtgtccacacttaaaagttgtatgtgtttaaaaaacaacaacagtaatgtgcaaggtgaaatgcttttggataaacgtaagcctattttctgacgtttcttaatgcaaactctttgccttaaatggtagaatatttagaaatttgcacaaaattaaaaaaataaacattgtcttggagggttaaaaaatagaaaggtgtatgtgtatagattcacatacacatatgtatatacaggctgacttgatctagaacattaaatccgccctgcaagttaaccccccattgcaatggttgccttaaggtgtttgctagttgtgtacatagtgtggttaatcattagctacactgcttcccacttgattagagcaatgggaagcatactgtggcctaccagcatctggaagtgtgtgctcgatctgtatgtgtgcagaggtggtgtggatgtgagcgtgcatgaaggaaaaaaagctgctactcctagtaggccaaacgctcaggttaaacaactgacgagtgttactgtagggtgtttttttgtttttttgttttttttcttctatcaaattgctacttttgttgtggaagacaaaagcatttccatttcaacgagtttgtcagctttattaatgttgggcaaaaattgatatgtcatgaaaatgaaacagatctatagttttgggacaaaattataaaatgaaatgtgtaggtaacctatttatatactgctataaagtattttttgaagagagatatgcaaagaagctattacctacataagaggtatatttaaagattttttttttttcatcctggtgccaggaatataaaaaagagtggatatatttaaccataacatactgtgattcatcaaacagcacaaactttcatttcatggagtttatctgttgacattgatttaaactgtcacttgttttatcatgtgggaacataagttatgtggtcaaaaatataaggattttgaattaatgttgattcaagttgtattgtcttattgtattgtcttttcaaagtgctgccagttgaaaagggaagcattatgtttacaaatctgttttgaaatgtttgccaaaattttggtagtgtctttaataaagatgtttgtctccagcatccagaaaaaaaaaaaaaaaa

SEQ ID NO: 1072 - protein, 640 aa, Homo sapiens
MAAGGTGGLREEQRYGLSCGRLGQDNITVLHVKLTETAIRALETYQSHKNLIPFRPSIQFQGLHGLVKIPKNDPLNEVHNFNFYLSNVGKDNPQGSFDCIQQTFSSSGASQLNCLGFIQDKITVCATNDSYQMTRERMTQAEEESRNRSTKVIKPGGPYVGKRVQIRKAPQAVSDTVPERKRSTPMNPANTIRKTHSSSTISQRPYRDRVIHLLALKAYKKPELLARLQKDGVNQKDKNSLGAILQQVANLNSKDLSYTLKDYVFKELQRDWPGYSEIDRRSLESVLSRKLNPSQNATGTSRSESPVCSSRDAVSSPQKRLLDSEFIDPLMNKKARISHLTNRVPPTLNGHLNPTSEKSAAGLPLPPAAAAIPTPPPLPSTYLPISHPPQIVNSNSNSPSTPEGRGTQDLPVDSFSQNDSIYEDQQDKYTSRTSLETLPPGSVLLKCPKPMEENHSMSHKKSKKKSKKHKEKDQIKKHDIETIEEKEEDLKREEEIAKLNNSSPNSSGGVKEDCTASMEPSAIELPDYLIKYIAIVSYEQRQNYKDDFNAEYDEYRALHARMETVARRFIKLDAQRKRLSPGSKEYQNVHEEVLQEYQKIKQSSPNYHEEKYRCEYLHNKLAHIKRLIGEFDQQQAESWS

SEQ ID NO: 1073 - DNA, 823 bp, Homo sapiens
atggagatacagcgtgtggggctggagccaggaatatcagagttttgccagaaacccttgagtctggagtggtacggctggagtccagattgcagtctgtggaggagtggacaggagaccaagaaattctcgagttctcttcagagaccaactggggatcaacaattcaatttaattctgacacccaaggaagaagagagtgcacctgatgtagtagccactgtaagaactgtgttggagaatgatccgattggccagtgcaagagggattgcagagaagaagaaaccacaagcagaaaaaccagatgaggaaattaagctaaatattaactatctcaagaatattcccagaagtgactgctaaatttaaatccctgctcacaatgaaatactgtacagcaggggttctcaaactttttggtcttaggacccttacagccttaaaaattattgagaactccaaagaactttcaattatgtgggtcataactactgatacttactgtattataacttgaaactgaaaaaatttttaaatatttataaacatttaaaaataataaacccattgtaagctaatgtaaatagcatgtttttattaaaaatcactttgttttccaaagcaaaaaatgtagtgagaagagaggccttcttttacattttaatatctggcttatgagaaaatagctgagtttctcatttctgcttctccatttaatctgttggtgtatattttatttaaagtacagttaacccttgaagaacgtgggtctgaactgtgcaggtccacttatacatggatttttttctaataaaagttgca

SEQ ID NO: 1074 - protein, 102 aa, Homo sapiens
MEIQRVGLEPGISEFCQKPLSLEWYGWSPDCSLWRSGQETKKFSSSLQRPTGDQQFNLILTPKEEESAPDVVATVRTVLENDPIGQCKRDCREEETTSRKTR

SEQ ID NO: 1075 - DNA, 1260 bp, Homo sapiens
gactagttcccctggcgtttggtcacctctgcttcattctccaccgcgcctatggtccctcttggagccagcgtggcgggcctggcggctcccgggtggtgagagagcggtccgggaacgatgaaggcctcgcagtgctgctgctgtctcagccacctcttggcttccgtcctcctcctgctgttgctgcctgaactaagcgggcccctggcagtcctgctgcaggcagccgaggccgcgccaggtcttgggcctcctgaccctagaccacggacattaccgccgctgccaccgggccctacccctgcccagcagccgggccgtggtctggctgaagctgcggggccgcggggctccgagggaggcaatggcagcaaccctgtggccgggcttgagacggacgatcacggagggaaggccggggaaggctcggtgggtggcggccttgctgtgagccccaaccctggcgacaagcccatgacccagcgggccctgaccgtgttgatggtggtgagcggcgcggtgctggtgtacttcgtggtcaggacggtcaggatgagaagaagaaaccgaaagactaggagatatggagttttggacactaacatagaaaatatggaattgacacctttagaacaggatgatgaggatgatgacaacacgttgtttgatgccaatcatcctcgaagataagaatgtgccttttgatgaaagaactttatctttctacaatgaagagtggaatttctatgtttaaggaataagaagccactatatcaatgttgggggggtatttaagttacatatattttaacaacctttaatttgctgttgcaataaataccgtatccttttattatatctttatatgtatagaagtactctgttaatgggctcagagatgttggggataaagtatactgtaataatttatctgtttgaaaattactataaaacggtgttttctgatcggtttttgtttcctgcttaccatatgattgtaaattgttttatgtattaatcagttaatgctaattatttttgctgatgtcatatgttaaagagctataaattccaacaaccaactggtgtgtaaaaataatttaaaatttcctttactgaaaggtatttcccatttttgtggggaaaagaagccaaatttattactttgtgttggggtttttaaaatattaagaaatgtctaagttattgtttgcaaaacaataaatatgattttaaattctcaaaaaaaaaaaaaaa

SEQ ID NO: 1076 - protein, 190 aa, Homo sapiens
MKASQCCCCLSHLLASVLLLLLLPELSGPLAVLLQAAEAAPGLGPPDPRPRTLPPLPPGPTPAQQPGRGLAEAAGPRGSEGGNGSNPVAGLETDDHGGKAGEGSVGGGLAVSPNPGDKPMTQRALTVLMVVSGAVLVYFVVRTVRMRRRNRKTRRYGVLDTNIENMELTPLEQDDEDDDNTLFDANHPRR

SEQ ID NO: 1077 - DNA, 6051 bp, Homo sapiens
gctgcagaagctgccgccacctccaatgcacaaggtgtctcatctgaaaagaaacctgagccccagggaggcggcgcggagcgaccctggcagagctggcgcaaacagggcgagaggtcgctgggcagcgttcgaggaccagagggagctcggccacagaagaccccagtgatctgatcccgggatcccggctccaagctctcctcgcattttacagatttcacccccgcgactatctccccaaaacggagcctttatatcaagagaaggtgcgggagctggggcaaccaggactttctcgggcacccaagatgcgctccattaggaagaggtggacgatctgcacaataagtctgctcctgatcttttataagacaaaagaaatagcaagaactgaggagcaccaggagacgcaactcatcggagatggtgaattgtctttgagtcggtcacttgtcaatagctctgataaaatcattcgaaaggctggctcttcaatcttccagcacaatgtagaaggttggaaaatcaattcctctttggtcctagagataaggaagaacatacttcgtttcttagatgcagaacgagatgtgtcagtggtcaagagcagttttaagcctggtgatgtcatacactatgtgcttgacaggcgccggacactaaacatttctcatgatctacatagcctcctacctgaagtttcaccaatgaagaatcgcaggtttaagacctgtgcagttgttggaaattctggcattctgttagacagtgaatgtggaaaggagattgacagtcacaattttgtaataaggtgtaatctagctcctgtggtggagtttgctgcagatgtgggaactaaatcagattttattaccatgaatccatcagttgtacaaagagcatttggaggctttcgaaatgagagtgacagagaaaaatttgtgcatagactttccatgctgaatgacagtgtcctttggattcctgctttcatggtcaaaggaggagagaagcacgtggagtgggttaatgcattaatccttaagaataaactgaaagtgcgaactgcctatccgtcattgagacttattcatgctgtcagaggttactggctgaccaacaaagttcctatcaaaagacccagcacaggtcttctcatgtatacacttgccacaagattctgtgatgaaattcacctgtatggattctggcccttccctaaggatttaaatggaaaagcggtcaaatatcattattatgatgacttaaaatataggtacttttccaatgcaagccctcacagaatgccattagaattcaaaacattaaatgtgctacataatagaggagctctaaaactgacaacaggaaagtgtgtaaagcaataaagcacattttgaaacaaacaatatgcacttcttttctgaagatgcttccgaagatttgaaaataggatccaaaacacggctgggtttcagcatccaccaatgaactgaaaggtgaataaaggacgttcatgagaaatcgactaccagctgatgaaatacctgcaaagtgctctaaaaattaaatattttgactttaagggtcctagtaagtgccacttccactaagaatacagtttgaatgtataatcagtagtgtttacaagatccaacagtgcactcatcattagttaacaaagcaaatatgttcatcactgtcaggctgcccacagcaacaccaagcatattagaagaggaaccccaggaacgcaactcagaccttgggaaattaaaccatccttgtcagcagaagccaagatggaagcagtttgagcaatgaaatccgtaagattaaacaactcaagtaaatgcttcagtcaggactctgagtctgatcatgaattttatgttttaatttatgttttttttttgtcttctggaatctcttttggtttggatattgggatgcttagaaatcctttctgagatgcatatgagtgaggaaataaactttaagtaattatttttaaagttcttatactttttaaaagctatcacacaaagacttttttttttttttttgtctcgctctgttgcccaggctggagtacagtggcgcgatctcagctcactgcaagctccgcctcccaagttcactccattctcctgcctcagcctccggagtagctgggactgcaggcgcctgccaccacgcctggctaattttttgtatttttagtggagacggattttcaccgtgttagccaggatggtctcaatctcctgacctcgtgatccacccgccttggcctcccaaagtgctgggattacaggcgtgagccaccgtgcctggccgacatttttaaaaaagttttattttgcacggctctaaacctccatgttattttccagtggtgtagaaggtaccagctaaagtgaaccactatgtaatattaggccattctaaaggaaagatgttccatgtcatcagagatggtaaaataggcagggaaaaaaaaatctttggtaccaaagattacacttgtgtttctacacagcaaaccatttttctttcatgaaaataatatattattaacatgaatatattattttgctattaatgtgaaagttgtctctaaatattttttaattttcaaactcatactttattttcatttgaaatgtttttcacaccttttgcattacataataattttgtggaagcattttgccctttagaataaatattagattgatatagctgaaatgtgacttccagttctttgatattccccttgttattcaaatagaaatatggaaatgctttatatattactgttaaatttcttagtgcagaaataacattattaatagagtattgttttcaaaacagatgattaatttcaagaggtttaacagtgaaattgtgtcaatattttgcatttaaaatgaatttaattgaccgatattttctgtagttaaatttagtcacaatatcacatatgttcttcaagaaacacatgaaattattaataaagtaattaaaaaatttttaatgtataacagaattgaccaataggccagttttctggtaacttatgatagtagattgtttctttagaaactgggcagaagctctgcattctcacttgtactttgatttcttatttcttgggcaggcaatttgaggaaagaagaaatggcatggggaatatatatgttttgtttcttagggaaaacagtctgagaaatgaataaaaagcatgaagtacgtgtgtgtgtgtgtgtgttaccatggaaaaggatattcacagtagtacagttctcaatatttttaattagatgtcatatttttttaatatagtaaaaccttgggatatagaatattacatcttttgagaatgtatgtgtctctaagtaagtaaaatctaatgcgtataggagactgatagctaaaaatgaatggaacattaatgtacttttataattaaacctcttatctatcagaaattgtaagagaatagatacatgttttgaatgtaaagttgaaaagtctggtttacttaataaattgaaagtgatttataaaatctaaatttggactacttgcaaatgataagctattctagtagcctttagtttaaatccaacagaaatctagaagtcacaagcaaatatcttaaaggtaaaatccatctgggcactcatttaaagtatatcttaaaaaagcagcagcaaggtaccttgccatttttagcatattttcttcctttttcttttttcttttttttttttttttgagatggagtctcactctgtcacacaggctggaatgcagtgatgccatctcagctcactgcaacctccacctcctgggttcaagtgattctcgtgcctcagcctcccaagtagctggggttacaggcgcccaccaccacactcggctaattttgtgtttttagtagagacaaagtttcaccatgttggccaggctggtcttgaacttcctgacctcaggttatccacccacctcagcctcccaaagtgctgggattacaggtgtgagccaccgcagccggaccatttttagtatattttcagtaaatacatttaaacaatgttaaggccacagcacacatatctcagccattcattgttctgtgcattgatgtttatctcatagatgcattgagtagtgcctttttagctttttcacattactttgtcaccatatcctttgtgttctctaaatacattgcccacttccaaaaatgttcagcatgaaaaaaagggcttcagtgtcgattgagattgcttttgttcatctcagggatttcaatagtcaagaatgaattcagttaaaggtatttagggttcaaagaagacaaactgtacaagcccatttcattccttgttgtatacctttccatctgccctcccattttaactatctactgtggcctttttatggaaacagagcaagatcaatgaaggctaatggcaagaataagaaaaagagttgagatttaaccaatagcggagcataaaggatcatgacaaaatcaaattataaaagcatacttgaaataggtggagctttttcttttgaaaatatatattcacaattttaatattttaatttattttttactatttaaccctgtacttggcaatgctcaggcagctgattgtgaaatattcttgtcctttacagaacatggttgttattgtgctgttgacatgaatagaccatggaaacattttcatcattattattcagcctgtgctgtagttaatgttaagttgctgaaataaaaagtgagcaagtaatagattttcttggcaaatctaatgattcagcccacaggactgttgaaactactgcggaagtttttctatctgaaagaaggtgctgggcattcaaatgtgttcatgtattgtatatcatatgaattgtatatcaattactaatgggaatttctacatatatgcttacaaaagcaatttatttaagtaatgctaggggtagtgtacataccaattagttattcagctactatacagaaaaaggatgaacaaattaatttatttctaattgagccagttagacataatgcatataacgtgatatttggttcatgaaagagttgttttcatgtggttattgtagggagtatatataattgtggaaggggtatgggaagagttgtgtatagttagttgttatctctacaagtttgaaagttttcccatcaaacattatcaatataccaatgttttaaaaattgagtgagggttattatttgtatttgatgaaagaaaatccaaataaagcccacctagaaatagatattttattatatatgtgctatagatatacctatatagtacaaatagacatgtgtgatgcatatatacaatgttatatatgtgtatatgtctgtatacacactgagtctgtaatatgtatacactaaatttgtgttatgctaacatcttcagggtctgcactgtgaactcccctggagataagtaagtccactttagaataaagaagttcttttgagacttcagttactaacgtgctttaagaggtatctactttataactgaattctatgtcgttcatacgtagagttacagtaagggtctagtatgtccaaatcttaataataaagaagaaaagtaaaggcttcaagctagcaatgtattcgaattacagttttcagattgtggctccaggccttgtgtttctcatttaagtagcaccttttaataaaaaccgtttctttgtgtaggcaaaagcacaagtgtttcaaatgtaaatagcaggaaaaaaaaagagtttacagagatagcattgctgcacagaataattgctactgagtatttcttatagaatttgtggaactgaaagatgaggtttattctgtcaagttcaagttcattctgttcaacactgttttcttattgtttgtgtatagcaaccgggtattattgttttatcatttgtaaaattgtaaaataaattaatccctttttttcactgaaaaaaaaaaaaaaa

SEQ ID NO: 1078 - protein, 359 aa, Homo sapiens
MRSIRKRWTICTISLLLIFYKTKEIARTEEHQETQLIGDGELSLSRSLVNSSDKIIRKAGSSIFQHNVEGWKINSSLVLEIRKNILRFLDAERDVSVVKSSFKPGDVIHYVLDRRRTLNISHDLHSLLPEVSPMKNRRFKTCAVVGNSGILLDSECGKEIDSHNFVIRCNLAPVVEFAADVGTKSDFITMNPSVVQRAFGGFRNESDREKFVHRLSMLNDSVLWIPAFMVKGGEKHVEWVNALILKNKLKVRTAYPSLRLIHAVRGYWLTNKVPIKRPSTGLLMYTLATRFCDEIHLYGFWPFPKDLNGKAVKYHYYDDLKYRYFSNASPHRMPLEFKTLNVLHNRGALKLTTGKCVKQ

SEQ ID NO: 1079 - DNA, 1887 bp, Homo sapiens
gctgcagaagctgccgccacctccaatgcacaaggtgtctcatctgaaaagaaacctgagccccagggaggcggcgcggagcgaccctggcagagctggcgcaaacagggcgagaggtcgctgggcagcgttcgaggaccagagggagctcggccacagaagaccccagtgatctgatcccgggatcccggctccaagctctcctcgcattttacagatttcacccccgcgactatctccccaaaacggagcctttatatcaagagaaggtgcgggagctggggcaaccaggactttctcgggcacccaagatgcgctccattaggaagaggtggacgatctgcacaataagtctgctcctgatcttttataagacaaaagaaatagcaagaactgaggagcaccaggagacgcaactcatcggagatggtgaattgtctttgagtcggtcacttgtcaatagctctgataaaatcattcgaaaggctggctcttcaatcttccagcacaatgtagaaggttggaaaatcaattcctctttggtcctagagataaggaagaacatacttcgtttcttagatgcagaacgagatgtgtcagtggtcaagagcagttttaagcctggtgatgtcatacactatgtgcttgacaggcgccggacactaaacatttctcatgatctacatagcctcctacctgaagtttcaccaatgaagaatcgcaggtttaagacctgtgcagttgttggaaattctggcattctgttagacagtgaatgtggaaaggagattgacagtcacaattttgtaataaggtgagctttcttctgctttttgagattgtaagtttttcaaagatattttacttgggggtggaaaactgttagaaaattttaaagtattactaaaacctcaaacaaatatttgtctatgatatccttttctgtgcaacatttaaattacatttaccctggaatagaatattataattattgcgtagttgaaagaaaaagtgatcctgtcatagcaacaagattcacacagctttttttggtgaggtgaggggggaggcaaatggcaattttattaaatttaatattccacacaaacttttttcttagtatctcttcttcatactcattagttttgtgtgattttatttgttgtataaagattatgaatattactatggaatgatgtaatagatttatgttaatgttactttttattaataattatctaggagatagtaagaacatagtttagcaagtttatatttgatatcctgagccatatttctttaatttctctttatatgtggtatttgtgtatgttagtatatttgaattttatgtttttttaacataattaagcgtgcatgtttgtttttcattaacggttaaaagatatttgatgaattgtgtgtttgattaacctattaactgaaaaaaactcaacagtagaaatggaattataatcacatcataaatataagcagtttttaatgatcaatttttatatctgtacagtttttttggattgttttagttccttagaaaaattagctaaatgacagaaacatggatattgaaatatgaaatagtacaatataaagatagatagaaaagtatgctgagttgacatgttgaaaaacacagtctcttgaagatatactggaatacattatttttgaatattttgaatattttttgaatatttttaaataaagtcttaaaagcataaataggtaactacttttaaaaaaaaagtcatgagaaatcacactcaagcattatcaagtgaagaaaattcataatagcaaataaaactgcaaacattttaccttaaaaaaaaaaaaaaaaaaaaaaaaaaaaaaaaaaaaaaaaaa

SEQ ID NO: 1080 - protein, 168 aa, Homo sapiens
MRSIRKRWTICTISLLLIFYKTKEIARTEEHQETQLIGDGELSLSRSLVNSSDKIIRKAGSSIFQHNVEGWKINSSLVLEIRKNILRFLDAERDVSVVKSSFKPGDVIHYVLDRRRTLNISHDLHSLLPEVSPMKNRRFKTCAVVGNSGILLDSECGKEIDSHNFVIR

SEQ ID NO: 1081 - DNA, 5334 bp, Homo sapiens
cccacgccgcgccttccggttggtccttgaggcgacgggtgaggcacagctgagcgccaaagccacaggctggggcgctaacgcccccgctcagcgctctgcgctccagacagctgcgagctggagtaggaaggttcaggcggtggcggagagtgcgctggaggctggagggccaggaggcgggaagcttcccgcacgggggcgctgtcacctgcctgtgggaggagccagagagggacctggctctgctgctctgaagcaccggagtcgggagaacccatccagacatgaagagcgccaaaggtattgagaacttggcttttgtcccctccagcccagacatcctgcgccgcttgtctgcgtcgccctcccaaatcgaagtctctgccttgtcctctgacccccaaagagagaattctcagccacaggagcttcagaagccccaggagccccagaagtcaccagagccatctctgccttcagcccctcccaatgtctccgaagagaagctccggtcactgtcgctgtccgagtttgaggaggggtcttacggctggaggaacttccatcctcaatgtctccagcgctgcaacacacctggaggctttctgcttcactactgcctcttggccgtcacgcaaggtattgtagttaatggcctagtaaatattagcatttccactgttgagaagcgttatgaaatgaagagttccctgactggcctgatttcatcaagctacgatatttcattctgtttgttgtctttatttgtatcattctttggtgaaagaggacataagccgagatggcttgcatttgcagcctttatgattggactgggagcacttgtattctcattgccacaatttttcagtggagaatataaattggggtctctttttgaagacacttgtgtaacaacaaggaatagcaccagttgtacatcttcaacttcttcactttctaactacttgtatgtcttcatcttgggacaactattgctgggggcaggaggaactcctctttatactctgggaacagcctttcttgatgattctgtgcccacacacaagtcttctctctatataggaaccggttatgctatgtcaatcttaggccctgctattggctatgtattgggaggacaactgctaaccatatacattgatgttgctatgggagaaagcactgatgtcactgaggatgatccgcgatggttgggagcttggtggattgggtttcttctatcatggatctttgcttggtctttaataatacctttttcttgctttccaaaacatttaccaggtacagcagaaattcaagctggaaaaacttcccaggctcatcagagtaatagtaatgcagatgtgaaatttggaaaaagtattaaagattttccagctgctctaaagaatttgatgaagaatgctgtctttatgtgtttagttctatcaacttcttcagaagccttaattactactggatttgctacatttttacctaaatttatagaaaatcaattcggattgacatccagcttcgcagctactcttggaggggctgttttaattcctggagctgctctcggtcaaattttaggtggcttccttgtttcaaaattcagaatgacatgtaaaaacacaatgaagtttgcactgttcacatctggagttgcacttacgctgagttttgtatttatgtatgccaaatgtgaaaatgagccatttgctggtgtatctgaatcatataatgggactggagaattgggaaacttgatagccccttgtaatgccaattgtaactgttcgcgatcatattattatcctgtctgtggagatggagtccaatatttttctccctgctttgcaggctgttcaaacccagttgcacacaggaagccaaaggtatattacaactgttcctgtattgaaaggaaaacagaaataacatccactgcagaaacttttggttttgaagctaaagctggaaaatgtgaaactcattgtgcgaaactgcccatattcctttgcattttctttattgtaattatttttacctttatggccggtactcctataactgtgtctatcctaaggtgtgttaatcacagacaacggtccctagccttgggaatacaatttatggtccttcgattattagggacaattcctggaccaattatatttggtttcacaatagacagcacatgtattctttgggatataaatgattgtggaattaaaggagcttgctggatttatgataacatcaagatggcccatatgctagtagccataagtgttacttgtaaagttatcaccatgttcttcaatggatttgcaatctttttgtataaaccacctccatcagccacagatgtgtcatttcataaagagaatgcagttgtgactaatgttttagcagaacaggatctcaacaaaatagtaaaagaagggtgaaatgggaaaagagaagactgttttacacctggaaaatttacctcgatttttaagaacacacattgccatggcaggattatctatccaatatggacaatcatatttacaaaattgatgtttttataatcaaatgtatttttttacttatgtagtttttgttttatgcaagaaacagacctgtgccttcaaagcccacgtaaagcctcaaaacacagcacacacacacacgagcacacacacacacacacacacgaacacacacacacacacacacacgcacacatacacacttatttcctattcccattgtctaggtatgaaatcctcaagcaataacaagaaaaaaggcccacaattagaaaaatttacatttaaaaaaaatgttgtttctatccccattacaacttgtttaattttaattttcattgtcaatattttgagcttagaacatttatggtataaaaatttaaactaatcaaagttgtgtgatgatttccgggaattattattgaaagcctatgaatttaaaaccaggtttaccatgtaatttgtttttaaatttatgtatactagcctggcctttctccaagcaaattattgaactattagaatatgttagttatcatccttgtgtcttagtatatagtgaatacagaaacatcagcattgtatacacatattttcactttaactcaagaattccaggaggtaatttgttgatattacaatttttaacacatttatgattctgtgataatattattcaattgcatatatttcagaggaaagtaccagtcagtaaagaaaaatgccaactaaacatgaaactattgatcaatacttatatacctttaatttttcctatttgaaaagccaaccacttaacacattactcatagcacctaagacagtgccttgcatagtgtagtcatctattattattgtttaattagaatattaaaccctaccctttaactcagcagtccccaaccttttttgcatcagggaccatttttgtggaagacaatttttccatgggggaagaaggtatggttttgagatgaaactgctccacctcagaccatcaggcattagttagattctcataaggagagtgcaacctagatcccttgcatgtgcagttcccaatggagtgtgcactcctatgagaatctaatgccactactgatctaacaagaggtggagctcaggcagtaatgctcactcacctgcctctcagctcaccaactgtgtggcccgattcctaacaggccacacacagcccagggctggggacccctgctttaactgatgcattgatttgataaagtattttacaagcctgataatgttataaccctgtttattcaggtcagatttatgccaactttgctgagaatatggagggtatagatgagtgaacatcaacaaacataacttctaccatggttaagaattttacttaggaaaagtattgaagttcaaatccagatagtattacatttgaaattgttataagggttattaatttaataaaattcatcatcaggtttcccctataagctttctcctaggttaattttccacaagcattgttttatatacactgtaatcaggataacacaagcttagtgttagatcttgtaggaaaccaagattagaaacattagaaatttgcagaatttaagaaattatgttttgtggtaatctatggccaacgatgttagaacctagcgcaattgtaaagtgaaattcaaggagaaggaatgaggagttagggaagcagcatacttgaatattagagaaggagaggagctgtgggtcaggaatcagagagacctgctaaaaccagacagatataaacaccaaagacggaagccaaataggtagccaaaaatccagatatttgagaagcaggaaatttatagcaaccaaagaaatagggcaagagaggcaggtgaacacacatgatacctcaattgacaatcttcctcccaccaagccagacacgttgtaaatgctgcttcctattggagcccagaaaaaaggaaaaggaaagtttaggctttctttgtcctttgtgtggaagcagggaattggattgaagactttcatagttgtaacataaaggcaaatcctgaggaactcactgatggagatgtgaaatggcagtaaggaagaaaacagaataactgaacaaatatattagtctagggccacttaatttagaggaagaaaaaaaatcaacccatccatagaaatagtttgataaacaggtcactaaatcattggcgtttataaagattcttagctatcaagggctgcattgtattttatatactcagttttataaggtgatactttttaaataagcgctttaatgaaaatggttagactgaaaataattttggtccttaaaaggagtcaggagcttttatatataaggtacatattttaaaagaatacctcctttataacagggttttacagacactaccataatttataatcattattttttacttttgggttcacctagatcatatgagttgatgtgatacttctagaacaaaattattcatagtgcgttttttgtaatttatgattgttaagtaagcttgacttataaattgacattgtaattgtgtacataattggatatatgtgttaaaatttaacatttagatttacttaattgtagaaaatacaaatgtaaaacttacacatggaaagaactgtatgcagttgactttactatgtaaattggagggaaacaaagttttagatccattttctttcaaaattttctttattgtaaagtatgcaaaatatatattcataccatttattaaatcagaatgtttatacaaaa

SEQ ID NO: 1082 - protein, 724 aa, Homo sapiens
MKSAKGIENLAFVPSSPDILRRLSASPSQIEVSALSSDPQRENSQPQELQKPQEPQKSPEPSLPSAPPNVSEEKLRSLSLSEFEEGSYGWRNFHPQCLQRCNTPGGFLLHYCLLAVTQGIVVNGLVNISISTVEKRYEMKSSLTGLISSSYDISFCLLSLFVSFFGERGHKPRWLAFAAFMIGLGALVFSLPQFFSGEYKLGSLFEDTCVTTRNSTSCTSSTSSLSNYLYVFILGQLLLGAGGTPLYTLGTAFLDDSVPTHKSSLYIGTGYAMSILGPAIGYVLGGQLLTIYIDVAMGESTDVTEDDPRWLGAWWIGFLLSWIFAWSLIIPFSCFPKHLPGTAEIQAGKTSQAHQSNSNADVKFGKSIKDFPAALKNLMKNAVFMCLVLSTSSEALITTGFATFLPKFIENQFGLTSSFAATLGGAVLIPGAALGQILGGFLVSKFRMTCKNTMKFALFTSGVALTLSFVFMYAKCENEPFAGVSESYNGTGELGNLIAPCNANCNCSRSYYYPVCGDGVQYFSPCFAGCSNPVAHRKPKVYYNCSCIERKTEITSTAETFGFEAKAGKCETHCAKLPIFLCIFFIVIIFTFMAGTPITVSILRCVNHRQRSLALGIQFMVLRLLGTIPGPIIFGFTIDSTCILWDINDCGIKGACWIYDNIKMAHMLVAISVTCKVITMFFNGFAIFLYKPPPSATDVSFHKENAVVTNVLAEQDLNKIVKEG

SEQ ID NO: 1083 - DNA, 2544 bp, Homo sapiens
tttgcctcctgccctaggagaaacgttcgctctggaggcttgggcggcaagagccccttgtggccaccgagtcctccgacgccctcgccaggctggcctttgggttggcccaggcaggacgggcagccgagagcactcgggccgcgtcgccaggagccgcccagggtgagccatgttcgtaggcgtcgcccggcactctgggagccaggatgaagtctcaaggggagtagagccgctggaggccgcgcgggcccagcctgctaaggacaggagggccaagggaaccccgaagtcctcgaagcccgggaaaaaacaccggtatctgagactacttccagaggccttgataaggttcggcggtttccgaaaaaggaaaaaagccaagtcctcagtttccaagaagccgggagaagtggatgacagtttggagcagccctgtggtttgggctgcttagtcagcacctgctgtgagtgttgcaataacattcgctgcttcatgattttctactgcatcctgctcatatgtcaaggtgtggtgtttggtcttatagatgtcagcattggcgattttcagaaggaatatcaactgaaaaccattgagaagttggcattggaaaagagttacgatatttcatctggcctggtagcaatatttatagcattctatggagacagaaaaaaagtaatatggtttgtagcttcctcctttttaataggacttggatcacttttatgtgcttttccatccattaatgaagaaaataaacaaagtaaggtaggaattgaagatatttgcgaagaaataaaggttgtcagtggttgccagagcagtggtatatcattccaatcaaaatacctgtctttcttcatccttgggcagactgtgcagggaatagcaggaatgcctctttatatccttggaataacctttattgatgagaatgttgctacacactcagctggtatctatttaggtattgcagaatgtacatcaatgattggatatgctctgggttatgtgctaggagcaccactagttaaagtccctgagaatactacttctgcaacaaacactacagtcaataatggtagtccagaatggctatggacttggtggattaattttctttttgccgctgtcgttgcatggtgtacattaataccattgtcatgctttccaaacaatatgccaggttcaacacggataaaagctaggaaacgtaaacagcttcatttttttgacagcagacttaaagatctgaaacttggaactaatatcaaggatttatgtgctgctctttggattctgatgaagaatccagtgctcatatgcctagctctgtcaaaagctacagaatatttagttattattggagcttctgaatttttgcctatatatttagaaaatcagtttatattaacacccactgtggcaactacacttgcaggacttgttttaattccaggaggtgcacttggccagcttctgggaggtgtcattgtttccacattagaaatgtcttgtaaagcccttatgagatttataatggttacatctgtgatatcacttatactgcttgtgtttattatttttgtacgctgtaatccagtgcaatttgctgggatcaatgaagattatgatggaacagggaagttgggaaacctcacggctccttgcaatgaaaaatgtagatgctcatcttcaatttattcttctatatgtggaagagatgatattgaatatttttctccctgctttgcagggtgtacatattctaaagcacaaaaccaaaaaaagatgtactacaattgttcttgcattaaagaaggattaataactgcagatgcagaaggtgattttattgatgccagacccgggaaatgtgatgcaaagtgctataagttacctttgttcattgcttttatcttttctacacttatattttctggtttttctggtgtaccaatcgtcttggccatgacgcgggttgtacctgacaaactgcgttctctggccttgggtgtaagctatgtgattttgagaatatttgggactattcctggaccatcaatctttaaaatgtcaggagaaacttcttgtattttacgggatgttaataaatgtggacacacaggacgttgttggatatataacaagacaaaaatggctttcttattggtaggaatatgttttctttgcaaactatgcactatcatcttcactactattgcatttttcatatacaaacgtcgtctaaatgagaacactgacttcccagatgtaactgtgaagaatccaaaagttaagaaaaaagaagaaactgacttgtaactggatcatcattgtgattgcagatcatttgaggatcagagtgtgaaaacgagtttctcttttacagattctccaagatttgtttctgtgcccaactttcagaagaggaaaatcacacattatgtttacataagtagcaaaaatatatttatggtgatctgcattttcataataaagtgtcctattgtgaaaaaaaaaaaaaaaaaaaaaaa

SEQ ID NO: 1084 - protein, 719 aa, Homo sapiens
MFVGVARHSGSQDEVSRGVEPLEAARAQPAKDRRAKGTPKSSKPGKKHRYLRLLPEALIRFGGFRKRKKAKSSVSKKPGEVDDSLEQPCGLGCLVSTCCECCNNIRCFMIFYCILLICQGVVFGLIDVSIGDFQKEYQLKTIEKLALEKSYDISSGLVAIFIAFYGDRKKVIWFVASSFLIGLGSLLCAFPSINEENKQSKVGIEDICEEIKVVSGCQSSGISFQSKYLSFFILGQTVQGIAGMPLYILGITFIDENVATHSAGIYLGIAECTSMIGYALGYVLGAPLVKVPENTTSATNTTVNNGSPEWLWTWWINFLFAAVVAWCTLIPLSCFPNNMPGSTRIKARKRKQLHFFDSRLKDLKLGTNIKDLCAALWILMKNPVLICLALSKATEYLVIIGASEFLPIYLENQFILTPTVATTLAGLVLIPGGALGQLLGGVIVSTLEMSCKALMRFIMVTSVISLILLVFIIFVRCNPVQFAGINEDYDGTGKLGNLTAPCNEKCRCSSSIYSSICGRDDIEYFSPCFAGCTYSKAQNQKKMYYNCSCIKEGLITADAEGDFIDARPGKCDAKCYKLPLFIAFIFSTLIFSGFSGVPIVLAMTRVVPDKLRSLALGVSYVILRIFGTIPGPSIFKMSGETSCILRDVNKCGHTGRCWIYNKTKMAFLLVGICFLCKLCTIIFTTIAFFIYKRRLNENTDFPDVTVKNPKVKKKEETDL

SEQ ID NO: 1085 - DNA, 1574 bp, Homo sapiens
gcttctctccatcttgtgattcctttttcctcctgaaccctccagtgggggtgcgagtttgtctttatcaccccccatcccaccgccttcttttcttctcgctctcctacccctccccagcttggtgggcgcctctttcctttctcgccccctttcatttttatttattcatatttatttggcgcccgctctctctctgtccctttgcctgcctccctccctccggatccccgctctctccccggagtggcgcgtcgggggctccgccgctggccaggcgtgatgttgcacgtggagatgttgacgctggtgtttctggtgctctggatgtgtgtgttcagccaggacccgggctccaaggccgtcgccgaccgctacgctgtctactggaacagcagcaaccccagattccagaggggtgactaccatattgatgtctgtatcaatgactacctggatgttttctgccctcactatgaggactccgtcccagaagataagactgagcgctatgtcctctacatggtgaactttgatggctacagtgcctgcgaccacacttccaaagggttcaagagatgggaatgtaaccggcctcactctccaaatggaccgctgaagttctctgaaaaattccagctcttcactcccttttctctaggatttgaattcaggccaggccgagaatatttctacatctcctctgcaatcccagataatggaagaaggtcctgtctaaagctcaaagtctttgtgagaccaacaaatagctgtatgaaaactataggtgttcatgatcgtgttttcgatgttaacgacaaagtagaaaattcattagaaccagcagatgacaccgtacatgagtcagccgagccatcccgcggcgagaacgcggcacaaacaccaaggatacccagccgccttttggcaatcctactgttcctcctggcgatgcttttgacattatagcacagtctcctcccatcacttgtcacagaaaacatcagggtcttggaacaccagagatccacctaactgctcatcctaagaagggacttgttattgggttttggcagatgtcagatttttgttttctttctttcagcctgaattctaagcaacaacttcaggttgggggcctaaacttgttcctgcctccctcaccccaccccgccccacccccagccctggcccttggcttctctcacccctcccaaattaaatggactccagatgaaaatgccaaattgtcatagtgacaccagtggttcgtcagctcctgtgcattctcctctaagaactcacctccgttagcgcactgtgtcagcgggctatggacaaggaagaatagtggcagatgcagccagcgctggctagggctgggagggttttgctctcctatgcaatatttatgccttctcattcagaactgtaagatgatcgcgcagggcatcatgtcaccatgtcaggtccggaggggaggtattaagaatagatacgatattacaccatttcctataggagtatgtaaatgaacaggcttctaaaaggttgagacactggttttttttttt

SEQ ID NO: 1086 - protein, 228 aa, Homo sapiens
MLHVEMLTLVFLVLWMCVFSQDPGSKAVADRYAVYWNSSNPRFQRGDYHIDVCINDYLDVFCPHYEDSVPEDKTERYVLYMVNFDGYSACDHTSKGFKRWECNRPHSPNGPLKFSEKFQLFTPFSLGFEFRPGREYFYISSAIPDNGRRSCLKLKVFVRPTNSCMKTIGVHDRVFDVNDKVENSLEPADDTVHESAEPSRGENAAQTPRIPSRLLAILLFLLAMLLTL

SEQ ID NO: 1087 - DNA, 2515 bp, Homo sapiens
cggcggcagcagcccatgcctccggtgcaacagctgcgcctcctccggtgccccggcggcgggggcgggagataacctgtccctgctgctccgcacctcctcgcccggcggcgccttccggacccgcacctcctcgccgctgtcgggctcgtcctgctgctgctgctgctgctcgtcgcgccggggcagccagctcaatgtgagcgagctgacgccgtccagccatgccagtgcgctccggcagcagtacgcgcagcagtccgcgcagcagtcggcgtccgcctcccagtaccaccagtgccacagcctgcagcccgccgccagccccacgggcagcctcggcagtctgggctccgggcccccgctctcgcaccaccaccaccacccgcacccggcgcaccaccagcaccaccagccccaggcgcgccgcgagagcaaccccttcaccgaaatagccatgagcagctgcaggtacaacgggggcgtcatgcggccgctcagcaacttgagcgcgtcccgccggaacctgcacgagatggactcagaggcgcagcccctgcagccccccgcgtctgtcggaggaggtggcggcgcgtcctccccgtctgcagccgctgccgccgccgccgctgtttcgtcctcagcccccgagatcgtggtgtctaagcccgagcacaacaactccaacaacctggcgctctatggaaccggcggcggaggcagcactggaggaggcggcggcggtggcgggagcgggcacggcagcagcagtggcaccaagtccagcaaaaagaaaaaccagaacatcggctacaagctgggccaccggcgcgccctgttcgaaaagcgcaagcggctcagcgactacgcgctcatcttcggcatgttcggcatcgtggtcatggtcatcgagaccgagctgtcgtggggcgcctacgacaaggcgtcgctgtattccttagctctgaaatgccttatcagtctctccacgatcatcctgctcggtctgatcatcgtgtaccacgccagggaaatacagttgttcatggtggacaatggagcagatgactggagaatagccatgacttatgagcgtattttcttcatctgcttggaaatactggtgtgtgctattcatcccatacctgggaattatacattcacatggacggcccggcttgccttctcctatgccccatccacaaccaccgctgatgtggatattattttatctataccaatgttcttaagactctatctgattgccagagtcatgcttttacatagcaaacttttcactgatgcctcctctagaagcattggagcacttaataagataaacttcaatacacgttttgttatgaagactttaatgactatatgcccaggaactgtactcttggtttttagtatctcattatggataattgccgcatggactgtccgagcttgtgaaaggtaccatgatcaacaggatgttactagcaacttccttggagcgatgtggttgatatcaataacttttctctccattggttatggtgacatggtacctaacacatactgtggaaaaggagtctgcttacttactggaattatgggtgctggttgcacagccctggtggtagctgtagtggcaaggaagctagaacttaccaaagcagaaaaacacgtgcacaatttcatgatggatactcagctgactaaaagagtaaaaaatgcagctgccaatgtactcagggaaacatggctaatttacaaaaatacaaagctagtgaaaaagatagatcatgcaaaagtaagaaaacatcaacgaaaattcctgcaagctattcatcaattaagaagtgtaaaaatggagcagaggaaactgaatgaccaagcaaacactttggtggacttggcaaagacccagaacatcatgtatgatatgatttctgacttaaacgaaaggagtgaagacttcgagaagaggattgttaccctggaaacaaaactagagactttgattggtagcatccacgccctccctgggctcataagccagaccatcaggcagcagcagagagatttcattgaggctcagatggagagctacgacaagcacgtcacttacaatgctgagcggtcccggtcctcgtccaggaggcggcggtcctcttccacagcaccaccaacttcatcagagagtagctagaagagaataagttaaccacaaaataagactttttgccatcatatggtcaatattttagcttttattgtaaagcccctatggttctaatcagcgttatccgggttctgatgtcagaatcctgggaacctgaacactaagttttaggccaaaatgagtgaaaactctttttttttctttcagatgcacagggaatgcacctattattgctatatagattgttcctcctgtaatttcactaactttttattcatgcacttcaaacaaactttactactacattatatgatatataataaaaaaagttaatttctgcacata

SEQ ID NO: 1088 - protein, 579 aa, Homo sapiens
MSSCRYNGGVMRPLSNLSASRRNLHEMDSEAQPLQPPASVGGGGGASSPSAAAAAAAAVSSSAPEIVVSKPEHNNSNNLALYGTGGGGSTGGGGGGGGSGHGSSSGTKSSKKKNQNIGYKLGHRRALFEKRKRLSDYALIFGMFGIVVMVIETELSWGAYDKASLYSLALKCLISLSTIILLGLIIVYHAREIQLFMVDNGADDWRIAMTYERIFFICLEILVCAIHPIPGNYTFTWTARLAFSYAPSTTTADVDIILSIPMFLRLYLIARVMLLHSKLFTDASSRSIGALNKINFNTRFVMKTLMTICPGTVLLVFSISLWIIAAWTVRACERYHDQQDVTSNFLGAMWLISITFLSIGYGDMVPNTYCGKGVCLLTGIMGAGCTALVVAVVARKLELTKAEKHVHNFMMDTQLTKRVKNAAANVLRETWLIYKNTKLVKKIDHAKVRKHQRKFLQAIHQLRSVKMEQRKLNDQANTLVDLAKTQNIMYDMISDLNERSEDFEKRIVTLETKLETLIGSIHALPGLISQTIRQQQRDFIEAQMESYDKHVTYNAERSRSSSRRRRSSSTAPPTSSESS

SEQ ID NO: 1089 - DNA, 1457 bp, Homo sapiens
cttcaacactgtggaagctttgttctttcgctcttttgcaataaatcttgctactgctcactctttgggtccacactgcctttatgagctgtaacactcaccgcgaaaggtctgcagcttcactcctgaagccagcgagcccacgagcccacagggaggaatgaacaactccagatgcaccgccttaagagctgtaacactcacggcgaaggtctgcagcttcactcctgagccagcgagaccaggaacccaccagaaggaagaaactccgaacacatccgaacatcagaaggaacaaactccagacggcgccaccttaagagctgtaacactcaccgccagggtccagggcttcgttcttgaagtcagtgagaccaagaacccaccaattccggacgcagtaccatgatcaacaggatgttactagcaacttccttggagcgatgtggttgatatcaataacttttctctccattggttatggtgacatggtacctaacacatactgtggaaaaggagtctgcttacttactggaattatgggtgctggttgcacagccctggtggtagctgtagtggcaaggaagctagaacttaccaaagcagaaaaacacgtgcacaatttcatgatggatactcagctgactaaaagagtaaaaaatgcagctgccaatgtactcagggaaacatggctaatttacaaaaatacaaagctagtgaaaaagatagatcatgcaaaagtaagaaaacatcaacgaaaattcctgcaagctattcatcaattaagaagtgtaaaaatggagcagaggaaactgaatgaccaagcaaacactttggtggacttggcaaagacccagaacatcatgtatgatatgatttctgacttaaacgaaaggagtgaagacttcgagaagaggattgttaccctggaaacaaaactagagactttgattggtagcatccacgccctccctgggctcataagccagaccatcaggcagcagcagagagatttcattgaggctcagatggagagctacgacaagcacgtcacttacaatgctgagcggtcccggtcctcgtccaggaggcggcggtcctcttccacagcaccaccaacttcatcagagagtagctagaagagaataagttaaccacaaaataagactttttgccatcatatggtcaatattttagcttttattgtaaagcccctatggttctaatcagcgttatccgggttctgatgtcagaatcctgggaacctgaacactaagttttaggccaaaatgagtgaaaactctttttttttctttcagatgcacagggaatgcacctattattgctatatagattgttcctcctgtaatttcactaactttttattcatgcacttcaaacaaactttactactacattatatgatatataataaaaaaagttaatttctgcacata

SEQ ID NO: 1090 - protein, 231 aa, Homo sapiens
MWLISITFLSIGYGDMVPNTYCGKGVCLLTGIMGAGCTALVVAVVARKLELTKAEKHVHNFMMDTQLTKRVKNAAANVLRETWLIYKNTKLVKKIDHAKVRKHQRKFLQAIHQLRSVKMEQRKLNDQANTLVDLAKTQNIMYDMISDLNERSEDFEKRIVTLETKLETLIGSIHALPGLISQTIRQQQRDFIEAQMESYDKHVTYNAERSRSSSRRRRSSSTAPPTSSESS

SEQ ID NO: 1091 - DNA, 8192 bp, Homo sapiens
gagggaaggagggagggaagcagccgctgacccgtggcatgagctggatgcggtgtccgttgcaggactagggcgccgacatgaacctgcaccaggtgctgaccggggctgtgaaccctggcgaccactgcttctccgtgggcagcattggcgaccagcgcttcacggcttatgcatctggatgtgacattgtaatactgggaagcgattttgaaagattacagataatcccaggagctaaacatggaaatattcaagtgggatgtgtagactgttcaatgcaacaaggcaagattgcagcgtcttatggaaatgttatctccatttttgaaccagttaacctaccaaaacaaaagaaaaatttggaattatatagtcagtggcagaaaagtggccaattttttctggaatcaatagcacacaatataacctgggatcccacaggcagtcgtcttttaactggttccagctatttgcaactctggtccaatactaacttggagaagccaactgaagatgaaaatttaaataaaacagatcttaactttggagattggaaatgcatttggcattgcaaaactgcttcccaagttcatttaatgaaattttcaccagatggagaattttttgccactgctgggaaggatgactgtcttttgaaggtttggtataatgtagaaaactggcggacagctgttacttctccagatggaagttcagaaaaacaatcccaaggagaaattgacttttcttttgtgtatctggcccatcctcgagcagtaaatggattttcctggcgtaaaacaagcaaatatatgcctagggcttctgtatgtaatgtactgttgacttgctgcaaagataatgtgtgtcgtctttgggtagagacatttttaccaaatgattgtttgctatacggaggtgactgcagccattggactgaatcaattaatttaacaaataacttcaagagaaatgcttccagtaaagaacgagttcaaaatgctttagaagtaaatctgagacattttcgtagaggtcggaggagatcacttgctcttgtagcacatacgggatatctaccacatcagcaggatcctcatcatgttcacaggaacactccactgcatgccaatgcactttgccactttcatattgcagccagcatcaacccagccacagacattccacttcttccatctattacatctctgagtctaaatgaaaatgaagagaagaccggaccttttgttgtacactggctaaacaataaagaactgcattttactttgtccatggaagtttttttacagcaacttagaaaaagttttgaacaaccatcttctgaggccagtgtagaagattctaatcaggcagatgtaaaatctgatgaagaaactgatgatggtgttgatgatctgaaaataaatcccgaaaagaaggaattaggctgtgataaaatggtaccaaactcaagttttacatcattatcgtcagctgccattgatcatcagattgaagtacttctgtctgaatggagtaaaaatgcagatatgctatttagtattcatcccatggatggttctttgctagtttggcatgtggattggctggatgaataccagcctggtatgtttcgtcaagtacaggtgtcctttgtttccagaattccagtagctttccccacaggtgatgcaaactctctctgtaaaagcataatgatgtatgcctgtaccaagaatgttgacttggctattcagcaggggaaacaaaaaccttctggcctcacccgttccacatcaatgcttatttcttctggtcacaataaatcatctaatagtttaaaattaagtatttttacgcctaatgttatgatgatatcaaaacatgctgatggttctctgaatcagtggctggtcagttttgccgaggaatctgctttttctactgttctcagtatttcccacaaatccagatattgtggtcatcgttttcatcttaatgatttagcttgccactcagtattaccattattgctgacaacatcacaccataatgcattaaggacaccagatgttgataacccagagcaaccttttgatgctctaaatattgaagaatgctctttgacacaacaaaataaaagcactgttgacgtggcatttcaggatcccagtgcagtttacagtgagcttattctgtggagggttgacccagttgggccattgtctttttctggaggagtttctgagcttgcccggattaattctcttcatgtttctgccttttccaatgtggcatggctgcccactcttatacccagttattgtctgggtgcatactgcaactctcctagtgcatgctttgtagccagtgatggacaatatctgagattatatgaagcagttattgatgctaagaaacttttatctgagctttctaaccctgaaatttctaaatatgttggtgaagtctttaacatcgtcagtcaacaatcaacagccaggccaggatgcattattgcattagatcccattaccaaacttcatggcagaaaaacccaactgcttcatgtttttgaagaagacttcattttgaataaccttgagaagaaaagccttggcaaagacagcattttatctaatgcaggcagctcacctaatggattttctgagaagttctacctaattgtaatagaatgcactcaagacaaccgttcactgttacacatgtggaatttacatctaaagtcaattcctgtctcattagatgaaaaagtagatacaaaattatccgaagcggtttggcagccagaagaacattattcttcttctccagagaagatcctatctcctttttcacaaaagtatcaggcttgcagagcaaatctccagagtaccagcaggttgactctgttttcagaaatggtttatagccaagaattgcatttaccagaaggagttgagataataagtattaagccatcagcaggacatctgagttcatcttctatatatcctgcatgcagtgctccttatttattggcaacttcatgttcagatgagaaagtaagattctggagatgcagagtaacagatggagaatctgccacgtcaaagaatggaaaaattgatcttgcatacatttgggaagaatggccattacttattgaagatggacttcagagcaatagtagtataactgtacctggtaggcctgtagaagttagctgtgcacatacaaatcgtttagcagtagcttataagcagcctgcatctaatagtagatcttcccaggactttgtgatgcatgtaagtatttttgaatgtgagtcaacaggaggttcatgttgggtccttgagcagacaattcatttagatgagttaagcacagtattggattctggcattagtgttgatagcaatttagtggcctataataaacaagacatgtatttatctagtaaagagaatatcacatcaaacacaaagcatttagttcacttagattggatgtctagagaagacggttctcatatcctgactgtaggaattggatcaaaactttttatgtatggacccctggctggcaaggtacaagaccaaactggtaaggaaaccctggcatttcctctctgggagagtaccaaagttgtgcccctttctaaatttgtactattacgaagtgtggacctagtttcttctgtagatggctccccaccttttcctgtttctttatcgtgggtccgggatggcatccttgtggtaggaatggactgtgaaatgcatgtgtattgccaatggcaaccatcttctaaacaagaacctgttataacagattcgtacagtgggagcactccatctataacaagtttaataaaacagagtaactccagttctgggttacatcctccaaagaaaactctgactcgatccatgaccagtcttgcacagaaaatctgtggaaagaaaactgcattcgatccttcagtggatatggaagattcaggtctttttgaagcagctcatgtactttccccgactctacctcagtatcatcccttgcagcttttggaactcatggatcttggtaaagttcggagagccaaggccatcttgtcccatcttgttaagtgcattgctggggaagttgtggctctgaatgaagctgaatctaatcatgaacgccgccttaggtctctcacaatcagtgctagtggaagcactaccagagacccccaggcattcaacaaggctgaaaatacagattacacagaaatagattctgttcctccacttcctttatatgccttacttgcagcagatgatgatagctgttactcatctttggagaaatctagtaatgagagtacgttaagtaaatcaaaccaattatctaaagaaagttatgatgagctttttcagactcaacttctaatgactgatactcatatgttagagacagatgaagaaaatacaaagcctagagttattgacctttcacagtacagtccgacttactttggacctgagcatgctcaggttctttctggccacttacttcattctagtttaccaggactcagccggatggagcagatgtctttgatggccttagcagatacaattgcaactacaagcactgatattggagaaagccgagacagaagccaaggtggagaaactcttgatgaatgtgggttaaaatttcttttggctgttcgactccatacctttcttacaacttcccttccagcctatcgagctcaactccttcaccaaggcctgtctacaagtcattttgcttgggcatttcactcagtagcagaagaagaactgctgaacatgttgccagccatgcagaaagatgatcccacttggtctgaactaagagctatgggtgtggggtggtgggtccggaatacccgcatcttacgcaaatgcatagaaaaagtagctaaagcagccttttatagaaagaatgatcctttagatgctgccattttttaccttgcaatgaaaaagaaagctgtgatttggggattatatagagctgaaaaaaacaccaggatgacacagttttttggacacaattttgaggatgagaggtggcgtaaagcagctttaaagaatgctttttctttgctaggcaaacaaagatttgaacattctgcagcattttttcttttagctggttgcctcagagatgcaattgaggtatgtcttgagaaattgaatgacattcagttggctcttgtaatagcaagactctatgagtctgaatttgatacatctgcagcatataaatctattttacgtaaaaaagttttgggaatcgattctcctgtcagtgaactgtgttcattgaacataaatatgcatcatgatccttttcttcggagcatggcatattggattttggaagattatagtggtgctctggaaacattaataaagcaacctatcagagagaatgatgatcaagttttatcagccagtaatcctacagtttttaatttctacaattatctaagaacacatcctcttttgctgagacgtcattttggatcatctgatacattttccacacatatgagcctaacaggaaaaagtggactggcaggaacaattaatttaagtgaaagacgtttattttttaccactgccagtgctcatttaaaagctggctgcccaatgttggctttggaagtattatcaaagatgcctaaagtcatcaagaaaacaagacctttttatagggcttctagttttctggatactagtaaagactgttctccttcttctccattaaagttggatgcaagggaagataagtcttctgctgttgattggtcacagtcactgataaatggttttggatcttcttcagagggttcctcagagaagcaatcaaactccactctttcttttgactggagccaaccaagtgttgtgtttcaggatgactctttagagttaaaatgggacagtgataatgatgaagaaaatgaggatgtccctatttcaatgaaagaactaaaacctttacagagaaaaacagataaaaagttggatgacataagttctaactacacagaatctttcagcacactagatgaaaatgaccttttaaatccatcagaagatataattgcagttcagttaaaatttagagcatgtttaaagattctcacagtagaacttcgtactttatctactggctatgaaatagatggtggaaaattgcgttaccaactataccactggcttgaaaaagaggtgatagctcttcagaggacttgtgacttttgctcagatgctgaagaactacagtctgcatttggcagaaatgaagatgaatttggattaaatgaggatgctgaagatttgcctcaccaaacaaaagtgaaacaactgagagaaaattttcaggaaaaaagacagtggctcttgaagtatcagtcacttttgagaatgtttcttagttactgcatacttcatggatcccatggtgggggtcttgcatctgtaagaatggaattgattttgcttttgcaagaatctcagcaggaaacatcagaaccactattttctagccttctgtcagagcaaacctcagtgcctctcctctttgcttgtacagccaatgccaaaacagtagttgccaatccattattgcaccttagtaatctgacacatgatattctccatgccataataaactttgattcaccaccccaccctgatatccaaagcaataaagtgtatgtaatgcatactttagcagcttcactttctgcttgtatttatcagtgcctttgtggtagtcataactacagttcatttcagacgaatcagtttactggaatggtatatcagacagtactgcttcctcatcgaccttctttgaaaacaggaagcttagatgaagcattaactcccaatacgtcaccagctcaatggccaggaataacttgtctaattcgacttttgaattcttctggcgaggaagcccagtcagggcttacagtcttgctctgtgagattctcacagcagtgtatcttagtctcttcatccatggcctggccacacattcaagtaatgagctatttcggattgtggcccatcctctaaatgagaaaatgtggtctgctgtgtttggtggaggtgcacatgttcctagcaaagaacagacacattcaaaaactttacctgtttcttcactagttgaagaaggagaaaaacagaacaaacgttttaggccgtcaaaaatgtcttgcagagaatctgccccactgaccccttcctcggcaccagtaagccaggagtcactggcggttaaagaaaagttcatcccacctgagctcagtatctgggactatttcatagctaagccttttctaccctcttctcaaagtagagccgaatatgattcagaggagagtctgggaagtgatgatgatgacaatgatgatgatgatgatgttttagcatcagatttccatctccaggaacattctaattcaaattcatatagttggtccttgatgcggttggcgatggtgcaattggtgctcaacaatttgaagactttttatcccttcgcaggtcatgatcttgcagagcttccagttagttcacctctttgtcatgcggttctaaaaactcttcaatgttgggaacaagttcttctccgacgacttgaaatccatggtgggccacctcaaaattatatcgcaagtcataccgccgaagagagtttgtctgcaggtcctgcaattcttcgccacaaagctttactggaacctacaaacactcctttcaaatccaaacaccatctggcactgtctgtgaagaggctttggcagtatttggtgaagcaggaagaaattcaggaaacctttatcaaaaatatattcacaaagaaacggtgtctaaatgagatagaagcagatttgggatatcctggaggtaaagcaagaattattcataaggaatctgatatcattactgcgtttgctgttaataaggcaaatagaaactgcatagcaatcgcttccagtcatgatgttcaagaactggatgtttctggaattctggccacacaggtctacacttgggtagatgatgatatagaagtggaaaccaaaggatcagaagatttcttggttatacatgctcgtgatgattta

SEQ ID NO: 1092 - protein, 3027 aa, Homo sapiens
MNLHQVLTGAVNPGDHCFSVGSIGDQRFTAYASGCDIVILGSDFERLQIIPGAKHGNIQVGCVDCSMQQGKIAASYGNVISIFEPVNLPKQKKNLELYSQWQKSGQFFLESIAHNITWDPTGSRLLTGSSYLQLWSNTNLEKPTEDENLNKTDLNFGDWKCIWHCKTASQVHLMKFSPDGEFFATAGKDDCLLKVWYNVENWRTAVTSPDGSSEKQSQGEIDFSFVYLAHPRAVNGFSWRKTSKYMPRASVCNVLLTCCKDNVCRLWVETFLPNDCLLYGGDCSHWTESINLTNNFKRNASSKERVQNALEVNLRHFRRGRRRSLALVAHTGYLPHQQDPHHVHRNTPLHANALCHFHIAASINPATDIPLLPSITSLSLNENEEKTGPFVVHWLNNKELHFTLSMEVFLQQLRKSFEQPSSEASVEDSNQADVKSDEETDDGVDDLKINPEKKELGCDKMVPNSSFTSLSSAAIDHQIEVLLSEWSKNADMLFSIHPMDGSLLVWHVDWLDEYQPGMFRQVQVSFVSRIPVAFPTGDANSLCKSIMMYACTKNVDLAIQQGKQKPSGLTRSTSMLISSGHNKSSNSLKLSIFTPNVMMISKHADGSLNQWLVSFAEESAFSTVLSISHKSRYCGHRFHLNDLACHSVLPLLLTTSHHNALRTPDVDNPEQPFDALNIEECSLTQQNKSTVDVAFQDPSAVYSELILWRVDPVGPLSFSGGVSELARINSLHVSAFSNVAWLPTLIPSYCLGAYCNSPSACFVASDGQYLRLYEAVIDAKKLLSELSNPEISKYVGEVFNIVSQQSTARPGCIIALDPITKLHGRKTQLLHVFEEDFILNNLEKKSLGKDSILSNAGSSPNGFSEKFYLIVIECTQDNRSLLHMWNLHLKSIPVSLDEKVDTKLSEAVWQPEEHYSSSPEKILSPFSQKYQACRANLQSTSRLTLFSEMVYSQELHLPEGVEIISIKPSAGHLSSSSIYPACSAPYLLATSCSDEKVRFWRCRVTDGESATSKNGKIDLAYIWEEWPLLIEDGLQSNSSITVPGRPVEVSCAHTNRLAVAYKQPASNSRSSQDFVMHVSIFECESTGGSCWVLEQTIHLDELSTVLDSGISVDSNLVAYNKQDMYLSSKENITSNTKHLVHLDWMSREDGSHILTVGIGSKLFMYGPLAGKVQDQTGKETLAFPLWESTKVVPLSKFVLLRSVDLVSSVDGSPPFPVSLSWVRDGILVVGMDCEMHVYCQWQPSSKQEPVITDSYSGSTPSITSLIKQSNSSSGLHPPKKTLTRSMTSLAQKICGKKTAFDPSVDMEDSGLFEAAHVLSPTLPQYHPLQLLELMDLGKVRRAKAILSHLVKCIAGEVVALNEAESNHERRLRSLTISASGSTTRDPQAFNKAENTDYTEIDSVPPLPLYALLAADDDSCYSSLEKSSNESTLSKSNQLSKESYDELFQTQLLMTDTHMLETDEENTKPRVIDLSQYSPTYFGPEHAQVLSGHLLHSSLPGLSRMEQMSLMALADTIATTSTDIGESRDRSQGGETLDECGLKFLLAVRLHTFLTTSLPAYRAQLLHQGLSTSHFAWAFHSVAEEELLNMLPAMQKDDPTWSELRAMGVGWWVRNTRILRKCIEKVAKAAFYRKNDPLDAAIFYLAMKKKAVIWGLYRAEKNTRMTQFFGHNFEDERWRKAALKNAFSLLGKQRFEHSAAFFLLAGCLRDAIEVCLEKLNDIQLALVIARLYESEFDTSAAYKSILRKKVLGIDSPVSELCSLNINMHHDPFLRSMAYWILEDYSGALETLIKQPIRENDDQVLSASNPTVFNFYNYLRTHPLLLRRHFGSSDTFSTHMSLTGKSGLAGTINLSERRLFFTTASAHLKAGCPMLALEVLSKMPKVIKKTRPFYRASSFLDTSKDCSPSSPLKLDAREDKSSAVDWSQSLINGFGSSSEGSSEKQSNSTLSFDWSQPSVVFQDDSLELKWDSDNDEENEDVPISMKELKPLQRKTDKKLDDISSNYTESFSTLDENDLLNPSEDIIAVQLKFRACLKILTVELRTLSTGYEIDGGKLRYQLYHWLEKEVIALQRTCDFCSDAEELQSAFGRNEDEFGLNEDAEDLPHQTKVKQLRENFQEKRQWLLKYQSLLRMFLSYCILHGSHGGGLASVRMELILLLQESQQETSEPLFSSLLSEQTSVPLLFACTANAKTVVANPLLHLSNLTHDILHAIINFDSPPHPDIQSNKVYVMHTLAASLSACIYQCLCGSHNYSSFQTNQFTGMVYQTVLLPHRPSLKTGSLDEALTPNTSPAQWPGITCLIRLLNSSGEEAQSGLTVLLCEILTAVYLSLFIHGLATHSSNELFRIVAHPLNEKMWSAVFGGGAHVPSKEQTHSKTLPVSSLVEEGEKQNKRFRPSKMSCRESAPLTPSSAPVSQESLAVKEKFIPPELSIWDYFIAKPFLPSSQSRAEYDSEESLGSDDDDNDDDDDVLASDFHLQEHSNSNSYSWSLMRLAMVQLVLNNLKTFYPFAGHDLAELPVSSPLCHAVLKTLQCWEQVLLRRLEIHGGPPQNYIASHTAEESLSAGPAILRHKALLEPTNTPFKSKHHLALSVKRLWQYLVKQEEIQETFIKNIFTKKRCLNEIEADLGYPGGKARIIHKESDIITAFAVNKANRNCIAIASSHDVQELDVSGILATQVYTWVDDDIEVETKGSEDFLVIHARDDLTAVQGTTPYTHSNPGTPINMPWLGSTQTGRGASVMIKKAINNVRRMTSHPTLPYYLTGAQDGSVRMFEWGHSQQITCFRSGGNSRVTRMRFNYQGNKFGIVDADGYLSLYQTNWKCCPVTGSMPKPYLTWQCHNKTANDFVFVSSSSLIATAGLSTDNRNVCLWDTLVAPANSLVHAFTCHDSGATVLAYAPKHQLLISGGRKGFTYVFDLCQRQQRQLFQSHDSPVKAVAVDPTEEYFVTGSAEGNIKIWSLSTFGLLHTFVSEHARQSIFRNIGTGVMQIETGPANHIFSCGADGTMKMRILPDQFSPLNEVLKNDVKFML

SEQ ID NO: 1093 - DNA, 2003 bp, Homo sapiens
gctcgtccgagtacatgtgagcggtaatcgcccctgcagctggttatcctgacattatgcactccgaagcagaagaatccaaggaaggcctaggcttaaacactggcatatatggagagaacagttgccactcgactcagagattgagtagacacccaaagaactgcagttcttaagccttaggagaagcgagagaaatggcagtggccacagatgtctttaattccaaaaacctggccgttcaggcacaaaagaagatcttgggtaaaatggtgtccaaatccatcgccaccaccttaatagacgacacaagtagtgaggtgctggatgagctctacagagtgaccagggagtacacccaaaacaagaaggaggcagagaagatcatcaagaacctcatcaagacagtcatcaagctggccattctttataggaataatcagtttaatcaagatgagctagcattgatggagaaatttaagaagaaagttcatcagcttgctatgaccgtggtcagtttccatcaggtggattatacctttgaccggaatgtgttatccaggctgttaaatgaatgcagagagatgctgcaccaaatcattcagcgccacctcactgccaagtcacatggacgggttaataatgtgtttgatcatttttcagattgtgaatttttggctgccttgtataatccttttgggaattttaaaccccacttacaaaaactatgtgatggtatcaacaaaatgttggatgaagagaacatatgagcacatgagttaagattgtgactgatcatgatttatttgaagatggagcactgctgatttatgaaggaaaaaagaagaattttctaaagattacacatatttcagaaagactttacccaattcagttgtcagacataatgatttatttgaaggcttgttttatttgaagaaaagcatattgccaaaaattctggttaaaagcttcctaacgggtaacagaccatgggagagatatgtggttgggtaatgcaaatgtagttatacaaagaaaaatacagatgtctccagacctgaggactttttaatagggcagttgttgtgttggtggcacattggatatttctaacatgtacaaagctatgtattttgatttactttcatttcttgctatgtatatgtacttttcttaaaatgccaagaactttctcttgctatcattgctccttttgaaacaattcaattttcatgtctacagctgactgttttgttaagattgagtcatcgacattcaggatttaagtctgaggtagtcaaccctcaggaaaaaaaaatggcttatctgaaatcagtactgtggaaatgaactatattagctattatgaataatgtccagtataagaatatgcttctggaattgagttctccttttaagtaccaatgatacttaaatttctcagaaatgtaatggtgtgtcattgccttgaaatgcttgcttagggcttcttttatgttatcttaaaaagtgctggtgaattttccattttttacatccatttcacatgtaagagacacaaaagtctagattggtcttgatattgagataataaaaagtaagtagcattaagaaaggtaacaatcttcattctacagatgaactcattgaaacaatttaggggaatgaggggcaaaaggggagaaatactgctaaagaacatgagcataaaaatgcgtgcgtttcagtgtttaagaaggcttgataaagaatgtcacttttttatttaactgataagatttttgttattttttactttgataagtaaaccaaagaatatttgtatttcaagcagtttgtgtggtgtttctatataattttctgtgtataaataataaagtaggcatttgtttattttgtaaaaaagaaatgaaaatctgctggccagctatgtcctctaggaaatgacagacccaaccaccagcaataaacatttccattgtcaaaaaaaaaaaaaaaaa

SEQ ID NO: 1094 - protein, 190 aa, Homo sapiens
MAVATDVFNSKNLAVQAQKKILGKMVSKSIATTLIDDTSSEVLDELYRVTREYTQNKKEAEKIIKNLIKTVIKLAILYRNNQFNQDELALMEKFKKKVHQLAMTVVSFHQVDYTFDRNVLSRLLNECREMLHQIIQRHLTAKSHGRVNNVFDHFSDCEFLAALYNPFGNFKPHLQKLCDGINKMLDEENI

SEQ ID NO: 1095 - DNA, 2593 bp, Homo sapiens
ggccagcgcgtctgcttgttcgtgtgtgtgtcgttgcaggccttattcatgggctcaccgctgaggttcgacgggcgggtggtactggtcaccggcgcgggggcaggattgggccgagcctatgccctggcttttgcagaaagaggagcgttagttgttgtgaatgatttgggaggggacttcaaaggagttggtaaaggctccttagctgctgataaggttgttgaagaaataagaaggagaggtggaaaagcagtggccaactatgattcagtggaagaaggagagaaggttgtgaagacagccctggatgcttttggaagaatagatgttgtggtcaacaatgctggaattctgagggatcgttcctttgctaggataagtgatgaagactgggatataatccacagagttcatttgcggggttcattccaagtgacacgggcagcatgggaacacatgaagaaacagaagtatggaaggattattatgacttcatcagcttcaggaatatatggcaactttggccaggccaattatagtgctgcaaagttgggtcttctgggccttgcaaattctcttgcaattgaaggcaggaaaagcaacattcattgtaacaccattgctcctaatgcgggatcacggatgactcagacagttatgcctgaagatcttgtggaagccctgaagccagagtatgtggcacctcttgtcctttggctttgtcacgagagttgtgaggagaatggtggcttgtttgaggttggagcaggatggattggaaaattacgctgggagcggactcttggagctattgtaagacaaaagaatcacccaatgactcctgaggcagtcaaggctaactggaagaagatctgtgactttgagaatgccagcaagcctcagagtatccaagaatcaactggcagtataattgaagttctgagtaaaatagattcagaaggaggagtttcagcaaatcatactagtcgtgcaacgtctacagcaacatcaggatttgctggagctattggccagaaactccctccattttcttatgcttatacggaactggaagctattatgtatgcccttggagtgggagcgtcaatcaaggatccaaaagatttgaaatttatttatgaaggaagttctgatttctcctgtttgcccaccttcggagttatcataggtcagaaatctatgatgggtggaggattagcagaaattcctggactttcaatcaactttgcaaaggttcttcatggagagcagtacttagagttatataaaccacttcccagagcaggaaaattaaaatgtgaagcagttgttgctgatgtcctagataaaggatccggtgtagtgattattatggatgtctattcttattctgagaaggaacttatatgccacaatcagttctctctctttcttgttggctctggaggctttggtggaaaacggacatcagacaaagtcaaggtagctgtagccatacctaatagacctcctgatgctgtacttacagataccacctctcttaatcaggctgctttgtaccgcctcagtggagactggaatcccttacacattgatcctaactttgctagtctagcaggttttgacaagcccatattacatggattatgtacatttggattttctgccaggcgtgtgttacagcagtttgcagataatgatgtgtcaagattcaaggcaattaaggctcgttttgcaaaaccagtatatccaggacaaactctacaaactgagatgtggaaggaaggaaacagaattcattttcaaaccaaggtccaagaaactggagacattgtcatttcaaatgcatatgtggatcttgcaccaacatctggtacttcagctaagacaccctctgagggcgggaagcttcagagtacctttgtatttgaggaaataggacgccgcctaaaggatattgggcctgaggtggtgaagaaagtaaatgctgtatttgagtggcatataaccaaaggcggaaatattggggctaagtggactattgacctgaaaagtggttctggaaaagtgtaccaaggccctgcaaaaggtgctgctgatacaacaatcatactttcagatgaagatttcatggaggtggtcctgggcaagcttgaccctcagaaggcattctttagtggcaggctgaaggccagagggaacatcatgctgagccagaaacttcagatgattcttaaagactacgccaagctctgaagggcacactacactattaataaaaatggaatcattaaatactctcttcacccaaatatgcttgattattctgcaaaagtgattagaactaagatgcaggggaaattgcttaacattttcagatatcagataactgcagattttcattttctactaattttcatgtatcattatttttacaaggaactatatataagctagcacatgattatccttctgttcttagatctgtatcttcataataaaaaattttgcccaagtcctgtttccttagaatttgtgatagcattgataagttgaaaggaaaattaaatcaataaaggcctttgatacc

SEQ ID NO: 1096 - protein, 736 aa, Homo sapiens
MGSPLRFDGRVVLVTGAGAGLGRAYALAFAERGALVVVNDLGGDFKGVGKGSLAADKVVEEIRRRGGKAVANYDSVEEGEKVVKTALDAFGRIDVVVNNAGILRDRSFARISDEDWDIIHRVHLRGSFQVTRAAWEHMKKQKYGRIIMTSSASGIYGNFGQANYSAAKLGLLGLANSLAIEGRKSNIHCNTIAPNAGSRMTQTVMPEDLVEALKPEYVAPLVLWLCHESCEENGGLFEVGAGWIGKLRWERTLGAIVRQKNHPMTPEAVKANWKKICDFENASKPQSIQESTGSIIEVLSKIDSEGGVSANHTSRATSTATSGFAGAIGQKLPPFSYAYTELEAIMYALGVGASIKDPKDLKFIYEGSSDFSCLPTFGVIIGQKSMMGGGLAEIPGLSINFAKVLHGEQYLELYKPLPRAGKLKCEAVVADVLDKGSGVVIIMDVYSYSEKELICHNQFSLFLVGSGGFGGKRTSDKVKVAVAIPNRPPDAVLTDTTSLNQAALYRLSGDWNPLHIDPNFASLAGFDKPILHGLCTFGFSARRVLQQFADNDVSRFKAIKARFAKPVYPGQTLQTEMWKEGNRIHFQTKVQETGDIVISNAYVDLAPTSGTSAKTPSEGGKLQSTFVFEEIGRRLKDIGPEVVKKVNAVFEWHITKGGNIGAKWTIDLKSGSGKVYQGPAKGAADTTIILSDEDFMEVVLGKLDPQKAFFSGRLKARGNIMLSQKLQMILKDYAKL

SEQ ID NO: 1097 - DNA, 1186 bp, Homo sapiens
aaccttaacagccctgcagtgtagtgggcactgggcagtgctgctccttcactaagcggtctgagttctttagctatctcggagattcaactacgtttactcgtactgaatctttttaatgaatttcctgagagccaagaagggccaatctacaggaaaaagtgggaggtggacattaagcatcttctagaaactcttctagctgatatcatgaaacgacgacaaaagaggaaacatttggaaaatgaagagtcccaggaaaccgctgagaagggaggaggaatccagagaatacatcgagacagcccccagcctcaatcacccctggcccaggttcaggaacgaggagagactcctccccgctcacaacatgtctccttgtcgtcctattcatcctataagacttgtgtgtcctctctgtgtgtaaacaaagaggaaaggggcatgaaaatatactacatgcaggtacaaatgaacaaaggtgtggctgtctcctgggagacagaggaaactttggagtccttagaaaagcagccaaggatggaagaagtgaccctttctgaggttgtgagggtaggtactcccccctctgatgtgtccaccagaaacctcctgtctgacagtgagcccagtggggaggagaaagagcatgaggaaaggacagaatcagacagcctgccaggctcacccaccgttgaggacacacccagagccaagactcctgactggctggtgaccatggagaacggcttcaggtgcatggcctgctgccgggtgttcaccaccatggaagccctccaggagcatgtgcagtttgggatcagagagggcttcagctgccccaagatgagcaggaggaggaaaatggaaatgagaaggaggaggaagagaaaccagaagcaaaggaggaggaggggcagcccacagaagaagaccttggcctgaggagatcctggagccaatgtccaggctgtgtgtttcattctccaaaggacagctgagacttatgggccagaagatactggaagatggtgtggccttctcttgcaagagggagaagaaagagccatggagatagtagcagacaggctgcccaaggtatgaagcagatgagggaccagcactcagtctaacatgtaaacatcatacgtaataaaggttgtgtttcaaaccttaaaaaaaaaaa

SEQ ID NO: 1098 - protein, 244 aa, Homo sapiens
MKRRQKRKHLENEESQETAEKGGGIQRIHRDSPQPQSPLAQVQERGETPPRSQHVSLSSYSSYKTCVSSLCVNKEERGMKIYYMQVQMNKGVAVSWETEETLESLEKQPRMEEVTLSEVVRVGTPPSDVSTRNLLSDSEPSGEEKEHEERTESDSLPGSPTVEDTPRAKTPDWLVTMENGFRCMACCRVFTTMEALQEHVQFGIREGFSCPKMSRRRKMEMRRRRKRNQKQRRRRGSPQKKTLA

SEQ ID NO: 1099 - DNA, 894 bp, Homo sapiens
ggcggcgctatgctgtcctgcttcaggctcctctccaggcacatcagcccttcgctggcgtctctgcgcccggtgcgctgctgcttcgcgctcccgctgcgttgggccccggggcgccccttggaccccaggcagatcgccccccgccgccccctggccgcagccgcctcctcccgggaccctaccgggcccgccgccggcccctctcgggtgcgccagaacttccaccccgactccgaggctgccatcaaccgccagatcaacctcgagctctatgcgtcctacgtgtacttgtccatggcctattacttctcccgggatgacgtggccttgaacaacttctccaggtatttccttcaccagtcccgggaggagaccgagcacgcggagaagctgatgaggctgcagaaccagcgaggaggccggatccgcctgcaggacatcaagaagccggaacaggacgactgggaaagcgggctgcatgccatggagtgtgctctactcttggaaaagaacgtgaaccagtcgttgctggaattgcacgctctagcctcagataaaggtgacccccatttgtgcgatttcctggaaacctactacctgaatgagcaggtgaagtctatcaaagaactaggtgaccacgtgcacaacttagtgaagatgggggccccggatgctggcctggcggagtacctttttgacacacatacccttggaaatgaaaacaagcagaactaagccacgagctgccttcctcccaggctagtggatccaaagaccaaagtcagctgtctcctgctttcttgcccttaaaatcacctccatctttatattcttctgttatactattcctccaataaagtgatttgtagaaaaaaaaaaaaaaaaaaaaaa

SEQ ID NO: 1100 - protein, 242 aa, Homo sapiens [sequence omitted]

SEQ ID NO: 1101 - DNA, 2836 bp, Homo sapiens
gtggcgacgcagccgcggtctgagagaccggttcacgtgcaggcagcggcggatcatattccttcatctaccatggctcagccgggaactctgaacctcaataacgaggttgtgaagatgagaaaagaagtgaagagaattcgagttttagttatccgaaaacttgtcaggagtgttggccgactgaagtcaaaaaagggtactgaagatgcactgttaaaaaaccaaagacgggcgcaaagattgcttgaagaaatccatgccatgaaggaattgaaacctgacatagtaactaaatctgctcttggtgatgatatcaactttgaaaaaatcttcaaaaagccagattctactgcaactgaaagagcaattgccagactagcagtacatcctcttctgaagaaaaagatagatgtgctaaaagctgctgtacaagcctttaaagaagcaagacaaaatgttgctgaagttgagtcatcaaagaatgcttcagaggacaatcattctgagaatactttgtattcaaatgataatggaagtaatttacagcgtgaagcaactgtcatcagtgagcaaaaagtcaaagaaaccaaaatattggcgaagaaaccaatacataattcaaaggaaaaaatagcaaagatggaacatggacctaaagcagtgactattgcaaattctccatcaaagccttcagaaaaggattctgtagtttcccttgagtcccagaagacacctgctgacccaaaactgaaaactctaagtcaaaccaaaaaaaacaaaggatctgatagctcactctctggtaacagtgatggcggagaagaattttgtgaagaggagaaggaatattttgatgatagcacagaagaaaggttttacaagcagtcttccatgtctgaagatagtgatagcggtgacgacttcttcattgggaaagtcagacggacacgaaagaaggaaagtagttgtcattcttcagttaaggaacaaaaaccactagaaaaagtgtttcttaaagaagatacaggtgaaactcatggggatacaagaaatgacaaaatcaagccaagtacagaaaccagaaagttagaatcagtgtttttccactctttatctggatctaaaagctctagaagaaatttcaaagaacaggctccaaaaacaagatccctagattttccacagaatgagcctcagatcaagaatcagtttaataagaagctatcaggaagacttgaaaatacaaaacagcaattgcagctgcctcttcatccttcatgggaagcaagcagaaggcgaaaagaacagcaatctaatattgctgtgtttcaggggaaaaaaattacgtttgatgattgattagtgcctctttctgcaaacttttccatctaaaaaaaaaaatgttttttttaagacaggatctcattctgttgcccagactagagtacaatattgcaatcacagctcactgcagcctcaaactcctgggctcaagtgatcctcccacctctgcctcccaaagggctgggactgcaggtgcatgcactaccatgcccagctttctcaccccaggctctgcagctattacttaaactcgtatttgaataagtctcttggggagaattatagaatgtttgtttttgtatttttttttaaagtaaattcaacttacgcttatataagcctttcacaaatccaatatgtacttaaattgatttttaataatatccctcagactgtttcccttatgaagtaatttggggattttagtgatctcatattttctctttagtgcttatcatgaaatgtgcttcactggttcagctctgttgtttccttaaacataaatgtcaatatatatttaaaataataatggaaacataggaaatcagctatttaaaccagatcacccttgttaaaaatcattcttgttagcaaactaaaatagtaacttttattatggatgtacagataaatattaattttattatagttttaagtacttgtgatcatgtactttttgattctaaaatagttgtctaggacaattttgggattcttaattatattttagttaagaaaattgtttaaatatagcaatacaaccaataatttgttttatgtttcactgcatataaatatttccattaaatcaagaatgtatattatctagtttttactatacttattttaaaatttttgaggaatcatagattctaatttttaagaacaaattctgaaggtggtaggattaaaagaatatttccactgatggctaagcaaagaagttgtaagatgactcactgaggaagggactgctttatacatcacagtactgctatttaaaaggaaaacagaaatttttaaatcccttcaaatgtttcacttttgctatgctgggaaaaattttgaagttcttggtaaactgaataatgctaatccatgtttcctgcacattagttcctttaatggcagggaaggccatctggttaacctgtattcacaaactctcaagagtttctacttatttcaggagcttaagaatttagataactcagccgggcgtggtgactcatgcctataatcccagcactttgggaggctgaggcgggtagatcgctagaggcaaggagttcaaaaccagcctgggcaacatggtgaaaccctgtctctactaaaaatacagaaaattatccaggcgtggtggccggcatctgtaattccagctactcagaaggctgaggcataagaattgcttgaacctgggaggtggaggttgcagtgagccaagattgcaccactgcactccagcctgggtgacagagtatgactg

SEQ ID NO: 1102 - protein, 429 aa, Homo sapiens
MAQPGTLNLNNEVVKMRKEVKRIRVLVIRKLVRSVGRLKSKKGTEDALLKNQRRAQRLLEEIHAMKELKPDIVTKSALGDDINFEKIFKKPDSTATERAIARLAVHPLLKKKIDVLKAAVQAFKEARQNVAEVESSKNASEDNHSENTLYSNDNGSNLQREATVISEQKVKETKILAKKPIHNSKEKIAKMEHGPKAVTIANSPSKPSEKDSVVSLESQKTPADPKLKTLSQTKKNKGSDSSLSGNSDGGEEFCEEEKEYFDDSTEERFYKQSSMSEDSDSGDDFFIGKVRRTRKKESSCHSSVKEQKPLEKVFLKEDTGETHGDTRNDKIKPSTETRKLESVFFHSLSGSKSSRRNFKEQAPKTRSLDFPQNEPQIKNQFNKKLSGRLENTKQQLQLPLHPSWEASRRRKEQQSNIAVFQGKKITFDD

SEQ ID NO: 1103 - DNA, 1946 bp, Homo sapiens
agacactgcccgctctccgggactccgcgccgctccccgttgccttccaggactgagaaaggggaaagggaagggtgccacgtccgagcagccgccttgactggggaagggtctgaatcccacccttggcattgcttggtggagactgagatacccgtgctccgctcgcctccttggttgaagatttctccttccctcacgtgatttgagccccgtttttattttctgtgagccacgtcctcctcgagcggggtcaatctggcaaaaggagtgatgcgcttcgcctggaccgtgctcctgctcgggcctttgcagctctgcgcgctagtgcactgcgcccctcccgccgccggccaacagcagcccccgcgcgagccgccggcggctccgggcgcctggcgccagcagatccaatgggagaacaacgggcaggtgttcagcttgctgagcctgggctcacagtaccagcctcagcgccgccgggacccgggcgccgccgtccctggtgcagccaacgcctccgcccagcagccccgcactccgatcctgctgatccgcgacaaccgcaccgccgcggcgcgaacgcggacggccggctcatctggagtcaccgctggccgccccaggcccaccgcccgtcactggttccaagctggctactcgacatctagagcccgcgaagctggcgcctcgcgcgcggagaaccagacagcgccgggagaagttcctgcgctcagtaacctgcggccgcccagccgcgtggacggcatggtgggcgacgacccttacaacccctacaagtactctgacgacaacccttattacaactactacgatacttatgaaaggcccagacctgggggcaggtaccggcccggatacggcactggctacttccagtacggtctcccagacctggtggccgacccctactacatccaggcgtccacgtacgtgcagaagatgtccatgtacaacctgagatgcgcggcggaggaaaactgtctggccagtacagcatacagggcagatgtcagagattatgatcacagggtgctgctcagatttccccaaagagtgaaaaaccaagggacatcagatttcttacccagccgaccaagatattcctgggaatggcacagttgtcatcaacattaccacagtatggatgagtttagccactatgacctgcttgatgccaacacccagaggagagtggctgaaggccacaaagcaagtttctgtcttgaagacacatcctgtgactatggctaccacaggcgatttgcatgtactgcacacacacagggattgagtcctggctgttatgatacctatggtgcagacatagactgccagtggattgatattacagatgtaaaacctggaaactatatcctaaaggtcagtgtaaaccccagctacctggttcctgaatctgactataccaacaatgttgtgcgctgtgacattcgctacacaggacatcatgcgtatgcctcaggctgcacaatttcaccgtattagaaggcaaagcaaaactcccaatggataaatcagtgcctggtgttctgaagtgggaaaaaatagactaacttcagtaggatttatgtattttgaaaaagagaacagaaaacaacaaaagaatttttgtttggactgttttcaataacaaagcacataactggattttgaacgcttaagtcatcattacttgggaaatttttaatgtttattatttacatcactttgtgaattaacacagtgtttcaattctgtaattacatatttgactctttcaaagaaatccaaatttctcatgttccttttgaaattgtagtgcaaaatggtcagtattatctaaatgaatgagccaaaatgactttgaactgaaacttttctaaagtgctggaactttagtgaaacataataataatgggtttata

SEQ ID NO: 1104 - protein, 417 aa, Homo sapiens
MRFAWTVLLLGPLQLCALVHCAPPAAGQQQPPREPPAAPGAWRQQIQWENNGQVFSLLSLGSQYQPQRRRDPGAAVPGAANASAQQPRTPILLIRDNRTAAARTRTAGSSGVTAGRPRPTARHWFQAGYSTSRAREAGASRAENQTAPGEVPALSNLRPPSRVDGMVGDDPYNPYKYSDDNPYYNYYDTYERPRPGGRYRPGYGTGYFQYGLPDLVADPYYIQASTYVQKMSMYNLRCAAEENCLASTAYRADVRDYDHRVLLRFPQRVKNQGTSDFLPSRPRYSWEWHSCHQHYHSMDEFSHYDLLDANTQRRVAEGHKASFCLEDTSCDYGYHRRFACTAHTQGLSPGCYDTYGADIDCQWIDITDVKPGNYILKVSVNPSYLVPESDYTNNVVRCDIRYTGHHAYASGCTISPY

SEQ ID NO: 1105 - DNA, 1972 bp, Homo sapiens
aaagactgcggttcctgttactcagcagcctcaaaaactcacaccagctcctgcaaggaatgtgaatcttggagctcccagctattctgttcctgtttctgtcagctccttccctgaaaactcagaggtgctcagcatgccatgctaaaaggcaaaataaaaagatcttggagacatctcagctttaatgaggactttccaacattccagactgccgtcctgcaatgaagctctgagtcacggtctgtgaggctaaggtactggcaacggtgtgaaccccaggacaactaacctcactaaccttcactctaagcagaagcccaaagtgagtctggcctgaaatcagagcaagcactacagaaagacatctttgttaatggaaagaggaaagaagaaaagaatttccaataagttacaacaaacttttcaccattctaaagaacccactttccttatcaaccaagctgggcttctctctagtgactcctattctagcctttccccagaaacagagagtgttaatcctggtgaaaatataaagacagacactcagaaaaagagacctgggactgtgatactatcaaaactgtcaagtagaagaattatatcggaaagccagcttagcccccctgtgatcccggcccgcaggcctggattccgggtatgctatatctgtggccgagaatttgggtcccagtcaattgccattcatgaaccccagtgcttgcagaagtggcatattgaaaacagcaagttgcccaagcatttgaggaggccagaaccctccaaaccacagtctctcagcagcagtgggtcctacagtcttcaggcaactaacgaggctgcatttcagagtgcccaggctcagctgctgccctgtgaatcctgtggccgcacattcttgccagatcatcttcttgttcatcacagaagctgcaagccaaagggtgagggtcccagagcaccacactcaaacagttctgatcatcttactggcctcaagaaagcttgtagtggaaccccagcccgaccaaggactgttatctgctacatatgtggtaaggaatttggcaccctgtcccttcctattcatgagcccaaatgcctggaaaagtggaaaatggaaaatgaccggctccctgtggagctccaccagccactcccacagaagcctcagccccttccgaatgcacagtccagccaagcgggaccaaatcaagctcagcttgtgttctgcccacattgtagccgaatctttacctcagaccgcctcctggtacaccagagaagttgtaaaactcatccttatgggccaaaatatcagaatttgaatttagggagtaaaggaggcctaaaagagtacactaattccaagcagcaaaggaacagggcagcacccagtgtaactgataaggtaattcatgccacacaagacgcattaggtgaacctggtggtgccctctgcctgtaggggaacaagagaaaactatccccagaatcagccacctcagcccctagtattttttctatcaatgccttgtatcagcctcaaagcagcctgttcaagttaactccctgttgaactccagggcctatacctctcttggctgaatagatataagaacatccttgcctgatgggttcatattcctcttcaattctgctgtctaaaagaagaagagatggacttctttcttccctgatccctgatacaaataatccctgggagagacagtaatttgaaaatgagtcattaatgctgtgtctacattacagagatataattcccattccaacagccaatatttattgccggtttattttagtcatctaccttaggaattcatttttggcaatgctgggttatgctgagtttatcttactaaaatagaatctgtgtcaaaaacccccaatgactttagcaacaattaaacactgaagcacttgcaaaaatacaaaaaaaaaaaaaaaa

SEQ ID NO: 1106 - protein, 364 aa, Homo sapiens
MERGKKKRISNKLQQTFHHSKEPTFLINQAGLLSSDSYSSLSPETESVNPGENIKTDTQKKRPGTVILSKLSSRRIISESQLSPPVIPARRPGFRVCYICGREFGSQSIAIHEPQCLQKWHIENSKLPKHLRRPEPSKPQSLSSSGSYSLQATNEAAFQSAQAQLLPCESCGRTFLPDHLLVHHRSCKPKGEGPRAPHSNSSDHLTGLKKACSGTPARPRTVICYICGKEFGTLSLPIHEPKCLEKWKMENDRLPVELHQPLPQKPQPLPNAQSSQAGPNQAQLVFCPHCSRIFTSDRLLVHQRSCKTHPYGPKYQNLNLGSKGGLKEYTNSKQQRNRAAPSVTDKVIHATQDALGEPGGALCL

SEQ ID NO: 1107 - DNA, 8192 bp, Homo sapiens
ctttccaatatccgtcttcggagcgcacgggaatccgccgagctctgcgtgcaggcccttttttcttttgaggttcacattttttgaaattttacgccagggcttttgtaatttcctcccccgcccgctgacggtcctggagtcgctcggggctttaggccggttatgcaacgtgtaccgctcggggctgccggctgcacctccgccgcgcctcgccgctcactgcgctagacccggcgccccgcgtctcgcttcgcgggcagtcagggggccggcgctctgtcgaggtctccagctagagcagggagcccgagcccgagggagtccccggagccgacgaagggcttattagaccctgactcttttctgaggcgcgcagattttgtctttgatcactccctctccgcgggtctacggccgcgcgctttcggcgccggcgatggggagaagacggaggctgtgtctccagctctacttcctgtggctgggctgtgtggtgctctgggcgcagggcacggccggccagcctcagcctcctccgcccaagccgccccggccccagccgccgccgcaacaggttcggtccgctacagcaggctctgaaggcgggtttctagcgcccgagtatcgcgaggagggtgccgcagtggccagccgcgtccgccggcgaggacagcaggacgtgctccgagggcccaacgtgtgcggctccagattccactcctactgctgccctggatggaagacgctccctggaggaaaccagtgcattgtcccgatttgtagaaatagttgtggagatggattttgttcccgtcctaacatgtgtacttgttccagtgggcaaatatcatcaacctgtggatcaaaatcaattcagcagtgcagtgtgagatgcatgaatggtgggacctgtgcagatgaccactgccagtgccagaaaggatatattggaacttattgtggacaacctgtctgtgaaaatggatgtcagaatggtggacgttgcatcggacccaaccgctgtgcttgtgtttatgggttcactggtccacagtgtgaaagagattacaggacaggcccgtgtttcactcaggtcaacaaccagatgtgccaagggcagctgacaggcattgtctgcacgaagactctgtgctgtgccaccattggacgggcgtggggccatccctgtgagatgtgtccagcccagcctcagccctgccgacggggtttcatccccaacatccgcactggagcttgccaagatgttgatgaatgccaggctatcccagggatatgccaaggaggaaactgtatcaatacagtgggctcttttgaatgcagatgccctgctggtcacaaacagagtgaaactactcagaaatgtgaagacattgatgagtgcagcatcattcctgggatatgtgaaactggtgaatgttccaacaccgtgggaagctatttttgtgtttgtccacgtggatatgtaacctcaacagatggctctcgatgcatcgatcagagaacaggcatgtgtttctcgggcctggtgaatggccgctgtgcacaagagctcccggggagaatgacgaaaatgcagtgctgctgtgagcctggccgctgctggggcatcggaaccattcctgaagcctgtcctgtcagaggttctgaggaatatcgcagactttgcatggatggacttccaatgggaggaattccagggagtgctggttccagacctggaggcactgggggaaatggctttgccccaagtggcaatggcaatggctatggcccaggagggacaggcttcatccccatccctggaggcaatggcttttctcctggcgttgggggagccggtgtgggggccgggggacagggacctatcatcactggactaacaattctgaaccagacaatagatatctgtaagcatcatgctaacctttgtttaaatggacgctgtataccaactgtctcaagctaccgatgtgaatgcaacatgggttataagcaggatgcaaatggagattgtatagatgttgatgaatgcacatcaaatccctgcactaatggagattgtgttaacacacctggttcctattattgtaaatgtcatgctggattccagaggactcctaccaagcaagcatgcattgatattgatgagtgcatccagaatggggttctttgtaaaaacggtcgatgcgtgaacacagatggaagtttccagtgcatttgcaatgccggctttgaattaactacagatggaaaaaactgtgttgatcatgatgaatgtacaactaccaacatgtgtttgaatggaatgtgcatcaatgaagatggcagcttcaagtgcatctgcaaaccaggatttgtcttggctccaaatgggcgttactgtactgatgttgatgaatgccagaccccaggaatctgcatgaatgggcactgcatcaacagtgaagggtccttccgctgtgactgtcccccaggcctggctgtgggcatggatggacgtgtgtgtgttgatactcacatgcgcagtacctgctatggaggaatcaagaaaggagtgtgtgtgcgtcctttccccggtgcagtgaccaagtccgaatgctgctgtgccaatccagactatggttttggagaaccctgccagccatgccctgcaaaaaattcagctgaattccacggcctttgtagtagtggagtaggtatcactgtggatggaagagatatcaatgaatgtgctttggatcctgatatatgtgccaatgggatttgtgaaaacttacgtggtagttaccgttgtaattgcaacagtggctatgaaccagatgcctctggaagaaactgtattgacattgatgaatgtttagtaaacagactgctttgtgataacggattgtgccgaaacacgccaggaagttacagctgtacgtgcccaccagggtatgtgttcaggactgagacagagacctgtgaagatataaatgaatgtgaaagcaacccatgtgtcaatggggcctgcagaaacaaccttggatctttcaattgtgaatgttcgcccggcagcaaactcagctccacaggattgatctgtattgacagcctgaaggggacctgttggctcaacatccaggacagccgctgtgaggtgaatattaatggagccactctgaaatctgaatgctgtgccaccctcggagccgcctgggggagcccctgtgagcggtgtgaactagatacagcttgcccaagagggcttgccaggattaaaggtgttacgtgtgaagatgttaatgagtgtgaggtgttccctggcgtttgtccaaatggacgctgtgtcaacagtaagggatcttttcattgcgagtgccctgaaggccttacgttggatgggactggccgtgtatgtttggatattcgcatggagcagtgttacttgaagtgggatgaagatgaatgcatccaccccgttcctggaaagttccgcatggatgcctgctgctgtgctgtcggggcggcttggggcaccgagtgtgaggagtgccccaaacctggcaccaaggaatacgagacgctgtgcccccgcggggctggctttgctaaccgaggggatgttcttactgggcggccattttacaaagacatcaatgaatgcaaagcatttcctgggatgtgcacttatgggaagtgcagaaatacaatcggaagcttcaaatgccgttgcaatagtggctttgctctagacatggaggaaagaaactgcacggacatcgacgagtgcaggatttctcctgacctctgtggcagtggaatctgcgtcaatacaccgggcagctttgagtgcgagtgcttcgaaggctatgaaagtggcttcatgatgatgaagaactgcatggacattgacgaatgtgaacgtaaccctctcctttgtaggggtggcacctgtgtgaacactgagggcagctttcagtgtgactgcccactgggacacgagctgtcaccatcccgtgaggactgtgtggatattaatgaatgctccctgagtgacaatctctgcagaaatggaaaatgtgtgaacatgattggaacctatcagtgctcttgcaatcctggatatcaggctacgccagaccgccagggctgtacagatattgatgaatgtatgataatgaacggaggctgtgacacccagtgcacaaattcagagggaagctacgaatgcagctgcagtgagggttatgccctgatgccagatgggagatcgtgtgcagacattgatgaatgtgaaaacaatcctgatatctgtgatggcggccagtgtaccaacattcctggagagtatcgctgcctctgctatgatggcttcatggcttccatggacatgaaaacatgcattgatgtcaatgaatgtgacctaaattcaaatatctgcatgtttggggaatgtgagaacacaaagggatccttcatttgccactgtcagctgggttactcagtgaagaaggggaccacaggatgtacagatgtggatgagtgtgaaattggtgctcataactgcgacatgcatgcctcatgtctgaatatcccaggaagcttcaagtgtagctgcagagaaggctggattggaaacggcatcaagtgtattgatctggacgaatgttctaatggaacccaccagtgtagcatcaatgctcagtgtgtaaataccccgggctcataccgctgtgcctgctccgaaggtttcactggtgatggctttacctgctcagatgttgatgagtgtgcagaaaacataaacctctgtgagaacggacagtgccttaatgtcccgggtgcatatcgctgcgagtgtgagatgggcttcactccagcctcagacagcagatcctgccaagatattgatgaatgctccttccaaaacatttgtgtctttggaacatgtaataacctgcctggaatgtttcattgcatctgcgatgatggttatgaattggacagaacaggagggaactgtacagatattgatgagtgtgcagatcctataaactgtgtcaatggcctatgtgtcaacacgcctggtcgctatgagtgtaactgcccacccgattttcagttgaacccaactggtgtgggttgtgttgacaaccgtgtgggcaactgctacctgaagtttggacctcgaggagatgggagtctgtcttgcaacaccgagatcggggtgggcgtcagtcgctcttcatgctgctgctctctgggaaaggcctggggaaacccctgtgagacatgcccccctgtcaatagcactgaatattacaccctgtgtcccggaggtgaaggcttcagacctaaccccatcacaatcattttagaagacattgacgaatgccaggagttaccaggtctctgccagggtggaaactgcatcaacacttttgggagcttccagtgtgagtgcccacaaggctactacctcagcgaggatacccgcatctgtgaagatattgatgagtgttttgcacatcctggtgtgtgtgggcctgggacctgctataacaccctgggaaattacacctgcatttgcccacctgagtacatgcaggtcaatggaggccacaactgcatggacatgagaaaaagcttttgctaccgaagctataatggaaccacttgtgagaatgagttgcctttcaatgtgacaaaaaggatgtgctgctgcacatataatgtgggcaaagcctggaacaaaccttgtgaaccatgcccaactccaggaacagctgactttaaaaccatatgtggaaatattcctggattcacctttgacattcacacaggaaaagctgttgacattgatgaatgtaaagagattccaggcatttgtgcaaatggtgtgtgcattaaccagattggcagtttccgctgtgaatgccctacaggattcagttacaatgacctgctgttggtttgtgaagatatagatgagtgcagcaatggtgataatctctgccagcggaatgcagactgcatcaatagtcctggtagttaccgctgtgaatgtgccgcgggtttcaaactttcacccaatggggcctgtgtagatcgcaatgaatgtttagaaattcctaacgtttgcagtcatggcttgtgtgttgatctgcaaggaagttaccagtgcatctgccacaatggctttaaggcttctcaggaccagaccatgtgcatggatgttgatgagtgcgagcggcatccatgtggaaatggaacttgtaaaaacaccgttggatcctataactgtctgtgctacccagggtttgaactcactcataataatgattgcctggacatagatgagtgcagttccttttttggtcaggtgtgcagaaatggacgttgttttaatgaaattggttctttcaagtgtctatgtaacgaaggttatgaacttaccccagatggcaaaaactgtatagacactaatgagtgtgtcgcccttcccggctcttgctctcctggtacctgtcagaatttggagggatccttcagatgcatctgtcccccagggtatgaagtaaaaagcgagaactgcattgatataaatgaatgtgatgaagatcccaacatttgtctttttggttcctgtactaatactccagggggcttccagtgcctctgcccccctggctttgtactatctgataatggacggagatgctttgatactcgccagagcttctgcttcacaaattttgaaaatggaaagtgttctgtacccaaagctttcaacaccacaaaagcaaaatgctgctgtagtaagatgccaggagagggctggggggacccctgtgagctgtgccccaaagacgatgaagttgcatttcaggatttgtgtccatatggccatggaactgtccctagtcttcatgatacacgtgaagatgtcaatgagtgtcttgagagcccaggcatttgttcaaatggtcaatgtatcaacaccgacggatcttttcgctgtgaatgtccaatgggctacaaccttgactacactggagtacgctgtgtggatactgatgagtgttcaatcggcaatccgtgtggaaatggtacatgcaccaatgttattgggagttttgaatgcaattgcaatgaaggctttgagccagggcccatgatgaattgtgaagatatcaacgaatgtgcccagaacccactgctgtgtgctttccgctgcatgaacacttttgggtcctatgaatgcacgtgcccgattggctatgccctcagggaagatcaaaagatgtgcaaagatctggatgaatgtgctgaagggttacacgactgtgaatctaggggcatgatgtgtaagaatctaatcggcaccttcatgtgcatctgccctcctggaatggcccgaaggcccgatggagaaggctgtgtagatgaaaatgaatgcaggaccaagccaggaatctgtgaaaatggacgttgtgttaacattattggaagctatagatgtgagtgtaatgaaggattccagtcaagttcttcaggcactgaatgccttgacaatcgacagggtctctgctttgcagaggtactgcagacaatatgtcaaatggcatccagtagtcgcaatctcgtcactaagtcagaatgctgctgtgatggtgggcgaggctggggccaccagtgcgagctttgcccacttcctggaactgcccagtacaaaaagatatgtcctcatggcccaggatatacaactgatggaagagatattgatgaatgtaaggtaatgccaaacctctgcaccaatggtcagtgcatcaataccatgggctcattccgatgcttctgcaaggttggctacaccacagacatcagtggaacctcttgtatagaccttgatgaatgctcccagtccccgaaaccatgcaactacatctgcaagaacactgaggggagttatcagtgttcatgtccgagggggtatgtcctgcaagaggatggaaagacatgcaaagaccttgatgaatgtcaaacaaagcagcataactgccagttcctctgtgtcaacaccctgggggggtttacctgtaaatgtccacctggtttcacacagcatcacactgcttgtatcgacaacaacgaatgtgggtctcaaccttcgctttgtggagcaa

SEQ ID NO: 1108 - protein, 2912 aa, Homo sapiens
MGRRRRLCLQLYFLWLGCVVLWAQGTAGQPQPPPPKPPRPQPPPQQVRSATAGSEGGFLAPEYREEGAAVASRVRRRGQQDVLRGPNVCGSRFHSYCCPGWKTLPGGNQCIVPICRNSCGDGFCSRPNMCTCSSGQISSTCGSKSIQQCSVRCMNGGTCADDHCQCQKGYIGTYCGQPVCENGCQNGGRCIGPNRCACVYGFTGPQCERDYRTGPCFTQVNNQMCQGQLTGIVCTKTLCCATIGRAWGHPCEMCPAQPQPCRRGFIPNIRTGACQDVDECQAIPGICQGGNCINTVGSFECRCPAGHKQSETTQKCEDIDECSIIPGICETGECSNTVGSYFCVCPRGYVTSTDGSRCIDQRTGMCFSGLVNGRCAQELPGRMTKMQCCCEPGRCWGIGTIPEACPVRGSEEYRRLCMDGLPMGGIPGSAGSRPGGTGGNGFAPSGNGNGYGPGGTGFIPIPGGNGFSPGVGGAGVGAGGQGPIITGLTILNQTIDICKHHANLCLNGRCIPTVSSYRCECNMGYKQDANGDCIDVDECTSNPCTNGDCVNTPGSYYCKCHAGFQRTPTKQACIDIDECIQNGVLCKNGRCVNTDGSFQCICNAGFELTTDGKNCVDHDECTTTNMCLNGMCINEDGSFKCICKPGFVLAPNGRYCTDVDECQTPGICMNGHCINSEGSFRCDCPPGLAVGMDGRVCVDTHMRSTCYGGIKKGVCVRPFPGAVTKSECCCANPDYGFGEPCQPCPAKNSAEFHGLCSSGVGITVDGRDINECALDPDICANGICENLRGSYRCNCNSGYEPDASGRNCIDIDECLVNRLLCDNGLCRNTPGSYSCTCPPGYVFRTETETCEDINECESNPCVNGACRNNLGSFNCECSPGSKLSSTGLICIDSLKGTCWLNIQDSRCEVNINGATLKSECCATLGAAWGSPCERCELDTACPRGLARIKGVTCEDVNECEVFPGVCPNGRCVNSKGSFHCECPEGLTLDGTGRVCLDIRMEQCYLKWDEDECIHPVPGKFRMDACCCAVGAAWGTECEECPKPGTKEYETLCPRGAGFANRGDVLTGRPFYKDINECKAFPGMCTYGKCRNTIGSFKCRCNSGFALDMEERNCTDIDECRISPDLCGSGICVNTPGSFECECFEGYESGFMMMKNCMDIDECERNPLLCRGGTCVNTEGSFQCDCPLGHELSPSREDCVDINECSLSDNLCRNGKCVNMIGTYQCSCNPGYQATPDRQGCTDIDECMIMNGGCDTQCTNSEGSYECSCSEGYALMPDGRSCADIDECENNPDICDGGQCTNIPGEYRCLCYDGFMASMDMKTCIDVNECDLNSNICMFGECENTKGSFICHCQLGYSVKKGTTGCTDVDECEIGAHNCDMHASCLNIPGSFKCSCREGWIGNGIKCIDLDECSNGTHQCSINAQCVNTPGSYRCACSEGFTGDGFTCSDVDECAENINLCENGQCLNVPGAYRCECEMGFTPASDSRSCQDIDECSFQNICVFGTCNNLPGMFHCICDDGYELDRTGGNCTDIDECADPINCVNGLCVNTPGRYECNCPPDFQLNPTGVGCVDNRVGNCYLKFGPRGDGSLSCNTEIGVGVSRSSCCCSLGKAWGNPCETCPPVNSTEYYTLCPGGEGFRPNPITIILEDIDECQELPGLCQGGNCINTFGSFQCECPQGYYLSEDTRICEDIDECFAHPGVCGPGTCYNTLGNYTCICPPEYMQVNGGHNCMDMRKSFCYRSYNGTTCENELPFNVTKRMCCCTYNVGKAWNKPCEPCPTPGTADFKTICGNIPGFTFDIHTGKAVDIDECKEIPGICANGVCINQIGSFRCECPTGFSYNDLLLVCEDIDECSNGDNLCQRNADCINSPGSYRCECAAGFKLSPNGACVDRNECLEIPNVCSHGLCVDLQGSYQCICHNGFKASQDQTMCMDVDECERHPCGNGTCKNTVGSYNCLCYPGFELTHNNDCLDIDECSSFFGQVCRNGRCFNEIGSFKCLCNEGYELTPDGKNCIDTNECVALPGSCSPGTCQNLEGSFRCICPPGYEVKSENCIDINECDEDPNICLFGSCTNTPGGFQCLCPPGFVLSDNGRRCFDTRQSFCFTNFENGKCSVPKAFNTTKAKCCCSKMPGEGWGDPCELCPKDDEVAFQDLCPYGHGTVPSLHDTREDVNECLESPGICSNGQCINTDGSFRCECPMGYNLDYTGVRCVDTDECSIGNPCGNGTCTNVIGSFECNCNEGFEPGPMMNCEDINECAQNPLLCAFRCMNTFGSYECTCPIGYALREDQKMCKDLDECAEGLHDCESRGMMCKNLIGTFMCICPPGMARRPDGEGCVDENECRTKPGICENGRCVNIIGSYRCECNEGFQSSSSGTECLDNRQGLCFAEVLQTICQMASSSRNLVTKSECCCDGGRGWGHQCELCPLPGTAQYKKICPHGPGYTTDGRDIDECKVMPNLCTNGQCINTMGSFRCFCKVGYTTDISGTSCIDLDECSQSPKPCNYICKNTEGSYQCSCPRGYVLQEDGKTCKDLDECQTKQHNCQFLCVNTLGGFTCKCPPGFTQHHTACIDNNECGSQPSLCGAKGICQNTPGSFSCECQRGFSLDATGLNCEDVDECDGNHRCQHGCQNILGGYRCGCPQGYIQHYQWNQCVDENECSNPNACGSASCYNTLGSYKCACPSGFSFDQFSSACHDVNECSSSKNPCNYGCSNTEGGYLCGCPPGYYRVGQGHCVSGMGFNKGQYLSLDTEVDEENALSPEACYECKINGYSKKDSRQKRSIHEPDPTAVEQISLESVDMDSPVNMKFNLSHLGSKEHILELRPAIQPLNNHIRYVISQGNDDSVFRIHQRNGLSYLHTAKKKLMPGTYTLEITSIPLYKKKELKKLEESNEDDYLLGELGEALRMRLQIQLY

SEQ ID NO: 1109 - DNA, 3523 bp, Homo sapiens
atggctgtgcgctctcgccgcccgtggatgagcgtggcattagggctggtgctgggcttcaccgccgcgtcctggctcatcgcccccagggtggcggagctgagcgagaggaagagacgtggctccagcctctgctcctactacggtcgctctgctgctggcccccgcgccggcgctcagcagccgctcccccagccccagtcccgaccacggcaggagcagtcgccgccccccgcgcgccaggatctccaggggccaccgctgcccgaggcagcacccgggatcaccagttttcgaagcagcccctggcagcagccacctccgctgcagcagcggcggcgaggacgcgagcctgagggcgcgacggggcttcccggtgctccagcggccgagggggagcccgaggaggaggacgggggcgcggctgggcagcggagagacggccggccggggagtagccacaacggcagcggggacgggggcgctgccgccccgagcgcccgaccccgggacttcctgtacgtgggggtgatgaccgcgcagaagtacctgggcagccgcgcgctggccgcgcagcggacctgggcgcgtttcatcccgggccgcgtggagttcttttccagccagcagccccccaacgccggccagcccccgccacccctgcctgtcatcgcgctaccgggtgtggacgactcctatcctccccagaaaaagtccttcatgatgatcaagtacatgcacgaccactacctggacaagtatgagtggttcatgcgcgccgacgacgatgtctacatcaaaggtgataaattagaagagtttcttagatcgctaaacagcagtaagcctctctacctgggacagactggcctggggaatattgaagagcttggaaagctgggactggagcctggggaaaacttctgtatgggaggacctggcatgatctttagccgagaagttctcaggaggatggtgccacatattggtgaatgccttagagaaatgtacacgactcatgaggatgtggaagtaggaagatgcgttcgccgttttggtgggactcagtgtgtctggtcttacgagatgcaacaactgttccatgaaaattatgaacacaatcggaagggttacatccaagaccttcacaatagcaaaatccatgcagccataacacttcatcccaacaaaaggcctgcataccaatacaggctgcataattacatgctcagccgcaaaatttctgaacttcgctaccgcaccatccagctccacagggaaagtgccctgatgagcaagctcagtaacacagaagtgagcaaagaggaccagcagctgggagtgataccttctttcaaccacttccagcctcgggagagaaatgaagtgatagaatgggagttcctgacagggaagcttctatactcagcagctgagaaccagccccctcgacagagcctcagtagcattttaagaacagcactggatgataccgtcctacaggtgatggagatgatcaatgagaatgccaagagcagaggacggctcattgacttcaaggaaattcagtatggctaccgcagagttaaccccatgcacggggtggagtacattttggatttactccttttatacaaaagacacaagggaaggaaactgactgtgccagtgagacgtcatgcctatcttcagcagttgttcagcaagcctttcttcagagagaccgaagagctagatgtcaacagtcttgtggagagtattaacagtgaaactcagtcattctcctttatatctaattctttaaagatattatcttcttttcaaggtgccaaagaaatgggagggcacaatgaaaagaaagtacacattctcgttcctctcatcggaaggtatgacattttcttgagattcatggagaactttgaaaacatgtgtcttatcccaaagcagaatgtaaagttggtcattatccttttcagtagggattctggccaagactccagcaagcatattgagctgataaaagggtaccagaacaagtaccccaaagcagaaatgaccctgatcccaatgaagggagagttttccagaggtcttggtcttgaaatggcttctgcccagtttgacaatgacactttgctgctattttgtgatgttgacttgatcttcagagaagattttctccaacgatgtagagacaatacaattcagggacaacaggtgtactatcccatcatctttagccagtatgacccaaaggtaacaaacgggggaaatcctcccactgatgattacttcatattctcaaaaaagactggattttggagagactatggatatggcatcacctgtatttacaaaagtgatcttctaggtgcaggtggatttgatacctcaatacaaggctggggactagaagatgtagatctctacaataaagtcattctatctggcttaaggccattcagaagccaagaagtaggagtggtgcatattttccatccagttcattgtgatcctaacttggaccctaagcagtataagatgtgcttaggatccaaggcaagtactttcgcctcaaccatgcaactggctgaactctggcttgaaaaacatttaggtgtcaggtacaatcgaactctctcctgacagtccaggcaacacattttgccttttttaaggggagtttacctcattgttggttgttgttatttttattgtattattgttattttattattattattgttataattttattttgttgtcctggtcttaaactactcttggttgtcttcctaagggtgtttgttgacctcaagcaagaagagtctgcagttcactgatgtttcagatttctactgaagtcaatatgttattacttttatataactttatttgagattgagttaaatcatagcaatcaaatgacttttgaaacgcattcatcacaagagacagcttagaagaatgttctcttggggcttaaagatgcaatatcgacttttatttggtttctcaaattcaatgtgatacaaatatttactggtgaaaggtaccacaaaagtgctttatgcttcctatggggaagggactctgtaacataaacttgagttttgtaatttatacaaggacttaaatatataaacaataattttcttcatctttagaatttttaaagtaaatgaatacctatgattgtatgtttattttttaaaaaaagttttaaaaattgaggagttttgttccacaagcaaccggtactggctaccctggtcttatgacaattatgagctcctcacaactgtctgctataaatgcgaatgaactttattttctcaaggaaatatgatttaattaaatattcatgtacattttagaagctttatgaaacaatgtccttcatttgctggcaagaagataaaatatgacagaacctgtttatttaaaataaaacacaggtatagcagtattctttttcaaaaacactgaaaaaaaaaaaaaaaaaaaaaaaaaaaaaaaa

SEQ ID NO: 1110 - protein, 882 aa, Homo sapiens
MAVRSRRPWMSVALGLVLGFTAASWLIAPRVAELSERKRRGSSLCSYYGRSAAGPRAGAQQPLPQPQSRPRQEQSPPPARQDLQGPPLPEAAPGITSFRSSPWQQPPPLQQRRRGREPEGATGLPGAPAAEGEPEEEDGGAAGQRRDGRPGSSHNGSGDGGAAAPSARPRDFLYVGVMTAQKYLGSRALAAQRTWARFIPGRVEFFSSQQPPNAGQPPPPLPVIALPGVDDSYPPQKKSFMMIKYMHDHYLDKYEWFMRADDDVYIKGDKLEEFLRSLNSSKPLYLGQTGLGNIEELGKLGLEPGENFCMGGPGMIFSREVLRRMVPHIGECLREMYTTHEDVEVGRCVRRFGGTQCVWSYEMQQLFHENYEHNRKGYIQDLHNSKIHAAITLHPNKRPAYQYRLHNYMLSRKISELRYRTIQLHRESALMSKLSNTEVSKEDQQLGVIPSFNHFQPRERNEVIEWEFLTGKLLYSAAENQPPRQSLSSILRTALDDTVLQVMEMINENAKSRGRLIDFKEIQYGYRRVNPMHGVEYILDLLLLYKRHKGRKLTVPVRRHAYLQQLFSKPFFRETEELDVNSLVESINSETQSFSFISNSLKILSSFQGAKEMGGHNEKKVHILVPLIGRYDIFLRFMENFENMCLIPKQNVKLVIILFSRDSGQDSSKHIELIKGYQNKYPKAEMTLIPMKGEFSRGLGLEMASAQFDNDTLLLFCDVDLIFREDFLQRCRDNTIQGQQVYYPIIFSQYDPKVTNGGNPPTDDYFIFSKKTGFWRDYGYGITCIYKSDLLGAGGFDTSIQGWGLEDVDLYNKVILSGLRPFRSQEVGVVHIFHPVHCDPNLDPKQYKMCLGSKASTFASTMQLAELWLEKHLGVRYNRTLS

SEQ ID NO: 1111 - DNA, 6463 bp, Homo sapiens
ctctcttgctcgctcgctccctctctctcctgctggctgcctgttctaggaagccagcgcggagaggggggggatgcacagcacaggggagagagattgcgcatgttggtcagtcgtgttttaaagagtacagtgcggggaggctgagaggggcgcatgcaacaacaacttttggaaggatggaagagaagaggcgaaaatactccatcagcagtgacaactctgacaccactgacagtcatgcgacatctacatccgcatcaagatgctccaaactgcccagcagcaccaagtcgggctggccccgacagaacgaaaagaagccctccgaggttttccggacagacttgatcacagccatgaagatcccggactcataccagctcagcccggatgactactacatcctggcagacccatggcgacaggaatgggagaaaggtgtgcaggtgcctgccggggcagaggccatcccagagcccgtggtgaggatcctcccaccactggaaggcccccctgcccaggcatccccgagcagcaccatgcttggtgagggctcccagcctgattggccagggggcagccgctatgacttggacgagattgatgcctactggctggagctcatcaactcggagcttaaggagatggagaggccggagctggacgagctgacattagagcgtgtgctggaggagctggagaccctgtgccaccagaatatggccagggccattgagacgcaggaggggctgggcatcgagtacgacgaggatgttgtctgcgacgtgtgtcgctctcctgagggcgaggatggcaacgagatggtcttctgtgacaagtgcaacgtctgtgtgcatcaggcatgctacgggatcctcaaggtgcccacgggcagctggctgtgccggacgtgtgccctgggtgtccagccaaagtgcctgctctgccccaagcgaggaggagccttgaagcccactagaagtgggaccaagtgggtgcatgtcagctgtgccctatggattcctgaggtcagcatcggctgcccagagaagatggagcccatcaccaagatctcgcatatcccagccagccgctgggctctgtcctgcagcctctgcaaggaatgcacaggcacctgcatccagtgttccatgccttcctgcgtcacagcgttccatgtcacatgcgcctttgaccacggcctggaaatgcggactatattagcagacaacgatgaggtcaagttcaagtcattctgccaggagcacagtgacgggggcccacgtaatgagcccacatctgagcccacggaacccagccaggctggcgaggacctggaaaaggtgaccctgcgcaagcagcggctgcagcagctagaggaggacttctacgagctggtggagccggctgaggtggctgagcggctggacctggctgaggcactggtcgacttcatctaccagtactggaagctgaagaggaaagccaatgccaaccagccgctgctgacccccaagaccgacgaggtggacaacctggcccagcaggagcaggacgtcctctaccgccgcctgaagctcttcacccatctgcggcaggacctagagagggttagaaatctgtgctacatggtgacaaggcgcgagagaacgaaacacgccatctgcaaactccaggagcagatattccacctgcagatgaaacttattgaacaggatctgtgtcgaggcctgtccacctcattccccatcgatggcaccttcttcaacagctggctggcacagtcggtgcagatcacagcagagaacatggccatgagcgagtggccactgaacaatgggcaccgcgaggaccctgctccagggctgctgtcagaggaactgctgcaggacgaggagacactgctcagcttcatgcgggacccctcgctgcgacctggtgaccctgctaggaaggcccgaggccgcacccgcctgcctgccaagaagaaaccaccaccaccaccaccgcaggacgggcctggttcacggacgactccagacaaagcccccaagaagacctggggccaggatgcaggcagtggcaaggggggtcaagggccacctaccaggaagccaccacgtcggacatcttctcacttgccgtccagccctgcagccggggactgtcccatcctagccacccctgaaagccccccgccactggcccctgagaccccggacgaggcagcctcagtagctgctgactcagatgtccaagtgcctggccctgcagcaagccctaagcctttgggccggctccggccaccccgcgagagcaaggtaacccggagattgccgggtgccaggcctgatgctgggatgggaccaccttcagctgtggctgagaggcccaaggtcagcctgcattttgacactgagactgatggctacttctctgatggggagatgagcgactcagatgtagaggccgaggacggtggggtgcagcggggtccccgggaggcaggggcagaggaggtggtccgcatgggcgtactggcctcctaactcacccccttccctgtcccaggccctgccctggtccccccacaaggcctcagcccagtcacaactgccatttccagtctctgctgagtgtcccagaccctcgaggctgccactccgtcgtggttttatttttaatatagagagagttttgaattctacactgttgtctttcctctgtgctggcctaggacattaggattccttccacggctccggccgctaggaccctgccaggtcccgcgcaccatccctgccctgcccacgtggtattgctgggctcctggctagatgcaagcaaggtggacaagagctcaggactccagcccactgccactgggtgacacagactgtcgtttgggcattatttcatggcagatgggccagtccagggcctaccccgccttgcccccagatcccactggggtccatttggggggtcctgctacactccaccgatccccaaggaagtataataaacgatacccagccagagtctactcactgtcacaagcacaacgagtttatatgagaaagcactgagggggtgcagagggcccgctagttccaggggaactgaaagctgttcctgatcagcccgtatcatctgaggcctgcctgcccaccctgccaccctcccctcccttgctgctctgcccctgccagtgcccagcccagcggctctgggaaggggttcccagaatccctcctgagctgtgccatttactcaggggactcccaaacagccagctgccagtgcaggtggagggctgtaggggagggccagtgcccagacagggtcatggggctcagaccagcccactgtagagaatcactctgaggctccaacttccttccttccttcggggccagtctcggccgaagtctggtcacgctcagacagagctgaccagaccagaccgtttgccttttcaagtttcctagtcctgctacaagatgagcttcttccgtggtttccttttggaaactcctccttccaacaagcagtgggatcccggggcccagggcgggccggtgttggccgctggggctgttgtaagtcttgctggatgttcccctgttcctgagccttaacccctcgcacagccatccccccccccgtcctgccatccccccccgccgtcctgccttccccaccccacccttaggtcccaggtagttgctctgaagagtttcagtagagtggccccagggtgatagctcagggaacaacaaaaaaggaattccgtgaaaacatttttttttctttgatgaattactcctgggtcacttccaccactggtaaagccagaacttctccaaaaagaaccttgcaaaaagtccagtgaatcagtcgaatcattctgtggatgccaaagaatattttgaccataatacagcacagcctggacctgacaacttgtcatttggacttttttttaaatggagttctttagcaacaaagtatagaaacatgttcattgcacacacccaaggagaagagctcaagcgcttggaagaggatgctttgctgctgctgaagtgtacctgggtgttagatttcagatcctgggctgagcccactgtgagctttcctaaactgtgagactcacagaggggaaagatactgacggtgaaaccagcatggaaaacgtctttaccatgtggttccctcctccccaaatacataaagcaaataagcaggatggggaacagcttgaccttcatccacccctaactccaaaactatcaaggtacgacagtggcattgtcatcgacactcaatttcatgtgaattttagcaaaacaggaaacaaagataatgactcagttcagaggatcggacaaatgtgtctagtccgggtggactcggagggagtggggtgggcttcaaggattctgggcgttgggatggcatgagctaccctgtagagtttagtctgcctgcccgccttggtagtagtgaccagtcagtgtcagcatcagtgtcccaaccccagtctctgtttactgcctttgaacagaacttcttccttccccatgctttgggtcacctcgggctgcaaccctgtctgtgccagattgcccggtctgaccctgcaggaagcaaagaggtgagcttaaagaacaaccaaactctgccaggggtcccagaaagcccagggtccagcagtctcagcacttggccccttgccccttcacaccatcctggggcaggggctgggcctccctggtggcaggggtgggtggagaattagggagagggtgcaacgagtctggccccttgcctcgggctggctggtgttcttccaagagcctctgctcacattgttggcctctggattctggcccttcttcattggctgttgctttggactggactgttgctgagcctgtgtcctgcagaacccagatgtctgttaggctggctggctgctgcgaggggaggggggtggcctttcatttggggtgccctttcactcccaggccaagccctggagcaatcttcttcaggcagctgtctccacctccaggatgtccagcaggctgcaaggagaaggatgccagccacccatcctcccccagttcccagcctttcccctgttggtcacagccgcttctgtctttttccggtctactgtccccagtgtagagggctttgctgtccctgagactgaggcaggttccttttccaggtcagaggtggaggtagatctttctctcaaccacatctgcctccacacacagctcctccgcagggaaggagaagctgctctgtaactcattctggctatcgtcccccttctcactgacctgaccgcccaccacctccttccccctcatcacatgacaaaggataatgtgcaagaaaagtatttttatgtatcataaatgtattttgaaacaaatgagaagaagaaaggtagaagggtttattttattaaatgagcctgacttagtgacagtgtgtgagcatttgcaatgtaagggcctcagcttccttggagaagccaccccaggtttccagacatagatgttgaattgtttgtggggggtgtgccaggccacgtctcgtgtgtccgtatgcaggcatgcctgtgtatactgtgtatgggcacactgggactagctgggacaattcctagagattcaactgcccaattctaaccaacattggcagcggctgaacttggcatttccttgctaactgccagatgtggccaacctttgtccatatgcaaaccactgaaaaatgatctggatttctatagcaaggcccttggggagggcactctcccatgcccttggcctcgctggccacattggccaatgagccagggctggagtctgagacctttggttgttctttaaggcacctcctgccactttctccctcagaggcacaaacactttgtgttccacgtcagtttgaggggacggtggggggatgatatgaatgtcacaggaggagacaccttctgtctttgtttcaaagaaagtgatgtgccatttgttaatatacaagagaaatattgaaaatatattgaaaagagcaattttaaattatttttggcttatgttgcaatatttattttcttgtattagaaaagattcctttgtagagaaaaaatgtatttttcattaacgcaaagacctatttctcctttttgtacattgtccatgtgcgcaacccttaacgagcaatagaatgtatggtcacctgggtgtggccagtgcccgctgtgccctgcatgattctgtgttgccgctgctgcatagttcccagccccatcctgtcctgctcactcatgggggcttccagaccccggccccaccagggcttgtgtcatagggagccctttgcactcctcgtgtgttggcaaacgcagttaataaagcagtgttttctgtgc

SEQ ID NO: 1112 - protein, 790 aa, Homo sapiens
MEEKRRKYSISSDNSDTTDSHATSTSASRCSKLPSSTKSGWPRQNEKKPSEVFRTDLITAMKIPDSYQLSPDDYYILADPWRQEWEKGVQVPAGAEAIPEPVVRILPPLEGPPAQASPSSTMLGEGSQPDWPGGSRYDLDEIDAYWLELINSELKEMERPELDELTLERVLEELETLCHQNMARAIETQEGLGIEYDEDVVCDVCRSPEGEDGNEMVFCDKCNVCVHQACYGILKVPTGSWLCRTCALGVQPKCLLCPKRGGALKPTRSGTKWVHVSCALWIPEVSIGCPEKMEPITKISHIPASRWALSCSLCKECTGTCIQCSMPSCVTAFHVTCAFDHGLEMRTILADNDEVKFKSFCQEHSDGGPRNEPTSEPTEPSQAGEDLEKVTLRKQRLQQLEEDFYELVEPAEVAERLDLAEALVDFIYQYWKLKRKANANQPLLTPKTDEVDNLAQQEQDVLYRRLKLFTHLRQDLERVRNLCYMVTRRERTKHAICKLQEQIFHLQMKLIEQDLCRGLSTSFPIDGTFFNSWLAQSVQITAENMAMSEWPLNNGHREDPAPGLLSEELLQDEETLLSFMRDPSLRPGDPARKARGRTRLPAKKKPPPPPPQDGPGSRTTPDKAPKKTWGQDAGSGKGGQGPPTRKPPRRTSSHLPSSPAAGDCPILATPESPPPLAPETPDEAASVAADSDVQVPGPAASPKPLGRLRPPRESKVTRRLPGARPDAGMGPPSAVAERPKVSLHFDTETDGYFSDGEMSDSDVEAEDGGVQRGPREAGAEEVVRMGVLAS

SEQ ID NO: 1113 - DNA, 1377 bp, Homo sapiens
ccggaaggggctgatgcgaactggggccacggcagccatcgcgctttgcagttcggtctcctggtgtacggccaacgccaagtaggggattgcgttccctccagtcgcagagtttccctcttgtcgcccaggctggagtgaagtggcacgatctcggcttactgcaagctccgcctcccgggttcacgccattctcctgcctcagcctcccgagtagctgggactacagaccctatcagatttggatatgtccttcatatttgattggatttacagtggtttcagcagtgtgctacagtttttaggattatataagaaaactggtaaactggtatttcttggattggataatgcaggaaaaacaacattgctacacatgctaaaagatgacagacttggacaacatgtcccaacattacatcccacttccgaagaactgaccattgctggcatgacgtttacaacttttgatctgggtggacatgttcaagctcgaagagtgtggaaaaactaccttcctgctatcaatggcattgtatttctggtggattgtgcagaccacgaaaggctgttagagtcaaaagaagaacttgattcactaatgacagatgaaaccattgctaatgtgcctatactgattcttgggaataagatcgacagacctgaagccatcagtgaagagaggttgcgagagatgtttggtttatatggtcagacaacaggaaaggggagtatatctctgaaagaactgaatgcccgacccttagaagttttcatgtgtagtgtgctcaaaagacaaggttacggagaaggcttccgctggatggcacagtacattgattaacacaaactcacattggttccaggtctcaacgttcaggcttactcagagatttgattgctcaacatgcataacttgaattcaatagacttttgctggttataaaacagatgttttttagattattaatattaaatcaacttaatttgaatgagaattgaaaactgattcaagtaagtttgagtatcacaatgttagctttctaattccataaaagtacttggtttttacagtttataatctgacatcaccccagcgccatttgtaaagagcaactttccagcagtacatttgaagcactttttaacaacatgaaactataaaccatatttaaaagctcatcatgttaaattttttatgtacttttctggaactagtttttaaattttagattatatgtccacctatcttaagtgtacagttaataattagcttattcaatgattgcatgatgccttacagttttcaataactttttttcttatgcaaacgtcatgcaataaaacaaactctaatgtttggcaaaaaaaaaaaaa

SEQ ID NO: 1114 - protein, 198 aa, Homo sapiens
MSFIFDWIYSGFSSVLQFLGLYKKTGKLVFLGLDNAGKTTLLHMLKDDRLGQHVPTLHPTSEELTIAGMTFTTFDLGGHVQARRVWKNYLPAINGIVFLVDCADHERLLESKEELDSLMTDETIANVPILILGNKIDRPEAISEERLREMFGLYGQTTGKGSISLKELNARPLEVFMCSVLKRQGYGEGFRWMAQYID

SEQ ID NO: 1115 - DNA, 1258 bp, Homo sapiens
ccggaaggggctgatgcgaactggggccacggcagccatcgcgctttgcagttcggtctcctggtgtacggccaacgccaagtaggggattgcgttccctccagtcgcagaccctatcagatttggatatgtccttcatatttgattggatttacagtggtttcagcagtgtgctacagtttttaggattatataagaaaactggtaaactggtatttcttggattggataatgcaggaaaaacaacattgctacacatgctaaaagatgacagacttggacaacatgtcccaacattacatcccacttccgaagaactgaccattgctggcatgacgtttacaacttttgatctgggtggacatgttcaagctcgaagagtgtggaaaaactaccttcctgctatcaatggcattgtatttctggtggattgtgcagaccacgaaaggctgttagagtcaaaagaagaacttgattcactaatgacagatgaaaccattgctaatgtgcctatactgattcttgggaataagatcgacagacctgaagccatcagtgaagagaggttgcgagagatgtttggtttatatggtcagacaacaggaaaggggagtatatctctgaaagaactgaatgcccgacccttagaagttttcatgtgtagtgtgctcaaaagacaaggttacggagaaggcttccgctggatggcacagtacattgattaacacaaactcacattggttccaggtctcaacgttcaggcttactcagagatttgattgctcaacatgcataacttgaattcaatagacttttgctggttataaaacagatgttttttagattattaatattaaatcaacttaatttgaatgagaattgaaaactgattcaagtaagtttgagtatcacaatgttagctttctaattccataaaagtacttggtttttacagtttataatctgacatcaccccagcgccatttgtaaagagcaactttccagcagtacatttgaagcactttttaacaacatgaaactataaaccatatttaaaagctcatcatgttaaattttttatgtacttttctggaactagtttttaaattttagattatatgtccacctatcttaagtgtacagttaataattagcttattcaatgattgcatgatgccttacagttttcaataactttttttcttatgcaaacgtcatgcaataaaacaaactctaatgtttggcaaaaaaaaaaaaa

SEQ ID NO: 1116 - protein, 198 aa, Homo sapiens; identical to SEQ ID NO: 1114

SEQ ID NO: 1117 - DNA, 2203 bp, Homo sapiens
gtgggaaggggacgcgcgccctgcggcccggcctctagtcatcgccctcgcagcggcggccaacatcaccgccactgccacccctcccagactgtggacgggaggatggagtcgatggccgtcgctaccgacggcggggagaggccgggggtcccagcgggctcaggtctgtcggcttcccagcgtcgggcggagctgcgtcggagaaagctgctcatgaactcggaacagcgcatcaaccggatcatgggctttcacaggcccgggagcggcgcggaagaagaaagtcaaacaaaatcaaagcagcaggacagtgataaactgaactccctcagcgttccttccgtttcaaagcgagtagtgctgggtgattcagtcagtacaggaacaactgaccagcagggtggtgtggccgaggtaaaggggacccaactgggagacaaattggactcgttcattaaaccacctgagtgcagtagtgatgtcaaccttgagctccggcagcggaacagaggggacctgacagcggactcggtccagaggggttcccgccatggcctagagcagtacctttccagattcgaagaagcaatgaagctaaggaaacagctgattagtgaaaaacccagtcaagaggatggaaatacaacagaagaatttgactcttttcgaatatttagattggtgggatgtgctcttcttgctcttggagtcagagcttttgtttgcaaatacttgtccatatttgctccatttcttactttacaacttgcgtacatgggattatacaaatattttcccaagagtgaaaagaagataaagacaacagtactaacagctgcacttctattgtcgggaattcctgccgaagtgataaatcgatcaatggatacctatagcaaaatgggcgaagtcttcacagatctctgtgtctactttttcacttttatcttttgtcatgaactgcttgattattggggctctgaagtaccatgaagcctgtagaactgagaaggagaagcttacaaaaaaaaaaaaatcctcttctatattgcagtgtctctaaaggaggcaaattggtttacaccttcatgtaattcttttactttaggggttgtaaagctactttattagatatagaatggcagattctctgatttaaaagggctgagtttgtattattactgatatgaagaatagagtaccaatgtcattaattgatttttcttgttaatcagaattcctattctgtacctttcctctaacttctcagatttgtaattcttcttttgggagctgagctagtgcttttaggagaacagataaatgtggtctcagccagccctagagactgcttcttgtgtttgtgtcattctgtcctgagaaatgaagtcatctgaaaaataaaatgaaagaaactgaattgtctaatgttaactctgcacattgtaacttttcttgttgagttagtatcttaatttttactccagcacaagtatttaatcaaagaaaagattcatacatgtgaaattggaaggtatttataaaatttttattgctgtataccaaactcagaattggaactttttacatttgagtttcactttttagaagtatgttttaagcaagcaaaaacaaaatgggatgtgaagaattgaggcatgcaacccaatagcataaatgtcctttttccccccaaatatggtctagatgagttattataaacattgtttttatttttttgagacagagtttcgctcttgttgcccaggctagagtgcaatggcgccatctcggctcaccgcaacctccaccttcctggttcaagggattctcctgcctcagcctcccaagtagctgggattacaggcatgcaccaccacgcccagctaatttttatattctttagtaaagacagggtttctccatgttggtcaggctggtctcgaacttctgacctcaggtgatctgcccacctcggcctcccaaagtgctgggattacaggcgtgagccactgcacctggccttataaatatccttttaactaactcagtaactgccatattttgttgggttgtcttcttaaaagaatataagactaaagtgttaatgtcacttggtgttacatttccttacagatttttgtatagtctaatttggttaatccttgtgacattaaaaacacatacactttttaaaaaa

SEQ ID NO: 1118 - protein, 296 aa, Homo sapiens
MESMAVATDGGERPGVPAGSGLSASQRRAELRRRKLLMNSEQRINRIMGFHRPGSGAEEESQTKSKQQDSDKLNSLSVPSVSKRVVLGDSVSTGTTDQQGGVAEVKGTQLGDKLDSFIKPPECSSDVNLELRQRNRGDLTADSVQRGSRHGLEQYLSRFEEAMKLRKQLISEKPSQEDGNTTEEFDSFRIFRLVGCALLALGVRAFVCKYLSIFAPFLTLQLAYMGLYKYFPKSEKKIKTTVLTAALLLSGIPAEVINRSMDTYSKMGEVFTDLCVYFFTFIFCHELLDYWGSEVP

SEQ ID NO: 1119 - DNA, 5695 bp, Homo sapiens
agcacgtcctgttttcgttggccgcgctgggatggccgccacagctgtaggtgctgctagtgtttagcgctggtctttgccgggcgttgagggcagctcagcctccttgtttgtccggttcgcctgtgcgtggtactcaagggcaccagtattcccgcggtcggcagcatgggtcgggagtcacgccactatcgaaaacgatcggcatcccggggtcgctctggaagtcggtctagaagtcgctcaccctcagacaaaagaagtaaacgtggagatgacagacggtctagaagtagagatagagataggaggagagagaggtctcgtagcagggataaaagaagatctcggtcaagggacaggaagcgtctgagacgttccagaagtagagagagagacagaagccgagagcgaagaagatctcgaagtagagacaggagacgctcaaggagtagaagccggggccggcgatcccgatcctccagtcctggaaataaaagcaagaaaactgagaatagatctaggtccaaagagaaaactgatggtggggaaagttctaaagagaagaaaaaagacaaagatgacaaggaggatgaaaaagaaaaagatgctggcaactttgaccagaataagctggaagaagaaatgagaaagcgaaaagaaagagtagaaaaatggcgagaagagcaacgtaaaaaggctatggaaaacataggagaactgaaaaaggaaatcgaagagatgaaacaagggaaaaagtggagtttagaggacgatgatgatgacgaagatgatcctgcagaagctgaaaaggagggaaatgaaatggagggtgaggagttagatccattagatgcttacatggaagaagtgaaagaggaagtaaaaaaatttaacatgagaagtgtaaaaggtggtgggggaaatgaaaagaagtctgggccaacggtcacaaaagttgtcactgttgtgacaaccaaaaaagcagttgtggattctgataagaagaaaggtgagctgatggagaatgaccaggatgccatggagtattcttcagaggaggaagaagttgatcttcagacagcccttacagggtatcaaacaaaacagcgaaagcttctagaaccagttgatcatggaaaaattgagtatgagccatttaggaaaaacttctatgttgaagttccagaactagcaaaaatgtctcaagaagaggtaaatgtgtttcgattggaaatggagggcattacagttaaaggaaaaggttgccccaaaccaattaaatcctgggtccagtgtggaatttccatgaagatcttaaattccctcaagaagcatggctatgaaaagcccacgcccatccaaacccaagctattcctgctataatgtctggacgagatttgattggcattgccaaaacaggaagtggaaagaccattgcttttctgttgcccatgtttagacacatcatggatcagaggtcattagaggaaggagaggggccaatagctgtcatcatgactccaactcgagaactggctttacagattactaaagagtgtaagaagttttccaagactttgggacttagagtggtctgtgtttacggaggaacaggaatcagtgagcagattgctgagctgaaaagaggtgctgaaattattgtttgcacacctggtcgaatgattgacatgttagccgctaacagtggtcgggtcacaaatcttcgaagagtgacatatgttgttttagatgaagcagacagaatgtttgacatgggttttgaaccccaggtcatgcgcatcgtggataatgttcgtcctgatcgacagacggttatgttttcagctactttccccagagctatggaggctttggctcgcaggatcctcagtaaacctattgaagtacaagttggaggcaggagtgtggtttgctcagatgtggagcaacaagtgattgtgattgaagaagaaaagaaattcttgaagttacttgagcttctaggccattatcaagagtcaggatctgtcattatatttgtggataagcaggaacatgctgatggtcttcttaaggatttaatgagagcatcttatccttgcatgtctcttcatggaggcattgatcaatatgacagagatagcatcataaatgactttaagaatgggacctgcaaacttcttgtggctacctctgttgctgcccgaggtctagatgtgaaacatctgattcttgtagtaaattatagctgccccaaccattatgaggattatgtacacagagcagggcggactggaagagcaggaaacaagggttatgcttatacttttatcacagaggatcaagctcgctatgctggtgacataattaaagctcttgaattgtcagggactgcagtacctcctgatttagagaaactgtggagtgatttcaaagatcagcagaaagctgaggggaaaataattaaaaagagtagtgggttctctggtaagggattcaagtttgatgaaacagaacaagctttggctaatgagaggaagaagttacaaaaagcagctcttggtctacaagattcagatgatgaggatgctgcagttgatattgatgagcaaattgaaagcatgtttaattcaaagaagagagtaaaggatatggctgctcctggaacatcaagtgttcctgctccaactgcaggaaatgctgagaaattagaaattgctaagagattggctcttagaatcaatgcccagaagaatttgggcatcgagtctcaggatgtgatgcagcaggccaccaatgcaattcttaggggtggcaccattctggctcccactgtttctgcaaaaaccattgcagaacaacttgctgaaaagatcaatgccaagctcaattatgtgccgttagagaaacaagaagaagagagacaggatggtggacagaatgaatcttttaagagatatgaagaagaattagagatcaatgacttcccacagactgctaggtggaaagttacctctaaggaagctctgcagagaatcagtgaatactctgaagccgcaattacaatcagaggaacctacttccctcctggcaaagaacccaaggaaggcgagcggaagatttacttggcaattgaaagtgccaatgaactggctgtgcagaaagcaaaggcagaaatcaccaggctcataaaagaagagctgatccggctgcaaaattcataccaaccaacaaataaaggaagatacaaagtcttatagacatccggaaaaaagatttttacctgtgctggtctatgatgtatgtggcagttgctgtctgcagtttacaatgtattgtaaatgaagattttttaaattctatcttgctgattttttttaaatataagaaactggtacttggtaaagaaatctgtccgtaagtacccccacaatcagtcaaactatatttaaagccagcctgttttcagagtatgatgtcctttaatgtaaactcaaatatcaatattttaaatgtccggataatattctagaggtttaaaaaatggaaatatttgaactttctattgaagacaataaagtacacaagtcgttaaggggctattcactttatcctgtactttcaatgaaattgtgatcatttcctaagaaaaggtaaaattcactatcatattttgtgtccccaccttgatgttacatgactctggaacaatatgaactggatttaagaatgttataatagaagtcttacaaaatgggttgagagtttttgtttcaatttttatcatcataaatgggcaaaaagtagttggactaatttcggtttttatacaagtaaagatttaatagtataaggatttttttgcatttctttacactgagtgtaaaactctacaaagagttatagtatttactactttgaggtttccctcacaacttctggctccatacctagcccctcttttataatcttccttaaaagaaagagtgtagcctataaatactaaatatgataccttttccttctagaaagtgtttatttatatatctatacatgttgtatgtacaaatatcctactacttttaatctgatttttcttcaggattattgagtaggttgtgaattttctttcttaaaaattgtaaaacataatggtacccaagttttaaacttagatgtgcttcatcttagtgaaatttaattcacaaggaatcataaattgtgtttttgaggctgggcgcagtgactcacacctgtatcccagcaatttgggaggccgaggtgggcagatcacttgaggtcaggagttcaagactagcctggtcaacatggtgaaaccctgtctctactaaaaatacaaaaattagtcggcatggtggtgggtggctgtaatcccagctactcaggaggctgaggcagaagaatctgagccaagataacaccattgcactccagcctgggcgacagagtgagactatctcaaaaataaataaataaataaataaatagtatttttgagccttcaagatacagttcctgaatattctaatttaaattgttataattggattacctaatattcttttcaagactcctgatgtattaacttcatgttattgtcacttttcaaaaaaggaatttttttcaggagttaaataaagtcagtcttttatatccaagggtttcaaacccacagattaaaccaaccacagatcaaaaatagaaaaaaaaaaaaaaagaaaaaaagaatgtaaaattttaaaaatacagtttaacagctgtaaaagttttactataacatttacattgtgttaggtattttaagtaatttaaaggttacagtatacaggcggttaaagtatacaggaggatgtgcatcggttatatgcatatagcaagccatttcatataagaggcttgaacatccatggattttggtatagaggaggggtttaaggggtgtcctgcaatcagtccccctctcataccaaaggatgactgtatatttcttaaatgaagagactttcattctttaaatattattgacttacagtttaaaaataaataaataaaagcatactatagttgtaaaaacaaataattttaatagtatattcagtggctgaagtgatagggagtattaatcattatttcttcagtataaagttattcttcctgaaaaagtaagatatacctgggaaatattcttggatccttcacacatccacttaatttcttgaaggaagaaaacagacaaaagacatgtaacaacagaaacaaataaaccacttactgtaaaatttcagaaattgtgggctcattccctccctctagtttatttatttgctcatctttatcacctaatggtagtttgttttctttggtagagtatatggcagtcccacatcgatgataattggtgctcccttcatccaactggatcactttgagattcagttttacatcattttagcattttgtttgtatatcagttgtgatgagccactgataaaattttgttctaaaatgaaacatattactttgttagtacattttttagtgtcacactgacttttaaaatttgaatgatatatagactttgtttttttaatgcaatatgaatatttgctcatgttttctaaattccttataaaataaaattaattcgaattcaaaaaaaaaaaaaaaaaa

SEQ ID NO: 1120 - protein, 1031 aa, Homo sapiens
MGRESRHYRKRSASRGRSGSRSRSRSPSDKRSKRGDDRRSRSRDRDRRRERSRSRDKRRSRSRDRKRLRRSRSRERDRSRERRRSRSRDRRRSRSRSRGRRSRSSSPGNKSKKTENRSRSKEKTDGGESSKEKKKDKDDKEDEKEKDAGNFDQNKLEEEMRKRKERVEKWREEQRKKAMENIGELKKEIEEMKQGKKWSLEDDDDDEDDPAEAEKEGNEMEGEELDPLDAYMEEVKEEVKKFNMRSVKGGGGNEKKSGPTVTKVVTVVTTKKAVVDSDKKKGELMENDQDAMEYSSEEEEVDLQTALTGYQTKQRKLLEPVDHGKIEYEPFRKNFYVEVPELAKMSQEEVNVFRLEMEGITVKGKGCPKPIKSWVQCGISMKILNSLKKHGYEKPTPIQTQAIPAIMSGRDLIGIAKTGSGKTIAFLLPMFRHIMDQRSLEEGEGPIAVIMTPTRELALQITKECKKFSKTLGLRVVCVYGGTGISEQIAELKRGAEIIVCTPGRMIDMLAANSGRVTNLRRVTYVVLDEADRMFDMGFEPQVMRIVDNVRPDRQTVMFSATFPRAMEALARRILSKPIEVQVGGRSVVCSDVEQQVIVIEEEKKFLKLLELLGHYQESGSVIIFVDKQEHADGLLKDLMRASYPCMSLHGGIDQYDRDSIINDFKNGTCKLLVATSVAARGLDVKHLILVVNYSCPNHYEDYVHRAGRTGRAGNKGYAYTFITEDQARYAGDIIKALELSGTAVPPDLEKLWSDFKDQQKAEGKIIKKSSGFSGKGFKFDETEQALANERKKLQKAALGLQDSDDEDAAVDIDEQIESMFNSKKRVKDMAAPGTSSVPAPTAGNAEKLEIAKRLALRINAQKNLGIESQDVMQQATNAILRGGTILAPTVSAKTIAEQLAEKINAKLNYVPLEKQEEERQDGGQNESFKRYEEELEINDFPQTARWKVTSKEALQRISEYSEAAITIRGTYFPPGKEPKEGERKIYLAIESANELAVQKAKAEITRLIKEELIRLQNSYQPTNKGRYKVL

SEQ ID NO: 1121 - DNA, 4269 bp, Homo sapiens
aagaaatggggtcagcaggagttccagcatctcagaattgtggtgaaaaccaatacaaaaaatgatgcatcctgttgccagcagtaatccagctttctgtgggcctggcaagccttcctgcctcaatgaagatgccatgagagctgctgatcagtttgacatatattcctcccagcaaagcaaatacagccacacagtcaaccacaaaccaatggtttgtcagaggcaagacccattaaatgaaacacacttgcagactacaagtggcagaagcatagaaataaaagatgaactaaagaaaaagaagaatctcaaccgatctggtaagcgtggccggccttcgggaaccaccaaatcagcaggataccggaccagcacaggcagacccctgggaaccaccaaagcagctggatttaagacaagtccaggcagacctttggggacaactaaagctgcgggatacaaagtcagcccaggcagacctccaggtagcattaaagctctatcccgtcttgccgatcttggttatggctgtggcactgctgcttttccttaccctatgatgcatggcagagcagttcatggggtagaggaaactagcagtgaagtcaaaccacccaatgagtgaatgaggcaggaaaagagggccaggtttagaaggaagattgtgaataatcccaaagcttcttggttttattttgatatacataattttatggcctgggctttccaaatttgttttcctgtttggtttttttcctgcttttgctcaaaaactgccatatgctgacagatgcactcagggcatgagcagcggcattgtatttgtacataggttcaagtgtaacacctaactaaatcatttttccttttcctttagagttatggtcatgtctcatgtttcattactactttggggctgttctaaatagatgctttatgtgataaacaactgaaaccattatacctattagtttgtgaagtaagcctacagtataataaagacactaacgtatttttaactgatggagcaaaaaagcaaactaatgaatcaggattacttgaggtaatggctgtgtgagtttttgtaacatttattttcacaagatgggacacatatttgtatgctttggcatttacatccacttcaaatgttaaaaaacttatttttaatgttttaggtttaagcagcttgtaatttattgatctacatggcattaattgatttaaccattatacctgaaataattcttcagtgtttgcctttgagcagtgataggttgtgtattttttaattgcctaagagcatatataccaaacactacaaacaattcatatttacagaaaatttaaactattttataaaaactgcacattacatttttggtgaaatatagtgcattctgaggatagcatatttcatataatagaaaaagaagcattctctaggtttgcatgtagctatagtcactatattttgcctttcatatagaaagttttaaagtattatgtttaaaaacatttattggctgggtgtggtggctcacacccagcactttgggaggccgaggcaggcggatcacttgaggtcagcagttcaagactagcctggccaacatggtgaaaccccatctctactaaaaatataaaaattagccaggcgtggtggcgggcgcctgtaatccaagctactggggaggctgaggcaggagaattgcttaaatccaggaggcggaggttgcagtgagccaagattgtgccactgcactccagcctgggtgacagagtaagactccgtctcaaataaataaataaataaataaataaataaataaataaaaccatttattgatgttgctcatttatttggaacgtttttagtttttctcagaaattgtcccattgcattagcacttactgtgttttcaggttgatatctaccaaaggacacaaattgaatggtagactgtaaaactggtataaacagaatgcagtttcccgaccatcagaacccaaatattaagaagcatataggaatccatctatgcatgaaacatgtaaaaaatatgttggttagtttaattaaaaatcttattgtgggtccagtgagaccatctcatccaaaagattttttttcccccaatgatgtttgctttagaagcaagatagaaaggaaaaaaagtattaggtagatatgtatagtagggacagagggaaatctttcttctttcctttctgaaagtaatacttcttgttacacattttatttattgagtttgttctaaataaaatattataaacttcagacttgaaaaaattccacttaactttaaagttacaatgtttgtatttgggattttaaatgcctttgagattaaaatgtagaattgcaggacccaaaaacttttaaaataattaaaattttaaaagagcacatgttgtgttttttgggcttgctattaatgcaaactctgattgcaaatggatgtcatgtttcataccttttttatcaggaaaaaagcagcaagccttcaggtgttccagtgatgcctgacacaattgagctggactttatgctgctctttacagtaagaggtgttgcattgtatgtggggactatgtgcactggcgtctaagacagtgacctcaacaatattagctttgcacaaaccatagagaacgatgttggatggttacataatcagttataacattctggcagctaaattgctacaagagctttttcttgcaaaagcttaaaatacaagatttttaataatttactcagaacagtataacttctgacacacacaaatgcttgcctctttattcatatgttcgttacctactctgtacatgtatctgtcatttagctgtttctcaagatgatgttcagcagttggctgcttagaaatctttttcaagccagtttctaaagacatttgtttaatgttctaccatagaataatgcacaccattgtcaaagatttgattattgtgttttatagtaagtccatttgacatttatttccctttcagtttattttccttccttattttgttatacatacccttccctttctcccctgcctttcgtacattcattcctcttcctctaccctccagcacatctacttactggtgctgtgctgtgtgtcagaagataaaacaggtgtattattgtataatgaattttgtatacatgtttatgaaatggtgagatcaactaaaggaggcatgttcataacagtgtttattatcagcagctatgtcccaggaaaaaaaaatgggaggggcaaatggctacagttgtaaatggataacatcatttagaaagccgaatttactgttcatctgagcggttacctggagtattatatctatgcactggtgagcatctcctgattccacttacttttctccctgtgaacagtttaccggtgccatgctgaagagaaagacatctaagtgataacatgaatgaagtcttaaaatttaaagtatttttactgctatataaactaaagactacattgtgcatattttgttaacactgtctcttgttatgataaacactgaaatagcatgttaaacagttgcctatactttaatataatcagttggggaaaactggccttttctcccccactgtatgattgtttcttgaaaggtaaattgctaattttatacagtgtaattctgttcttcacaaaataggtttcattattctatatttaaactgttggtcagaaaatgatctgcaattcaagtaagtctgcattacttttttctttaaaaagtactttaacatgccttatttattatattagcaaatgagctaataacagatgaaattttcattttttgacagatataaccttgcataagtagtatttagggtgattttgatactatctttagagttttgcattggatattaaaaaatatattggcacaatgtattggaagaaaatgagtagtatctggtttaatttttaatatttagggacattttaaaaaatcaatgttttaattagactaaaaattctttatattttttatttactttttaaagaaacatctgtcaaagtaatattgattccaaactgatgtttgtgtgaatttacatgtctattttcatgaactaagaatagagtttctttgagttgaggagaaaaaaatatatatgtgggtccatttattaggttaaagttgacccattcagtgtaaaaataaccatagtgtgtgagctaaaaaaaaaaaaaaaaa

SEQ ID NO: 1122 - protein, 188 aa, Homo sapiens
MMHPVASSNPAFCGPGKPSCLNEDAMRAADQFDIYSSQQSKYSHTVNHKPMVCQRQDPLNETHLQTTSGRSIEIKDELKKKKNLNRSGKRGRPSGTTKSAGYRTSTGRPLGTTKAAGFKTSPGRPLGTTKAAGYKVSPGRPPGSIKALSRLADLGYGCGTAAFPYPMMHGRAVHGVEETSSEVKPPNE

SEQ ID NO: 1123 - DNA, 3689 bp, Homo sapiens
agttaaaaccaacctctcctgccctgagtggataggtagggttagggttgccagatgtcacgaagttacaggatgctcagttttaaggtatatcccttatactataagggttatagtaaaaaatattcattatgtgaaattcaaatataactgggtatcaggtattctatgtggcaaccctaggtaggggagcacaggttaggcaagcgattagaagatttgcagcctccaaagtttctgcacctcgatgggacactagaacaggaaggctcctgggcctttctggctctgggaatgaagcgtggaaaaccctccttaggcgggcgcagtgcttcaagtagccaagctctgacttccgagggaagaaaggaggccatgggcctctgccagagccatgctctgcactctggggtcagcagagttcaaaacgacctgcaacgtctggcgcttagctcctaaagaggtctccagtccagcgccgacggccagcggctagaggccgtccgcccgactccaagatggcgcccgccacagctgccaggtgttaagatggcggcgcggggccgcgcccgcgctcccaggctctcctcccccagccttcctccggctggcagcacgactcgcgtagccgtgcgccgattgcctctcggcctgggcaatggtcccggctgccggtcgacgaccgccccgcgtcatgcggctcctcggctggtggcaagtattgctgtgggtgctgggacttcccgtccgcggcgtggaggttgcagaggaaagtggtcgcttatggtcagaggagcagcctgctcaccctctccaggtgggggctgtgtacctgggtgaggaggagctcctgcatgacccgatgggccaggacagggcagcagaagaggccaatgcggtgctggggctggacacccaaggcgatcacatggtgatgctgtctgtgattcctggggaagctgaggacaaagtgagttcagagcctagcggcgtcacctgtggtgctggaggagcggaggactcaaggtgcaacgtccgagagagccttttctctctggatggcgctggagcacacttccctgacagagaagaggagtattacacagagccagaagtggcggaatctgacgcagccccgacagaggactccaataacactgaaagtctgaaatccccaaaggtgaactgtgaggagagaaacattacaggattagaaaatttcactctgaaaattttaaatatgtcacaggaccttatggattttctgaacccaaacggtagtgactgtactctagtcctgttttacaccccgtggtgccgcttttctgccagtttggcccctcactttaactctctgccccgggcatttccagctcttcactttttggcactggatgcatctcagcacagcagcctttctaccaggtttggcaccgtagctgttcctaatattttattatttcaaggagctaaaccaatggccagatttaatcatacagatcgaacactggaaacactgaaaatcttcatttttaatcagacaggtatagaagccaagaagaatgtggtggtaactcaagccgaccaaataggccctcttcccagcactttgataaaaagtgtggactggttgcttgtattttccttattctttttaattagttttattatgtatgctaccattcgaactgagagtattcggtggctaattccaggacaagagcaggaacatgtggagtagtgatggtctgaaagaagttggaaagaggaacttcaatccttcgtttcagaaattagtgctacagtttcatacattttctccagtgacgtgttgacttgaaacttcaggcagattaaaagaatcatttgttgaacaactgaatgtataaaaaaattataaactggtgttttaactagtattgcaataagcaaatgcaaaaatattcaatagatgcactattcttgtttttactgcatgaacgtaatccagtatttggaaagtaatccagtttgaaatgtgaagatgtattccggcagaatagtgagtagaatgacatgcttactatacagaaggcaaaaataggactctcaggtaatagtttaaggaaacccttgattccttatatatgtttaagaaggttagttttctgtttctttgcagtttttcttctagagtccatagcaggaaagtatgtaaccagaattggttagtgtgaccccctcaagtagcaagtgatggaaaataagagtcaaataccttgatgtttgtgatctctaactcaaaaaatttgaagtgttttaagttgtttctgggtaagggagatgttaggagaaaggaaatgctgtaactaaagctcaattattatcagttctatgctaacgtatacattttaatcatagttacctaagcagcatgcattaattgaaccttaaaatgttcccagcaggctgggcgcagtggctcatgcctgtaatcccagcactttgggaggccaaggcgggaggatcacttgaggttaggacttttgagaccagcctggccaacttggtgaaaccctctctctactaaaaatacaaaaaattagctgggcgtggtggcgggcacctgtaatcccagctacttgggaaagctgaggcatgagaatcacttgaacccgggaggcagaggttgcagtgagctgagatcatgccactgcactccagcctgtgcaaccagagcgaaactccatctcaaaaacaaacaaaaagaagtattgaagtgtaaaacactgttcttgcccacaagttgattctagtctagttcaagacacatgtttagtaaagagacaacatgtaatttaaacaaactttttttttttttttagacaaagtctcactctgtcacctaggctggagtgcaatggtgcaatcttggctcactgcaacctctgcttcccgggttcaagcgattctccagcctcagcctcctgagtagctgggactatgggcctgtgccatcacacccagctaatttttctatttttagtagagatggggttttgccatgttggccaggctggtctcaaactgctgacttcaggtgatccacccgcctcagcctcccaaagtgttgggattacaggtgtgagccactgcgcctggcctaaacaaactttttgaaaagctgtttctaaaagattccttaaattcagatatgacagctaattacctcatcataaattacttttatactaattgtttccagggttttagagtagttgaatgtttatttcacaaggcaccctaaattctatagaaataaaacctcagatgagtctccttcttagagtgttacaatgaatgggagtttacaacttttatgtgtcatgtttccaacagctgtgtttggggtggtcactggcaggaggggaccgtatctcagaatggcacattatttctattttacacatgagcaaattgaggcatagagagttagataacttgcccaggttacacagattgtaagttgatgaagctgggatttgaatcttcacatgtgtgtacttataaatacaaatgtaaggaaaactctagtgagtccacctcttatattgagttattactgtgtgagtgccaagtactgttttagatgctttacatatactattttgtttaatatcctttttaaagaataaactaggttggtgcag

SEQ ID NO: 1124 - protein, 360 aa, Homo sapiens
MVPAAGRRPPRVMRLLGWWQVLLWVLGLPVRGVEVAEESGRLWSEEQPAHPLQVGAVYLGEEELLHDPMGQDRAAEEANAVLGLDTQGDHMVMLSVIPGEAEDKVSSEPSGVTCGAGGAEDSRCNVRESLFSLDGAGAHFPDREEEYYTEPEVAESDAAPTEDSNNTESLKSPKVNCEERNITGLENFTLKILNMSQDLMDFLNPNGSDCTLVLFYTPWCRFSASLAPHFNSLPRAFPALHFLALDASQHSSLSTRFGTVAVPNILLFQGAKPMARFNHTDRTLETLKIFIFNQTGIEAKKNVVVTQADQIGPLPSTLIKSVDWLLVFSLFFLISFIMYATIRTESIRWLIPGQEQEHVE

SEQ ID NO: 1125 - DNA, 6485 bp, Homo sapiens
tgcagccatgctgaatcactgttgctgatcagatttcccactggtctgctgggagaatcaagaacagaactaggatccccgagtgcatacacagttcagcagctaccaccctggctgggcctcacacaatggagggtgaaagtgtcaagctgagctcccagactctgatacaggctggggatgatgagaagaaccagaggacgatcactgtcaaccctgcccacatggggaaagcattcaaggttatgaatgaactgcggagtaaacagctgttgtgtgacgtgatgattgtggcagaagatgtcgagatagaagcccaccgtgtggtcctggcagcctgcagcccctacttctgtgcgatgttcacaggtgacatgtctgagagtaaagccaaaaagatagaaatcaaggacgtggatgggcagacgctgagtaagctgattgactacatctatactgctgaaatcgaggtgactgaagagaatgtccaggtgctgctcccggcagccagcttgctgcagctcatggatgttcggcagaactgctgtgacttcctgcagtctcagttgcatcccaccaattgcctgggcatccgtgcgtttgcagatgtacacacctgcactgaccttctgcagcaggccaatgcctacgcagagcagcactttccagaggtgatgctaggagaagaatttcttagcctgagtctggaccaggtgtgcagcttgatatccagcgacaagctgaccgtttcttcagaagagaaggtgtttgaagctgtgatctcatggatcaattatgagaaagaaaaccgtttagagcacatggcaaagctgatggaacatgtccgacttcctctcttacctagggactacctagtccaaacggttgaagaagaagctttgataaagaataacaacacctgtaaagacttcctcattgaggccatgaaataccatctcctccctctggatcagagactattgattaagaacccaaggaccaagcccaggactccagtcagccttcccaaggtcatgattgtggttggcggccaggcacccaaggcaatccgcagtgtggagtgctatgatttcgaggaggaccggtgggatcagattgctgagcttccttccagaagatgcagagcaggtgtggtgttcatggctggccacgtgtatgccgtgggagggtttaatggctcactgcgggtgcggacagtggatgtgtatgacggcgtgaaggaccagtggacgtccattgccagcatgcaggagcgccggagcacactgggcgcagcggtgctcaatgacttgctctacgcagtgggaggctttgatggcagtactggcctagcatcggtggaagcctacagctacaagaccaacgagtggttctttgtggccccgatgaacacgcggcagagcagtgtgggtgtgggcgttgtggaggggaagctatatgctgttgggggttatgatggagcttcccgccagtgtctgagcactgtggaacagtacaacccagcgaccaatgaatggatatacgtggcggacatgagcacccgccgcagtggcgcaggggttggagtgcttagcggacagctgtacgccacaggtgggcatgatgggcctttggtgaggaagagcgttgaggtttacgatcctggaacaaatacctggaagcaagtggcagacatgaacatgtgccggcgcaacgcaggggtctgtgcagtaaatgggctcctgtatgtggttggaggggatgatggatcctgcaacttggcttcggtggagtactacaatcctgtcactgacaaatggacgctgcttccaacgaacatgagcacggggcggagctatgcaggtgttgccgtgattcacaagtccttgtgacccaaactcctactgccaggaggtggaggaaggagcaggtgctgcctgtgactctgaacagcaggaccttggtgactggattcaacttgcttgggagggtctgtgctgctgtgagaaccgctctcctctgacttggcagactggtgttgttcatcgcagtgtggacaccattacccacccccgttcccctgaggtgctctggcctatgccctgagcaaggggggtcttgacatccccaggcagcacctttgggctttgttttggtgtttctacagggacaatacagaccctggagtgtgtgtgtgtgtgtgtgtagaccatggtgtttctctatgtttctctaagttggggggtgagcgtgtgtgacagtctactggatttctttactactgatcctttcgctgtgttaaaaatcaagtcacagagacctctcttctggatttgtcccatggggaccctgagactactaaagctgctttcttctgaaggtccagttggacagtctgggaatgtccagaaataaccagtgagaggggcagttctctggccacacccacttatgtactttaactactgtgactttgtctgcagaagagctggaaaattctcgaagctgcaccgtgtcctctgtgtgctagaataagggacaaatgggttccctgtgcttctcagctcactgtttttccttgagttctcctacaggaagcagatgagaactgcccagtcttcaggtttaggccattggtctttgatgtcatagattccaggcctgggaggtgttatgtctcttcagctgggaaaactagctcttcagagaagcctcgggtaacactgaaaaacaaaacaaaacaaaacaaaaacaggaaaaaaacaaaaaaccaaagtggtaaggattcagttcctgcctataatggtctcagagagggtcctacttttaggttttcccaggacaggacagtccccatttatacttattatcccagtttaattattcacagcaccccattttactcagaagtgttctggtctggaggataaataagaggtcaccctcctccagacccaaagatagatttgtgcctgtgttggatggggtcgtgtgtgattcagatggacattggatggcttcaaaggaatataccactagagctggcccttggcactttgtgacagtggtcaagtctgtctaatgtccttgtcttctttttcttgtgctttccccctattccagggtgtgcaccctctccccaacccccaagaaccccactactgctttccctgtgaggtaggagatatcagtgggtcttggatttgaggcttcctaagatgtgcttgcattttaaaaagggagcttggtgagagctttgctaattcacaggtaaaaattattaacaatagaacttcaagcatcttgaggagcgggcatttgagggggcatggagtaatttgtatttaaaaaaccttaaagttgtgctgttcctaaactagcaaattgctcatgctgaaatttctggcataagcaggggaagtcttgtgtctggagaatagtctcataccttgcagtctgggacaccctccctactttgagaatccacctacaggaagccaaggaactttataaatcctgatgttggacttctgatacgactgggctacttccaagcaggtgctgcaggagattggcatcccccagcccctgcagttagaaaccccgaagtcttcccagccagtgagccactttgtgtatttactgtatatttattgtgccctaaatgtgcaactctcctaaagacaaaacttctctttctgatgttaagcacatgttacttcaacaagatgcttggagaacaacaaggtacccagaatttttagaagccttcagaagaggctaaaatatccagctttgggggacctggaagaaatgtctccaaaggaagcaaggcatgttttagttgagtgctctggtctcactatgaagtggggatgactgtggcttcataactctacctggctgtgggttggaagctgatggaatgagaaatgtcctttctccttctctgaggaaattttgagacttgtttcggtgtgtctgtgtgatggggatgaggctggggttgggatctgatgtatgccattcacagaagctctcaatttcagatgataggtgaattccctgcccctcccccaccactgagaagctagactttcatgcgggagaggctacttttatgtgtcgtcttccggggaagggtccctccactgaaagctagccagtcatgttttctgtttttggatttttgcaattggtttcacctcatgtctccctccctacaaagcactgcctctactgggcgtgctgccaaggccatgtgcactccatcctcatgtatcctttttcacggggaccagaacactggtacgtcatcaccaaagccaatctgctctagctgcccacagatgccaccaaaacctgctatctcttcatcaccaggtacgattctctttccacagtggacacagcaggctattttctagtttgtgctggtcacgtggtagatgaagcctcttactgccccacttagggtggccacggctgcttgtgaatgcagctttgccagtggcatatctgtcatctgattgcggtggtgaaatggaattgaggcccaaggttagaagcagccgagacgccacttggatactgatttgaacaatgtagaagtcagattctgaattccaaagttatttctcataagtacccaatggcatctctccatctacaaagttgcagtattatgcaaataaaactgacctcattttctgctatgcaataagaatacttaattctagttcccgacaagccagttgcaatatcccctaagatgctttttgagctgtcttactttgatatctgttgtgtaacgtttgtatatttctgagccagatcctttcaaagattgcctttttataaaattgaagctatagcttttaggctaaaattttaacgtagatatttttataagatatttttttcaagagtttgaatcgctttttattgtccatggtaatgaaatgttgtgttctttgcatcattcactctcaaacgtagttcatgcctgtagctctcttccttttgtttctcacccttcagaaacatatttttcagtagctccaggtagatgagcctttttttttttttttttaaataccatattcaagggagtctgctgaattttaaaacgcagtcactggtgtttcttgaattgctagggactgatgttatgttcgactcagcacttgcccgtctgtattgattgtgtctttttttttttttttggagtctgctttctgtgggggtgaggccgggctgtctcgtggtggctcccactgacgggcactgagcctggtaccctgtggcatggagaagcctcagggaaaggcctgcccccccagcacatactcccatagtgtcctaggtccagccgaccattccttattctcttctatctccttgttgatctgaagcttccaatagcttgaggcctttgctgctggatgatgccctttttgggagcatcttgtctctaacctttaaaagaggggtcaatcctcatgatccctgtgtgttaagcatatgctttgcaggtgctcacactacacttacaacttgcttcttgagctatgtctctactccaggctctgttttgtgtatttatctgccatttgcatcatggtttttaaaatttattattattattattattgttgggacaggtgccatttaaattgcctccatgctccccatttgcacctagctggatcaagttgggaggctgagcaaactcatattccagttagttggagtttttaaaggctctgtttgcctggagaagcaaggaggttagaatgtaatttttttaagcgtttgcactatttagagtcctaagcccctcatgttcagctgtgctgtgtttctactgaccaagcaggagagccagcagcacttccagcatttgggaatggaagagatttcttctgtagtggataattacagcctcatagcccctgtgcagccttcgtcatgggactcagtgactcatggatatagcatcagccatggcaggaatgcacaggactgtggcatttgcagcatcaaatcaccctagtgccatgtttggttatgagattgtaaattattcgctcccccgtcctcccctcccctcattttcagtggcaatagaggacccttgttgtacttcttgtttaatttgcatattatgtgtaaaatgctttcgttgaaagaaaactgaagacactgaatgtgtatgtctgtgtgggtgctctgtccctgtggttgtcatagccagtcagacttgatcactgacaccccgtacaacatattgcataggtaagatcctcgatctggtgttctctgcgtggctgttagggactgtatatcttgtaaaagaacacttgtcacatgcttgatcagttacagcaatagctgaagaaacatttcctcaaatgtattattttaacaggaatcatgttctaatttcccatcctttaattttaataaaagctgaactgtgtgaa

SEQ ID NO: 1126 - protein, 587 aa, Homo sapiens
MEGESVKLSSQTLIQAGDDEKNQRTITVNPAHMGKAFKVMNELRSKQLLCDVMIVAEDVEIEAHRVVLAACSPYFCAMFTGDMSESKAKKIEIKDVDGQTLSKLIDYIYTAEIEVTEENVQVLLPAASLLQLMDVRQNCCDFLQSQLHPTNCLGIRAFADVHTCTDLLQQANAYAEQHFPEVMLGEEFLSLSLDQVCSLISSDKLTVSSEEKVFEAVISWINYEKENRLEHMAKLMEHVRLPLLPRDYLVQTVEEEALIKNNNTCKDFLIEAMKYHLLPLDQRLLIKNPRTKPRTPVSLPKVMIVVGGQAPKAIRSVECYDFEEDRWDQIAELPSRRCRAGVVFMAGHVYAVGGFNGSLRVRTVDVYDGVKDQWTSIASMQERRSTLGAAVLNDLLYAVGGFDGSTGLASVEAYSYKTNEWFFVAPMNTRQSSVGVGVVEGKLYAVGGYDGASRQCLSTVEQYNPATNEWIYVADMSTRRSGAGVGVLSGQLYATGGHDGPLVRKSVEVYDPGTNTWKQVADMNMCRRNAGVCAVNGLLYVVGGDDGSCNLASVEYYNPVTDKWTLLPTNMSTGRSYAGVAVIHKSL

SEQ ID NO: 1127 - DNA, 2983 bp, Homo sapiens
gcccagataggggagcggaggtggcggcggcggcggtagcggtggccttggttgtcttccagtctcctcggctcgccctttagccggcaccgctccccttccctcccccttcctctcttccttccttccctccccttccctttttcccttccccgtcggtgagcggcgggggtggctccagcaacggctgggcccaagctgtgtagaggccttaaccaacgataacggcggcgacggcgaaacctcggagctcgcagggcgggggcaaggcccgggccttggagatggagaattctcagttgtgtaagctgttcatcggcggcctcaatgtgcagacgagtgagtcgggcctgcgcggccactttgaggcctttgggactctgacggactgcgtggtggtggtgaatccccagaccaagcgctcccgttgctttggcttcgtgacctactccaatgtggaggaggcggacgccgccatggccgcctcgccccatgccgtggacggcaacactgtggagctgaagcgggcggtgtcccgggaggattcggcgcggcccggtgcccacgccaaggttaagaagctctttgtcggaggccttaaaggagacgtggctgagggcgacctgatcgagcacttctcgcagtttggcaccgtggaaaaggccgagattattgccgacaagcagtccggcaagaagcgtggattcggcttcgtgtatttccagaatcacgacgcggcagacaaggccgcggtggtcaagttccatccgattcagggccatcgcgtggaggtgaagaaagcagtccccaaggaggatatctactccggtgggggtggaggcggctcccgatcctcccggggcggccgaggcggccgggggcgcggcggtggtcgagaccagaacggcctttccaagggcggcggcggcggttacaacagctacggtggttacggcggcggcggaggcggcggctacaatgcctacggaggcggcggcggcggttcgtcctacggtgggagcgactacggtaacggcttcggcggcttcggcagctacagccagcatcagtcctcctatgggcccatgaagagcggcggcggcggcggcggtggaggcagtagctggggcggtcgcagtaatagtggaccttacagaggcggctatggcggtgggggtggctatggaggcagctccttctaaaagaaaatttaaaatgcctgggagtggctataggggtagctctttccaacagcccaagtggggtcaactcctaagccccaccccctcacacacaccgccttccctgttttgcccttgggggagccacttctaaggctgcttacccttgggggtgttcctctatttgcctgccacctctcttgtctctccctctgaagatggactcggccccacatacacatttttgtgttacagtcattgatggactctatttttttattattacttggaccttggtcgtttttatactagcaaaatgtcttgttttaatttgtgttttttggggggagggagggagtgaacttgctgattctgtagcaaaacctgggtgggggttggggtggggggtagtttactttgttgtaaggacttgataacctggctacagcgttttctatgaaatctacttggatcccatgcctgaaatttggaagcatatgtacaaaaatcatttttacgttttatttttaataaatcattgtgtttgaccgtacatgtctaacattttttttctaggatccattccgtaccgttttttaagggatatttgtttaagactttacgtgttaattctttattcttgatgtgtacttagagaaacttaagaggtcctgtggtttttttcccctctcctgttgccctgctagttgcgtgttgaattatatcccttacaggcaaaacttttgaagtggtggatgtggctttttaaactcttaagtttctgtgcatccatctcttgtactaagcgaattgtttatcatcttgacatggttggtcatttctatgacaatttacttcaaactgtgtactgtgtagttctatatagtttgtgttaagcatgtcattcatataaactgtttaaaatttttcagatggcctagtttcatccctcttactggtttgtctgtaatgaatggttaaaaataagggttatattttaccctcaaatgcgtttttgtactttcagagcaggtttaaacgttttttttttttttttcctatatccgaactgttggcctcatggaaatccctttcccgatctttgtagcaccatctactggcagaatggcagagtagctgcgaaacaatttgtttaaaaacttgcttaagacaattgcatcagatttggaagttttgccatcaaaattctttgcagaattggaagttaacacatttgcttgtaactgagatgggcttcacaggaatgtagttgccagttcatatcacaatagccctttctatatgaggtttgaaaatgtaaactgctatgcatagcttgggcaatagccctaaattgctatgacaactaatgaaccagctacgtatactggtattttaggtgcaagttgtaaagcaaaatatctgtgtattctgcttggttaacaaatgtatatttgtagccctttcctgcaatagcattcaagttgttgtttataagagaagaacaaaagtgataataggtgaaaattgcctttctggatagaaatagagaatagcaacgtttatggatatcacaaataaagaattcaattctttacatgattgagtgagagtatgtataacctggtgggtgggttcagagtaccttttaatctagtatgcttaacttgatgttaatatttaacttaaatatttgacttacatgttgacgttgaaggctcaaagctatactaagaagctttctgaaagattgggctttaaaataaaataatattttaatattgaaaaaaaaaaaaaaaaaa

SEQ ID NO: 1128 - protein, 305 aa, Homo sapiens
MENSQLCKLFIGGLNVQTSESGLRGHFEAFGTLTDCVVVVNPQTKRSRCFGFVTYSNVEEADAAMAASPHAVDGNTVELKRAVSREDSARPGAHAKVKKLFVGGLKGDVAEGDLIEHFSQFGTVEKAEIIADKQSGKKRGFGFVYFQNHDAADKAAVVKFHPIQGHRVEVKKAVPKEDIYSGGGGGGSRSSRGGRGGRGRGGGRDQNGLSKGGGGGYNSYGGYGGGGGGGYNAYGGGGGGSSYGGSDYGNGFGGFGSYSQHQSSYGPMKSGGGGGGGGSSWGGRSNSGPYRGGYGGGGGYGGSSF

SEQ ID NO: 1129 - DNA, 1957 bp, Homo sapiens
ttgatagggatagaaacacatttggctgcttctatagttaacaagatgctgttacattccttgcctcactagctctgaagactatactagcgggacaaagaaagcacctgagatgagctgagaggagggtaaaggtacacagagatcccctggatatttgttctatgtcctctcaggggctttgctaccactagagaattatccatattaagaacttgcattgatattctgggttctgtttcattttttagggtctcaagagcacgctcaagtcattcacatgtttccatcaaatacagacacagatcagggaagattaaaccctactaatttctcgtcggatgcctcacaacaaggtgccttccaagaactaatggccaaaatatccacccacaacacaaataagcttagaaaatctcttcttacaatcctgacacaatggaagtttccctaaaccacccagcatctaatacaaccagcacaaagaacaacaactcggcatttttttactttgagtcctgtcaacctccttctccagctttactcctattatgcatagcctatactgtggtcttaattgtgggcctttttggaaacctctctctcatcatcatcatctttaagaagcagagaaaagctcagaatttcaccagcatactgattgccaatctctccctctctgataccttggtgtgtgtcatgtgcatccattttactatcatctacactctgatggaccactggatatttggggataccatgtgcagactcacatcctatgtgcagagtgtctcaatctctgtgtccatattctcacttgtattcactgctgtcgaaagatatcagctaattgtgaacccccgtggctggaagcccagtgtgactcatgcctactggggcatcacactgatttggctgttttcccttctgctgtctattcccttcttcctgtcctaccacctcactgatgagcccttccgcaacctctctctccccactgacctctacacccaccaggtggcctgtgtggagaactggccctccaaaaaggaccggctgctcttcaccacctccctttttctgctgcagtattttgttcctctaggcttcatcctcatctgctacttgaagattgttatctgcctccgcaggagaaatgcaaaggtagataagaagaaggaaaatgagggccggctcaatgagaacaagaggatcaacacaatgttgatttccatcgtggtgacctttggagcctgctggctgccccgaatatcttcaatgtcatctttgactggtatcatgaggtgctgatgagctgccaccacgacctggtatttgtagtttgccacttggttgctatggtttccacatgtataaaccctctcttttatggctttctcaacaaaaatttccaaaaggacctggtagtgcttattcaccactgctggtgcttcacacctcaggaaagatgtgaaaatattgccatctccactatgcacacagactccaagaggtctttaagattggctcgtataacaacaggtatatgaaaattgataatgctgaagctcttcttgaatgggagctggacaggtaatggtgggaatagggcaagatgcagaaagaagaaaccagaaccaaaaatagcaactttatacccacttttcctttaggctaagactgcctgtctcatatgtctatccaacacaccctccaacatacacgaacacacataccaccccttttctcttaagaaaataactctaataattcaaacaacctgcccgccatcatttgtggcaaagaatgagaatgagaaagcagagagagaggcaaacagcagtgatggctggggaacaatgttcacagatacttttattcaatggaatatctacaaaagttatgactaatgatatgcctagtaaaaacactgctatacctccttagcactgagaat

SEQ ID NO: 1130 - DNA, 2244 bp, Homo sapiens
gggaaggagatgcctcttccttcccttcaatagtgggttaaacccagctggcaccctctggaactacgggaacaatattcttcaagagaaggtcactctaccaaagccaggagcacagtattctcaggatctcaacaaggaagagcagaccaaggttgcttctgattccttacaaccttccgtaattccaggcttgtggccccaaattcagggccccacccttccaggaacaaatcattatagtaataatttgccttcatcttccatataccaactaagcatgtttaactacgaacgtccaaaacacttcatccagtcccaaaacccatgtggctccagattgcagcctcctggaccagaaacctccagcttctctagccagaccaaacagtcttccattatcatccagccccgccagtgtacagagcaaagattttctgcctcctcaacactgagctctcacatcaccatgtcctcctctgctttccctgcttctccccagcagcatgctggctccaacccaggccaaagggttacaaccacctataaccagtccccagccagcttcctcagctccatattaccatcacagcctgattacaatagcagtaaaatcccttccgctatggattccaactatcaacagtcctcagctggccaacctataaatgcaaagccatcccaaactgcaaatgctaagcccataccaagaactcctgatcatgaaatacaaggatcaaaagaagctttgattcaagatttggaaagaaagctgaaatgcaaggacacccttcttcataatggaaatcaacgtctaacatatgaagagaagatggctcgcagattgctaggaccacagaatgcagctgctgtgtttcaagctcaggatgacagtggtgcacaagactcgcagcaacacaactcagaacatgcgcgactgcaagttcctacatcacaagtaagaagtagatcaacctcaaggggagatgtgaatgatcaggatgcaatccaggagaaattttacccaccacgtttcattcaagtgccagagaacatgtcgattgatgaaggaagattctgcagaatggacttcaaagtgagtggactgccagctcctgatgtgtcatggtatctaaatggaagaacagttcaatcagatgatttgcacaaaatgatagtgtctgagaagggtcttcattcactcatctttgaagtagtcagagcttcagatgcaggggcttatgcatgtgttgccaagaatagagcaggagaagccaccttcactgtgcagctggatgtccttgcaaaagaacataaaagagcaccaatgtttatctacaaaccacagagcaaaaaagttttagagggagattcagtgaaactagaatgccagatctcggctatacctccaccaaagcttttctggaaaagaaataatgaaatggtacaattcaacactgaccgaataagcttatatcaagataacactggaagagttactttactgataaaagatgtaaacaagaaagatgctgggtggtatactgtgtcagcagttaatgaagctggagtgactacatgtaacacaagattagacgttacggcacgtccaaaccaaactcttccagctcctaagcagttacgggttcgaccaacattcagcaaatatttagcacttaatgggaaaggtttgaatgtaaaacaagcttttaacccagaaggagaatttcagcgtttggcagctcaatctggactctatgaaagtgaagaactttaataactttaccaacattggaaaacagccaactacaccattagtaatatatttgattacatttttttgaaattaatccatagctgtattaacagattatggttttaattaggtaatatagttaatatatatttataatattatttatcctttgactcttgcacattctatgtacccctccgatttgtgaagcctacaggaaatctgggtatatggatttgtaactgcagaagactatcttaaaatacaggattttaacatttaagtcatgcacatttaacaattacaggttataaattagtatcaactttttaaacacatctaatgcttgtaataacgtttactggtactgctttctaaatactgttttacccgttttctcttgtaggaatactaacatggtatagattatctgagtgttccacagttgtatgtcaaaagaaaataaaattcaaatatttaaaacggac

SEQ ID NO: 1131 - protein, 498 aa, Homo sapiens
MFNYERPKHFIQSQNPCGSRLQPPGPETSSFSSQTKQSSIIIQPRQCTEQRFSASSTLSSHITMSSSAFPASPQQHAGSNPGQRVTTTYNQSPASFLSSILPSQPDYNSSKIPSAMDSNYQQSSAGQPINAKPSQTANAKPIPRTPDHEIQGSKEALIQDLERKLKCKDTLLHNGNQRLTYEEKMARRLLGPQNAAAVFQAQDDSGAQDSQQHNSEHARLQVPTSQVRSRSTSRGDVNDQDAIQEKFYPPRFIQVPENMSIDEGRFCRMDFKVSGLPAPDVSWYLNGRTVQSDDLHKMIVSEKGLHSLIFEVVRASDAGAYACVAKNRAGEATFTVQLDVLAKEHKRAPMFIYKPQSKKVLEGDSVKLECQISAIPPPKLFWKRNNEMVQFNTDRISLYQDNTGRVTLLIKDVNKKDAGWYTVSAVNEAGVTTCNTRLDVTARPNQTLPAPKQLRVRPTFSKYLALNGKGLNVKQAFNPEGEFQRLAAQSGLYESEEL

SEQ ID NO: 1132 - DNA, 2205 bp, Homo sapiens
gggcggtgtagtgcaggtccgccatggctgaggcgtcacggtggcaccgaggcggggcttcgaaacataagttgcattacagaaaggaagtagaaattacaaccacacttcaggaattgttactctactttatttttttaataaacctatgtatattgacttttgggatggtaaacccacatatgtattacttaaacaaggttatgtcatctctatttttggacacttctgtgcctggtgaagaaagaaccaactttaagtccattcgcagcataactgatttttggaagtttatggaaggaccccttttggaaggtctgtactgggattcatggtacaataaccagcagctgtataatttaaagaacagcagtcgcatctactatgaaaatatacttctaggagttcccagagttcgtcaactaaaagtccgcaacaacacatgcaaagtctattcatcttttcagtctttgatgagtgaatgttatggcaaatatacttctgcaaatgaagacctctctaattttggccttcaaattaatactgaatggagatattctacttctaataccaactccccttggcactggggatttcttggtgtttaccgaaatgggggatacattttcactttatcaaaatcgaaatctgaaaccaaaaacaagttcattgaccttcgactgaacagctggatcacaagagggactagagttatttttattgatttttccttatataatgctaatgtaaatctattttgtattatcagattggtggcagaattccctgcaactggaggaatacttacttcatggcagttttactctgtgaagctcctcagatatgttagctactatgactattttattgcttcctgtgaaatcacattctgtatttttctttttgtcttcacaacacaagaagtcaaaaaaataaaagaatttaagtctgcctatttcaaaagtatttggaactggctagaattgctacttttgctgttgtgttttgtggctgtttccttcaacacatactataatgtacaaatttttctcttacttggacagctgttgaaaagtactgaaaaatattcagatttctattttcttgcatgctggcacatttattacaataatataattgctattaccatcttttttgcatggataaagatattcaaattcataagctttaacaagacaatgtctcagctgtcatcaaccttgtcccgttgtgttaaagacatagtaggatttgccatcatgttttttataatattctttgcttatgcccagttaggatttcttgtttttggatcacaagttgatgacttttccacttttcagaattccatatttgcacaatttcgaattgttcttggagattttaattttgctggtattcagcaagccaatcctatcttgggacccatttacttcatcactttcatcttttttgtgttctttgtcctgctgaatatgttcttggcaattattaatgatacctattctgaagtgaaagctgactattcaataggcagaaggccagattttgaacttggcaaaatgattaaacagagttacaaaaatgttctcgagaaattcagactgaagaaagctcaaaaagatgaagacaagaaaaccaaaggcagcggagatttggctgaacaagccagaagagaaggctttgacgaaaatgagattcaaaacgcagagcagatgaaaaaatggaaagagaggcttgagaaaaagtattattctatggaaattcaagatgactaccagcctgtcactcaagaagaatttcgagatggcaccacaaccaagtacaaaatgagattctctctgagtgcctgacaaaacgaatttaagtaccagccaagtacacacgatgatagcttcaaggaatacaactgactttatgatatgaattttcaaggaacgtatcttatatggattttgaagaatcttgtttgcttataagaacttcaagaagcctaagcttggctttaattttcttgtactctctgtactcctcaagcactggaacacgatcctctttctgggcattcctaggggagaaaataaaatttgtaatgttctagagatcatttggaaaaaaagatccaaaagttgtcttaatatgagacatactgttactaaacataagttcaaataaaaagttgttctgaaaaaaaaaaaaaaaaaa

SEQ ID NO: 1133 - protein, 609 aa, Homo sapiens
MAEASRWHRGGASKHKLHYRKEVEITTTLQELLLYFIFLINLCILTFGMVNPHMYYLNKVMSSLFLDTSVPGEERTNFKSIRSITDFWKFMEGPLLEGLYWDSWYNNQQLYNLKNSSRIYYENILLGVPRVRQLKVRNNTCKVYSSFQSLMSECYGKYTSANEDLSNFGLQINTEWRYSTSNTNSPWHWGFLGVYRNGGYIFTLSKSKSETKNKFIDLRLNSWITRGTRVIFIDFSLYNANVNLFCIIRLVAEFPATGGILTSWQFYSVKLLRYVSYYDYFIASCEITFCIFLFVFTTQEVKKIKEFKSAYFKSIWNWLELLLLLLCFVAVSFNTYYNVQIFLLLGQLLKSTEKYSDFYFLACWHIYYNNIIAITIFFAWIKIFKFISFNKTMSQLSSTLSRCVKDIVGFAIMFFIIFFAYAQLGFLVFGSQVDDFSTFQNSIFAQFRIVLGDFNFAGIQQANPILGPIYFITFIFFVFFVLLNMFLAIINDTYSEVKADYSIGRRPDFELGKMIKQSYKNVLEKFRLKKAQKDEDKKTKGSGDLAEQARREGFDENEIQNAEQMKKWKERLEKKYYSMEIQDDYQPVTQEEFRDGTTTKYKMRFSLSA

SEQ ID NO: 1134 - DNA, 5470 bp, Homo sapiens
ccgcctctgtcgccactctctccccctgttccgcgtctgcgtcgccaccaccgccgggggtatccggggggtcgcttaccgggctggccccgcgccacagccgtagctttaacctccccgtcagcggccgccccaggaagaggcttctcggccgcggagccacttggggcctcagttctcgccctcttgccgtcgccgcgggtcctggagaagcggccgcggccagggaacggggcatcgcggttccaacgattaactgctgaagtactgatcgagttctgcatttcttcaatgaggaactacaggctgatcttctgccataatctcaaacagccataaatgacaaaagaatgcttgctcagtgagggtagctggtgcagaagccattttttaaacttaggtatttaagtactgaaagaaaagacagctttgatttctggctgcaaaaaagatatgaggaagagctcctccccttccttgagtaactgcaactccgttcttgctaacaaaatatttggaattccacttgatgagctgcagcagggaggacatccagacattgaggttccattcatagtccgccacgttgtggactatattgaggaacatggaggtctggagcaacaaggactttttcaagtcaatggaaatgctgagacagtggagtggcttcggcagagatacgacagcggagaagaggtggatttggttaaggaagcagatgttccctcagctattagccttcttagattttttcttcaagaacttcctgaacctgttatccctggcagtttacatattcacttgatgcagctttctcaagattataataatgaagatgaatttggaagaaagttgaggttcctcttgcaacagcttccacctgttaattatagtttgttaaagtttctgtgtagatttttagccaatgtagcatcacatcatgaagaaatttggtctgcaaattctttggctgctgtctttggtccagatgtcttccacatttacacagatgtggaagacatgaaagagcaagaaatagtgagcaggataatggctggacttctggaaaactactatgagttttttgagaatgaagaggaagatttttcatctaatgatttgagttcaattactgaacaggttaatgaactttctgaggaagaagaggaagatgaaaagctggaacatattgaagaacttccagaagagggtgcagaaaaatcaaatgacatgccagaggtggtacaattaaggatgactgaaaacatcctggaatcaaatagtgttacggcaacaagcacccatatatctcccatcagcatcctaccagcctctacagatattttagaaagaacaattagagcagctgtggaacagcacctttttgatcttcagagcagcatagatcatgatcttaagaatttacaacagcaaagtgtggtgtgtaataatgaagcagaaagtattcattgtgatggggaaggatctaataaccagattgatattgctgatgatattattaatgccagtgaaagtaacagagactgttcaaaacctgtggctagcactaatttagacaatgaagctatgcagcaagattgtgtatttgagaatgaagaaaatacccagtctgtaggtatattgttagagccatgcagtgaccgtggtgatagtgaagatggctgtcttgagagggaagaatatttgttatttgacagtgataaattgtcacacttgattctggattctagtagcaagatatgtgatttgaatgccaacactgaatcagaagtaccaggaggtcagagtgttggtgttcaaggggaagcagcgtgtgtcagtattccacatttagatctgaagaatgtttctgatggtgataaatgggaagagccatttcctgcttttaagtcttggcaggaggactctgagtctggagaagctcagctgtctccacaagctggaagaatgaatcatcaccccttggaagaggactgtcctccagtattatcacaccgcagtttagattttggtcaaagccagcgtttcctacatgatccagaaaagttggattcctcatctaaagcactgtcttttactagaattcgaagatcatcctttagttcaaaagatgaaaagagagaggacagaacaccttatcagctggtcaagaaacttcagaagaaaatcagacaatttgaggaacagtttgaaagggaaagaaatagcaagccctcctacagtgatattgctgccaatccaaaggtattaaaatggatgacagagcttacaaaactgcggaagcaaattaaagatgcaaaacacaaaaattctgatggagaatttgtacctcagacacgtccacgtagtaacacacttccaaaaagctttggctcttctctagaccatgaagatgaagagaatgaagatgaacccaaggtcattcagaaggagaaaaaaccatctaaagaagcaacccttgaacttattcttaaaagactgaaagaaaaacgtattgagaggtgtcttccagaagatatcaagaaaatgaccaaagatcatttggtagaagagaaagcttctcttcagaaaagtcttctttactatgaaagtcaacatggaaggccggtgaccaaggaagaaaggcacattgttaaacctctctatgatagatacaggcttgtaaaacaaatgctgacaagagctagcatcactcctgtccttggatctccatccaccaagcgaaggggtcagatgttacagccaatcatagaaggagaaactgcacatttttttgaagaaatcaaggaggaagaagaagatggtgttaatctgtcctctgagttaggtgatatgttgaaaactgcagtacaggtacagtcttcattagaaaactctgaatctgatgttgaagaaaatcaagaaaaactggctctggatctccgattgtcaagttctcgagcagcttctatgcctgaattattggaacaactttggaaagccagagctgaaaaaaagaaactacgcaaaacgttgcgggaatttgaagaagcattttatcaacaaaatggaaggaatgcccagaaagaggatcgtgttccagtgcttgaggagtacagagagtacaagaaaattaaagccaagcttaggcttcttgaagttcttataagcaaacaagattcttcaaaatccatataagatacgttccttgaaaattcatatcataaagtcagttgtattccttgaagctatcatcgtgtgtacttggctggtacttaaattcgttttgtcaggcactcagagaatctcattttgtacttggttgtggtgccactaaacaaaacaaatgatgggagagtaagtaggccctctcaagggagcgtaagtgatgttccatattaaccacagactgtcctctccacctttagcaaacatatggtttacttcattgttttgtactacagatacatccttttagcaaaagactggaattttatcctttcaacttcaagaactttggaaatgcaagctttttgttattaccaactttttgtttctcattactgaagaaaattggaggaaaatcttcatactgaattcttctgttgcctttttcttacagaatgactgaaaatttgaaagaaaagcctataaaagtgcacatacgcaactgtgttctctgttttcctagaaaaccaaaatcaaactgagatttcaagtcgtactatggaacacctttctgtttaattcccaaagtgacatcttctcacaggtagtatgttagtaaaattttgcaattcgctggtcacacagctcccggatgaagataacagttggtagaccaaaaggtgacctcgcttagtatattgaaaacacacaccacacatcacacacagaactgaatcataccacatgctgcctatgggacttcagttactgtttcctgagttactgtttatccgctggcaatggtgtgatttgtctggatcagatccgcgctattccccaacccacctccagataatgtgagaaaatagccatgtcagtatgtaggaactctgatggtgctcagatttgtgtgttcaatcaatgggcttaaatcagcaaaatattatgcctaaagtaaatctgttcttaacaagggctctaccactgcattttcacatgtaccttcagggggttatctttttttttttcccctcctattttaatcagcaaaatccataccaaaacaacgacaacaacgccctcttaagggaccaccctttggtcaatcataacatgctgtttaaagcagctgtttacaggatgtgtagtggtatgccccttgtcatatactcttagcatatctttttttcctttggctttgcatggcttttcttcaggtactgtctcggtatcattctgctaatcattgttacagaatggtgacttcatttgtgctaacagtacaacagcagatttgggtcaggcttaatctaagtgttaacttttttttctggtgcttttttggattgatgactgtctcactttgactatacccatgttttgcatgcaatgactcatgcatggttttcttaactagctaatattaacaatttattccatataaaaatggaattttgcaacatcctttaataaggtgagggaagcatgaacctcagacttctggcactattacatagtaagcacatgaagtagtttgataataaatagcagttctagtacttcacatttcacccgtgtgtgcaatgcctttttctggggggtggggggtgagggaaaacctggtagtgaatgtgtagttggggaataaagaaaagcactaaatcctgccctttttgtgtggtttccttttgatacaactaggttattcataatgtatacctagaaaagtgaaattgaaaataccaaaagatgtatcatttttatttgaatccatcatgcagtgtacatttcagataatttccttcagtctccagataggagtgtatccaaacatctaattttatgtgcactgtgtatcttatatgaatgttttattttttataccacatgcaaaaatgtccatatgcactatttaaatgttttaaataatatattccttctttataatgctaaatctatatgagtaccatatttttataagtcagtggtctgactggtttcattttagaattaacagctgcttcaatatgttattcaatgttaatgtttggctgtgagtagaatatgtaaaagtggcatggcagcacttatgctctgtgacagtattgtgtgtcatagttgagcagtagctggtagaattaggcagttggtgatagttttactttggtacaaataaaaactgtatatctatatacaaataatatatagatatatatgtccaccagtataatggcattgctgtgtctggcacttcattgtacagacttttataataaaagaacttgaaagttctaaaaaa

SEQ ID NO: 1135 - protein, 915 aa, Homo sapiens
MRKSSSPSLSNCNSVLANKIFGIPLDELQQGGHPDIEVPFIVRHVVDYIEEHGGLEQQGLFQVNGNAETVEWLRQRYDSGEEVDLVKEADVPSAISLLRFFLQELPEPVIPGSLHIHLMQLSQDYNNEDEFGRKLRFLLQQLPPVNYSLLKFLCRFLANVASHHEEIWSANSLAAVFGPDVFHIYTDVEDMKEQEIVSRIMAGLLENYYEFFENEEEDFSSNDLSSITEQVNELSEEEEEDEKLEHIEELPEEGAEKSNDMPEVVQLRMTENILESNSVTATSTHISPISILPASTDILERTIRAAVEQHLFDLQSSIDHDLKNLQQQSVVCNNEAESIHCDGEGSNNQIDIADDIINASESNRDCSKPVASTNLDNEAMQQDCVFENEENTQSVGILLEPCSDRGDSEDGCLEREEYLLFDSDKLSHLILDSSSKICDLNANTESEVPGGQSVGVQGEAACVSIPHLDLKNVSDGDKWEEPFPAFKSWQEDSESGEAQLSPQAGRMNHHPLEEDCPPVLSHRSLDFGQSQRFLHDPEKLDSSSKALSFTRIRRSSFSSKDEKREDRTPYQLVKKLQKKIRQFEEQFERERNSKPSYSDIAANPKVLKWMTELTKLRKQIKDAKHKNSDGEFVPQTRPRSNTLPKSFGSSLDHEDEENEDEPKVIQKEKKPSKEATLELILKRLKEKRIERCLPEDIKKMTKDHLVEEKASLQKSLLYYESQHGRPVTKEERHIVKPLYDRYRLVKQMLTRASITPVLGSPSTKRRGQMLQPIIEGETAHFFEEIKEEEEDGVNLSSELGDMLKTAVQVQSSLENSESDVEENQEKLALDLRLSSSRAASMPELLEQLWKARAEKKKLRKTLREFEEAFYQQNGRNAQKEDRVPVLEEYREYKKIKAKLRLLEVLISKQDSSKSI

SEQ ID NO: 1136 - DNA, 1498 bp, Homo sapiens
gggcgatggggaacctgtttatgctctgggcagctctgggcatatgctgtgctgcattcagtgcctctgcctggtcagtgaacaatttcctgataacaggtcccaaggcctatctgacctacacgactagtgtggccttgggtgcccagagtggcatcgaggagtgcaagttccagtttgcttgggaacgctggaactgccctgaaaatgctcttcagctctccacccacaacaggctgagaagtgctaccagagagacttccttcatacatgctatcagctctgctggagtcatgtacatcatcaccaagaactgtagcatgggtgacttcgaaaactgtggctgtgatgggtcaaacaatggaaaaacaggaggccatggctggatctggggaggctgcagcgacaatgtggaatttggggaaaggatctccaaactctttgtggacagtttggagaaggggaaggatgccagagccctgatgaatcttcacaacaacagggccggcagactggcagtgagagccaccatgaaaaggacatgcaaatgtcatggcatctctgggagctgcagcatacagacatgctggctgcagctggctgaattccgggagatgggagactacctaaaggccaagtatgaccaggcgctgaaaattgaaatggataagcggcagctgagagctgggaacagcgccgagggccactgggtgcccgctgaggccttccttcctagcgcagaggcggaactgatctttttagaggaatcaccagattactgtacctgcaattccagcctgggcatctatggcacagagggtcgtgagtgcctacagaacagccacaacacatccaggtgggagcgacgtagctgtgggcgcctgtgcactgagtgtgggctgcaggtggaagagaggaaaactgaggtcataagcagctgtaactgcaaattccagtggtgctgtacggtcaagtgtgaccagtgtaggcatgtggtgagcaagtattactgcgcacgctccccaggcagtgcccagtccctgggtaagggcagtgcctgataataccccacacaagttcacttgattaattgcatcagtggaaggggacatagcttctctcttagagagaacagattggaaagcaatcggaaaattgcagttttggtctgtagtcctcatgatatctgctatcagtggggaaaatggaggcccaagattctacagcatattcctggcggggctgaaattggaacctgggcctcctgactttggcagacccccatttcatctttcctgcaaactactttcccatctttgtgcctgtacttatgcagctttctacagggagagtttggtttggggtctatatctagagggaccttcaaagtatttgttcctttaaatttcagaccatgtccaacccagctgtgctgctgggaatcaggagaatagaagcaaaaaacgaaagagttctgttcagacttctgaagagcagc

SEQ ID NO: 1137 - protein, 351 aa, Homo sapiens
MGNLFMLWAALGICCAAFSASAWSVNNFLITGPKAYLTYTTSVALGAQSGIEECKFQFAWERWNCPENALQLSTHNRLRSATRETSFIHAISSAGVMYIITKNCSMGDFENCGCDGSNNGKTGGHGWIWGGCSDNVEFGERISKLFVDSLEKGKDARALMNLHNNRAGRLAVRATMKRTCKCHGISGSCSIQTCWLQLAEFREMGDYLKAKYDQALKIEMDKRQLRAGNSAEGHWVPAEAFLPSAEAELIFLEESPDYCTCNSSLGIYGTEGRECLQNSHNTSRWERRSCGRLCTECGLQVEERKTEVISSCNCKFQWCCTVKCDQCRHVVSKYYCARSPGSAQSLGKGSA

SEQ ID NO: 1138 - DNA, 1243 bp, Homo sapiens
gcagccaccgtccccacgctggggcttcaggtctcctagcaacaagttgtaccatatgaggacggccgctgagccataatggagatatcaatgcctccacctcagatatatgtagaaaaaactctggccattatcaaaccagatattgttgacaaagaggaggagatacaagatattattcttagatccggattcaccattgttcagagaagaaaactacgcctcagccctgagcaatgtagtaacttttatgtggaaaagtatggaaaaatgtttttccccaacttaacagcttacatgagttctggaccacttgtcgccatgatattagctagacataaagccatctcttattggttagaacttttgggaccaaataatagcttagtagcgaaggagacacatccagacagtctgagggcaatttatggcacagatgacctaaggaatgcacttcatgggagtaatgactttgctgctgcggaaagagaaatacgttttatgtttcctgaagtgattgttgagcccattccaattggacaagctgctaaggactatttaaatttacatataatgccaactctgcttgaaggactcacagagctttgtaagcaaaaaccagcagatcctttgatttggctagctgattggctgctgaaaaataatcctaacaaacccaaactttgtcaccatccaattgtagaagaaccttattaaaaaaaaaatcctcgaaagaacaaatcatgaactatcttattataaaaggctgtacttctactgtttgaaaaaattatttctagggtttaagtaactacaagtaaaataaatttatttcttaaaaataagtgttaaaggaataactattctatgaagcagataacattaaggtaaaatataggcttagagtatgattttaacaatgatgtaacactaggtaatggaaaactcatgtaagatgttgctagatgtttttgtttttcttaagtttgagaagtaagacataaagtttagttatacattttcccaagcacatatcctatatctaaatacataattaatgcacagttgagacagtctagtttaaaaggcttaggtccttttgtagtccataagcatggtgatttggtttcatgctcatgtgtcagatatgcttccctcaaaccttgttacagcatcatcacattacctgtttgatgtaaaaaataaaaaatagaaaggtgtaagtaaaaaaaaaaaaaaaaaa

SEQ ID NO: 1139 - protein, 212 aa, Homo sapiens
MEISMPPPQIYVEKTLAIIKPDIVDKEEEIQDIILRSGFTIVQRRKLRLSPEQCSNFYVEKYGKMFFPNLTAYMSSGPLVAMILARHKAISYWLELLGPNNSLVAKETHPDSLRAIYGTDDLRNALHGSNDFAAAEREIRFMFPEVIVEPIPIGQAAKDYLNLHIMPTLLEGLTELCKQKPADPLIWLADWLLKNNPNKPKLCHHPIVEEPY

SEQ ID NO: 1140 - DNA, 3253 bp, Homo sapiens
gggtttcggcccttccagaccgtctctcctcagggttggagacttcggggccaagatggcgacgggaacgggcaaacacaagctgctaagcactggccccacagagccatggtccatccgagagaagctatgtttagcatcttctgtcatgagaagtggcgatcaaaattgggtatcagttagcagagcaatcaagccctttgcagaacctggccgccctccagactggttctctcaaaaacattgtgcttcccagtactcggagcttttagagaccactgagacaccaaaacggaaacgaggtgaaaagggagaagtggtggaaactgttgaagatgttattgttcggaaattgactgctgagcgagttgaagaactaaagaaagtgataaaggaaacccaggagagatatagacggctaaagagagatgcagaactaattcaagctggacacatggacagcagactggatgagctttgcaatgacattgcaacgaaaaagaaattggaagaagaggaggctgaagtaaagaggaaggctacagatgctgcataccaggctcgtcaagcagtaaaaacacccccccggaggttacccactgtgatggttcgctctcctatagattctgcctccccaggaggtgattatccacttggggacttgactccaaccactatggaagaggctacctctggggtaacccccgggactttgccgagtaccccagtcacctcgtttcctgggattcctgacacccttcctccaggctctgcacccttagaagcccccatgaccccagtaacagatgattcaccccagaaaaagatgcttggacagaaagcaactccacccccctcccctctgctgtcagagctcttgaagaagggcagcctcctgcctactagccccagactggtcaatgagagtgaaatggctgtggcttctggccacctgaacagtacaggtgtcctcctggaggtaggcggggtccttcccatgatacatggtggggagatacagcaaacacccaatactgttgcagcctcccctgctgcatcaggtgctcccactctttcccggcttttagaagctggtcctacacagttcaccacacctcttgcttccttcactactgttgccagtgagcctccagttaaacttgtgccaccccctgtagagtctgtgtcccaagctaccattgtcatgatgcctgcgctgccagcaccatcctctgctccggctgtctccactactgaaagtgtagctccagtgagtcaacccgacaactgtgttcccatggaggctgtgggggatccacatactgtgactgtttccatggacagcagtgaaatatccatgatcatcaattctatcaaagaagagtgttttcgatcaggggtagcagaggctcctgttggatcaaaggctcccagcatagatgggaaggaagaattagatctggctgagaagatggatattgctgtgtcttacacaggtgaagagctggattttgagactgttggagacatcattgccatcattgaggacaaggtagatgatcatcctgaagtgctggatgtggcagcagtggaagcagcactgtcattttgtgaagaaaatgatgatcctcagtccctgcctggcccctgggagcatcctatccagcaggagcgggacaagccagtacctctccctgcaccagaaatgacggtcaagcaagagagactggactttgaggaaacggaaaacaagggaatacatgaactggtggacatcagggagcccagtgcagagatcaaggtggaacctgcagaaccagagccagtcatttcaggagccgaaatagtagctggagttgttccagccacaagtatggagccaccagaactcaggagtcaggacttagatgaggaactgggaagtactgcagctggagagattgttgaagcagatgttgccattgggaaaggcgatgagactccacttacaaatgtgaagacagaggcatcccctgaaagcatgttgtctccatcacatggctcaaatcccattgaagatcctttagaggcagagactcagcacaagtttgaaatgtcagactcattgaaagaagaatcagggactatttttggaagccagataaaggatgccccaggtgaggatgaggaggaagatggtgtcagtgaagcggccagcctagaggagcctaaggaagaggatcaaggagaaggctacttgtcagaaatggataatgaacctcctgtgagcgagagtgatgatggcttcagcatacacaatgctacactgcagtcacacacactggcagactccatccccagcagccctgcttcttcacagttctctgtctgtagtgaggatcaggaagctattcaggcacagaaaatttggaagaaagccatcatgcttgtatggagagctgcagctaatcataggtatgccaatgtcttcctgcagcctgttacagatgacatagcacctggctaccacagcattgtgcagaggcctatggatttgtcaactattaagaaaaacatagaaaatggactgatccgaagcacagctgaatttcagcgtgacattatgctgatgtttcagaatgctgtaatgtacaatagctcagaccatgatgtctatcacatggcagtggagatgcagcgagatgtcttggaacagatccagcaattcttggccacgcagttgattatgcaaacatccgagtctgggatcagtgctaaaagtcttcgagggagagattctacccgcaaacaggatgcttcagagaaggacagtgtcccaatgggctctcctgccttccttctctctctctttgatggaggaaccaggggacgccgctgtgccattgaagcagatatgaagatgaaaaagtgaagcctcagagttaccctctttgagccgaacctaaaataaaagtaaacaagatagagcttgggcttgcgggcccagttccagaggtggaagttacagaagaggaggtacctgggccacacgacatgagctggaaaatctctcttagagagttggagtagcacaattgcctgttttagggcagaaaccatgggctatgttaatgtcctaatgtgtagctagcagatcgtagctagtttgtattgtcttgtcaattgtacagactttttaaaaaaaacaaccaccagtgaaatgtgtgtgtatacaataaactgaaaaaaaaaactaaaaaaaaaaaaaaaaaaa

SEQ ID NO: 1141 - protein, 951 aa, Homo sapiens
MATGTGKHKLLSTGPTEPWSIREKLCLASSVMRSGDQNWVSVSRAIKPFAEPGRPPDWFSQKHCASQYSELLETTETPKRKRGEKGEVVETVEDVIVRKLTAERVEELKKVIKETQERYRRLKRDAELIQAGHMDSRLDELCNDIATKKKLEEEEAEVKRKATDAAYQARQAVKTPPRRLPTVMVRSPIDSASPGGDYPLGDLTPTTMEEATSGVTPGTLPSTPVTSFPGIPDTLPPGSAPLEAPMTPVTDDSPQKKMLGQKATPPPSPLLSELLKKGSLLPTSPRLVNESEMAVASGHLNSTGVLLEVGGVLPMIHGGEIQQTPNTVAASPAASGAPTLSRLLEAGPTQFTTPLASFTTVASEPPVKLVPPPVESVSQATIVMMPALPAPSSAPAVSTTESVAPVSQPDNCVPMEAVGDPHTVTVSMDSSEISMIINSIKEECFRSGVAEAPVGSKAPSIDGKEELDLAEKMDIAVSYTGEELDFETVGDIIAIIEDKVDDHPEVLDVAAVEAALSFCEENDDPQSLPGPWEHPIQQERDKPVPLPAPEMTVKQERLDFEETENKGIHELVDIREPSAEIKVEPAEPEPVISGAEIVAGVVPATSMEPPELRSQDLDEELGSTAAGEIVEADVAIGKGDETPLTNVKTEASPESMLSPSHGSNPIEDPLEAETQHKFEMSDSLKEESGTIFGSQIKDAPGEDEEEDGVSEAASLEEPKEEDQGEGYLSEMDNEPPVSESDDGFSIHNATLQSHTLADSIPSSPASSQFSVCSEDQEAIQAQKIWKKAIMLVWRAAANHRYANVFLQPVTDDIAPGYHSIVQRPMDLSTIKKNIENGLIRSTAEFQRDIMLMFQNAVMYNSSDHDVYHMAVEMQRDVLEQIQQFLATQLIMQTSESGISAKSLRGRDSTRKQDASEKDSVPMGSPAFLLSLFDGGTRGRRCAIEADMKMKK

SEQ ID NO: 1142 - DNA, 4074 bp, Homo sapiens
gggtttcggcccttccagaccgtctctcctcagggttggagacttcggggccaagatggcgacgggaacgggcaaacacaagctgctaagcactggccccacagagccatggtccatccgagagaagctatgtttagcatcttctgtcatgagaagtggcgatcaaaattgggtatcagttagcagagcaatcaagccctttgcagaacctggccgccctccagactggttctctcaaaaacattgtgcttcccagtactcggagcttttagagaccactgagacaccaaaacggaaacgaggtgaaaagggagaagtggtggaaactgttgaagatgttattgttcggaaattgactgctgagcgagttgaagaactaaagaaagtgataaaggaaacccaggagagatatagacggctaaagagagatgcagaactaattcaagctggacacatggacagcagactggatgagctttgcaatgacattgcaacgaaaaagaaattggaagaagaggaggctgaagtaaagaggaaggctacagatgctgcataccaggctcgtcaagcagtaaaaacacccccccggaggttacccactgtgatggttcgctctcctatagattctgcctccccaggaggtgattatccacttggggacttgactccaaccactatggaagaggctacctctggggtcaatgagagtgaaatggctgtggcttctggccacctgaacagtacaggtgtcctcctggaggtaggcggggtccttcccatgatacatggtggggagatacagcaaacacccaatactgttgcagcctcccctgctgcatcaggtgctcccactctttcccggcttttagaagctggtcctacacagttcaccacacctcttgcttccttcactactgttgccagtgagcctccagttaaacttgtgccaccccctgtagagtctgtgtcccaagctaccattgtcatgatgcctgcgctgccagcaccatcctctgctccggctgtctccactactgaaagtgtagctccagtgagtcaacccgacaactgtgttcccatggaggctgtgggggatccacatactgtgactgtttccatggacagcagtgaaatatccatgatcatcaattctatcaaagaagagtgttttcgatcaggggtagcagaggctcctgttggatcaaaggctcccagcatagatgggaaggaagaattagatctggctgagaagatggatattgctgtgtcttacacaggtgaagagctggattttgagactgttggagacatcattgccatcattgaggacaaggtagatgatcatcctgaagtgctggatgtggcagcagtggaagcagcactgtcattttgtgaagaaaatgatgatcctcagtccctgcctggcccctgggagcatcctatccagcaggagcgggacaagccagtacctctccctgcaccagaaatgacggtcaagcaagagagactggactttgaggaaacggaaaacaagggaatacatgaactggtggacatcagggagcccagtgcagagatcaaggtggaacctgcagaaccagagccagtcatttcaggagccgaaatagtagctggagttgttccagccacaagtatggagccaccagaactcaggagtcaggacttagatgaggaactgggaagtactgcagctggagagattgttgaagcagatgttgccattgggaaaggcgatgagactccacttacaaatgtgaagacagaggcatcccctgaaagcatgttgtctccatcacatggctcaaatcccattgaagatcctttagaggcagagactcagcacaagtttgaaatgtcagactcattgaaagaagaatcagggactatttttggaagccagataaaggatgccccaggtgaggatgaggaggaagatggtgtcagtgaagcggccagcctagaggagcctaaggaagaggatcaaggagaaggctacttgtcagaaatggataatgaacctcctgtgagcgagagtgatgatggcttcagcatacacaatgctacactgcagtcacacacactggcagactccatccccagcagccctgcttcttcacagttctctgtctgtagtgaggatcaggaagctattcaggcacagaaaatttggaagaaagccatcatgcttgtatggagagctgcagctaatcataggtatgccaatgtcttcctgcagcctgttacagatgacatagcacctggctaccacagcattgtgcagaggcctatggatttgtcaactattaagaaaaacatagaaaatggactgatccgaagcacagctgaatttcagcgtgacattatgctgatgtttcagaatgctgtaatgtacaatagctcagaccatgatgtctatcacatggcagtggagatgcagcgagatgtcttggaacagatccagcaattcttggccacgcagttgattatgcaaacatccgagtctgggatcagtgctaaaagtcttcgagggagagattctacccgcaaacaggatgcttcagagaaggacagtgtcccaatgggctctcctgccttccttctctctctctttatgggacacgagtgggtttggctggattctgaacaagatcatcccaatgactctgagttgagcaatgactgcaggtccctcttcagctcatgggactccagtctggatcttgatgtgggcaactggagggaaactgaggatccagaggctgaggaactagaggaaagcagcccggagagagaacctagtgaactgcttgttggggatggaggcagtgaggaatctcaggaagcggcaaggaaagccagccaccagaacctcctccactttctctctgaggtagcttatttaatggagcccttgtgcatcagcagcaacgaatcaagtgaaggctgctgccctccatctggtaccagacaagaaggaagggaaattaaagctagcgaaggagaaagggagctctgcagagagactgaagagctttcagctaaaggagaccccttagtagctgaaaagccactgggagaaaatggaaagccagaggtggcttcagctccctcagttatttgtacagttcagggactactcacagagagtgaagagggggaggctcagcaagaatccaaaggggaggaccagggtgaagtatatgtgtcagagatggaagaccagcccccttcaggcgagtgtgatgatgcctttaacattaaggagactcccttggtggatacacttttcagccatgctacctcctcaaagctgactgatctaagccaggatgaccctgttcaggatcatttgctatttaagaagactctcctgccagtctggaagatgattgccagtcacaggttcagcagtccatttctgaagcctgtgtcagaaaggcaggccccagggtacaaggatgtggtgaaaagacccatggacttaactagcctgaagagaaatctctctaagggtcggattcgcaccatggcccaattcctgcgagacctgatgctgatgttccaaaatgctgtaatgtacaatgactctgatcatcatgtataccatatggctgtggagatgcggcgagaagtcctggagcagattcaggtactgaatatctggttagacaaaagaaaaggctcaagtagtctggaaggagaaccagctaacccagtggatgatggaaaacctgttttctaacctggagctgctatcctgactttttctagagtttgaatctctcccggaactctgacctagagaggatcctggtacttctttgccatgtcctcattttcttttccaacaagaataataccttaactcacaaccaacgagtcaaagatgcatgtggacataatataaagaaaaaaaggggaagctgaggtttggatttatgccataaatgttgcccacatctttgttccatcggcttgatttaaagacaattccattagatcttttctaagccttttactctataaataaatgtatttacacaataaaaaaaa

SEQ ID NO: 1143 - protein, 1235 aa, Homo sapiens
MATGTGKHKLLSTGPTEPWSIREKLCLASSVMRSGDQNWVSVSRAIKPFAEPGRPPDWFSQKHCASQYSELLETTETPKRKRGEKGEVVETVEDVIVRKLTAERVEELKKVIKETQERYRRLKRDAELIQAGHMDSRLDELCNDIATKKKLEEEEAEVKRKATDAAYQARQAVKTPPRRLPTVMVRSPIDSASPGGDYPLGDLTPTTMEEATSGVNESEMAVASGHLNSTGVLLEVGGVLPMIHGGEIQQTPNTVAASPAASGAPTLSRLLEAGPTQFTTPLASFTTVASEPPVKLVPPPVESVSQATIVMMPALPAPSSAPAVSTTESVAPVSQPDNCVPMEAVGDPHTVTVSMDSSEISMIINSIKEECFRSGVAEAPVGSKAPSIDGKEELDLAEKMDIAVSYTGEELDFETVGDIIAIIEDKVDDHPEVLDVAAVEAALSFCEENDDPQSLPGPWEHPIQQERDKPVPLPAPEMTVKQERLDFEETENKGIHELVDIREPSAEIKVEPAEPEPVISGAEIVAGVVPATSMEPPELRSQDLDEELGSTAAGEIVEADVAIGKGDETPLTNVKTEASPESMLSPSHGSNPIEDPLEAETQHKFEMSDSLKEESGTIFGSQIKDAPGEDEEEDGVSEAASLEEPKEEDQGEGYLSEMDNEPPVSESDDGFSIHNATLQSHTLADSIPSSPASSQFSVCSEDQEAIQAQKIWKKAIMLVWRAAANHRYANVFLQPVTDDIAPGYHSIVQRPMDLSTIKKNIENGLIRSTAEFQRDIMLMFQNAVMYNSSDHDVYHMAVEMQRDVLEQIQQFLATQLIMQTSESGISAKSLRGRDSTRKQDASEKDSVPMGSPAFLLSLFMGHEWVWLDSEQDHPNDSELSNDCRSLFSSWDSSLDLDVGNWRETEDPEAEELEESSPEREPSELLVGDGGSEESQEAARKASHQNLLHFLSEVAYLMEPLCISSNESSEGCCPPSGTRQEGREIKASEGERELCRETEELSAKGDPLVAEKPLGENGKPEVASAPSVICTVQGLLTESEEGEAQQESKGEDQGEVYVSEMEDQPPSGECDDAFNIKETPLVDTLFSHATSSKLTDLSQDDPVQDHLLFKKTLLPVWKMIASHRFSSPFLKPVSERQAPGYKDVVKRPMDLTSLKRNLSKGRIRTMAQFLRDLMLMFQNAVMYNDSDHHVYHMAVEMRREVLEQIQVLNIWLDKRKGSSSLEGEPANPVDDGKPVF

SEQ ID NO: 1144 - DNA, 3086 bp, Homo sapiens
gggtttcggcccttccagaccgtctctcctcagggttggagacttcggggccaagatggcgacgggaacgggcaaacacaagctgctaagcactggccccacagagccatggtccatccgagagaagctatgtttagcatcttctgtcatgagaagtggcgatcaaaattgggtatcagttagcagagcaatcaagccctttgcagaacctggccgccctccagactggttctctcaaaaacattgtgcttcccagtactcggagcttttagagaccactgagacaccaaaacggaaacgaggtgaaaagggagaagtggtggaaactgttgaagatgttattgttcggaaattgactgctgagcgagttgaagaactaaagaaagtgataaaggaaacccaggagagatatagacggctaaagagagatgcagaactaattcaagctggacacatggacagcagactggatgagctttgcaatgacattgaaaaagaaattggaagaagaggaggctgaagtaaagaggaaggctacagatgctgcataccaggctcgtcaagcagtaaaaacacccccccggaggttacccactgtgatggttcgctctcctatagattctgcctccccaggaggtgattatccacttggggacttgactccaaccactatggaagaggctacctctggggtaacccccgggactttgccgagtaccccagtcacctcgtttcctgggattcctgacacccttcctccaggctctgcacccttagaagcccccatgaccccagtaacagatgattcaccccagaaaaagatgcttggacagaaagcaactccacccccctcccctctgctgtcagagctcttgaagaagggcagcctcctgcctactagccccagactggtcaatgagagtgaaatggctgtggcttctggccacctgaacagtacaggtgtcctcctggaggtaggcggggtccttcccatgatacatggtggggagatacagcaaacacccaatactgttgcagcctcccctgctgcatcagagtctgtgtcccaagctaccattgtcatgatgcctgcgctgccagcaccatcctctgctccggctgtctccactactgaaagtgtagctccagtgagtcaacccgacaactgtgttcccatggaggctgtgggggatccacatactgtgactgtttccatggacagcagtgaaatatccatgatcatcaattctatcaaagaagagtgttttcgatcaggggtagcagaggctcctgttggatcaaaggctcccagcatagatgggaaggaagaattagatctggctgagaagatggatattgctgtgtcttacacaggtgaagagctggattttgagactgttggagacatcattgccatcattgaggacaaggtagatgatcatcctgaagtgctggatgtggcagcagtggaagcagcactgtcattttgtgaagaaaatgatgatcctcagtccctgcctggcccctgggagcatcctatccagcaggagcgggacaagccagtacctctccctgcaccagaaatgacggtcaagcaagagagactggactttgaggaaacggaaaacaagggaatacatgaactggtggacatcagggagcccagtgcagagatcaaggtggaacctgcagaaccagagccagtcatttcaggagccgaaatagtagctggagttgttccagccacaagtatggagccaccagaactcaggagtcaggacttagatgaggaactgggaagtactgcagctggagagattgttgaagcagatgttgccattgggaaaggcgatgagactccacttacaaatgtgaagacagaggcatcccctgaaagcatgttgtctccatcacatggctcaaatcccattgaagatcctttagaggcagagactcagcacaagtttgaaatgtcagactcattgaaagaagaatcagggactatttttggaagccagataaaggatgccccaggtgaggatgaggaggaagatggtgtcagtgaagcggccagcctagaggagcctaaggaagaggatcaaggagaaggctacttgtcagaaatggataatgaacctcctgtgagcgagagtgatgatggcttcagcatacacaatgctacactgcagtcacacacactggcagactccatccccagcagccctgcttcttcacagttctctgtctgtagtgaggatcaggaagctattcaggcacagaaaatttggaagaaagccatcatgcttgtatggagagctgcagctaatcataggtatgccaatgtcttcctgcagcctgttacagatgacatagcacctggctaccacagcattgtgcagaggcctatggatttgtcaactattaagaaaaacatagaaaatggactgatccgaagcacagctgaatttcagcgtgacattatgctgatgtttcagaatgctgtaatgtacaatagctcagaccatgatgtctatcacatggcagtggagatgcagcgagatgtcttggaacagatccagcaattcttggccacgcagttgattatgcaaacatccgagtctgggatcagtgctaaaagtcttcgagggagagattctacccgcaaacaggatgcttcagagaaggatggaggaaccaggggacgccgctgtgccattgaagcagatatgaagatgaaaaagtgaagcctcagagttaccctctttgagccgaacctaaaataaaagtaaacaagatagagcttgggcttgcgggcccagttccagaggtggaagttacagaagaggaggtacctgggccacacgacatgagctggaaaatctctcttagagagttggagtagcacaattgcctgttttagggcagaaaccatgggctatgttaatgtcctaatgtgtagctagcagatcgtagctagtttgtattgtcttgtcaattgtacagactttttaaaaaaaacaaccaccagtgaaatgtgtgtgtatacaataaactgaaaaaaaaaactaaaaaaaaaaaaaaaaaaa

SEQ ID NO: 1145 - protein, 757 aa, Homo sapiens
MSFAMTLKKKLEEEEAEVKRKATDAAYQARQAVKTPPRRLPTVMVRSPIDSASPGGDYPLGDLTPTTMEEATSGVTPGTLPSTPVTSFPGIPDTLPPGSAPLEAPMTPVTDDSPQKKMLGQKATPPPSPLLSELLKKGSLLPTSPRLVNESEMAVASGHLNSTGVLLEVGGVLPMIHGGEIQQTPNTVAASPAASESVSQATIVMMPALPAPSSAPAVSTTESVAPVSQPDNCVPMEAVGDPHTVTVSMDSSEISMIINSIKEECFRSGVAEAPVGSKAPSIDGKEELDLAEKMDIAVSYTGEELDFETVGDIIAIIEDKVDDHPEVLDVAAVEAALSFCEENDDPQSLPGPWEHPIQQERDKPVPLPAPEMTVKQERLDFEETENKGIHELVDIREPSAEIKVEPAEPEPVISGAEIVAGVVPATSMEPPELRSQDLDEELGSTAAGEIVEADVAIGKGDETPLTNVKTEASPESMLSPSHGSNPIEDPLEAETQHKFEMSDSLKEESGTIFGSQIKDAPGEDEEEDGVSEAASLEEPKEEDQGEGYLSEMDNEPPVSESDDGFSIHNATLQSHTLADSIPSSPASSQFSVCSEDQEAIQAQKIWKKAIMLVWRAAANHRYANVFLQPVTDDIAPGYHSIVQRPMDLSTIKKNIENGLIRSTAEFQRDIMLMFQNAVMYNSSDHDVYHMAVEMQRDVLEQIQQFLATQLIMQTSESGISAKSLRGRDSTRKQDASEKDGGTRGRRCAIEADMKMKK

SEQ ID NO: 1146 - DNA, 2972 bp, Homo sapiens
tcttcggacctaggctgccctgccgtcatgtcgcaagggatcctttctccgccagcgggcttgctgtccgatgacgatgtcgtagtttctcccatgtttgagtccacagctgcagatttggggtctgtggtacgcaagaacctgctatcagactgctctgtcgtctctacctccctagaggacaagcagcaggttccatctgaggacagtatggagaaggtgaaagtatacttgagggttaggcccttgttaccttcagagttggaacgacaggaagatcagggttgtgtccgtattgagaatgtggagacccttgttctacaagcacccaaggactcgtttgccctgaagagcaatgaacggggaattggccaagccacacacaggttcaccttttcccagatctttgggccagaagtgggacaggcatccttcttcaacctaactgtgaaggagatggtaaaggatgtactcaaagggcagaactggctcatctatacatatggagtcactaactcagggaaaacccacacgattcaaggtaccatcaaggatggagggattctcccccggtccctggcgctgatcttcaatagcctccaaggccaacttcatccaacacctgatctgaagcccttgctctccaatgaggtaatctggctagacagcaagcagatccgacaggaggaaatgaagaagctgtccctgctaaatggaggcctccaagaggaggagctgtccacttccttgaagaggagtgtctacatcgaaagtcggataggtaccagcaccagcttcgacagtggcattgctgggctctcttctatcagtcagtgtaccagcagtagccagctggatgaaacaagtcatcgatgggcacagccagacactgccccactacctgtcccggcaaacattcgcttctccatctggatctcattctttgagatctacaacgaactgctttatgacctattagaaccgcctagccaacagcgcaagaggcagactttgcggctatgcgaggatcaaaatggcaatccctatgtgaaagatctcaactggattcatgtgcaagatgctgaggaggcctggaagctcctaaaagtgggtcgtaagaaccagagctttgccagcacccacctcaaccagaactccagccgcagtcacagcatcttctcaatcaggatcctacaccttcagggggaaggagatatagtccccaagatcagcgagctgtcactctgtgatctggctggctcagagcgctgcaaagatcagaagagtggtgaacggttgaaggaagcaggaaacattaacacctctctacacaccctgggccgctgtattgctgcccttcgtcaaaaccagcagaaccggtcaaagcagaacctggttcccttccgtgacagcaagttgactcgagtgttccaaggtttcttcacaggccgaggccgttcctgcatgattgtcaatgtgaatccctgtgcatctacctatgatgaaactcttcatgtggccaagttctcagccattgctagccagcttgtgcatgccccacctatgcaactgggattcccatccctgcactcgttcatcaaggaacatagtcttcaggtatcccccagcttagagaaaggggctaaggcagacacaggccttgatgatgatattgaaaatgaagctgacatctccatgtatggcaaagaggagctcctacaagttgtggaagccatgaagacactgcttttgaaggaacgacaggaaaagctacagctggagatgcatctccgagatgaaatttgcaatgagatggtagaacagatgcaacagcgggaacagtggtgcagtgaacatttggacacccaaaaggaactattggaggaaatgtatgaagaaaaactaaatatcctcaaggagtcactgacaagtttttaccaagaagagattcaggagcgggatgaaaagattgaagagctagaagctctcttgcaggaagccagacaacagtcagtggcccatcagcaatcagggtctgaattggccctacggcggtcacaaaggttggcagcttctgcctccacccagcagcttcaggaggttaaagctaaattacagcagtgcaaagcagagctaaactctaccactgaagagttgcataagtatcagaaaatgttagaaccaccaccctcagccaagcccttcaccattgatgtggacaagaagttagaagagggccagaagaatataaggctgttgcggacagagcttcagaaacttggtgagtctctccaatcagcagagagagcttgttgccacagcactggggcaggaaaacttcgtcaagccttgaccacttgtgatgacatcttaatcaaacaggaccagactctggctgaactgcagaacaacatggtgctagtgaaactggaccttcggaagaaggcagcatgtattgctgagcagtatcatactgtgttgaaactccaaggccaggtttctgccaaaaagcgccttggtaccaaccaggaaaatcagcaaccaaaccaacaaccaccagggaagaaaccattccttcgaaatttacttccccgaacaccaacctgccaaagctcaacagactgcagcccttatgcccggatcctacgctcacggcgttcccctttactcaaatctgggccttttggcaaaaagtactaaggctgtggggaaagagaagagcagtcatggccctgaggtgggtcagctactctcctgaagaaataggtctcttttatgctttaccatatatcaggaattatatccaggatgcaatactcagacactagcttttttctcacttttgtattataaccacctatgtaatctcatgttgttgtttttttttatttacttatatgatttctatgcacacaaaaacagttatattaaagatattattgttcacattttttattgaaaaaaaaaaaaaa

SEQ ID NO: 1147 - protein, 890 aa, Homo sapiens
MSQGILSPPAGLLSDDDVVVSPMFESTAADLGSVVRKNLLSDCSVVSTSLEDKQQVPSEDSMEKVKVYLRVRPLLPSELERQEDQGCVRIENVETLVLQAPKDSFALKSNERGIGQATHRFTFSQIFGPEVGQASFFNLTVKEMVKDVLKGQNWLIYTYGVTNSGKTHTIQGTIKDGGILPRSLALIFNSLQGQLHPTPDLKPLLSNEVIWLDSKQIRQEEMKKLSLLNGGLQEEELSTSLKRSVYIESRIGTSTSFDSGIAGLSSISQCTSSSQLDETSHRWAQPDTAPLPVPANIRFSIWISFFEIYNELLYDLLEPPSQQRKRQTLRLCEDQNGNPYVKDLNWIHVQDAEEAWKLLKVGRKNQSFASTHLNQNSSRSHSIFSIRILHLQGEGDIVPKISELSLCDLAGSERCKDQKSGERLKEAGNINTSLHTLGRCIAALRQNQQNRSKQNLVPFRDSKLTRVFQGFFTGRGRSCMIVNVNPCASTYDETLHVAKFSAIASQLVHAPPMQLGFPSLHSFIKEHSLQVSPSLEKGAKADTGLDDDIENEADISMYGKEELLQVVEAMKTLLLKERQEKLQLEMHLRDEICNEMVEQMQQREQWCSEHLDTQKELLEEMYEEKLNILKESLTSFYQEEIQERDEKIEELEALLQEARQQSVAHQQSGSELALRRSQRLAASASTQQLQEVKAKLQQCKAELNSTTEELHKYQKMLEPPPSAKPFTIDVDKKLEEGQKNIRLLRTELQKLGESLQSAERACCHSTGAGKLRQALTTCDDILIKQDQTLAELQNNMVLVKLDLRKKAACIAEQYHTVLKLQGQVSAKKRLGTNQENQQPNQQPPGKKPFLRNLLPRTPTCQSSTDCSPYARILRSRRSPLLKSGPFGKKY

SEQ ID NO: 1148 - DNA, 3160 bp, Homo sapiens
gtggcccgagtcgggaaaatggctgcgagtacctccatggtcccggtggctgtgacggcggcagtggcgcctgtcctgtccataaacagcgatttctcagatttgcgggaaattaaaaagcaactgctgcttattgcgggccttacccgggagcggggcctactacacagtagcaaatggtcggcggagttggctttctctctccctgcattgcctctggccgagctgcaaccgcctccgcctattacagaggaagatgcccaggatatggatgcctataccctggccaaggcctactttgacgttaaagagtatgatcgggcagcacatttcctgcatggctgcaatagcaagaaagcctattttctgtatatgtattccagatatctgtctggagaaaaaaagaaggacgatgaaacagttgatagcttaggccccctggaaaaaggacaagtgaaaaatgaggcgcttagagaattgagagtggagctcagcaaaaaacaccaagctcgagaacttgatggatttggactttatctgtatggtgtggtgcttcgaaaactggacttggttaaagaggccattgatgtgtttgtggaagctactcatgttttgcccttgcattggggagcctggttagaactctgtaacctgatcacagacaaagagatgctgaagttcctgtctttgccagacacctggatgaaagagttttttctggctcatatatacacagagttgcagttgatagaggaggccctgcaaaagtatcagaatctcattgatgtgggcttctctaagagctcgtatattgtttcccaaattgcagttgcctatcacaatatcagagatattgacaaagccctctccatttttaatgagctaaggaaacaagacccttacaggattgaaaatatggacacattctccaaccttctttatgtcaggagcatgaaatcggagttgagttatctggctcataacctctgtgagattgataaatatcgtgtagaaacgtgctgtgtaattggcaattattacagtttacgttctcagcatgagaaagcagccttatatttccagagagccctgaaattaaatcctcggtatcttggtgcctggacactaatgggacatgagtacatggagatgaagaacacgtctgctgctatccaggcttatagacatgccattgaggtcaacaaacgggactacagagcttggtatggcctcgggcagacctatgaaatccttaagatgccattttactgcctttattattatagacgggcccaccagcttcgacccaatgattctcgcatgctggttgctttaggagaatgttacgagaaactcaatcaactagtggaagccaaaaagtgttattggagagcttacgccgtgggagatgtggagaaaatggctctggtgaaactggcaaagcttcatgaacagttgactgagtcagaacaggctgcccagtgttacatcaaatatatccaagatatctattcctgtggggaaatagtagaacacttggaggaaagcactgcctttcgctatctggcccagtactattttaagtgcaaactgtgggatgaagcttcaacttgtgcacaaaagtgttgtgcatttaatgatacccgggaagaaggtaaggccttactccggcaaatcctacagcttcggaaccaaggcgagactcctaccaccgaggtgcctgctccctttttcctacctgcttcactctctgctaacaatacccccacacgcagagtttctccactcaacttgtcttctgtcacgccatagttggctactctcaagccagcacattgttagacccatcttaattaagccttacctccatgtaaagaacagcacgtctgttccaaggacctcagctcttcttgtttctacagatggcaacagctccatagggacagcttgtataattaccttcagaggccaactgacagaatcctggcaggaacagacattatcttgccagttagaagtacttctgtctcacttatgtccaaagagtggctatagatcttggccttcttccctgaatgctttttttttttggcccccaagaaagtcccttttatagcactttagcacaggcaatgctacaggaacaaagtttcaatgctgctgagagtgaaagaaaggaggaaagtctgccactctaccctgagctggcagtagggcactgagtacccttaggaagaagtcagagcaatggatacaaatgaccttgctcttggatttgctgagcatgatccctattctgatgtcagagattaggtttaaatggaatagagctatccatttgttcttactctctagggagacaatcttccaaaacagttttgggggggtcttctaaagctttcaaattggaagtaactttattcaactagagttgaataaaagaagggcaaaaataatctcacagagcttggaactgctgatagcccttactgagggcaaaagatggctatattgttagctatactcctaccaaagcaagcaaggagataggattatagataatttcacggacatttggaaataacattggtgattatacagacaagaataaactcacttcaagctggtctgttttaataaattttcaacgtaattgtctatttttttccctcccatctgcaacagaatacatttttttcagcctttatctagatgaggtaaagggaatcattcttatggtgctcttggagagtttcaggcctgtgcatgtgtgtacagcaggaggtaatatgctataatgtctgctgtaatatatttgcacagtagatgctatggatcattctgagctcagggtccagactttattcttattcccagaattttgtgttacgtttttacctcctaacatatgacacttcatcttatattaaggaaggtttagaatatctaatacgacttgaattcatttgttactaagccttctcaggcaagctgtatactagttactggtctccactgccatgccttttcaaggttcccatggtccagaatgatgtttgattcttaatttttctgtcccttttataatttgttttaatgattttgctacatttggaattcaataaaaaatgtgaacaataataaaaaaaaaaaaaaaaaa

SEQ ID NO: 1149 - protein, 591 aa, Homo sapiens
MVPVAVTAAVAPVLSINSDFSDLREIKKQLLLIAGLTRERGLLHSSKWSAELAFSLPALPLAELQPPPPITEEDAQDMDAYTLAKAYFDVKEYDRAAHFLHGCNSKKAYFLYMYSRYLSGEKKKDDETVDSLGPLEKGQVKNEALRELRVELSKKHQARELDGFGLYLYGVVLRKLDLVKEAIDVFVEATHVLPLHWGAWLELCNLITDKEMLKFLSLPDTWMKEFFLAHIYTELQLIEEALQKYQNLIDVGFSKSSYIVSQIAVAYHNIRDIDKALSIFNELRKQDPYRIENMDTFSNLLYVRSMKSELSYLAHNLCEIDKYRVETCCVIGNYYSLRSQHEKAALYFQRALKLNPRYLGAWTLMGHEYMEMKNTSAAIQAYRHAIEVNKRDYRAWYGLGQTYEILKMPFYCLYYYRRAHQLRPNDSRMLVALGECYEKLNQLVEAKKCYWRAYAVGDVEKMALVKLAKLHEQLTESEQAAQCYIKYIQDIYSCGEIVEHLEESTAFRYLAQYYFKCKLWDEASTCAQKCCAFNDTREEGKALLRQILQLRNQGETPTTEVPAPFFLPASLSANNTPTRRVSPLNLSSVTP

SEQ ID NO: 1150 - DNA, 1980 bp, Homo sapiens
ccaggaccctggtgggagagtgtgtgcgtcgcgctggagggcgggaggcgggggcgggaggtgccggtcgagggagccccgctctcagagctccaggggaggagcgaggggagcgcggagcccggcgcctacagctcgccatggtgcgccccctgaacccgcgaccgctgccgcccgtagtcctgatgttgctgctgctgctgccgccgtcgccgctgcctctcgcagccggagacccccttcccacagaaagccgactcatgaacagctgtctccaggccaggaggaagtgccaggctgatcccacctgcagtgctgcctaccaccacctggattcctgcacctctagcataagcaccccactgccctcagaggagccttcggtccctgctgactgcctggaggcagcacagcaactcaggaacagctctctgataggctgcatgtgccaccggcgcatgaagaaccaggttgcctgcttggacatctattggaccgttcaccgtgcccgcagccttggtaactatgagctggatgtctccccctatgaagacacagtgaccagcaaaccctggaaaatgaatctcagcaaactgaacatgctcaaaccagactcagacctctgcctcaagtttgccatgctgtgtactctcaatgacaagtgtgaccggctgcgcaaggcctacggggaggcgtgctccgggccccactgccagcgccacgtctgcctcaggcagctgctcactttcttcgagaaggccgccgagccccacgcgcagggcctgctactgtgcccatgtgcccccaacgaccggggctgcggggagcgccggcgcaacaccatcgcccccaactgcgcgctgccgcctgtggcccccaactgcctggagctgcggcgcctctgcttctccgacccgctttgcagatcacgcctggtggatttccagacccactgccatcccatggacatcctaggaacttgtgcaacagagcagtccagatgtctacgagcatacctggggctgattgggactgccatgacccccaactttgtcagcaatgtcaacaccagtgttgccttaagctgcacctgccgaggcagtggcaacctgcaggaggagtgtgaaatgctggaagggttcttctcccacaacccctgcctcacggaggccattgcagctaagatgcgttttcacagccaactcttctcccaggactggccacaccctacctttgctgtgatggcacaccagaatgaaaaccctgctgtgaggccacagccctgggtgccctctcttttctcctgcacgcttcccttgattctgctcctgagcctatggtagctggacttccccagggccctcttcccctccaccacacccaggtggacttgcagcccacaaggggtgaggaaaggacagcagcaggaaggaggtgcagtgcgcagatgagggcacaggagaagctaagggttatgacctccagatccttactggtccagtcctcattccctccaccccatctccacttctgattcatgctgcccctccttggtggccacaatttagccatgtcatctggtggtgaccagctccaccaagcccctttctgagcccttcctcttgactaccaggatcaccagaatctaataagttagccattctctattgcattccagattagggttagggtagggaggactgggtgttctgaggcagcctagaaagtcattctcctttgtgaagaaggctcctgccccctcgtctcctcctctgagtggaggatggaaaactactgcctgcactgccctgtccccggatcctgccgaacatctgggcatcaggagctggagcctgtgggccttgctttattcctattattgtcctaaagtctctctgggctcttggatcatgattaaacctttgacttaaaaaaaaaaaaaaaaaaaaaaaaaaaaaaaaaaaaaaaaaaaaaaaaaaa

SEQ ID NO: 1151 - protein, 400 aa, Homo sapiens
MVRPLNPRPLPPVVLMLLLLLPPSPLPLAAGDPLPTESRLMNSCLQARRKCQADPTCSAAYHHLDSCTSSISTPLPSEEPSVPADCLEAAQQLRNSSLIGCMCHRRMKNQVACLDIYWTVHRARSLGNYELDVSPYEDTVTSKPWKMNLSKLNMLKPDSDLCLKFAMLCTLNDKCDRLRKAYGEACSGPHCQRHVCLRQLLTFFEKAAEPHAQGLLLCPCAPNDRGCGERRRNTIAPNCALPPVAPNCLELRRLCFSDPLCRSRLVDFQTHCHPMDILGTCATEQSRCLRAYLGLIGTAMTPNFVSNVNTSVALSCTCRGSGNLQEECEMLEGFFSHNPCLTEAIAAKMRFHSQLFSQDWPHPTFAVMAHQNENPAVRPQPWVPSLFSCTLPLILLLSLW

SEQ ID NO: 1152 - DNA, 2115 bp, Homo sapiens
ggtcaacgcctgcggctgttgatattcttgctcagaggccgtaactttggccttctgctcagggaagactctgagtccgacgttggcctacccagtcggaaggcagagctgcaatctagttaactacctcctttcccctagatttcctttcattctgctcaagtcttcgcctgtgtccgatccctatctactttctctcctcttgtagcaagcctcagactccaggcttgagctaggttttgtttttctcctggtgagaattcgaagaccatgtctacggaactcttctcatccacaagagaggaaggaagctctggctcaggacccagttttaggtctaatcaaaggaaaatgttaaacctgctcctggagagagacacttcctttaccgtctgtccagatgtccctagaactccagtgggcaaatttcttggtgattctgcaaacctaagcattttgtctggaggaaccccaaaatgttgcctcgatctttcgaatcttagcagtggggagataactgccactcagcttaccacttctgcagaccttgatgaaactggtcacctggattcttcaggacttcaggaagtgcatttagctgggatgaatcatgaccagcacctaatgaaatgtagcccagcacagcttctttgtagcactccgaatggtttggaccgtggccatagaaagagagatgcaatgtgtagttcatctgcaaataaagaaaatgacaatggaaacttggtggacagtgaaatgaaatatttgggcagtcccattactactgttccaaaattggataaaaatccaaacctaggagaagaccaggcagaagagatttcagatgaattaatggagttttccctgaaagatcaagaagcaaaggtgagcagaagtggcctatatcgctccccgtcgatgccagagaacttgaacaggccaagactgaagcaggtggaaaaattcaaggacaacacaataccagataaagttaaaaaaaagtatttttctggccaaggaaagctcaggaagggcttatgtttaaagaagacagtctctctgtgtgacattactatcactcagatgctggaggaagattctaaccaggggcacctgattggtgatttttccaaggtatgtgcgctgccaaccgtgtcagggaaacaccaagatctgaagtatgtcaacccagaaacagtggctgccttactgtcggggaagttccagggtctgattgagaagttttatgtcattgattgtcgctatccatatgagtatctgggaggacacatccagggagccttaaacttatatagtcaggaagaactgtttaacttctttctgaagaagcccatcgtccctttggacacccagaagagaataatcatcgtgttccactgtgaattctcctcagagaggggcccccgaatgtgccgctgtctgcgtgaagaggacaggtctctgaaccagtatcctgcattgtactacccagagctatatatccttaaaggcggctacagagacttctttccagaatatatggaactgtgtgaaccacagagctactgccctatgcatcatcaggaccacaagactgagttgctgaggtgtcgaagccagagcaaagtgcaggaaggggagcggcagctgcgggagcagattgcccttctggtgaaggacatgagcccatgataacattccagccactggctgctaacaagtcaccaaaaagacactgcagaaaccctgagcagaaagaggccttctggatggccaaacccaagattattaaaagatgtctctgcaaaccaacaggctaccaacttgtatccaggcctgggaatggattaggtttcagcagagctgaaagctggtggcagagtcctggagctggctctataaggcagccttgagttgcatagagatttgtattggttcagggaactctggcattccttttcccaactcctcatgtcttctcacaagccagccaactctttctctctgggcttcgggctatgcaagagcgttgtctaccttctttctttgtattttccttctttgtttccccctctttcttttttaaaaatggaaaaataaacactacagaatgag

SEQ ID NO: 1153 - protein, 473 aa, Homo sapiens
MSTELFSSTREEGSSGSGPSFRSNQRKMLNLLLERDTSFTVCPDVPRTPVGKFLGDSANLSILSGGTPKCCLDLSNLSSGEITATQLTTSADLDETGHLDSSGLQEVHLAGMNHDQHLMKCSPAQLLCSTPNGLDRGHRKRDAMCSSSANKENDNGNLVDSEMKYLGSPITTVPKLDKNPNLGEDQAEEISDELMEFSLKDQEAKVSRSGLYRSPSMPENLNRPRLKQVEKFKDNTIPDKVKKKYFSGQGKLRKGLCLKKTVSLCDITITQMLEEDSNQGHLIGDFSKVCALPTVSGKHQDLKYVNPETVAALLSGKFQGLIEKFYVIDCRYPYEYLGGHIQGALNLYSQEELFNFFLKKPIVPLDTQKRIIIVFHCEFSSERGPRMCRCLREEDRSLNQYPALYYPELYILKGGYRDFFPEYMELCEPQSYCPMHHQDHKTELLRCRSQSKVQEGERQLREQIALLVKDMSP

SEQ ID NO: 1154 - DNA, 1896 bp, Homo sapiens
ggtcaacgcctgcggctgttgatattcttgctcagaggccgtaactttggccttctgctcagggaagactctgagtccgacgttggcctacccagtcggaaggcagagctgcaatctagttaactacctcctttcccctagatttcctttcattctgctcaagtcttcgcctgtgtccgatccctatctactttctctcctcttgtagcaagcctcagactccaggcttgagctaggttttgtttttctcctggtgagaattcgaagaccatgtctacggaactcttctcatccacaagagaggaaggaagctctggctcaggacccagttttaggtctaatcaaaggaaaatgttaaacctgctcctggagagagacacttcctttaccgtctgtccagatgtccctagaactccagtgggcaaatttcttggtgattctgcaaacctaagcattttgtctgggtcacctggattcttcaggacttcaggaagtgcatttagctgggatgacaatggaaacttggtggacagtgaaatgaaatatttgggcagtcccattactactgttccaaaattggataaaaatccaaacctaggagaagaccaggcagaagagatttcagatgaattaatggagttttccctgaaagatcaagaagcaaaggtgagcagaagtggcctatatcgctccccgtcgatgccagagaacttgaacaggccaagactgaagcaggtggaaaaattcaaggacaacacaataccagataaagttaaaaaaaagtatttttctggccaaggaaagctcaggaagggcttatgtttaaagaagacagtctctctgtgtgacattactatcactcagatgctggaggaagattctaaccaggggcacctgattggtgatttttccaaggtatgtgcgctgccaaccgtgtcagggaaacaccaagatctgaagtatgtcaacccagaaacagtggctgccttactgtcggggaagttccagggtctgattgagaagttttatgtcattgattgtcgctatccatatgagtatctgggaggacacatccagggagccttaaacttatatagtcaggaagaactgtttaacttctttctgaagaagcccatcgtccctttggacacccagaagagaataatcatcgtgttccactgtgaattctcctcagagaggggcccccgaatgtgccgctgtctgcgtgaagaggacaggtctctgaaccagtatcctgcattgtactacccagagctatatatccttaaaggcggctacagagacttctttccagaatatatggaactgtgtgaaccacagagctactgccctatgcatcatcaggaccacaagactgagttgctgaggtgtcgaagccagagcaaagtgcaggaaggggagcggcagctgcgggagcagattgcccttctggtgaaggacatgagcccatgataacattccagccactggctgctaacaagtcaccaaaaagacactgcagaaaccctgagcagaaagaggccttctggatggccaaacccaagattattaaaagatgtctctgcaaaccaacaggctaccaacttgtatccaggcctgggaatggattaggtttcagcagagctgaaagctggtggcagagtcctggagctggctctataaggcagccttgagttgcatagagatttgtattggttcagggaactctggcattccttttcccaactcctcatgtcttctcacaagccagccaactctttctctctgggcttcgggctatgcaagagcgttgtctaccttctttctttgtattttccttctttgtttccccctctttcttttttaaaaatggaaaaataaacactacagaatgag

SEQ ID NO: 1155 - protein, 400 aa, Homo sapiens
MSTELFSSTREEGSSGSGPSFRSNQRKMLNLLLERDTSFTVCPDVPRTPVGKFLGDSANLSILSGSPGFFRTSGSAFSWDDNGNLVDSEMKYLGSPITTVPKLDKNPNLGEDQAEEISDELMEFSLKDQEAKVSRSGLYRSPSMPENLNRPRLKQVEKFKDNTIPDKVKKKYFSGQGKLRKGLCLKKTVSLCDITITQMLEEDSNQGHLIGDFSKVCALPTVSGKHQDLKYVNPETVAALLSGKFQGLIEKFYVIDCRYPYEYLGGHIQGALNLYSQEELFNFFLKKPIVPLDTQKRIIIVFHCEFSSERGPRMCRCLREEDRSLNQYPALYYPELYILKGGYRDFFPEYMELCEPQSYCPMHHQDHKTELLRCRSQSKVQEGERQLREQIALLVKDMSP

SEQ ID NO: 1156 - DNA, 4135 bp, Homo sapiens
ccgcggccctgggagctggaggaaccgcgactcagcaggcatgactggagagggaagtcccaatggtgctagaatggtgctgcagtggcagaagacggctcacaagtgaggtctggaagaacaacagggaagacatccatcatttgctccaaagtgtgcaagtcaaatcctggggagaatcatgataaccctgatcactgagcagctacagaagcagactctggatgagctgaaatgcacacgcttcagcatcagtctgcctttgcctgatcatgcagacatctccaactgtgggaactctttccagcttgtgtctgaaggtgcttcctggaggggcctgccccactgttcctgtgctgagttccaggacagcctcaacttcagctaccatccctcaggcctgagcctgcacctcagaccacccagtcggggaaactcccccaaggagcagcccttctcccaagtcctaagacctgagcccccagatccagagaagcttcctgtgccccctgcccctccatccaagaggcactgccgctcactctcagtgcccgtggacctgtctcgctggcagccggtgtggcggcccgccccctccaagctgtggactcccataaagcaccggggcagtggtggagggggtgggccgcaggtgcctcaccagagccccccaaagcgggtctccagcctcaggttcctccaagctcccagtgcctcttctcaatgtgccccagctcacagaccctacagccctcctttcttcagcctggccctggcccaagattcctctcgaccctgcgccgcctcccctcaaagtggctcctgggagagtgatgctgagtccttgtcaccttgcccacctcagcgccgcttctccctgtcacccagtctgggcccgcaggcaagccgcttcttgccctctgcccggagctctcccgcatcctccccagagctgccctggcgacctcgaggtctccgcaaccttccccgaagccgctcacagccttgtgatctggatgcccgcaaaactggggtcaagcggcgccacgaggaagacccccggcgtctgcggccttcgttggactttgacaagatgaatcagaaaccatactcaggaggtctttgtctccaagaaacagcccgggaaggcagcagcatctctccaccatggttcatggcctgtagccccccacccctctctgcttcctgcagccccactgggggttcctcccaggtgctgagtgaaagcgaagaggaggaggagggggctgtgcggtggggtcggcaggcgctgagcaagcggacactgtgccagcgggactttggggacctggacttgaatttgattgaggaaaactaaaactgagaggctacttcctggggccacacagactgactctctcatggctactaacaagtgtcgagtccccaaggctgggggccgagcctgggaatgggggtgagtggagggctccgactcagggcagctggaaatcttctcgctccagcaagctcgaccatgccaagagactggccgggacaagataaacggagctggtggcgggagggacagccccagagcagacccttcctatggcggccctgagtgtgagtatccctgccaccaagagagcaatgggcagggaaggaaggggtctgccgaccccagctcggggaatttcactagcccctttgcttcaaagggcacttgtgtcttagaatttggccagggtggggggttgagtcagcctcctcagagaaactgcgtgagagtgtgtgcgtgcatgggagtgtacttgtggaaaggtgtgtttgcgtagccttagggaaggaaggcaattgctccttaacagcagagtatcatgatacccccaggatcttgagttttttacaggatgttgggtttgctcaaggagtcaagaggagggcaccaagttttccttttttctaaatagctctggaaccaggcttgtaatccatagcatcaccgactctgcaaaggatttcattttggggtacagcagggtgttttaagtgctgtgacttcagctaatgatcttttcttcagccccaccccctccccactagctcgatctagtatattggggaatgcaggtggggggtgtcaccatattttttctgagctggcctttttttctcatcagattgtccaggctatattccacctgcctcttttgccctcttgagtagagttgcacacagcacatgggcaactgaagcagggttgaggggctctatctctctctctcctctgctgatgggacccttttcccctcaccctctgcccttctaagtcatagactaggtaggaaggccctatattggtccccagcatctactgaggcagacctgcaacagaagtggcattcagtccccagcagacatgggtgagctcaccccagcactgctgttgggaaggtgactgcaggaaaccaattcttacaagatccaggcccagcctttttgacctgcttgagagggaagaaggggtgtttagcatttaatagtttgcttgtcttccactcctgccaggaagtgtttatttgcctctaattgggcctgagagaccatagggaggttggggctcactgagggattggctgaggatgtataaagcaaaggctgtgagaagcagttgggagtttggttgtcattggattgaatttacttttttgtttctcacccgcaacttgagccaggacagctggtccaagtggccacagtgatgggtttaagtaccttggtagggctggcaccagtggaaacacatactgaagctgccaccacaatagcttgtgaggttttatccagctttggttagaccctgcatgaccaaatttgacctgcccttgtttatggcaagaagggcatttttctcttcaatttccagggtttcctaggacccagttcctcatgtaagggaggaagaccaaggtctttgtgttttcttcctcatggaattgaacctgacattttctggatctcctgcatgtcaggagcatcagtgaggcttcagcctccttgtctccactccagagaggaggtggctatgtcttcttaagcctctggccctcagaggctcctccctatctcctggctagttaccactaggctaccaggtctctaggggcctgagagaggccctctagagaatccagggaaactgtgagcccaggagttgcccatctatggtttcattcctcccctggctcttctccctcttcaggccataatttccctggtgccaatttcttttcctcctggggcatcctcatcccagggctctctgctgtagattggctgtgccagcttccaacaggttactggcaatgccagtgagtttctgtaggccctaagctgaagaagtgaggcagtgattctgcctccatcctggtttccccaaagccccagggcaccatccttaagggagaaggtctacagttatcattattttaattccattactttcagtctggaaaactaagctagtcagaactgtcatcttgcttcccaatctaagaacctgtggccctggaacacttttcaagaattggttcattttgctttacacagtagatctgttccaacagttctgtgtaaaccaaatgctatttttcaatgcatttggactgctgaccatttaaaagcagcctatgattgcttctttttgtaaagcaagcaacctccctccactttagctgttttgactatttgaattttcacatattgggcttacccagagtggagcacacctccagggcatgtggctgacactgggtcaatgtctgcatctgtgctgtgtgtgtagtgtggttggccagtaggtgagtatccctgtgtgtgtgagtgaagccactccccaggctggtgctctcctcctgtgcccagtgactgcccagtggcagctcagctgcccttcactcccacctgctgccaaagtccctgtgctaatgggattacaaatacaaaaagtggaaaaaaattttcgtaaactttgttttatattaaaagaaaaatccataagtctgtgtgtgttaaacatgaggttctgcctctgtggctgtgtttgaaaaaataaagttttattagaataatccattttcccaagcaaaaa

SEQ ID NO: 1157 - protein, 392 aa, Homo sapiens
MITLITEQLQKQTLDELKCTRFSISLPLPDHADISNCGNSFQLVSEGASWRGLPHCSCAEFQDSLNFSYHPSGLSLHLRPPSRGNSPKEQPFSQVLRPEPPDPEKLPVPPAPPSKRHCRSLSVPVDLSRWQPVWRPAPSKLWTPIKHRGSGGGGGPQVPHQSPPKRVSSLRFLQAPSASSQCAPAHRPYSPPFFSLALAQDSSRPCAASPQSGSWESDAESLSPCPPQRRFSLSPSLGPQASRFLPSARSSPASSPELPWRPRGLRNLPRSRSQPCDLDARKTGVKRRHEEDPRRLRPSLDFDKMNQKPYSGGLCLQETAREGSSISPPWFMACSPPPLSASCSPTGGSSQVLSESEEEEEGAVRWGRQALSKRTLCQRDFGDLDLNLIEEN

SEQ ID NO: 1158 - DNA, 6830 bp, Homo sapiens
gcggggcccaggctgcggctccgctcccggccacggggggcgctgcgctgcgccggtggttggtggtggctgttggggggggtgggggggaacggcggccgcgggtggtgcggagggaggccttgcgggcggatcgggcgcttggcggcggaggtggtgggaggcggcgggcgggagcgcgggtcaggccggccccggcgatggcggacgcggcggcctccccggtgggcaagcggctgctgctgctgttcgcggacactgcggcctcagcctcggcctcggctcccgcggcggcagcggcgagcggagatccggggcctgcgctgcgcactcgagcctggcgggccggcacggtgcgggccatgagcggggcggtgccccaggacctagcgatctttgtagaatttgatggctgtaactggaagcaacactcctgggtaaaagttcatgctgaggaagttatcgtgcttctgctggaagggtctcttgtatgggcgccccgtgaggacccagtccttctccagggcattcgagtctccattgcacaatggccagccctgacttttactccccttgtagataaactgggtttgggttctgtggttccagtggaatatcttctggatcgagagcttcggttcctgtcagatgccaatgggttgcatctgtttcagatgggaacagatagccaaaaccagattcttttggaacatgctgcactgagagaaacagttaatgctttgatcagtgaccaaaagctacaagagatattcagccgaggtccctacagtgttcaaggtcacagggtcaaaatatatcagccagagggggaagaagggtggctctatggtgttgtgagccatcaggactccatcactcgtcttatggaggtgtctgtaactgagagtggtgagatcaagtcggtagatcccagactaatccatgtgatgctgatggataattcaacgcctcaaagcgaggggggtacgttaaaagcagtaaaatcttccaaaggaaagaagaagagagaaagcatagaggggaaagatggccggaggaggaaaagtgcttcggactctgggtgtgaccctgcatcaaagaaattaaaaggagacaggggtgaagtagacagtaatgggagcgatggaggtgaggcaagccgagggccctggaaaggagggaatgccagtggagagccagggctggatcagagagccaagcagccaccgtctacatttgtcccccagataaaccgcaacattcgctttgccacttacaccaaagaaaacggcaggactctggtggtgcaggatgagcctgtaggtggggacacacctgcatctttcactccatattctacagccacaggtcagacacctttggccccagaggtgggtggagccgaaaacaaagaggcaggaaaaacactggaacaagttggccagggcatagtggcttccgcagctgtggtcactaccgccagctccaccccaaacacagtgaggatctcagacactggccttgcagcagggactgtgccagaaaaacagaaaggcagccggtcgcaggcctcgggagagaattcaagaaattctattctggcctcttctggatttggagcacctctccctagttcatcgcaacctttgacttttggaagtggaaggagccagtccaatggtgttctagccacagagaacaaacctttgggcttctcttttggctgtagctctgcacaagaggcacagaaagacactgatctctccaaaaacttgttttttcaatgcatgtcccaaactttacctaccagtaactacttcactactgtttcagagagtttggctgatgattcttctagtcgggactcattcaaacaaagccttgagagcctgagctcaggcctgtgtaaaggcagatccgttcttggaacagacactaagccaggctctaaggctggcagctctgtggaccggaaagtgcctgcagagtccatgcccaccctcactccagccttcccacggagcctcctaaatgcccgtaccccagagaatcatgaaaatctatttttacagccccccaaattgtcccgagaagagccttctaatcctttcctggcatttgtggagaaagttgaacacagccctttcagtagttttgcatctcaggcatcaggtagctcctcttctgctaccactgtcacctccaaggtggcacccagctggcccgagtctcactcctctgcagattcggcatctttagcaaagaagaaacccctcttcattacaactgactcctccaagctagtatctggtgttctgggctcagctcttaccagtgggggcccaagcctctctgccatggggaatggccgctccagctcgcccaccagcagcctcactcagcccattgagatgccaactctctcctctagccccacagaggagaggccaactgtggggcctgggcagcaggacaatcccctcctcaaaacctttagtaacgtctttggcaggcactcaggcggctttctgtcctccccggcagatttttcacaggagaacaaagctccttttgaagctgtgaaaaggttctcactggatgaacgaagcttggcttgcagacaagactcggactccagcaccaacagtgacctgtcagatttgagtgactctgaggagcagctgcaggctaagacaggcctgaagggaattccagagcacctgatggggaagctgggccccaatggggagcgcagtgctgagctgttgctgggcaaaagcaaagggaagcaggcccccaagggccggcctcggactgcccccctgaaagttggccagtcagtgctgaaagatgtaagcaaagtgaagaagctgaagcaatctggagagcccttcctgcaggatgggtcatgcatcaatgtggcacctcatctgcacaagtgtcgtgaatgccgcctggagcggtaccggaagtttaaggaacaggagcaagatgattctactgtagcctgccgtttctttcacttccggaggttgatcttcactcgaaaaggggtactccgtgtggaggggtttttaagcccccagcaaagtgaccctgatgccatgaacctgtggattccctcttcctccctagcagaagggatagatctagagacctcaaaatacatcctggccaatgttggggaccagttctgccagctcgtaatgtctgagaaggaggccatgatgatggtggagccacaccagaaagtggcatggaagcgagctgtgcgtggtgtacgggagatgtgtgatgtgtgtgaaacaactctcttcaacatccactgggtttgtcgcaaatgtggatttggggtctgccttgactgttaccggctcaggaaaagccggccacgcagtgagacagaagagatgggtgatgaagaagttttctcctggttgaagtgtgcaaagggacagtcccacgaaccagagaatctcatgcccacacaaattattcctggcacagctctttacaatattggagacatggtacatgctgcccggggcaagtggggaattaaagcaaactgcccttgtatcagtcgacagaacaaatctgtattgagacctgccgtcaccaatgggatgtcacagcttcctagcataaaccctagtgcctcttctggaaacgaaactaccttctctggtggaggaggaccggcaccagtaacaactccagagccggaccatgttcccaaagccgacagcactgacatcagatctgaagagcctctgaaaacagacagttcggcatcaaatagcaatagtgaactgaaagccatcaggcctccttgccctgacacggccccaccctcctccgccctgcactggttggcagatttagcaactcagaaggctaaagaagaaacaaaagaagcagggtccctgaggtcggtgctcaataaagagtctcattcaccctttgggctggactcgttcaactccactgcaaaggtctctccgctgactccaaagctttttaacagtctgttgctgggtcccactgcctccaacaacaaaaccgaagggtctagccttcgagacctccttcactccgggccgggaaaacttcctcaaacccccttggacacaggcataccctttcccccggtcttctctacatcctcagcaggagtgaagagcaaggccagcctacccaactttcttgaccacatcattgcctcagtggtagaaaataagaaaacctcagatgcttcaaagcgggcctgcaacttgactgatacccagaaggaagtgaaggagatggtgatggggttaaatgtgctagatccccatacttctcactcctggctttgtgatgggaggcttctgtgtctccatgaccccagcaacaaaaacaattggaagatcttccgggagtgttggaagcaaggtcagccagtgctggtttcgggggtacataaaaagctcaagtctgagctctggaagccagaagcctttagccaggaatttggagaccaggatgtagacttggtgaactgcaggaactgtgctataatttccgatgtgaaagttcgggatttctgggatggtttcgagatcatatgcaaacgactacggtcagaagatgggcagccaatggtgctcaaactcaaggactggcctcctggggaagattttcgagacatgatgccaaccaggtttgaagatctgatggagaaccttcctctgccagaatataccaaacgagatggcaggctcaatctggcctctaggctacctagctactttgtaaggcctgatctgggccccaagatgtacaacgcctatgggttgataacagcagaagatagaagagttggtacaacaaatcttcacttagatgtgtctgatgctgttaatgtgatggtgtatgttgggattcccatcggggagggtgctcatgatgaagaggtactcaagacaattgacgagggagatgccgatgaggtgacgaagcagaggattcatgatggaaaagagaagccaggtgctttatggcacatctatgcagccaaggatgcagagaagatccgggagctgctccgaaaggttggagaagaacaaggccaagagaacccccctgatcatgacccaattcatgaccaaagttggtacctggaccagaccctccgtaagcgactctatgaggagtatggcgtgcaaggctgggctattgtgcagttcctaggtgatgctgttttcatacctgctggagccccacaccaggttcacaatctatacagttgcataaaagtagcagaagactttgtatctccagaacatgtaaagcactgtttccgcctgactcaggaattcaggcatctctctaacactcatacaaatcatgaggataaactgcaggtgaagaacatcatttaccatgcagtgaaagatgcggttggcaccctcaaggctcatgaatccaaactggcaaggtcctaggcatggagaaactccaagctcctctgtgaagcaggtctttcactcacaacacttaacagggaacggcagggctctttgctggagcagaggcccttcacccagagccagtgtggtcagtattccaaactctccagccactctcttctacgctgcctcaacactgaaggttgacacaggaaagtcgtactgttcacacacacagtttgagactccaagccaagagtgccacatccctatcctgtggccttttggaaatccaaattgcctgaacatggcggggctttcctgcacattctcctgatttgagattcacgggcacacctttcttttcttttcctcttgtgcctagttaagtggaaatgtgtttggagataggggaaatcacataactggtacaagtatggggtaattgcttaaacatgcctggtggaagtctgatagcgtctctgcacgtgacctctgacaaagcccatcccaggagacggggtgaagctattccccacactctcctgtgaacactggagtcttgcaagacccagggagaacccactgcttttcccaggaggctccaggattaggaaatgtgtgtatttagtgaaaaataggtttgtagtgaaatagttactatttcatgaaagtagatatttttagaatttttgaaataccacagttgttttcctggattataaggaaaggcacattacatttagtcttcctttcgatataaaactctttgaagaaatatgatttttagaaatcagctacccattatagcacaaaatcagccaaagcagaatttttaaaaattggcttttttaggattctttttctccccctcccatcttagtcttaccttgagggaacagtcatatgagaaggaactttgtcacatctaagctgtggtgtgttccccatgtgtgtgtacaacactggtgactccaggaaccattttcacctattaccagtgttccctggggactcctcttaatgtttccaaatgggaaggacagttgatttccaacatgaggttttttgttttttatccagaaatattttcagcaaaactttccaactgagtggagtctgattaaggatttatttgaaaatggtgggattcattggcccataggtacattggaaaatgtatatctctccagctgtactgtagtgccctgcaggctgtttatatgttcacagttacttttttttttttttttaaataaaagtcatttaatgtagaatacttttaatttcactttctgtattttaattttgttgaagggctgattgggatttccatgttcttattaaaaatctaacaaatctgaaaaaaaaaaaaaaaaa

SEQ ID NO: 1159 - protein, 1761 aa, Homo sapiens
MADAAASPVGKRLLLLFADTAASASASAPAAAAASGDPGPALRTRAWRAGTVRAMSGAVPQDLAIFVEFDGCNWKQHSWVKVHAEEVIVLLLEGSLVWAPREDPVLLQGIRVSIAQWPALTFTPLVDKLGLGSVVPVEYLLDRELRFLSDANGLHLFQMGTDSQNQILLEHAALRETVNALISDQKLQEIFSRGPYSVQGHRVKIYQPEGEEGWLYGVVSHQDSITRLMEVSVTESGEIKSVDPRLIHVMLMDNSTPQSEGGTLKAVKSSKGKKKRESIEGKDGRRRKSASDSGCDPASKKLKGDRGEVDSNGSDGGEASRGPWKGGNASGEPGLDQRAKQPPSTFVPQINRNIRFATYTKENGRTLVVQDEPVGGDTPASFTPYSTATGQTPLAPEVGGAENKEAGKTLEQVGQGIVASAAVVTTASSTPNTVRISDTGLAAGTVPEKQKGSRSQASGENSRNSILASSGFGAPLPSSSQPLTFGSGRSQSNGVLATENKPLGFSFGCSSAQEAQKDTDLSKNLFFQCMSQTLPTSNYFTTVSESLADDSSSRDSFKQSLESLSSGLCKGRSVLGTDTKPGSKAGSSVDRKVPAESMPTLTPAFPRSLLNARTPENHENLFLQPPKLSREEPSNPFLAFVEKVEHSPFSSFASQASGSSSSATTVTSKVAPSWPESHSSADSASLAKKKPLFITTDSSKLVSGVLGSALTSGGPSLSAMGNGRSSSPTSSLTQPIEMPTLSSSPTEERPTVGPGQQDNPLLKTFSNVFGRHSGGFLSSPADFSQENKAPFEAVKRFSLDERSLACRQDSDSSTNSDLSDLSDSEEQLQAKTGLKGIPEHLMGKLGPNGERSAELLLGKSKGKQAPKGRPRTAPLKVGQSVLKDVSKVKKLKQSGEPFLQDGSCINVAPHLHKCRECRLERYRKFKEQEQDDSTVACRFFHFRRLIFTRKGVLRVEGFLSPQQSDPDAMNLWIPSSSLAEGIDLETSKYILANVGDQFCQLVMSEKEAMMMVEPHQKVAWKRAVRGVREMCDVCETTLFNIHWVCRKCGFGVCLDCYRLRKSRPRSETEEMGDEEVFSWLKCAKGQSHEPENLMPTQIIPGTALYNIGDMVHAARGKWGIKANCPCISRQNKSVLRPAVTNGMSQLPSINPSASSGNETTFSGGGGPAPVTTPEPDHVPKADSTDIRSEEPLKTDSSASNSNSELKAIRPPCPDTAPPSSALHWLADLATQKAKEETKEAGSLRSVLNKESHSPFGLDSFNSTAKVSPLTPKLFNSLLLGPTASNNKTEGSSLRDLLHSGPGKLPQTPLDTGIPFPPVFSTSSAGVKSKASLPNFLDHIIASVVENKKTSDASKRACNLTDTQKEVKEMVMGLNVLDPHTSHSWLCDGRLLCLHDPSNKNNWKIFRECWKQGQPVLVSGVHKKLKSELWKPEAFSQEFGDQDVDLVNCRNCAIISDVKVRDFWDGFEIICKRLRSEDGQPMVLKLKDWPPGEDFRDMMPTRFEDLMENLPLPEYTKRDGRLNLASRLPSYFVRPDLGPKMYNAYGLITAEDRRVGTTNLHLDVSDAVNVMVYVGIPIGEGAHDEEVLKTIDEGDADEVTKQRIHDGKEKPGALWHIYAAKDAEKIRELLRKVGEEQGQENPPDHDPIHDQSWYLDQTLRKRLYEEYGVQGWAIVQFLGDAVFIPAGAPHQVHNLYSCIKVAEDFVSPEHVKHCFRLTQEFRHLSNTHTNHEDKLQVKNIIYHAVKDAVGTLKAHESKLARS

SEQ ID NO: 1160 - DNA, 2117 bp, Homo sapiens
gctgctgcagcggctgctgctgctactgcggctcctgctgccgccgccgccgccgctcggcctcaggcagctgcatcctcggccgggccgggtccccgccccgcgccgcgcccggccccgccatggtgtcctggatcatctctcgcctggtggtgctcatctttggcaccctgtacccagcctattcttcctacaaggccgtgaagacaaaaaacgtgaaggaatatgtgaaatggatgatgtactggatcgtctttgccttcttcaccacggccgagacgctcacggatatagtgctctcctggttccccttctactttgaactgaagatcgccttcgtgatatggctgctgtccccttacaccaagggctccagcgtgctctaccgcaagttcgtgcacccaacgctgtccaacaaggagaaggagatcgacgagtacatcacgcaggcccgagacaagagctatgagaccatgatgagggtgggcaagaggggcctgaaccttgccgccaatgctgcagtcacagctgccgccaagggggtgctgtcagagaagctccgcagcttcagcatgcaggacctgaccctgatccgggacgaggacgcactgcccctgcagaggcctgacggccgcctccgacccagccctggcagcctcctggacaccatcgaggacttaggagatgaccctgccctgagtctaaggtccagcacaaacccggcagattcccggacagaggcttctgaggatgacatgggagacaaagctcccaagagggccaaacccatcaaaaaagcgcccaaagctgagccactggcttccaagacactgaagacccggcccaagaagaagacctctggcgggggcgactcagcttgagcccctccacccccgcaggctgcagagcaaggatgaagcctcaggaggggcctcagacccagcccctgctccacactgtgccagtagcctaggtgtctcaggcccctgggccccgcagatggccatttccggtgcctgcccagtggccactcttctggaaggggcttggaaaagaggaaggaggcccagctgtgggggttgagggtagagggtggaccagaggctgaggactgagccacccaaggaggtggggactgctcggcctccaccgctgttccgctgcagccccgccctgccccacccacccagtgccttgctgaagcccatagcaatccgcttctcagaggtcctatcgtgtttccactgctcgccttggtttgggagcagggagggggaagtcctagcccagatggaccaaggacgggcctgaaggcacatgggggaaagggagcacacggggaggacgttggggaccctgggtggggcctccaggtgcagctgtggatggaagacagggattggcctgtgcttcagcgaccaggatggccaggccagagctgcagctgggggctcttttcctggtcattgggtggggctgagtgccacatgttcccacattaaaaaggggggtccagggctgtgtgagtgtgtctttctgggtctagggctcggggtagtttgggtcaaggactgtccctccagcagtcgcctcctcccaccctgagccccacagtcatctggccctttccctgctcaaccctccatcctaggctctgagcctcagaggacccagcccatgagagaacggggatctggggggcctctcacctgctcctatgaccttgctcccttttaggtcaccccattgccaccgtgcccctgggctggactcccatgctcctcagggcccacccctgctctgtctggtacaggcccctgctgagtgggcccctctcctctgcccctggggtccatcccctcttgcccagggtccccatcctgtaccaagcagactgggccctaagacccctggcagaacccagcctctgctcacacccgccccagcttctgccacggcttcagtcagggccaggaggaacacgtgaaggagaaagagaaatgcaggagccgcggggctcccggttccttgggaagagggtgcccattggacctttggcactggatgagccaataaaccaaactctggcacctcatttaaaaaaaaaaaaaaaaaaa

SEQ ID NO: 1161 - protein, 252 aa, Homo sapiens
MVSWIISRLVVLIFGTLYPAYSSYKAVKTKNVKEYVKWMMYWIVFAFFTTAETLTDIVLSWFPFYFELKIAFVIWLLSPYTKGSSVLYRKFVHPTLSNKEKEIDEYITQARDKSYETMMRVGKRGLNLAANAAVTAAAKGVLSEKLRSFSMQDLTLIRDEDALPLQRPDGRLRPSPGSLLDTIEDLGDDPALSLRSSTNPADSRTEASEDDMGDKAPKRAKPIKKAPKAEPLASKTLKTRPKKKTSGGGDSA

SEQ ID NO: 1162 - DNA, 3136 bp, Homo sapiens
gcgcagaacttggggagccgccgccgccatccgccgccgcagccagcttccgccgccgcaggaccggcccctgccccagcctccgcagccgcggcgcgtccacgcccgcccgcgcccagggcgagtcggggtcgccgcctgcacgcttctcagtgttccccgcgccccgcatgtaacccggccaggcccccgcaactgtgtcccctgcagctccagccccgggctgcacccccccgccccgacaccagctctccagcctgctcgtccaggatggccgcggccaaggccgagatgcagctgatgtccccgctgcagatctctgacccgttcggatcctttcctcactcgcccaccatggacaactaccctaagctggaggagatgatgctgctgagcaacggggctccccagttcctcggcgccgccggggccccagagggcagcggcagcaacagcagcagcagcagcagcgggggcggtggaggcggcgggggcggcagcaacagcagcagcagcagcagcaccttcaaccctcaggcggacacgggcgagcagccctacgagcacctgaccgcagagtcttttcctgacatctctctgaacaacgagaaggtgctggtggagaccagttaccccagccaaaccactcgactgccccccatcacctatactggccgcttttccctggagcctgcacccaacagtggcaacaccttgtggcccgagcccctcttcagcttggtcagtggcctagtgagcatgaccaacccaccggcctcctcgtcctcagcaccatctccagcggcctcctccgcctccgcctcccagagcccacccctgagctgcgcagtgccatccaacgacagcagtcccatttactcagcggcacccaccttccccacgccgaacactgacattttccctgagccacaaagccaggccttcccgggctcggcagggacagcgctccagtacccgcctcctgcctaccctgccgccaagggtggcttccaggttcccatgatccccgactacctgtttccacagcagcagggggatctgggcctgggcaccccagaccagaagcccttccagggcctggagagccgcacccagcagccttcgctaacccctctgtctactattaaggcctttgccactcagtcgggctcccaggacctgaaggccctcaataccagctaccagtcccagctcatcaaacccagccgcatgcgcaagtaccccaaccggcccagcaagacgcccccccacgaacgcccttacgcttgcccagtggagtcctgtgatcgccgcttctcccgctccgacgagctcacccgccacatccgcatccacacaggccagaagcccttccagtgccgcatctgcatgcgcaacttcagccgcagcgaccacctcaccacccacatccgcacccacacaggcgaaaagcccttcgcctgcgacatctgtggaagaaagtttgccaggagcgatgaacgcaagaggcataccaagatccacttgcggcagaaggacaagaaagcagacaaaagtgttgtggcctcttcggccacctcctctctctcttcctacccgtccccggttgctacctcttacccgtccccggttactacctcttatccatccccggccaccacctcatacccatcccctgtgcccacctccttctcctctcccggctcctcgacctacccatcccctgtgcacagtggcttcccctccccgtcggtggccaccacgtactcctctgttccccctgctttcccggcccaggtcagcagcttcccttcctcagctgtcaccaactccttcagcgcctccacagggctttcggacatgacagcaaccttttctcccaggacaattgaaatttgctaaagggaaaggggaaagaaagggaaaagggagaaaaagaaacacaagagacttaaaggacaggaggaggagatggccataggagaggagggttcctcttaggtcagatggaggttctcagagccaagtcctccctctctactggagtggaaggtctattggccaacaatcctttctgcccacttccccttccccaattactattccctttgacttcagctgcctgaaacagccatgtccaagttcttcacctctatccaaagaacttgatttgcatggattttggataaatcatttcagtatcatctccatcatatgcctgaccccttgctcccttcaatgctagaaaatcgagttggcaaaatggggtttgggcccctcagagccctgccctgcacccttgtacagtgtctgtgccatggatttcgtttttcttggggtactcttgatgtgaagataatttgcatattctattgtattatttggagttaggtcctcacttgggggaaaaaaaaaaaagaaaagccaagcaaaccaatggtgatcctctattttgtgatgatgctgtgacaataagtttgaacctttttttttgaaacagcagtcccagtattctcagagcatgtgtcagagtgttgttccgttaacctttttgtaaatactgcttgaccgtactctcacatgtggcaaaatatggtttggtttttctttttttttttttttgaaagtgttttttcttcgtccttttggtttaaaaagtttcacgtcttggtgccttttgtgtgatgcgccttgctgatggcttgacatgtgcaattgtgagggacatgctcacctctagccttaaggggggcagggagtgatgatttgggggaggctttgggagcaaaataaggaagagggctgagctgagcttcggttctccagaatgtaagaaaacaaaatctaaaacaaaatctgaactctcaaaagtctatttttttaactgaaaatgtaaatttataaatatattcaggagttggaatgttgtagttacctactgagtaggcggcgatttttgtatgttatgaacatgcagttcattattttgtggttctattttactttgtacttgtgtttgcttaaacaaagtgactgtttggcttataaacacattgaatgcgctttattgcccatgggatatgtggtgtatatccttccaaaaaattaaaacgaaaataaagtagctgcgattggg

SEQ ID NO: 1163 - protein, 543 aa, Homo sapiens
MAAAKAEMQLMSPLQISDPFGSFPHSPTMDNYPKLEEMMLLSNGAPQFLGAAGAPEGSGSNSSSSSSGGGGGGGGGSNSSSSSSTFNPQADTGEQPYEHLTAESFPDISLNNEKVLVETSYPSQTTRLPPITYTGRFSLEPAPNSGNTLWPEPLFSLVSGLVSMTNPPASSSSAPSPAASSASASQSPPLSCAVPSNDSSPIYSAAPTFPTPNTDIFPEPQSQAFPGSAGTALQYPPPAYPAAKGGFQVPMIPDYLFPQQQGDLGLGTPDQKPFQGLESRTQQPSLTPLSTIKAFATQSGSQDLKALNTSYQSQLIKPSRMRKYPNRPSKTPPHERPYACPVESCDRRFSRSDELTRHIRIHTGQKPFQCRICMRNFSRSDHLTTHIRTHTGEKPFACDICGRKFARSDERKRHTKIHLRQKDKKADKSVVASSATSSLSSYPSPVATSYPSPVTTSYPSPATTSYPSPVPTSFSSPGSSTYPSPVHSGFPSPSVATTYSSVPPAFPAQVSSFPSSAVTNSFSASTGLSDMTATFSPRTIEIC

SEQ ID NO: 1164 - DNA, 3653 bp, Homo sapiens
attgcaacacatgcagctgcctggagagagggagccggtgtcctacgtcagagccgccgccgccgcgagccgccgccggggaggagcagccgctgccgcccaggactgggcccttagggaggaggaggcgagaagatggcggacgaccccagtgctgccgacaggaacgtggagatctggaagatcaagaagctcattaagagcttggaggcggcccgcggcaatggcaccagcatgatatcattgatcattcctcccaaagaccagatttcacgagtggcaaaaatgttagcggatgagtttggaactgcatctaacattaagtcacgagtaaaccgcctttcagtcctgggagccattacatctgtacaacaaagactcaaactttataacaaagtacctccaaatggtctggttgtatactgtggaacaattgtaacagaagaaggaaaggaaaagaaagtcaacattgactttgaacctttcaaaccaattaatacgtcattgtatttgtgtgacaacaaattccatacagaggctcttacagcactactttcagatgatagcaagtttggattcattgtaatagatggtagtggtgcactttttggcacactccaaggaaacacaagagaagtcctgcacaaattcactgtggatctcccaaagaaacacggtagaggaggtcagtcagccttgcgttttgcccgtttaagaatggaaaagcgacataactatgttcggaaagtagcagagactgctgtgcagctgtttatttctggggacaaagtgaatgtggctggtctagttttagctggatccgctgactttaaaactgaactaagtcaatctgatatgtttgatcagaggttacaatcaaaagttttaaaattagttgatatatcctatggtggtgaaaatggattcaaccaagctattgagttatctactgaagtcctctccaacgtgaaattcattcaagagaagaaattaataggacgatactttgatgaaatcagccaggacacgggcaagtactgttttggcgttgaagatacactaaaggctttggaaatgggagctgtagaaattctaatagtctatgaaaatctggatataatgagatatgttcttcattgccaaggcacagaagaggagaaaattctctatctaactccagagcaagaaaaggataaatctcatttcacagacaaagagaccggacaggaacatgagcttatcgagagcatgcccctgttggaatggtttgctaacaactataaaaaatttggagctacgttggaaattgtcacagataaatcacaagaagggtctcagtttgtgaaaggatttggtggaattggaggtatcttgcggtaccgagtagatttccagggaatggaataccaaggaggagacgatgaattttttgaccttgatgactactaggtagtcgacatgggtccggcaaaacgtgcctcaccctccagcatccaacccaaggagcatacccatggtggaatccaaacagatccctgccttacaattggaacatttccagaacttaatccatgagcattggatattgaaaagaaaaccgaaacaaaaccagacccagccctacactttggtttgtcatggtgtcagcgcagcagcctacaactaagttcctaaacgccactttggactaatttaaaaaagaatcccagtttttacttttactggatggtgaaattggttgctcttgtattttatgaaaaaaaatgatttttttaaccttcatacatagaagcaaaaatactttaactgctgtaaaccttcaaaagttaatagaagtgagatcatactggtttgtttcttattttgattggagaaaaattaaattgctgcatttcgcagtgacccatttacatggcattctcagcttagactgcgtaagaagaaatatatgtggtgaaatgttggaaccatttctctcttggtctctgtttaatgttgaaagggtgagctaataggaggcactttcaacttcactccctcacgctaccccgtccccctccagactggcagtttcaaggatgcaaattgcattgcaaaatcaaactgactcatgaagcatttgggccagtgcactgtttacttccatctgtttgcagacacatttgtgcccggcgtttgggagccctttgtatcaatgttctgacaagggtccctataaccttaacctactcgaaaccggtttgggatggatatgatggggcttctgtgctattgctgggattgggagaaataaaacatgcaatttaagtggaagcgaagaaatttaaagaggattttattttgcttgggtcaatccttgttaaaagggaggtggatgtgtttccttgtgttggatggcatgagattatgtgaatgttttgatttattaaaatgaactgcaaggtttttcacaggaacgacagacatgtatgactgcatgtaattataaactcctgacctcctggtggggttggagcatctgtttcaaatgtgggacttacaagcacttctcacatgagaaattaggggcgggtgggaagggatgggacacagcttctggcaccatggatttaagaccatgttggatccaaaagttggcctgaaaccctgaagctgatgcttcacagctgggctgtaagtcagacttgaacccagctgatatgcaaggtcatggcgtgccagggtggtgacagttgaacaaagtgtatagtacgtgcccagtggtagcgatggaaaaaagtataccaaatggactttgaaggaccaaaggttttaaaagtcaattggtatcacctccacactgactagggtagtggggtgcatttggttttcaaattgggtacttttaacactttagtgcctgactgctgttctttactgacttgattcagtcactcgtagctttattggtctgaaccagctccttgttcccaggttacagacctgcctatcgttccaataatcctgtttcacttgaatgaagggagtatgtcttaaatgtaaagtttctggttctcacactgtactctgaggtccaaatactgtctgtcaatgtgtaacctgatgtctcaaccccctgtgagaagagtccattatttggtgttcaccaacgtgggagacttcaccggaacaggcttttttgctttgggctctgctatttgtttgcagaacacccaagagcgagcaaacacgctctcttcacagcagtaccttagggttttgccattgtaaatgggtctgatgtgatatgacaagaccagagaaattggatgtaaatttacatttttgaatatgcttgttgtttcacatgatacatttagggtatgcagctccttttgtagtttttatttttactatttaagtttggaaatgatgccaaatttttgtatttctttaatcaatgtgttctcttcggtgatatatattgcattatatattgatgtgtgtatcaatatatattgatatgtattacacttacacatacaaacacatataagagggggtgaaaaccgtagcctttgcattctctatagcctctgcagagagatactaagcagcaaaatcttggtgttgtgatgtacagaaatggagaagagtattaaaccatatttaag

SEQ ID NO: 1165 - protein, 437 aa, Homo sapiens
MADDPSAADRNVEIWKIKKLIKSLEAARGNGTSMISLIIPPKDQISRVAKMLADEFGTASNIKSRVNRLSVLGAITSVQQRLKLYNKVPPNGLVVYCGTIVTEEGKEKKVNIDFEPFKPINTSLYLCDNKFHTEALTALLSDDSKFGFIVIDGSGALFGTLQGNTREVLHKFTVDLPKKHGRGGQSALRFARLRMEKRHNYVRKVAETAVQLFISGDKVNVAGLVLAGSADFKTELSQSDMFDQRLQSKVLKLVDISYGGENGFNQAIELSTEVLSNVKFIQEKKLIGRYFDEISQDTGKYCFGVEDTLKALEMGAVEILIVYENLDIMRYVLHCQGTEEEKILYLTPEQEKDKSHFTDKETGQEHELIESMPLLEWFANNYKKFGATLEIVTDKSQEGSQFVKGFGGIGGILRYRVDFQGMEYQGGDDEFFDLDDY

SEQ ID NO: 1166 - DNA, 3778 bp, Homo sapiens
ccatttcctcctcctagccggactggagggagacaaagcagcgcccgtctgcttcgggcctctggaatttagcgctcgcccagctagccgcagaaatgactgctgtccatgcaggcaacataaacttcaagtgggatcctaaaagtctagagatcaggactctggcagttgagagactgttggagcctcttgttacacaggttacaacccttgtaaacaccaatagtaaagggccctctaataagaagagaggtcgttctaagaaggcccatgttttggctgcatctgttgaacaagcaactgagaatttcttggagaagggggataaaattgcgaaggagagccagtttctcaaggaggagcttgtggctgctgtagaagatgttcgaaaacaaggtgatttgatgaaggctgctgcaggagagttcgcagatgatccctgctcttctgtgaagcgaggcaacatggttcgggcagctcgagctttgctctctgctgttacccggttgctgattttggctgacatggcagatgtctacaaattacttgttcagctgaaagttgtggaagatggtatcttgaagttgaggaatgctggcaatgaacaagacttaggaatccagtataaagccctaaaacctgaagtggataagctgaacattatggcagccaaaagacaacaggaattgaaagatgttggccatcgtgatcagatggctgcagctagaggaatcctgcagaagaacgttccgatcctctatactgcatcccaggcatgcctacagcaccctgatgtcgcagcctataaggccaacagggacctgatatacaagcagctgcagcaggcggtcacaggcatttccaatgcagcccaggccactgcctcagacgatgcctcacagcaccagggtggaggaggaggagaactggcatatgcactcaataactttgacaaacaaatcattgtggaccccttgagcttcagcgaggagcgctttaggccttccctggaggagcgtctggaaagcatcattagtggggctgccttgatggccgactcgtcctgcacgcgtgatgaccgtcgtgagcgaattgtggcagagtgtaatgctgtccgccaggccctgcaggacctgctttcggagtacatgggcaatgctggacgtaaagaaagaagtgatgcactcaattctgcaatagataaaatgaccaagaagaccagggacttgcgtagacagctccgcaaagctgtcatggaccacgtttcagattctttcctggaaaccaatgttccacttttggtattgattgaagctgcaaagaatggaaatgagaaagaagttaaggagtatgcccaagttttccgtgaacatgccaacaaattgattgaggttgccaacttggcctgttccatctcaaataatgaagaaggtgtaaagcttgttcgaatgtctgcaagccagttagaagccctctgtcctcaggttattaatgctgcactggctttagcagcaaaaccacagagtaaactggcccaagagaacatggatctttttaaagaacaatgggaaaaacaagtccgtgttctcacagatgctgtcgatgacattacttccattgatgacttcttggctgtctcagagaatcacattttggaagatgtgaacaaatgtgtcattgctctccaagagaaggatgtggatggcctggaccgcacagctggtgcaattcgaggccgggcagcccgggtcattcacgtagtcacctcagagatggacaactatgagccaggagtctacacagagaaggttctggaagccactaagctgctctccaacacagtcatgccacgttttactgagcaagtagaagcagccgtggaagccctcagctcggaccctgcccagcccatggatgagaatgagtttatcgatgcttcccgcctggtatatgatggcatccgggacatcaggaaagcagtgctgatgataaggacccctgaggagttggatgactctgactttgagacagaagattttgatgtcagaagcaggacgagcgtccagacagaagacgatcagctgatagctggccagagtgcccgggcgatcatggctcagcttccccaggagcaaaaagcgaagattgcggaacaggtggccagcttccaggaagaaaagagcaagctggatgctgaagtgtccaaatgggacgacagtggcaatgacatcattgtgctggccaagcagatgtgcatgattatgatggagatgacagactttacccgaggtaaaggaccactcaaaaatacatcggatgtcatcagtgctgccaagaaaattgctgaggcaggatccaggatggacaagcttggccgcaccattgcagaccattgccccgactcggcttgcaagcaggacctgctggcctacctgcaacgcatcgccctctactgccaccagctgaacatctgcagcaaggtcaaggccgaggtgcagaatctcggcggggagcttgttgtctctggggtggacagcgccatgtccctgatccaggcagccaagaacttgatgaatgctgtggtgcagacagtgaaggcatcctacgtcgcctctaccaaataccaaaagtcacagggtatggcttccctcaaccttcctgctgtgtcatggaagatgaaggcaccagagaaaaagccattggtgaagagagagaaacaggatgagacacagaccaagattaaacgggcatctcagaagaagcacgtgaacccggtgcaggccctcagcgagttcaaagctatggacagcatctaagtctgcccaggccggccgcccccacccctcggggctcctgaatatcagtcactgttcgtcactcaaatgaatttgctaaatacaacactgatactagattccacagggaaatgggcagactgaaccagtccaggtggtgaattttccaagaacatagtttaagttgattaaaaatgcttttagaatgcaggagcctacttctagctgtattttttgtatgcttaaataaaaataaaaattcataaccaaagagaatcccacattagcttgttagtaatgctctgaccaagccgagatgcccattctcttagtgatggcggcgttagggtttgagagaagggaatttggctcaacttcagttgagagggtgcagtccagacagcttgactgcttttaaatgaccaaagatgacctgtggtaagcaacctgggcatcttaggaagcagtccctggagaaggcatgttcccagaaaggtctctggagggacaaactcactcagtaaaacataatgtatcatgaagaaaactgattctctatgacatgaaatgaaaattttaatgcattgttataattactaatgtacgctgctgcaggacattaataaagttgcttttttaggctacagtgtctcgatgccataatcagaacacactttttttcctctttctcccagcttcaaatgcaaattcatcattgggctcacttctaataactgcagtgtttcccgccttgggcttgcagcagaaaaacctgacaacatagtgtttgctaaggcagtaatttagactttaccttatttgtgattactgtagtgattgattgattgattactattaactacaaggtataatttactatcaccttatttaaattttatgaattaatttgaatgttttttacactaactaacttttcccaataaagtccactatgaaaccacgacaaaaaaaaaaaaaaaaaa

SEQ ID NO: 1167 - protein, 906 aa, Homo sapiens
MTAVHAGNINFKWDPKSLEIRTLAVERLLEPLVTQVTTLVNTNSKGPSNKKRGRSKKAHVLAASVEQATENFLEKGDKIAKESQFLKEELVAAVEDVRKQGDLMKAAAGEFADDPCSSVKRGNMVRAARALLSAVTRLLILADMADVYKLLVQLKVVEDGILKLRNAGNEQDLGIQYKALKPEVDKLNIMAAKRQQELKDVGHRDQMAAARGILQKNVPILYTASQACLQHPDVAAYKANRDLIYKQLQQAVTGISNAAQATASDDASQHQGGGGGELAYALNNFDKQIIVDPLSFSEERFRPSLEERLESIISGAALMADSSCTRDDRRERIVAECNAVRQALQDLLSEYMGNAGRKERSDALNSAIDKMTKKTRDLRRQLRKAVMDHVSDSFLETNVPLLVLIEAAKNGNEKEVKEYAQVFREHANKLIEVANLACSISNNEEGVKLVRMSASQLEALCPQVINAALALAAKPQSKLAQENMDLFKEQWEKQVRVLTDAVDDITSIDDFLAVSENHILEDVNKCVIALQEKDVDGLDRTAGAIRGRAARVIHVVTSEMDNYEPGVYTEKVLEATKLLSNTVMPRFTEQVEAAVEALSSDPAQPMDENEFIDASRLVYDGIRDIRKAVLMIRTPEELDDSDFETEDFDVRSRTSVQTEDDQLIAGQSARAIMAQLPQEQKAKIAEQVASFQEEKSKLDAEVSKWDDSGNDIIVLAKQMCMIMMEMTDFTRGKGPLKNTSDVISAAKKIAEAGSRMDKLGRTIADHCPDSACKQDLLAYLQRIALYCHQLNICSKVKAEVQNLGGELVVSGVDSAMSLIQAAKNLMNAVVQTVKASYVASTKYQKSQGMASLNLPAVSWKMKAPEKKPLVKREKQDETQTKIKRASQKKHVNPVQALSEFKAMDSI

SEQ ID NO: 1168 - DNA, 1996 bp, Homo sapiens
accggctcagacggtcgccgccgcgtttgcgcagggggagctggtcgccgccgcggccgcctggaattgtgggagttgtgtctgccactcggctgccggaggccgaaggccagctattacttctctactgaggccaactgtgagccctggtgtgtttcattggcaggagaagaggctaattaagtgaaactgaaaggtccctgactatggctccccagagcctgccttcatctaggatggctcctctgggcatgctgcttgggctgctgatggccgcctgcttcaccttctgcctcagtcatcagaacctgaaggagtttgccctgaccaacccagagaagagcagcaccaaagaaacagagagaaaagaaaccaaagccgaggaggagctggatgccgaagtcctggaggtgttccacccgacgcatgagtggcaggcccttcagccagggcaggctgtccctgcaggatcccacgtacggctgaatcttcagactggggaaagagaggcaaaactccaatatgaggacaagttccgaaataatttgaaaggcaaaaggctggatatcaacaccaacacctacacatctcaggatctcaagagtgcactggcaaaattcaaggagggggcagagatggagagttcaaaggaagacaaggcaaggcaggctgaggtaaagcggctcttccgccccattgaggaactgaagaaagactttgatgagctgaatgttgtcattgagactgacatgcagatcatggtacggctgatcaacaagttcaatagttccagctccagtttggaagagaagattgctgcgctctttgatcttgaatattatgtccatcagatggacaatgcgcaggacctgctttcctttggtggtcttcaagtggtgatcaatgggctgaacagcacagagcccctcgtgaaggagtatgctgcgtttgtgctgggcgctgccttttccagcaaccccaaggtccaggtggaggccatcgaagggggagccctgcagaagctgctggtcatcctggccacggagcagccgctcactgcaaagaagaaggtcctgtttgcactgtgctccctgctgcgccacttcccctatgcccagcggcagttcctgaagctcggggggctgcaggtcctgaggaccctggtgcaggagaagggcacggaggtgctcgccgtgcgcgtggtcacactgctctacgacctggtcacggagaagatgttcgccgaggaggaggctgagctgacccaggagatgtccccagagaagctgcagcagtatcgccaggtacacctcctgccaggcctgtgggaacagggctggtgcgagatcacggcccacctcctggcgctgcccgagcatgatgcccgtgagaaggtgctgcagacactgggcgtcctcctgaccacctgccgggaccgctaccgtcaggacccccagctcggcaggacactggccagcctgcaggctgagtaccaggtgctggccagcctggagctgcaggatggtgaggacgagggctacttccaggagctgctgggctctgtcaacagcttgctgaaggagctgagatgaggccccacaccaggactggactgggatgccgctagtgaggctgaggggtgccagcgtgggtgggcttctcaggcaggaggacatcttggcagtgctggcttggccattaaatggaaacctgaaggccatcctctttctgctgtgtgtctgtgtagactgggcacagccctgtggccggggggtcaggtgagtggttgggtgatgggctctgctgacgtgcagggctcagcccagggcatccaggaacaggctccagggcaggaacctgggcccaggagttgcaagtctctgcttcttaccaagcagcagctctgtaccttgggaagtcgcttaattgctctgagcttgtttcctcatctgtcaggagtgccattaaaggagaaaaatcacgtagaaaaaaaaaa

SEQ ID NO: 1169 - protein, 461 aa, Homo sapiens
MAPQSLPSSRMAPLGMLLGLLMAACFTFCLSHQNLKEFALTNPEKSSTKETERKETKAEEELDAEVLEVFHPTHEWQALQPGQAVPAGSHVRLNLQTGEREAKLQYEDKFRNNLKGKRLDINTNTYTSQDLKSALAKFKEGAEMESSKEDKARQAEVKRLFRPIEELKKDFDELNVVIETDMQIMVRLINKFNSSSSSLEEKIAALFDLEYYVHQMDNAQDLLSFGGLQVVINGLNSTEPLVKEYAAFVLGAAFSSNPKVQVEAIEGGALQKLLVILATEQPLTAKKKVLFALCSLLRHFPYAQRQFLKLGGLQVLRTLVQEKGTEVLAVRVVTLLYDLVTEKMFAEEEAELTQEMSPEKLQQYRQVHLLPGLWEQGWCEITAHLLALPEHDAREKVLQTLGVLLTTCRDRYRQDPQLGRTLASLQAEYQVLASLELQDGEDEGYFQELLGSVNSLLKELR

SEQ ID NO: 1170 - DNA, 1908 bp, Homo sapiens
accggctcagacggtcgccgccgcgtttgcgcagggggagctggtcgccgccgcggccgcctggaattgtgggagttgtgtctgccactcggctgccggaggccgaaggtccctgactatggctccccagagcctgccttcatctaggatggctcctctgggcatgctgcttgggctgctgatggccgcctgcttcaccttctgcctcagtcatcagaacctgaaggagtttgccctgaccaacccagagaagagcagcaccaaagaaacagagagaaaagaaaccaaagccgaggaggagctggatgccgaagtcctggaggtgttccacccgacgcatgagtggcaggcccttcagccagggcaggctgtccctgcaggatcccacgtacggctgaatcttcagactggggaaagagaggcaaaactccaatatgaggacaagttccgaaataatttgaaaggcaaaaggctggatatcaacaccaacacctacacatctcaggatctcaagagtgcactggcaaaattcaaggagggggcagagatggagagttcaaaggaagacaaggcaaggcaggctgaggtaaagcggctcttccgccccattgaggaactgaagaaagactttgatgagctgaatgttgtcattgagactgacatgcagatcatggtacggctgatcaacaagttcaatagttccagctccagtttggaagagaagattgctgcgctctttgatcttgaatattatgtccatcagatggacaatgcgcaggacctgctttcctttggtggtcttcaagtggtgatcaatgggctgaacagcacagagcccctcgtgaaggagtatgctgcgtttgtgctgggcgctgccttttccagcaaccccaaggtccaggtggaggccatcgaagggggagccctgcagaagctgctggtcatcctggccacggagcagccgctcactgcaaagaagaaggtcctgtttgcactgtgctccctgctgcgccacttcccctatgcccagcggcagttcctgaagctcggggggctgcaggtcctgaggaccctggtgcaggagaagggcacggaggtgctcgccgtgcgcgtggtcacactgctctacgacctggtcacggagaagatgttcgccgaggaggaggctgagctgacccaggagatgtccccagagaagctgcagcagtatcgccaggtacacctcctgccaggcctgtgggaacagggctggtgcgagatcacggcccacctcctggcgctgcccgagcatgatgcccgtgagaaggtgctgcagacactgggcgtcctcctgaccacctgccgggaccgctaccgtcaggacccccagctcggcaggacactggccagcctgcaggctgagtaccaggtgctggccagcctggagctgcaggatggtgaggacgagggctacttccaggagctgctgggctctgtcaacagcttgctgaaggagctgagatgaggccccacaccaggactggactgggatgccgctagtgaggctgaggggtgccagcgtgggtgggcttctcaggcaggaggacatcttggcagtgctggcttggccattaaatggaaacctgaaggccatcctctttctgctgtgtgtctgtgtagactgggcacagccctgtggccggggggtcaggtgagtggttgggtgatgggctctgctgacgtgcagggctcagcccagggcatccaggaacaggctccagggcaggaacctgggcccaggagttgcaagtctctgcttcttaccaagcagcagctctgtaccttgggaagtcgcttaattgctctgagcttgtttcctcatctgtcaggagtgccattaaaggagaaaaatcacgtagaaaaaaaaaa

SEQ ID NO: 1171 - protein, 461 aa, Homo sapiens; identical to SEQ ID NO: 1169

SEQ ID NO: 1172 - DNA, 3921 bp, Homo sapiens
gcgagagtgggtttgttcttgggctgcagccgctgccgccgcttctcgccagcgccgttgctgcgggggattgtgggagtctccgcgtcccgctcgctgggagagaggtacctctccttttccctctccctttccctaagagttgtctgctggttctcagcttgaagaagattctgcagtccttattgatcctttttcttggcgttaccatttttgaagcaaagttaacctagctttctagtttgagctttctttttggccgtctttaaaaaaatttttttttttaatctataaaatagacaagagctagttctacaatgtccaagtcattccagcagtcatctctcagtagggactcacagggtcatgggcgtgacctgtctgcggcaggaataggccttcttgctgctgctacccagtctttaagtatgccagcatctcttggaaggatgaaccagggtactgcacgccttgctagtttaatgaatcttggaatgagttcttcattgaatcaacaaggagctcatagtgcactgtcttctgctagtacttcttcccataatttgcagtctatatttaacattggaagtagaggtccactccctttatcttctcaacaccgtggagatgcagaccaggccagtaacattttggccagctttggtctgtctgctagagacttagatgaactgagtcgttatccagaggacaagattactcctgagaatttgccccaaatccttctacagcttaaaaggaggagaactgaagaaggccctaccttgagttatggtagagatggcagatctgctacacgggagccaccatacagagtacctagggatgattgggaagaaaaaaggcactttagaagagatagttttgatgatcgtggtcctagtctcaacccagtgcttgattatgaccatggaagtcgttctcaagaatctggttattatgacagaatggattatgaagatgacagattaagagatggagaaaggtgtagggatgattctttttttggtgagacctcgcataactatcataaatttgacagtgagtatgagagaatgggacgtggtcctggccccttacaagagagatctctctttgagaaaaagagaggcgctcctccaagtagcaatattgaagacttccatggactcttaccgaagggttatccccatctgtgctctatatgtgatttgccagttcattctaataaggagtggagtcaacatatcaatggagcaagtcacagtcgtcgatgccagcttcttcttgaaatctacccagaatggaatcctgacaatgatacaggacacacaatgggtgatccattcatgttgcagcagtctacaaatccagcaccaggaattctgggacctccacctccctcatttcatcttgggggaccagcagttggaccaagaggaaatctgggtgctggaaatggaaacctgcaaggacctagacacatgcagaaaggcagagtggaaactagcagagttgttcacatcatggattttcaacgagggaaaaacttgagataccagctattacagctggtagaaccatttggagtcatttcaaatcatctgattctaaataaaattaatgaggcatttattgaaatggcaaccacagaggatgctcaggccgcagtggattattacacaaccacaccagcgttagtatttggcaagccagtgagagttcatttatcccagaagtataaaagaataaagaaacctgaaggaaagccagatcagaagtttgatcaaaagcaagagcttggacgtgtgatacatctcagcaatttgccgcattctggctattctgatagtgctgttctcaagcttgctgagccttatgggaaaataaagaattacatattgatgaggatgaaaagtcaggcttttattgagatggagacaagagaagatgcaatggcaatggttgaccattgtttgaaaaaagccctttggtttcaggggagatgtgtgaaggttgacctgtctgagaaatataaaaaactggttctgaggattccaaacagaggcattgatttactgaaaaaagataaatcccgaaaaagatcttactctccagatggcaaagaatctccaagtgataagaaatccaaaactgatggttcccagaagactgagagttcaaccgaaggtaaagaacaagaagagaagtccggtgaagatggtgagaaagacacaaaggatgaccagacagagcaggaacctaatatgcttcttgaatctgaagatgagctacttgtagatgaagaagaagcagcagcactgctagaaagtggcagttcagtgggagacgagaccgatcttgctaatttaggtgatgtggcttctgatgggaaaaaggaaccatcagataaagctgtgaaaaaagatggaagtgcttcagcagcagcaaagaaaaagcttaaaaaggtggacaagatcgaggaacttgatcaagaaaacgaagcagcgttggaaaatggaattaaaaatgaggaaaacacagaaccaggtgctgaatcttctgagaacgctgatgatcccaacaaagatacaagtgaaaacgcagatggtcaaagtgatgagaacaaggacgactatacaatcccagatgagtatagaattggaccatatcagcccaatgttcctgttggtatagactatgtgatacctaaaacagggttttactgtaagctgtgttcactcttttatacaaatgaagaagttgcaaagaatactcattgcagcagccttcctcattatcagaaattaaagaaatttctgaataaattggcagaagaacgcagacagaagaaggaaacttaagatgtgcaaggagatttaatgatttcaaagaaaataatggttctttgtttttaatgttaaccttttttaaatacaatactgatagttagaagaaaactattgtactcttttgttttagtggagaaataatagatgtctgttcatgtgttaagtgttatagcaaaaaaaatacacatatggttaagttaatgaatagtttttgttttatcagaatggcaacagacagaagtactttgtagagattgacttcctaagctacttaagacaacttgcaccactaagaaaaaaatgtagaaccatttggaaaaatgaaatttagtagttccaagtttcaaagaaatgtcaacattttattccattcaataaagaacaaaaccaatagtgtttttattactttcatctgaaacattccatgttttaatctgagccttgcagactttcatttggagtttgaacccgttttggttgcatttcatttttggagaacttaattaacgtgagattggcaattgaaatgcaggtgcagttttctgttaatgtcatgctgttgtttaggtaataagaaatattaagtaattggctttagattttgtaatttttttccctgagttcctgctagatttcgtattctagtagtcaatgtattttcagtgaaatgcaaaaatattcccgttatctttgaccagtattaatttttgagatcttactgcttgtcacttgaatcccgtgattgtcatacatctctggtataagcaacatttgatttttgaagtgtgtagaccatctcttcatattttcaagatgtaattttacatttctgcatttttaaaacagtttggccataatcctagatgcacgcttctaattcatgtacctgcacatgtgacctttgtgaacagaaatttgcatgtataatttgtgtttacttgtaactttctggttatatactgcttatatctgtggattcaagttactgaagtgaataccaataaaaagaaaaccctaggccatgttaattggttatacatgtttggaatgttaaccaaaaaaaaaaaaaaaa

SEQ ID NO: 1173 - protein, 847 aa, Homo sapiens
MSKSFQQSSLSRDSQGHGRDLSAAGIGLLAAATQSLSMPASLGRMNQGTARLASLMNLGMSSSLNQQGAHSALSSASTSSHNLQSIFNIGSRGPLPLSSQHRGDADQASNILASFGLSARDLDELSRYPEDKITPENLPQILLQLKRRRTEEGPTLSYGRDGRSATREPPYRVPRDDWEEKRHFRRDSFDDRGPSLNPVLDYDHGSRSQESGYYDRMDYEDDRLRDGERCRDDSFFGETSHNYHKFDSEYERMGRGPGPLQERSLFEKKRGAPPSSNIEDFHGLLPKGYPHLCSICDLPVHSNKEWSQHINGASHSRRCQLLLEIYPEWNPDNDTGHTMGDPFMLQQSTNPAPGILGPPPPSFHLGGPAVGPRGNLGAGNGNLQGPRHMQKGRVETSRVVHIMDFQRGKNLRYQLLQLVEPFGVISNHLILNKINEAFIEMATTEDAQAAVDYYTTTPALVFGKPVRVHLSQKYKRIKKPEGKPDQKFDQKQELGRVIHLSNLPHSGYSDSAVLKLAEPYGKIKNYILMRMKSQAFIEMETREDAMAMVDHCLKKALWFQGRCVKVDLSEKYKKLVLRIPNRGIDLLKKDKSRKRSYSPDGKESPSDKKSKTDGSQKTESSTEGKEQEEKSGEDGEKDTKDDQTEQEPNMLLESEDELLVDEEEAAALLESGSSVGDETDLANLGDVASDGKKEPSDKAVKKDGSASAAAKKKLKKVDKIEELDQENEAALENGIKNEENTEPGAESSENADDPNKDTSENADGQSDENKDDYTIPDEYRIGPYQPNVPVGIDYVIPKTGFYCKLCSLFYTNEEVAKNTHCSSLPHYQKLKKFLNKLAEERRQKKET

SEQ ID NO: 1174 - DNA, 4031 bp, Homo sapiens
ctttcccctccggcctctgccggtgctgctgcgccctgcggagctccgaacacgtgcgcagaggctggctgtggcagatgcaactgcaggatgacttgaaagtagggcatccttcacccatctgaagggaggaaatagtggcaggtgacagtctgcatgtgcagttttcagatgccttcacctgaatgacatctacctccatcaggaccccagatgtctgacagccctgtgtgacaccaagataagtaacagttgtctgctggttctcagcttgaagaagattctgcagtccttattgatcctttttcttggcgttaccatttttgaagcaaagttaacctagctttctagtttgagctttctttttggccgtctttaaaaaaatttttttttttaatctataaaatagacaagagctagttctacaatgtccaagtcattccagcagtcatctctcagtagggactcacagggtcatgggcgtgacctgtctgcggcaggaataggccttcttgctgctgctacccagtctttaagtatgccagcatctcttggaaggatgaaccagggtactgcacgccttgctagtttaatgaatcttggaatgagttcttcattgaatcaacaaggagctcatagtgcactgtcttctgctagtacttcttcccataatttgcagtctatatttaacattggaagtagaggtccactccctttatcttctcaacaccgtggagatgcagaccaggccagtaacattttggccagctttggtctgtctgctagagacttagatgaactgagtcgttatccagaggacaagattactcctgagaatttgccccaaatccttctacagcttaaaaggaggagaactgaagaaggccctaccttgagttatggtagagatggcagatctgctacacgggagccaccatacagagtacctagggatgattgggaagaaaaaaggcactttagaagagatagttttgatgatcgtggtcctagtctcaacccagtgcttgattatgaccatggaagtcgttctcaagaatctggttattatgacagaatggattatgaagatgacagattaagagatggagaaaggtgtagggatgattctttttttggtgagacctcgcataactatcataaatttgacagtgagtatgagagaatgggacgtggtcctggccccttacaagagagatctctctttgagaaaaagagaggcgctcctccaagtagcaatattgaagacttccatggactcttaccgaagggttatccccatctgtgctctatatgtgatttgccagttcattctaataaggagtggagtcaacatatcaatggagcaagtcacagtcgtcgatgccagcttcttcttgaaatctacccagaatggaatcctgacaatgatacaggacacacaatgggtgatccattcatgttgcagcagtctacaaatccagcaccaggaattctgggacctccacctccctcatttcatcttgggggaccagcagttggaccaagaggaaatctgggtgctggaaatggaaacctgcaaggacctagacacatgcagaaaggcagagtggaaactagcagagttgttcacatcatggattttcaacgagggaaaaacttgagataccagctattacagctggtagaaccatttggagtcatttcaaatcatctgattctaaataaaattaatgaggcatttattgaaatggcaaccacagaggatgctcaggccgcagtggattattacacaaccacaccagcgttagtatttggcaagccagtgagagttcatttatcccagaagtataaaagaataaagaaacctgaaggaaagccagatcagaagtttgatcaaaagcaagagcttggacgtgtgatacatctcagcaatttgccgcattctggctattctgatagtgctgttctcaagcttgctgagccttatgggaaaataaagaattacatattgatgaggatgaaaagtcaggcttttattgagatggagacaagagaagatgcaatggcaatggttgaccattgtttgaaaaaagccctttggtttcaggggagatgtgtgaaggttgacctgtctgagaaatataaaaaactggttctgaggattccaaacagaggcattgatttactgaaaaaagataaatcccgaaaaagatcttactctccagatggcaaagaatctccaagtgataagaaatccaaaactgatggttcccagaagactgagagttcaaccgaaggtaaagaacaagaagagaagtccggtgaagatggtgagaaagacacaaaggatgaccagacagagcaggaacctaatatgcttcttgaatctgaagatgagctacttgtagatgaagaagaagcagcagcactgctagaaagtggcagttcagtgggagacgagaccgatcttgctaatttaggtgatgtggcttctgatgggaaaaaggaaccatcagataaagctgtgaaaaaagatggaagtgcttcagcagcagcaaagaaaaagcttaaaaaggtggacaagatcgaggaacttgatcaagaaaacgaagcagcgttggaaaatggaattaaaaatgaggaaaacacagaaccaggtgctgaatcttctgagaacgctgatgatcccaacaaagatacaagtgaaaacgcagatggtcaaagtgatgagaacaaggacgactatacaatcccagatgagtatagaattggaccatatcagcccaatgttcctgttggtatagactatgtgatacctaaaacagggttttactgtaagctgtgttcactcttttatacaaatgaagaagttgcaaagaatactcattgcagcagccttcctcattatcagaaattaaagaaatttctgaataaattggcagaagaacgcagacagaagaaggaaacttaagatgtgcaaggagatttaatgatttcaaagaaaataatggttctttgtttttaatgttaaccttttttaaatacaatactgatagttagaagaaaactattgtactcttttgttttagtggagaaataatagatgtctgttcatgtgttaagtgttatagcaaaaaaaatacacatatggttaagttaatgaatagtttttgttttatcagaatggcaacagacagaagtactttgtagagattgacttcctaagctacttaagacaacttgcaccactaagaaaaaaatgtagaaccatttggaaaaatgaaatttagtagttccaagtttcaaagaaatgtcaacattttattccattcaataaagaacaaaaccaatagtgtttttattactttcatctgaaacattccatgttttaatctgagccttgcagactttcatttggagtttgaacccgttttggttgcatttcatttttggagaacttaattaacgtgagattggcaattgaaatgcaggtgcagttttctgttaatgtcatgctgttgtttaggtaataagaaatattaagtaattggctttagattttgtaatttttttccctgagttcctgctagatttcgtattctagtagtcaatgtattttcagtgaaatgcaaaaatattcccgttatctttgaccagtattaatttttgagatcttactgcttgtcacttgaatcccgtgattgtcatacatctctggtataagcaacatttgatttttgaagtgtgtagaccatctcttcatattttcaagatgtaattttacatttctgcatttttaaaacagtttggccataatcctagatgcacgcttctaattcatgtacctgcacatgtgacctttgtgaacagaaatttgcatgtataatttgtgtttacttgtaactttctggttatatactgcttatatctgtggattcaagttactgaagtgaataccaataaaaagaaaaccctaggccatgttaattggttatacatgtttggaatgttaaccaaaaaaaaaaaaaaaa

SEQ ID NO: 1175 - protein, 847 aa, Homo sapiens; identical to SEQ ID NO: 1173

SEQ ID NO: 1176 - DNA, 1521 bp, Homo sapiens
gggtttggggagagaggggcggagggactggcgggctcttggcgtcttgggggaacgctgcaaccgtcgacgggcctgatcagaagatcgtctttctcccgtttcttcgccatcgctaccccttatttttggttgtattgcagctcatgccctggaaaaaagaacctttggggttaaaaacgacaaccaacatcagccatgaaagatccaagtcgcagcagtactagcccaagcatcatcaatgaagatgtgattattaacggtcattctcatgaagatgacaatccatttgcagagtacatgtggatggaaaatgaagaagaattcaacagacaaatagaagaggagttatgggaagaagaatttattgaacgctgtttccaagaaatgctggaagaggaagaagagcatgaatggtttattccagctcgagatctcccacaaactatggaccaaatccaagaccagtttaatgaccttgttatcagtgatggctcttctctggaagatcttgtggtcaagagcaatctgaatccaaatgcaaaggagtttgttcctggggtgaagtacggaaatatttgagtagacggggccctcttttggtggatgtagcacaatttccacactgtgaaggcagtattagaagacttaattgtaaaagctctcttgtcactgtgttacacttatgcattgccaaagtttttgttagtcttgcatgcttaataaaagtgctgagactgttactaagtaaaaagctgtcaaacatttactgaaaatagaattggccccatggcttgatgtgaagacagcaaggaaagaagcaccagtcaagttgtgaacaagcaccaaattaaaagacctaaaccttaccaaattgtctttttttgaggctaatctatcacttgttaatgtctaaactttaaaatcagtacatttaatttgagttccaactgttaagcatatttctcagacttaaatttgattatgtccccatcaaaaagaatctccattttctgaaggtctgttagttaatttgagataatttgttaaaggcaagtatgtcatattactgaggctacaagttagtcagcagatgagtgccagtccagccttttctggtatgttattgttagaaatattgagttctaatgttacatctgaggaagtatgtaatttgagaattgtaacttctaagggattcactgcatcatagctatgcctgtatggagtctaacatatgaccaataccaacccataatccagctgaacaaagatactgtaacatgatttgagtggtgcttttccttgctttgttaaccatcacgagagtctgcagcacaacttttaacaaagctagaacagttttggcttcttaaacttcatatttgggtaggttaagctgccatacgtgttcagtgtgaatagtgtttaagttgaaaatattgtaaaaaaattatattttttcaaaaatatttaaaaaaataaataatagtagaactgagcaaaaaaaaaaaaaaaaaa

SEQ ID NO: 1177 - protein, 127 aa, Homo sapiens
MKDPSRSSTSPSIINEDVIINGHSHEDDNPFAEYMWMENEEEFNRQIEEELWEEEFIERCFQEMLEEEEEHEWFIPARDLPQTMDQIQDQFNDLVISDGSSLEDLVVKSNLNPNAKEFVPGVKYGNI

SEQ ID NO: 1178 - DNA, 1500 bp, Homo sapiens
gtgaagtcacttccgggctggggtgtttgtttggactggagaagggaggcggcgggcgaagcgcacgtcgagcgggggagcggcgctgcctgtggagatccgcggaggccgacaggattcgttggctgccgtccccgctgctgtgcattgggttaaaaacgacaaccaacatcagccatgaaagatccaagtcgcagcagtactagcccaagcatcatcaatgaagatgtgattattaacggtcattctcatgaagatgacaatccatttgcagagtacatgtggatggaaaatgaagaagaattcaacagacaaatagaagaggagttatgggaagaagaatttattgaacgctgtttccaagaaatgctggaagaggaagaagagcatgaatggtttattccagctcgagatctcccacaaactatggaccaaatccaagaccagtttaatgaccttgttatcagtgatggctcttctctggaagatcttgtggtcaagagcaatctgaatccaaatgcaaaggagtttgttcctggggtgaagtacggaaatatttgagtagacggggccctcttttggtggatgtagcacaatttccacactgtgaaggcagtattagaagacttaattgtaaaagctctcttgtcactgtgttacacttatgcattgccaaagtttttgttagtcttgcatgcttaataaaagtgctgagactgttactaagtaaaaagctgtcaaacatttactgaaaatagaattggccccatggcttgatgtgaagacagcaaggaaagaagcaccagtcaagttgtgaacaagcaccaaattaaaagacctaaaccttaccaaattgtctttttttgaggctaatctatcacttgttaatgtctaaactttaaaatcagtacatttaatttgagttccaactgttaagcatatttctcagacttaaatttgattatgtccccatcaaaaagaatctccattttctgaaggtctgttagttaatttgagataatttgttaaaggcaagtatgtcatattactgaggctacaagttagtcagcagatgagtgccagtccagccttttctggtatgttattgttagaaatattgagttctaatgttacatctgaggaagtatgtaatttgagaattgtaacttctaagggattcactgcatcatagctatgcctgtatggagtctaacatatgaccaataccaacccataatccagctgaacaaagatactgtaacatgatttgagtggtgcttttccttgctttgttaaccatcacgagagtctgcagcacaacttttaacaaagctagaacagttttggcttcttaaacttcatatttgggtaggttaagctgccatacgtgttcagtgtgaatagtgtttaagttgaaaatattgtaaaaaaattatattttttcaaaaatatttaaaaaaataaataatagtagaactgagcaaaaaaaaaaaaaaaaaa

SEQ ID NO: 1179 - protein, 127 aa, Homo sapiens; identical to SEQ ID NO: 1177

SEQ ID NO: 1180 - DNA, 2326 bp, Homo sapiens
ggcctttgtcaagtcatcccctcttctcctcaggaactgctcaaacctgtgccccaaagatgagggcccaggaggacctcgagggccggacacagcatgaaaccaccagggacccctcgaccccgctacccacagagcctaagtttgacatgttgtacaagatcgaggacgtgccaccttggtacctgtgcatcctgctgggcttccagcactacctgacatgcttcagtggtaccatcgccgtgcccttcctgctggctgaggcgctgtgtgtgggccacgaccagcacatggttagtcagctcatcggcaccatcttcacgtgcgtgggcatcaccactctcatccagaccaccgtgggcatccggctgccgctgttccaggccagtgcctttgcatttctggttccagccaaagccatactggctctggagagatggaaatgccccccggaagaggagatctacggtaactggagtctgcccctgaacacctctcatatttggcacccacggatacgggaggtccagggtgcaatcatggtgtccagcgtggtggaggtggtgattggcctgctggggctgcctggggccctgctcaactacattgggcctctcacagtcacccccactgtctccctcattggcctttctgtcttccaagctgctggcgaccgagctggctcccactggggcatctcagcttgctccattctcctgatcatcctcttctcccagtacctgcgcaacctcaccttcctgctgcctgtctaccgctggggcaagggcctcactctcctccgcatccagatcttcaaaatgtttcctatcatgctggccatcatgaccgtgtggctgctctgctatgtcctgaccttgacagacgtgctgcccacagacccaaaagcctatggcttccaggcacgaaccgatgcccgtggtgacatcatggctattgcaccctggatccgcatcccctacccctgtcagtggggcctgcccacggtgactgcggctgctgtcctgggaatgttcagcgccactctggcaggcatcattgagtccatcggagattactacgcctgtgcccgcctggctggtgcaccaccccctccagtacatgctatcaacaggggcatcttcaccgaaggcatttgctgcatcatcgcggggctattgggcacgggcaacgggtccacctcgtccagtcccaacattggcgtcctgggaattaccaaggtgggcagccggcgcgtggtgcagtatggtgcggctatcatgctggtcctgggcaccatcggcaagttcacggccctcttcgcctcgctccctgaccccatcctggggggcatgttctgcactctctttggcatgattacagctgtggggctgtccaacctgcaatttgtggacatgaactcctctcgcaacctcttcgtgctgggattttccatgttcttcgggctcacgctgcccaattacctggagtccaaccctggcgccatcaatacaggcattcttgaagtggatcagattctgattgtgctgctgaccacggagatgtttgtgggcgggtgccttgctttcatacttgacaacacagtgccagggagcccagaggagcgtggtctgatacagtggaaagctggggctcatgccaacagtgacatgtcttccagcctcaagagctacgatttccccattgggatgggcatagtaaaaagaattacctttctgaaatacattcctatctgcccagtcttcaaaggattttcttcaagttcaaaagatcagattgcaattccagaagacactccagaaaatacagaaactgcatctgtgtgcaccaaggtctgaaaaatgacttccaggaaaggaagcatggtatataacaggaaaagaaaactacatggggaaccagaagacctaagcctgaaatcccagccctgcccctaactaacttctgtgtaaactcagataagtcacctttctctgggattcaaatttttgcatcagttaaaaaaaaaggggtgggggggaatgggccaaagtctgagtcttagagacttgtaccaatgttatgctatgtctctaaatctttactctcctaagtagacttgtcagcatctaggaagaacagctagaaattttcctctgtgatattttagactgcaagttgaaaaaaataaaaagaaatgagggcaggttccagggcctgaaatgtaggtatgctgcaaggcttttacattgaatttgaccctacatcacttcaagactaatgcataatattaaacatcatgttgaagaaaaaaaaaaaaaaaaaaaaa

SEQ ID NO: 1181 - protein, 598 aa, Homo sapiens
MRAQEDLEGRTQHETTRDPSTPLPTEPKFDMLYKIEDVPPWYLCILLGFQHYLTCFSGTIAVPFLLAEALCVGHDQHMVSQLIGTIFTCVGITTLIQTTVGIRLPLFQASAFAFLVPAKAILALERWKCPPEEEIYGNWSLPLNTSHIWHPRIREVQGAIMVSSVVEVVIGLLGLPGALLNYIGPLTVTPTVSLIGLSVFQAAGDRAGSHWGISACSILLIILFSQYLRNLTFLLPVYRWGKGLTLLRIQIFKMFPIMLAIMTVWLLCYVLTLTDVLPTDPKAYGFQARTDARGDIMAIAPWIRIPYPCQWGLPTVTAAAVLGMFSATLAGIIESIGDYYACARLAGAPPPPVHAINRGIFTEGICCIIAGLLGTGNGSTSSSPNIGVLGITKVGSRRVVQYGAAIMLVLGTIGKFTALFASLPDPILGGMFCTLFGMITAVGLSNLQFVDMNSSRNLFVLGFSMFFGLTLPNYLESNPGAINTGILEVDQILIVLLTTEMFVGGCLAFILDNTVPGSPEERGLIQWKAGAHANSDMSSSLKSYDFPIGMGIVKRITFLKYIPICPVFKGFSSSSKDQIAIPEDTPENTETASVCTKV

SEQ ID NO: 1182 - DNA, 2338 bp, Homo sapiens
ggcctttgtcaagtcatcccctcttctcctcaggaactgctcaaacctgtgccccaaagatgagggcccaggaggacctcgagggccggacacagcatgaaaccaccagggacccctcgaccccgctacccacagagcctaagtttgacatgttgtacaagatcgaggacgtgccaccttggtacctgtgcatcctgctgggcttccagcactacctgacatgcttcagtggtaccatcgccgtgcccttcctgctggctgaggcgctgtgtgtgggccacgaccagcacatggttagtcagctcatcggcaccatcttcacgtgcgtgggcatcaccactctcatccagaccaccgtgggcatccggctgccgctgttccaggccagtgcctttgcatttctggttccagccaaagccatactggctctggagagatggaaatgccccccggaagaggagatctacggtaactggagtctgcccctgaacacctctcatatttggcacccacggatacgggaggtgggtttgcatgtccagggtgcaatcatggtgtccagcgtggtggaggtggtgattggcctgctggggctgcctggggccctgctcaactacattgggcctctcacagtcacccccactgtctccctcattggcctttctgtcttccaagctgctggcgaccgagctggctcccactggggcatctcagcttgctccattctcctgatcatcctcttctcccagtacctgcgcaacctcaccttcctgctgcctgtctaccgctggggcaagggcctcactctcctccgcatccagatcttcaaaatgtttcctatcatgctggccatcatgaccgtgtggctgctctgctatgtcctgaccttgacagacgtgctgcccacagacccaaaagcctatggcttccaggcacgaaccgatgcccgtggtgacatcatggctattgcaccctggatccgcatcccctacccctgtcagtggggcctgcccacggtgactgcggctgctgtcctgggaatgttcagcgccactctggcaggcatcattgagtccatcggagattactacgcctgtgcccgcctggctggtgcaccaccccctccagtacatgctatcaacaggggcatcttcaccgaaggcatttgctgcatcatcgcggggctattgggcacgggcaacgggtccacctcgtccagtcccaacattggcgtcctgggaattaccaaggtgggcagccggcgcgtggtgcagtatggtgcggctatcatgctggtcctgggcaccatcggcaagttcacggccctcttcgcctcgctccctgaccccatcctggggggcatgttctgcactctctttggcatgattacagctgtggggctgtccaacctgcaatttgtggacatgaactcctctcgcaacctcttcgtgctgggattttccatgttcttcgggctcacgctgcccaattacctggagtccaaccctggcgccatcaatacaggcattcttgaagtggatcagattctgattgtgctgctgaccacggagatgtttgtgggcgggtgccttgctttcatacttgacaacacagtgccagggagcccagaggagcgtggtctgatacagtggaaagctggggctcatgccaacagtgacatgtcttccagcctcaagagctacgatttccccattgggatgggcatagtaaaaagaattacctttctgaaatacattcctatctgcccagtcttcaaaggattttcttcaagttcaaaagatcagattgcaattccagaagacactccagaaaatacagaaactgcatctgtgtgcaccaaggtctgaaaaatgacttccaggaaaggaagcatggtatataacaggaaaagaaaactacatggggaaccagaagacctaagcctgaaatcccagccctgcccctaactaacttctgtgtaaactcagataagtcacctttctctgggattcaaatttttgcatcagttaaaaaaaaaggggtgggggggaatgggccaaagtctgagtcttagagacttgtaccaatgttatgctatgtctctaaatctttactctcctaagtagacttgtcagcatctaggaagaacagctagaaattttcctctgtgatattttagactgcaagttgaaaaaaataaaaagaaatgagggcaggttccagggcctgaaatgtaggtatgctgcaaggcttttacattgaatttgaccctacatcacttcaagactaatgcataatattaaacatcatgttgaagaaaaaaaaaaaaaaaaaaaaa

SEQ ID NO: 1183 - protein, 602 aa, Homo sapiens
MRAQEDLEGRTQHETTRDPSTPLPTEPKFDMLYKIEDVPPWYLCILLGFQHYLTCFSGTIAVPFLLAEALCVGHDQHMVSQLIGTIFTCVGITTLIQTTVGIRLPLFQASAFAFLVPAKAILALERWKCPPEEEIYGNWSLPLNTSHIWHPRIREVGLHVQGAIMVSSVVEVVIGLLGLPGALLNYIGPLTVTPTVSLIGLSVFQAAGDRAGSHWGISACSILLIILFSQYLRNLTFLLPVYRWGKGLTLLRIQIFKMFPIMLAIMTVWLLCYVLTLTDVLPTDPKAYGFQARTDARGDIMAIAPWIRIPYPCQWGLPTVTAAAVLGMFSATLAGIIESIGDYYACARLAGAPPPPVHAINRGIFTEGICCIIAGLLGTGNGSTSSSPNIGVLGITKVGSRRVVQYGAAIMLVLGTIGKFTALFASLPDPILGGMFCTLFGMITAVGLSNLQFVDMNSSRNLFVLGFSMFFGLTLPNYLESNPGAINTGILEVDQILIVLLTTEMFVGGCLAFILDNTVPGSPEERGLIQWKAGAHANSDMSSSLKSYDFPIGMGIVKRITFLKYIPICPVFKGFSSSSKDQIAIPEDTPENTETASVCTKV

SEQ ID NO: 1184 - DNA, 988 bp, Homo sapiens
gacacacacatctgcacctcaaccacagactacacttgctgaactggctcctggggccatgaggctgtcactgccactgctgctgctgctgctgggagcctgggccatcccagggggcctcggggacagggcgccactcacagccacagccccacaactggatgatgaggagatgtactcagcccacatgcccgctcacctgcgctgtgatgcctgcagagctgtggcttaccagagactctgctcctatcctccccaccttccccctaactgagcagcagtcctgagggccctgcctcccagtccctccttgttccagatgtggcaaaatctggcaaaggcagagaccaaacttcatacctcaaactctggggggcggcgggagctgagcgagttgtctacacgatgtcctggaccggagctgctcccggaactggcaggactacggagttcgagaagtggaccaagtgaaacgtctcacaggcccaggacttagcgaggggccagagccaagcatcagcgtgatggtcacagggggcccctggcctaccaggctctccaggacatgtttgcactacttggggagtttggagaagaccagatctatgaagcccaccaacaaggccgaggggctctggaggcattgctatgtgggggaccccagggggcctgctcagagaaggtgtcagccacaagagaagagctctagtcctggactctaccctcctctgaaagaagctggggcttgctctgacggtctccactcccgtctgcaggcagccaggagggcaggaagcccttgctctgtgctgccatcctgcctccctcctccagcctcagggcactcgggcctgggtgggagtcaacgccttcccctctggactcaaataaaacccagtgacctcacttcttttctctgcaaaaggtgcttgtggggctgggagtgcagacattggtgtttctgctgatgtcccttgtgaaaaaaaaa

SEQ ID NO: 1185 - protein, 147 aa, Homo sapiens
MVTGGPWPTRLSRTCLHYLGSLEKTRSMKPTNKAEGLWRHCYVGDPRGPAQRRCQPQEKSSSPGLYPPLKEAGACSDGLHSRLQAARRAGSPCSVLPSCLPPPASGHSGLGGSQRLPLWTQIKPSDLTSFLCKRCLWGWECRHWCFC

SEQ ID NO: 1186 - DNA, 2925 bp, Homo sapiens
atgctgaccgcgctcgccccgccagccctgcctgggatcccgaggcagctgcccacggcccccgcgcggcgccaggactcctccggttcgtcaggctcctactacacggctccaggttctccggagcccccggacgttgggccggacgcgaaaggcccagcgaattggccctgggtggctcctgggcggggggcgggcgcgcagcctcgcctgtccgtcagcgcccagaatagccgccagcggcacgggcccggctcgggtttcccgcgaggcccaggttccggcccacggccaccccagccccagctgcgcacgctgccgtcgggggagatggaagtcatcttcggcgtcggacccctgttcggctgctccggcgcagacgatcgcgaggcgcaacaacagttcacggagccggccttcatcagccccttgccgccggggccagcgtctcccgccgcggtcccacgccagtcccaggtccccgatggtggctcccgctgggccacctacctagagctgcggccccgtgggccaagtcctgccgccccagcgcagttcgagtgtgtggaggtggctctggaggagggcgccgcgcccgccaggccccggacagccgccgcgggcttcgtgcagacggcgttggccagaaaactgagccccgaggccccggccccgagcagcgccaccttcgggtccacggggcggtcggaacctgagacccgggaaacggcccgcagcacccacgtggtcctggagaaggctaagtctcggccacttcgcgtacgagataattcggcccccgccaaggccccgaggccgtggcccagcctccgcgagcgcgcgattcggcgcgacaagcctgcgcccgggacggagccgctgggtcctgttagttccagcatcttccttcagtcagaggagaagatccaggaggcgcggaagactcggttcccgcgagaggcgccggatcgaactgttcagagggcacggagtccgccttttgagtgtaggatcccctcggaggttccgagtagggctgtgaggccaaggagcccgtccccgccacggcagactccaaatggggctgtacggggtcctcgctgcccgtcgccccagaacctgtccccgtgggatcggactactcggagggtgagtagcccattgttccctgaagcctcctccgagtgggaaaatcaaaatcctgccgtcgaggaaactgtcagcaggagaagcccttcccctccgatcctttcccagtggaatcagtgtgttgctggggaaaggagcccgtccctcgaagccccttccctgtgggagattccacattcggcagtcgcggatgcggtggagccacgtagcagcccgtccccgccggccttcttcccgtgggaggctccagatcgtcctattggaacttggggcccatctccccaagagacatgggatcccatggggccgggctcatcgatagcatttactcaggaagctcagaatgggttaactcaggaggagttggcaccgcctacaccgtccgcacccggcactccagaaccaacagagatgcagagtccatccacgcgggaaatttcagatcttgcctttggagggagtcagcagtccccagaggtagcagcacccgagccgcccggcagccaccctgtgggcaccctggacgcggataagtgcccggaagtcttgggtcctggagaggcggcctcgggacgcccgcgcatggccattccgcggcctcgagacgtgcgcaagttggtgaagaccacgtacgcgccaggcttcccggcaggagcacaaggctctgggctgcctgcgcctcctgccgacccctgcggggaggagggcggcgaatccaagacgcaagagccgccagcactggggccccccgccccggctcactacacttccgttttcatcaaggattttctaccggtggtgccgcacccctacgagcctcctgaaccgtccttcgacacggtcgcccgggacgcctcacagcccaacggggtcctgcggcggagggcagagaacagcacggcgaagcccttcaagcgcacagagatccgcctgcctggggccctggccttgggtcgccggcccgaggtaacctcgcgagtgcgagcgcgcggccctggaggagagaacagggatgtagaggcccagcgcctggtccccgacggcgacggtcggaccagccctctaggcggcgcccgcagctcatcccagcgctcccccgtagggccagcaggggtccgatcgccccgccccggctcccctcagatgcaagccagcccgagccctgggatagcacccaaaccgaagacaccacctacggcccccgagcccgcggctgccgtccaggcgccactcccgcgggagcccctggcgttggcgggcaggacggccccagcccagccccgcgctgcctcggcgcctcccacggaccggtccccgcaaagcccctcccagggagcgcgcaggcagcccggggccgcgcccctggggaaggtcttggtggaccccgagagcggccgctactactttgtggaggcgccgcggcagcctcggctgcgggtgctcttcgaccctgagagtgggcagtacgtggaggtgttgctgccgccctcgtctcccgggccgccccaccgcgtctacacccctctggccctggggctcggcctctacccgcccgcctatgggcctatacccagcctctctctgccaccgtccccgggcccgcaggccctcggcagcccccagctaccctgggtctctgaggcagggcccctggacgggacctactacctgccggtgagcgggacccccaaccccgcacctcctctgctcctctgtgcgccgccctccagctcaggtcccacccagcccggcaagggttcattgttcccgctgtga

SEQ ID NO: 1187 - protein, 974 aa, Homo sapiens
MLTALAPPALPGIPRQLPTAPARRQDSSGSSGSYYTAPGSPEPPDVGPDAKGPANWPWVAPGRGAGAQPRLSVSAQNSRQRHGPGSGFPRGPGSGPRPPQPQLRTLPSGEMEVIFGVGPLFGCSGADDREAQQQFTEPAFISPLPPGPASPAAVPRQSQVPDGGSRWATYLELRPRGPSPAAPAQFECVEVALEEGAAPARPRTAAAGFVQTALARKLSPEAPAPSSATFGSTGRSEPETRETARSTHVVLEKAKSRPLRVRDNSAPAKAPRPWPSLRERAIRRDKPAPGTEPLGPVSSSIFLQSEEKIQEARKTRFPREAPDRTVQRARSPPFECRIPSEVPSRAVRPRSPSPPRQTPNGAVRGPRCPSPQNLSPWDRTTRRVSSPLFPEASSEWENQNPAVEETVSRRSPSPPILSQWNQCVAGERSPSLEAPSLWEIPHSAVADAVEPRSSPSPPAFFPWEAPDRPIGTWGPSPQETWDPMGPGSSIAFTQEAQNGLTQEELAPPTPSAPGTPEPTEMQSPSTREISDLAFGGSQQSPEVAAPEPPGSHPVGTLDADKCPEVLGPGEAASGRPRMAIPRPRDVRKLVKTTYAPGFPAGAQGSGLPAPPADPCGEEGGESKTQEPPALGPPAPAHYTSVFIKDFLPVVPHPYEPPEPSFDTVARDASQPNGVLRRRAENSTAKPFKRTEIRLPGALALGRRPEVTSRVRARGPGGENRDVEAQRLVPDGDGRTSPLGGARSSSQRSPVGPAGVRSPRPGSPQMQASPSPGIAPKPKTPPTAPEPAAAVQAPLPREPLALAGRTAPAQPRAASAPPTDRSPQSPSQGARRQPGAAPLGKVLVDPESGRYYFVEAPRQPRLRVLFDPESGQYVEVLLPPSSPGPPHRVYTPLALGLGLYPPAYGPIPSLSLPPSPGPQALGSPQLPWVSEAGPLDGTYYLPVSGTPNPAPPLLLCAPPSSSGPTQPGKGSLFPL

SEQ ID NO: 1188 - DNA, 649 bp, Homo sapiens
gaagatggcgacgcccctcgggtggtcgaaggcggggtcaggatctgtgtgtctcgctttagatcaactgcgggacgtgattgagtctcaggaggaactaatccaccagctgaggaacgtgatggttctccaggacgaaaattttgtcagtaaagaagagttccaggcagtggagaagaagctggtggaagagaaagctgcccatgccaaaaccaaggtcctcctggccaaggaagaggagaagttacagtttgccctcggagaggtagaggtgctatccaagcagctggagaaagagaagctggcctttgaaaaagcgctctccagtgtcaagagcaaagtccttcaggagtccagcaagaaggaccagctcatcaccaagtgcaatgagattgagtctcacattataaagcaagaagatatacttaatggcaaagagaatgagattaaagagttgcagcaagttatcagccagcagaaacagatcttcaggaatcacatgtctgacttccggatccagaagcagcaggagagctacatggcccaggtgctggaccagaagcataagaaagcctcagggacacgtcaggcccgcagccaccagcatcccagggaaaaataaaatggccgccgctttcctgttctctgg

SEQ ID NO: 1189 - protein, 205 aa, Homo sapiens
MATPLGWSKAGSGSVCLALDQLRDVIESQEELIHQLRNVMVLQDENFVSKEEFQAVEKKLVEEKAAHAKTKVLLAKEEEKLQFALGEVEVLSKQLEKEKLAFEKALSSVKSKVLQESSKKDQLITKCNEIESHIIKQEDILNGKENEIKELQQVISQQKQIFRNHMSDFRIQKQQESYMAQVLDQKHKKASGTRQARSHQHPREK

SEQ ID NO: 1190 - DNA, 657 bp, Homo sapiens
actagctggcgggggcggaagatggcgacgcccctcgggtggtcgaaggcggggtcaggatctgtgtgtctcgctttagatcaactgcgggacgtgattgagtctcaggaggaactaatccaccagctgaggaacgtgatggttctccaggacgaaaattttgtcagtaaagaagagttccaggcagtggagaagaagctggtggaagagaaagctgcccatgccaaaaccaaggtcctcctggccaaggaagaggagaagttacagtttgccctcggagaggtagaggtgctatccaagcagctggagaaagagaagctggcctttgaaaaagcgctctccagtgtcaagagcaaagtccttcaggagtccagcaagaaggaccagctcatcaccaagtgcaatggtaggcgggaggcccgtgctctccaccacggttatataaacgggctctttcctaaccacccagtgcctgtgtcaaaggcagggtttcactctaacacctgtccccagctgaggatacaggcaggcccgggtgggccacaccttcgaaaaggccttaagggaccaggcaggccacggaaatgagggaagcagtcggtgtactatattcttcaccgccataaaggaatgggcttgctcccatttttcctgaaa

SEQ ID NO: 1191 - protein, 188 aa, Homo sapiens
MATPLGWSKAGSGSVCLALDQLRDVIESQEELIHQLRNVMVLQDENFVSKEEFQAVEKKLVEEKAAHAKTKVLLAKEEEKLQFALGEVEVLSKQLEKEKLAFEKALSSVKSKVLQESSKKDQLITKCNGRREARALHHGYINGLFPNHPVPVSKAGFHSNTCPQLRIQAGPGGPHLRKGLKGPGRPRK

SEQ ID NO: 1192 - DNA, 3019 bp, Homo sapiens
aaagcggttggcagcagcggcgcttggaggaaaggaagccggttggagggcgcagcgcacccctgctgcgcggaggagggggctgagctgaactcagcagaagttacatgcacaaggcaaaaattctgacgttctcaagagaccagctctgcccccgtggctcaactgaccctaccatgtggacgctgctcctccaggtgggaactggagttttgaaataaaatggatgatttgacgttacttgatcttctggagtgccctgtgtgctttgagaagctcgatgtcacagccaaagtcctcccttgccagcacaccttctgcaaaccatgtctacagagggttttcaaggcccacaaagagctgcggtgccccgaatgcaggacgcctgtgttttccaacattgaggcgctgccggccaacctgctgctcgtgcgccttctggatggagtgcgctcagggcagagctccgggagagggggctccttccgcaggcctggcacgatgaccttgcaggatggcaggaaaagcaggaccaaccccagacgtctgcaggccagtcctttccggctagtgcctaatgtcagaatccacatggatggggtgcctcgagcaaaggccttatgcaactacagagggcagaatcccggtgacctaaggtttaataagggagatatcatccttctccggagacagcttgatgagaattggtaccagggggaaatcaatggcatcagcgggaacttcccagccagctccgtggaagtcatcaagcagctgccccagccgcccccgctctgcagggccctctacaacttcgacctacgaggcaaggacaagagtgagaaccaggattgcctgaccttcctcaaggacgatatcatcactgtgatcagccgagtggatgagaactgggcagaaggcaagttaggagataaagtaggcatcttccctatcttgtttgtagagccaaacctcaccgcaagacaccttttagagaagaacaaaggtcgccagtcatcctgcacaaaaaacctgtccctggtgtcctcgtcctccagaggcaacacgtctaccctccgtaggggcccagggtccaggaggaaggtgcctgggcagttttccatcacaacagccttgaacactctcaaccggatggtccattctccttcagggcgccatatggtagagatcagcaccccagtgctcatcagctccagcaacccctctgtgatcacccagcccatggagaaagcagacgttccttccagctgtgtgggacaggtcagcacttatcaccccgcacctgtctctccaggacattccacagccgtggtcagtctgcctggctcccagcaacacctctcagcgaacatgtttgtagccctgcactcctactcagcccatggacccgatgagctggacctgcaaaagggagaaggcgtcagggtcctggggaagtgccaggacggctggctcaggggcgtctccttggtcaccgggcgagtcggcatcttcccaaacaattacgtcatccccattttcagaaagacctctagttttccagactcccggagccctggtctctacaccacatggacgttatccacctcctctgtgtcctcccaaggcagcatttcagaaggtgatccacggcaaagccgtcccttcaaatccgtctttgtgcccactgccatagtcaaccccgtgagaagcacagccggccctgggactttaggacaagggtctcttcggaaagggcggagcagcatgagaaagaatggatccctgcagagacccctccagtccgggatccccactctcgtggtaggctccctcagacgcagccccaccatggtccttcggcctcagcagttccaattctaccagccacaggggatcccctcctccccctcagccgtggtggtggagatggggtccaagcctgccctcacgggggagcccgccctcacgtgcatcagcaggggcagtgaggcccggatccactccgcggccagctccctcattatggaagacaaagaaatccccatcaagagtgagcctctgccaaaaccgcccgcatctgccccaccatccatcctggtgaaaccagaaaactcaagaaatggcatcgaaaagcaagtcaaaaccgtgagatttcagaattacagccctcctcccaccaaacattacacctcccatcccacctccggaaagcctgaacagccagccaccctcaaggcgtcccagcctgaagcagcgtccttgggcccagagatgaccgtcctatttgcccaccgaagtggctgccactccggacagcagacagacctccggagaaagtcagctcttgccaaggccacaaccctggtgtccactgcctcaggcacgcagaccgtgtttcccagcaaatgaacctacgggtggcttttcctagaccccaaagaggtgaattgcatttaaatacagtctgcctccactgagggcatcctgccattctttggggacttgagcatgggtccttgttcttcctatttcacctccaggaaagcaaaagtgggagcagaaattcctgccctgggtgggaggatagatggcgtggccttccaaacatacaaacataatgatttgatgccacaaagctcgcttactcagaccaaggagtgaaaaattgtcgtgcccactttatgccccagcatggagtatgtggcctcttgtcatccccgtgttactgtgtagaatttctatggtgtcctaaagggggctgcagcaggggtgtgacaacggtgggattgttggcgttgcttctttgaccttacaatatcctcaacaagcattagaacaacttctgccatcttctggggcctgtacactggccactagtagctgccatatctttttccctctgtaaagtcataatcctggctgcaaagggaggatttctgcgcggggtgtgaggtggatactttgaacattctgagaacccaataaaactagaaggagccaaaaaaaaaaaaaaaaa

SEQ ID NO: 1193 - protein, 729 aa, Homo sapiens
MDDLTLLDLLECPVCFEKLDVTAKVLPCQHTFCKPCLQRVFKAHKELRCPECRTPVFSNIEALPANLLLVRLLDGVRSGQSSGRGGSFRRPGTMTLQDGRKSRTNPRRLQASPFRLVPNVRIHMDGVPRAKALCNYRGQNPGDLRFNKGDIILLRRQLDENWYQGEINGISGNFPASSVEVIKQLPQPPPLCRALYNFDLRGKDKSENQDCLTFLKDDIITVISRVDENWAEGKLGDKVGIFPILFVEPNLTARHLLEKNKGRQSSCTKNLSLVSSSSRGNTSTLRRGPGSRRKVPGQFSITTALNTLNRMVHSPSGRHMVEISTPVLISSSNPSVITQPMEKADVPSSCVGQVSTYHPAPVSPGHSTAVVSLPGSQQHLSANMFVALHSYSAHGPDELDLQKGEGVRVLGKCQDGWLRGVSLVTGRVGIFPNNYVIPIFRKTSSFPDSRSPGLYTTWTLSTSSVSSQGSISEGDPRQSRPFKSVFVPTAIVNPVRSTAGPGTLGQGSLRKGRSSMRKNGSLQRPLQSGIPTLVVGSLRRSPTMVLRPQQFQFYQPQGIPSSPSAVVVEMGSKPALTGEPALTCISRGSEARIHSAASSLIMEDKEIPIKSEPLPKPPASAPPSILVKPENSRNGIEKQVKTVRFQNYSPPPTKHYTSHPTSGKPEQPATLKASQPEAASLGPEMTVLFAHRSGCHSGQQTDLRRKSALAKATTLVSTASGTQTVFPSK

SEQ ID NO: 1194 - DNA, 725 bp, Homo sapiens
ccgaagtttagaaaccagcttattgccaaagggaaaaaggatagcccaaaggacaagaaaacacttctcactatgaattggtttggaagtaacttcttcaggtgtcctgaggatctttccttactcaacatatactcacctctgttgtcacacatgtcatctgaagatgaacattttatttccaacttgagaggccatgtaccagccagcgctgtggtgaagcagcctgttcggggagccagtggcaggacgacaatcacagcaattgtccagactggcgggggctggagcaccggtctcttcagtgtctgcagagataggagaatttgtttctgtggtctattctgtcctatgtgtcttgagtgtgacatcgccaggcattatggagagtgtctttgttggccgttgttacctgggtccacctttgcactgagaattggcaccagggagagacataaaatacagggcacactgtgtgaagactggctggcggtgcactgctgttgggctttttccatctgccaggtggcccgggaactcaagatgaggacctcccaagtctatgaaatctgtgcagtcccaatgactaaggacaccctggtttgacagcaagataactcctcctccttactccccaacaccctcctctcaaacctctcagtggaacaattgctttttcctaagtttttactgaaatggtatgaaaataaatgatttccccccta

SEQ ID NO: 1195 - protein, 177 aa, Homo sapiens
MNWFGSNFFRCPEDLSLLNIYSPLLSHMSSEDEHFISNLRGHVPASAVVKQPVRGASGRTTITAIVQTGGGWSTGLFSVCRDRRICFCGLFCPMCLECDIARHYGECLCWPLLPGSTFALRIGTRERHKIQGTLCEDWLAVHCCWAFSICQVARELKMRTSQVYEICAVPMTKDTLV

SEQ ID NO: 1196 - DNA, 4868 bp, Homo sapiens
agttagcgcctgctgggtgtctgctcgggtggtctgggaactacaattcccggcgggctgtgagatgccttggctgtagttagtaaggagccggatgattgcctcagcaggtgtgaagcgtgtgctttagtttcgtgggaggcctggcatccccgagagggaggggaaaggtaaccactcctttgtggaggtcgccagggtcattgtcgtggatttgcacagtcggctgggcggtgcaatggcggaaagaaaaggaacagccaaagtggactttttgaagaagattgagaaagaaatccaacagaaatgggatactgagagagtgtttgaggtcaatgcatctaatttagagaaacagaccagcaagggcaagtattttgtaaccttcccatatccatatatgaatggacgccttcatttgggacacacgttttctttatccaaatgtgagtttgctgtagggtaccagcgattgaaaggaaaatgttgtctgtttccctttggcctgcactgtactggaatgcctattaaggcatgtgctgataagttgaaaagagaaatagagctgtatggttgcccccctgattttccagatgaagaagaggaagaggaagaaaccagtgttaaaacagaagatataataattaaggataaagctaaaggaaaaaagagtaaagctgctgctaaagctggatcttctaaataccagtggggcattatgaaatcccttggcctgtctgatgaagagatagtaaaattttctgaagcagaacattggcttgattatttcccgccactggctattcaggatttaaaaagaatgggtttgaaggtagactggcgtcgttccttcatcaccactgatgttaatccttactatgattcatttgtcagatggcaatttttaacattaagagaaagaaacaaaattaaatttgggaagcggtatacaatttactctccgaaagatggacagccttgcatggatcatgatagacaaactggagagggtgttggacctcaggaatatactttactcaaattgaaggtgcttgagccatacccatctaaattaagtggcctgaaaggtaaaaatattttcttggtggctgctactctcagacctgagaccatgtttgggcagacaaattgttgggttcgtcctgatatgaagtacattggatttgagacggtgaatggtgatatattcatctgtacccaaaaagcagccaggaatatgtcataccagggctttaccaaagacaatggcgtggtgcctgttgttaaggaattaatgggggaggaaattcttggtgcatcactttctgcacctttaacatcatacaaggtgatctatgttctcccaatgctaactattaaggaggataaaggcactggtgtggttacaagtgttccttccgactcccctgatgatattgctgccctcagagacttgaagaaaaagcaagccttacgagcaaaatatggaattagagatgacatggtcttgccatttgagccggtgccagtcattgaaatcccaggttttggaaatctttctgctgtaaccatttgtgatgagttgaaaattcagagccagaatgaccgggaaaaacttgcagaagcaaaggagaagatatatctaaaaggattttatgagggtatcatgttggtggatggatttaaaggacagaaggttcaagatgtaaagaagactattcagaaaaagatgattgacgctggagatgcacttatttacatggaaccagagaaacaagtgatgtccaggtcgtcagatgaatgtgttgtggctctgtgtgaccagtggtacttggattatggagaagagaattggaagaaacagacatctcagtgcttgaagaacctggaaacattctgtgaggagaccaggaggaattttgaagccaccttaggttggctacaagaacatgcttgctcaagaacttatggtctaggcactcacctgccttgggatgagcagtggctgattgaatcactttctgactccactatttacatggcattttacacagttgcacacctattgcaggggggtaacttgcatggacaggcagagtctccgctgggcattagaccgcaacagatgaccaaggaagtttgggattatgttttcttcaaggaggctccatttcctaagactcagattgcaaaggaaaaattagatcagttaaagcaggagtttgaattctggtatcctgttgatcttcgcgtctctggcaaggatcttgttccaaatcatctttcatattacctttataatcatgtggctatgtggccggaacaaagtgacaaatggcctacagctgtgagagcaaatggacatctcctcctgaactctgagaagatgtcaaaatccacaggcaacttcctcactttgacccaagctattgacaaattttcagcagatggaatgcgtttggctctggctgatgctggtgacactgtagaagatgccaactttgtggaagccatggcagatgcaggtattctccgtctgtacacctgggtagagtgggtgaaagaaatggttgccaactgggacagcctaagaagtggtcctgccagcactttcaatgatagagtttttgccagtgaattgaatgcaggaattataaaaacagatcaaaactatgaaaagatgatgtttaaagaagctttgaaaacagggttttttgagtttcaggccgcaaaagataagtaccgtgaattggctgtggaagggatgcacagagaacttgtgttccggtttattgaagttcagacacttctcctcgctccattctgtccacatttgtgtgagcacatctggacactcctgggaaagcctgactcaattatgaatgcttcatggcctgtggcaggtcctgttaatgaagttttaatacactcctcacagtatcttatggaagtaacacatgaccttagactacgactcaagaactatatgatgccagctaaagggaagaagactgacaaacaacccctgcagaagccctcacattgcaccatctatgtggcaaagaactatccaccttggcaacataccaccctgtctgttctacgtaaacactttgaggccaataacggaaaactgcctgacaacaaagtcattgctagtgaactaggcagtatgccagaactgaagaaatacatgaagaaagtcatgccatttgttgccatgattaaggaaaatctggagaagatggggcctcgtattctggatttgcaattagaatttgatgaaaaggctgtgcttatggagaatatagtctatctgactaattcgcttgagctagaacacatagaagtcaagtttgcctccgaagcagaagataaaatcagggaagactgctgtcctgggaaaccacttaatgtttttagaatagaacctggtgtgtccgtttctctggtgaatccccagccatccaatggccacttctcaaccaaaattgaaatcaggcaaggagataactgtgattccataatcaggcgtttaatgaaaatgaatcgaggaattaaagacctttccaaagtgaaactgatgagatttgatgatccactgttggggcctcgacgagttcctgtcctgggaaaggagtacaccgagaagacccccatttctgagcatgctgttttcaatgtggacctcatgagcaagaaaattcatctgactgagaatgggataagggtggatattggcgatacaataatctatctggttcattaaactcatgcacattggagatttatcctggtttcttaggaatactactactctgattgtgtctactgattggctatcagaaccttaggctggacctaaatagattgatttcatttctaaccatccaattctgcatgtattcataattctatcaagtcatctttgattcctggacctaataaattttttttccctttctttgggtgtccaagagaaatggtttttgccaaactctttttaaaaaacaaattgttgctatttcctagaagtttctggtttttaagatgaacataaaagtgtcagtatgcttcttttatgaggtgtactttatactttgatgaaggctaaggtgtacctaacagctttttatagtatattcatttatggagttagctgtatttttttttaaaaaagaaaagtagtaaattagcagcttttttttttaaatgaagagaacttcatgatgatttaaaagaactaatgagaatattttgacttgacttcaattactaagtattttgtataaagaacaaataggtcctgcattttataagactttttaaagctttaattattcaactaagaaccaataatggcttcttcaaggctaatatcaatagtttataagcagtatatttcacctacactaaatatgggcattttaaaagaagattccccccttcccccccagaaatctgcatttactaaatttgtcttaagtccaattgtgtttaaaggtcatgctggtcgggtgtggtggctcacacctataatcccagcactttgggaggccaaggtgggcagtcacctgaggtcaggagtttgagaccagcctgaccaacatggtgaaaccccgtctctactaaaaatacaaaaattagcttggcatggtggcgggtacctgtaatcccagctgcttgggagtgtgaggcaggagaatcgcttgaacctgggagaccgaggttgcagtgagctgaaaccgtgccattgcactccagcttaggcaacaagagtgaaactctgtctcaatcaatccatcaatcaatcaataaaatagaggtcatgctgactattacagatttaaaaaaaaaaaaaaaaaaaa

SEQ ID NO: 1197 - protein, 1176 aa, Homo sapiens
MAERKGTAKVDFLKKIEKEIQQKWDTERVFEVNASNLEKQTSKGKYFVTFPYPYMNGRLHLGHTFSLSKCEFAVGYQRLKGKCCLFPFGLHCTGMPIKACADKLKREIELYGCPPDFPDEEEEEEETSVKTEDIIIKDKAKGKKSKAAAKAGSSKYQWGIMKSLGLSDEEIVKFSEAEHWLDYFPPLAIQDLKRMGLKVDWRRSFITTDVNPYYDSFVRWQFLTLRERNKIKFGKRYTIYSPKDGQPCMDHDRQTGEGVGPQEYTLLKLKVLEPYPSKLSGLKGKNIFLVAATLRPETMFGQTNCWVRPDMKYIGFETVNGDIFICTQKAARNMSYQGFTKDNGVVPVVKELMGEEILGASLSAPLTSYKVIYVLPMLTIKEDKGTGVVTSVPSDSPDDIAALRDLKKKQALRAKYGIRDDMVLPFEPVPVIEIPGFGNLSAVTICDELKIQSQNDREKLAEAKEKIYLKGFYEGIMLVDGFKGQKVQDVKKTIQKKMIDAGDALIYMEPEKQVMSRSSDECVVALCDQWYLDYGEENWKKQTSQCLKNLETFCEETRRNFEATLGWLQEHACSRTYGLGTHLPWDEQWLIESLSDSTIYMAFYTVAHLLQGGNLHGQAESPLGIRPQQMTKEVWDYVFFKEAPFPKTQIAKEKLDQLKQEFEFWYPVDLRVSGKDLVPNHLSYYLYNHVAMWPEQSDKWPTAVRANGHLLLNSEKMSKSTGNFLTLTQAIDKFSADGMRLALADAGDTVEDANFVEAMADAGILRLYTWVEWVKEMVANWDSLRSGPASTFNDRVFASELNAGIIKTDQNYEKMMFKEALKTGFFEFQAAKDKYRELAVEGMHRELVFRFIEVQTLLLAPFCPHLCEHIWTLLGKPDSIMNASWPVAGPVNEVLIHSSQYLMEVTHDLRLRLKNYMMPAKGKKTDKQPLQKPSHCTIYVAKNYPPWQHTTLSVLRKHFEANNGKLPDNKVIASELGSMPELKKYMKKVMPFVAMIKENLEKMGPRILDLQLEFDEKAVLMENIVYLTNSLELEHIEVKFASEAEDKIREDCCPGKPLNVFRIEPGVSVSLVNPQPSNGHFSTKIEIRQGDNCDSIIRRLMKMNRGIKDLSKVKLMRFDDPLLGPRRVPVLGKEYTEKTPISEHAVFNVDLMSKKIHLTENGIRVDIGDTIIYLVH

SEQ ID NO: 1198 - DNA, 1017 bp, Homo sapiens
atgatggccatgaactccaagcagcctttcggcatgcacccggtgctgcaagaacccaaattctccagtctgcactctggctccgaggctatgcgccgagtctgtctcccagccccgcagctgcagggtaatatatttggaagctttgatgagagcctgctggcacgcgccgaagctctggcggcggtggatatcgtctcccacggcaagaaccatccgttcaagcccgacgccacctaccataccatgagcagcgtgccctgcacgtccacttcgtccaccgtgcccatctcccacccagctgcgctcacctcacaccctcaccacgccgtgcaccagggcctcgaaggcgacctgctggagcacatctcgcccacgctgagtgtgagcggcctgggcgctccggaacactcggtgatgcccgcacagatccatccacaccacctgggcgccatgggccacctgcaccaggccatgggcatgagtcacccgcacaccgtggcccctcatagcgccatgcctgcatgcctcagcgacgtggagtcagacccgcgcgagctggaagccttcgccgagcgcttcaagcagcggcgcatcaagctgggggtgacccaggcggacgtgggcgcggctctggctaatctcaagatccccggcgtgggctcgctgagccaaagcaccatctgcaggttcgagtctctcactctctcgcacaacaacatgatcgctctcaagccggtgctccaggcctggttggaggaggccgaggccgcctaccgagagaagaacagcaagccagagctcttcaacggcagcgaacggaagcgcaaacgcacgtccatcgcggcgccggagaagcgttcactcgaggcctatttcgctatccagccacgtccttcatctgagaagatcgcggccatcgctgagaaactggaccttaaaaagaacgtggtgagagtctggttctgcaaccagagacagaaacagaaacgaatgaagtattcggctgtccactga

SEQ ID NO: 1199 - protein, 338 aa, Homo sapiens
MMAMNSKQPFGMHPVLQEPKFSSLHSGSEAMRRVCLPAPQLQGNIFGSFDESLLARAEALAAVDIVSHGKNHPFKPDATYHTMSSVPCTSTSSTVPISHPAALTSHPHHAVHQGLEGDLLEHISPTLSVSGLGAPEHSVMPAQIHPHHLGAMGHLHQAMGMSHPHTVAPHSAMPACLSDVESDPRELEAFAERFKQRRIKLGVTQADVGAALANLKIPGVGSLSQSTICRFESLTLSHNNMIALKPVLQAWLEEAEAAYREKNSKPELFNGSERKRKRTSIAAPEKRSLEAYFAIQPRPSSEKIAAIAEKLDLKKNVVRVWFCNQRQKQKRMKYSAVH

SEQ ID NO: 1200 - DNA, 519 bp, Homo sapiens
atggatgtaaaggaccggcgacaccgctctttgaccagaggacgctgtggcaaagagtgtcgctacacaagctcctctctggacagtgaggactgccgcgtgcccacacagaaatcctacagctccagtgagactctgaaggcctatgaccatgacagcaggatgcactatggaaaccgagtcacagacctcatccaccgggagtcagatgagtttcctagacaaggaaccaacttcacccttgccgaactgggcatctgtgagccctccccacaccgaagcggctactgctccgacatggggatccttcaccagggctactcccttagcacagggtctgacgccgactccgacaccgagggagggatgtctccagaacacgccatcagactgtggggcagagggataaaatccaggcgcagttccggcctgtccagtcgtgaaaactcggcccttaccctgactgactctgacaacgaaaacaaatcagatgatgagaacggtaggcctgcttcttaa

SEQ ID NO: 1201 - protein, 172 aa, Homo sapiens [sequence omitted]

SEQ ID NO: 1202 - DNA, 3636 bp, Homo sapiens
atggatccgccggcgggagccgctcgccgcctgctctgccccgcgctgctgctgctgctgctgctgctgccgccgccgctcctgccgccgccgccgccgcccgcgaacgccaggctcgccgccgccgccgaccccccaggcgggcccctggggcacggagcggagcgcatcctggcggtgcccgtgcgcactgacgcccagggccgcttggtgtcccacgtggtgtcggcagctacgtccagagcaggggtacgagcccgcagggccgccccggtccggaccccgagcttccccggaggcaacgaggaggagcctggcagtcacctcttctacaatgtcacggtctttggccgagacctgcacctgcggctgcggcccaacgcccgcctcgtggcgcccggggccactatggagtggcagggcgagaagggcaccacccgcgtggagcccctgctcgggagctgtctctacgtcggagacgtggccggcctagccgaagcctcctctgtggcgctcagcaactgcgatgggctggctggtctgatccggatggaggaggaggagttcttcatcgaacccttggagaaggggctggcggcgcaggaggctgagcaaggccgtgtgcatgtggtgtatcgccggccacccacgtcccctcctctcggggggccacaggccctggacacaggggcctccctggacagcctggacagcctcagccgcgccctgggcgtcctagaggagcacgccaacagctcgaggcggagggcacgcaggcatgctgcagacgatgactacaacatcgaggtcctgctgggcgtggatgactctgtggtgcagttccacgggaaggagcacgtacagaagtacctgctgacactcatgaacattgtcaatgaaatctaccatgacgagtccttgggtgcccacatcaacgtggtcctggtgcggatcatcctcctgagctatggaaagtccatgagcctcatcgagatcgggaacccctctcagagcctggagaatgtctgccgctgggcctacctccagcagaagccagacacgggccacgatgaataccacgatcacgccatcttcctcacacggcaggactttgggccttccggcatgcaaggctatgctcctgtcaccggcatgtgccatccggtccgcagctgcaccctgaaccatgaggacggcttctcctcagcgtttgtggtggcccatgagactggccacgtgctgggcatggagcacgacgggcagggcaaccgctgtggcgacgaggtgcggctgggcagcatcatggcgcccctggtgcaggccgccttccaccgcttccactggtcccgctgcagccagcaggagctgagccgctacctgcactcctatgactgcctgctggatgaccccttcgcccacgactggccggcgctgccccagctcccgggactgcactactccatgaacgagcaatgccgctttgacttcggcctgggctacatgatgtgcacggcgttccggacctttgacccctgcaagcagctgtggtgcagccatcctgacaacccctacttttgcaagaccaagaaggggccccccttggacgggactatgtgtgcacctggcaagcattgttttaaaggacactgcatctggctgacacctgacatcctcaaacgggacggcagctggggcgcttggagtccgtttggctcctgctcacgtacctgtggcacgggcgtgaagttcaggacccgccagtgtgacaacccacacccggccaacgggggccgcacctgctcgggccttgcctacgacttccagctctgcagccgccaggactgccccgactccctggctgacttccgcgaggagcagtgccgccagtgggacctgtacttcgagcacggcgacgcccagcaccactggctgccccacgagcaccgggatgccaaggagagatgccacctgtactgcgagtccagggagaccggggaggtggtgtccatgaagcgcatggtgcatgatgggacgcgctgctcctacaaggacgccttcagcctctgtgtgcgcggggactgcaggaaggtgggctgtgacggtgtgatcggctccagcaagcaggaagacaagtgtggcgtgtgcggaggggacaacagccactgcaaagtggtcaagggcacgttcacacggtcacccaagaagcatggttacatcaagatgtttgagatccctgcaggagccagacacctgctcattcaggaggtagacgccaccagccaccatctggccgtcaagaacctggagacaggcaagttcatcttaaatgaagagaatgacgtggatgccagttccaaaaccttcattgccatgggcgtggagtgggagtacagagacgaggacggccgggagacgctgcagaccatgggccccctccacggcaccatcaccgttctggtcatcccggtgggagacacccgggtctcactgacgtacaaatacatgatccatgaggactcactgaatgtcgatgacaacaacgtcctggaagaggactctgtggtctacgagtgggccctgaagaagtggtctccgtgctccaagccctgtggcggagggtcccagttcaccaagtatggctgccgccggaggctggaccacaagatggtacaccgtggcttctgtgccgccctctcgaagcccaaagccatccgcagagcgtgcaacccacaggaatgctcccagccagtgtgggtcacaggcgaatgggagccatgtagccagacctgtgggcggacaggcatgcaggtgcgctccgtgcgctgcattcagccgctacacgacaacaccacccgctccgtgcacgccaagcactgcaatgacgcccggcccgagagccgccgggcctgcagccgcgagctctgccctggtcgttggcgagccgggccctggtcccagtgctcagtaacctgtggcaacggcacccaggagcggccagtgccctgccgcaccgcggacgacagcttcggcatctgccaggaggagcgtcctgagacagcgaggacctgcaggcttggcccctgtccccgaaacatctcagatccctccaagaagagctacgtagttcagtggctgtcccgcccggaccccgactcgcccatccggaagatctcgtcaaagggccactgccaaggcgacaagtcaatattctgtaggatggaagtcttgtcccgctattgctccatcccaggctacaacaagctgtcctgcaagtcctgtaacctgtacaacaacctcaccaacgtggagggcaggatagagccaccgcctgggaagcacaacgacattgacgtgttcatgcctaccctcccagtgcccactgtagccatggaggtgcggccatcaccaagcacccccctggaggtccctctcaatgcctccagcaccaatgccacagaggatcacccagaaaccaatgccgtagatgaaccctacaaaatccatggcctggaagatgaagtccagccacccaacctaatccctcgacgaccgagcccctatgaaaagaccagaaaccaaagaatccaagagctcattgatgagatgcggaagaaagagatgctcggaaagttctaa

SEQ ID NO: 1203 - protein, 1211 aa, Homo sapiens
MDPPAGAARRLLCPALLLLLLLLPPPLLPPPPPPANARLAAAADPPGGPLGHGAERILAVPVRTDAQGRLVSHVVSAATSRAGVRARRAAPVRTPSFPGGNEEEPGSHLFYNVTVFGRDLHLRLRPNARLVAPGATMEWQGEKGTTRVEPLLGSCLYVGDVAGLAEASSVALSNCDGLAGLIRMEEEEFFIEPLEKGLAAQEAEQGRVHVVYRRPPTSPPLGGPQALDTGASLDSLDSLSRALGVLEEHANSSRRRARRHAADDDYNIEVLLGVDDSVVQFHGKEHVQKYLLTLMNIVNEIYHDESLGAHINVVLVRIILLSYGKSMSLIEIGNPSQSLENVCRWAYLQQKPDTGHDEYHDHAIFLTRQDFGPSGMQGYAPVTGMCHPVRSCTLNHEDGFSSAFVVAHETGHVLGMEHDGQGNRCGDEVRLGSIMAPLVQAAFHRFHWSRCSQQELSRYLHSYDCLLDDPFAHDWPALPQLPGLHYSMNEQCRFDFGLGYMMCTAFRTFDPCKQLWCSHPDNPYFCKTKKGPPLDGTMCAPGKHCFKGHCIWLTPDILKRDGSWGAWSPFGSCSRTCGTGVKFRTRQCDNPHPANGGRTCSGLAYDFQLCSRQDCPDSLADFREEQCRQWDLYFEHGDAQHHWLPHEHRDAKERCHLYCESRETGEVVSMKRMVHDGTRCSYKDAFSLCVRGDCRKVGCDGVIGSSKQEDKCGVCGGDNSHCKVVKGTFTRSPKKHGYIKMFEIPAGARHLLIQEVDATSHHLAVKNLETGKFILNEENDVDASSKTFIAMGVEWEYRDEDGRETLQTMGPLHGTITVLVIPVGDTRVSLTYKYMIHEDSLNVDDNNVLEEDSVVYEWALKKWSPCSKPCGGGSQFTKYGCRRRLDHKMVHRGFCAALSKPKAIRRACNPQECSQPVWVTGEWEPCSQTCGRTGMQVRSVRCIQPLHDNTTRSVHAKHCNDARPESRRACSRELCPGRWRAGPWSQCSVTCGNGTQERPVPCRTADDSFGICQEERPETARTCRLGPCPRNISDPSKKSYVVQWLSRPDPDSPIRKISSKGHCQGDKSIFCRMEVLSRYCSIPGYNKLSCKSCNLYNNLTNVEGRIEPPPGKHNDIDVFMPTLPVPTVAMEVRPSPSTPLEVPLNASSTNATEDHPETNAVDEPYKIHGLEDEVQPPNLIPRRPSPYEKTRNQRIQELIDEMRKKEMLGKF

SEQ ID NO: 1204 - DNA, 1701 bp, Homo sapiens
atggatccgccggcgggagccgctcgccgcctgctctgccccgcgctgctgctgctgctgctgctgctgccgccgccgctcctgccgccgccgccgccgcccgcgaacgccaggctcgccgccgccgccgaccccccaggcgggcccctggggcacggagcggagcgcatcctggcggtgcccgtgcgcactgacgcccagggccgcttggtgtcccacgtggtgtcggcagctacgtccagagcaggggtacgagcccgcagggccgccccggtccggaccccgagcttccccggaggcaacgaggaggagcctggcagtcacctcttctacaatgtcacggtctttggccgagacctgcacctgcggctgcggcccaacgcccgcctcgtggcgcccggggccactatggagtggcagggcgagaagggcaccacccgcgtggagcccctgctcgggagctgtctctacgtcggagacgtggccggcctagccgaagcctcctctgtggcgctcagcaactgcgatgggctggctggtctgatccggatggaggaggaggagttcttcatcgaacccttggagaaggggctggcggcgcaggaggctgagcaaggccgtgtgcatgtggtgtatcgccggccacccacgtcccctcctctcggggggccacaggccctggacacaggggcctccctggacagcctggacagcctcagccgcgccctgggcgtcctagaggagcacgccaacagctcgaggcggagggcacgcaggcatgctgcagacgatgactacaacatcgaggtcctgctgggcgtggatgactctgtggtgcagttccacgggaaggagcacgtacagaagtacctgctgacactcatgaacattgtcaatgaaatctaccatgacgagtccttgggtgcccacatcaacgtggtcctggtgcggatcatcctcctgagctatggaaagtccatgagcctcatcgagatcgggaacccctctcagagcctggagaatgtctgccgctgggcctacctccagcagaagccagacacgggccacgatgaataccacgatcacgccatcttcctcacacggcaggactttgggccttccggcatgcaaggctatgctcctgtcaccggcatgtgccatccggtccgcagctgcaccctgaaccatgaggacggcttctcctcagcgtttgtggtggcccatgagactggccacgtgctgggcatggagcacgacgggcagggcaaccgctgtggcgacgaggtgcggctgggcagcatcatggcgcccctggtgcaggccgccttccaccgcttccactggtcccgctgcagccagcaggagctgagccgctacctgcactcctatgactgcctgctggatgaccccttcgcccacgactggccggcgctgccccagctcccgggactgcactactccatgaacgagcaatgccgctttgacttcggcctgggctacatgatgtgcacggcgttccggacctttgacccctgcaagcagctgtggtgcagccatcctgacaacccctacttttgcaagaccaagaaggggccccccttggacgggactatgtgtgcacctggcaagttcaggccgggcgcggtggctcatgcctgttatcccagcactttgggaggccaaggtaggtggatcgcctga

SEQ ID NO: 1205 - protein, 566 aa, Homo sapiens
MDPPAGAARRLLCPALLLLLLLLPPPLLPPPPPPANARLAAAADPPGGPLGHGAERILAVPVRTDAQGRLVSHVVSAATSRAGVRARRAAPVRTPSFPGGNEEEPGSHLFYNVTVFGRDLHLRLRPNARLVAPGATMEWQGEKGTTRVEPLLGSCLYVGDVAGLAEASSVALSNCDGLAGLIRMEEEEFFIEPLEKGLAAQEAEQGRVHVVYRRPPTSPPLGGPQALDTGASLDSLDSLSRALGVLEEHANSSRRRARRHAADDDYNIEVLLGVDDSVVQFHGKEHVQKYLLTLMNIVNEIYHDESLGAHINVVLVRIILLSYGKSMSLIEIGNPSQSLENVCRWAYLQQKPDTGHDEYHDHAIFLTRQDFGPSGMQGYAPVTGMCHPVRSCTLNHEDGFSSAFVVAHETGHVLGMEHDGQGNRCGDEVRLGSIMAPLVQAAFHRFHWSRCSQQELSRYLHSYDCLLDDPFAHDWPALPQLPGLHYSMNEQCRFDFGLGYMMCTAFRTFDPCKQLWCSHPDNPYFCKTKKGPPLDGTMCAPGKFRPGAVAHACYPSTLGGQGRWIA

SEQ ID NO: 1206 - DNA, 591 bp, Homo sapiens
atggtccagtcaggcggccccgacttcaggtcagagggcacggaggacgtccgggcagaggacttggaggacgtcagggcagaggacttggaggacgtcagggcagagagcacagagtacgtcagggcagagagcaaggaggacgtcagggcagaggactcagagggcgttggggcagagggcacagaggacgtcggtgcagaggactcagaggacgtcagggcagagggcacggaggacgttggggcagaggacttggaggacgtcagggcagaaggcacagaggacgtcgggacagagggcacggaggacgtcggggcagaggactcagaggacatcagggcagagagctcagaggacatcggggcagagagcacagaggacgtcggggcagagggcacggaggacgtcggggcagaggactcagaggacattggggcagagagcacgcaggacgtcagggcagaggactcagaggacgtcggggcagagggcacggaggacgttggggcagagggcacagaggacgtcggggcagaggactcaggatgccatgcagttcccacccagatgggaacgcagaagtgctga

SEQ ID NO: 1207 - protein, 196 aa, Homo sapiens
MVQSGGPDFRSEGTEDVRAEDLEDVRAEDLEDVRAESTEYVRAESKEDVRAEDSEGVGAEGTEDVGAEDSEDVRAEGTEDVGAEDLEDVRAEGTEDVGTEGTEDVGAEDSEDIRAESSEDIGAESTEDVGAEGTEDVGAEDSEDIGAESTQDVRAEDSEDVGAEGTEDVGAEGTEDVGAEDSGCHAVPTQMGTQKC

SEQ ID NO: 1208 - DNA, 2052 bp, Homo sapiens
gacagctgtgtctcgatggagtagactctcagaacagcgcagtttgccctccgctcacgcagagcctctccgtggcttccgcaccttgagcattaggccagttctcctcttctctctaatccatccgtcacctctcctgtcatccgtttccatgccgtgaggtccattcacagaacacatccatggctctcatgctcagtttggttctgagtctcctcaagctgggatcagggcagtggcaggtgtttgggccagacaagcctgtccaggccttggtgggggaggacgcagcattctcctgtttcctgtctcctaagaccaatgcagaggccatggaagtgcggttcttcaggggccagttctctagcgtggtccacctctacagggacgggaaggaccagccatttatgcagatgccacagtatcaaggcaggacaaaactggtgaaggattctattgcggaggggcgcatctctctgaggctggaaaacattactgtgttggatgctggcctctatgggtgcaggattagttcccagtcttactaccagaaggccatctgggagctacaggtgtcagcactgggctcagttcctctcatttccatcacgggatatgttgatagagacatccagctactctgtcagtcctcgggctggttcccccggcccacagcgaagtggaaaggtccacaaggacaggatttgtccacagactccaggacaaacagagacatgcatggcctgtttgatgtggagatctctctgaccgtccaagagaacgccgggagcatatcctgttccatgcggcatgctcatctgagccgagaggtggaatccagggtacagataggagatacctttttcgagcctatatcgtggcacctggctaccaaagtactgggaatactctgctgtggcctattttttggcattgttggactgaagattttcttctccaaattccagtggaaaatccaggcggaactggactggagaagaaagcacggacaggcagaattgagagacgcccggaaacacgcagtggaggtgactctggatccagagacggctcacccgaagctctgcgtttctgatctgaaaactgtaacccatagaaaagctccccaggaggtgcctcactctgagaagagatttacaaggaagagtgtggtggcttctcagagtttccaagcagggaaacattactgggaggtggacggaggacacaataaaaggtggcgcgtgggagtgtgccgggatgatgtggacaggaggaaggagtacgtgactttgtctcccgatcatgggtactgggtcctcagactgaatggagaacatttgtatttcacattaaatccccgttttatcagcgtcttccccaggaccccacctacaaaaataggggtcttcctggactatgagtgtgggaccatctccttcttcaacataaatgaccagtcccttatttataccctgacatgtcggtttgaaggcttattgaggccctacattgagtatccgtcctataatgagcaaaatggaactcccatagtcatctgcccagtcacccaggaatcagagaaagaggcctcttggcaaagggcctctgcaatcccagagacaagcaacagtgagtcctcctcacaggcaaccacgcccttcctccccaggggtgaaatgtaggatgaatcacatcccacattcttctttagggatattaaggtctctctcccagatccaaagtcccgcagcagccggccaaggtggcttccagatgaagggggactggcctgtccacatgggagtcaggtgtcatggctgccctgagctgggagggaagaaggctgacattacatttagtttgctctcactccatctggctaagtgatcttgaaataccacctctcaggtgaagaaccgtcaggaattcccatctcacaggctgtggtgtagattaagtagacaaggaatgtgaataatgcttagatcttattgatgacagagtgtatcctaatggtttgttcattatattacactttcagtaaaaaaa

SEQ ID NO: 1209 - protein, 500 aa, Homo sapiens
MALMLSLVLSLLKLGSGQWQVFGPDKPVQALVGEDAAFSCFLSPKTNAEAMEVRFFRGQFSSVVHLYRDGKDQPFMQMPQYQGRTKLVKDSIAEGRISLRLENITVLDAGLYGCRISSQSYYQKAIWELQVSALGSVPLISITGYVDRDIQLLCQSSGWFPRPTAKWKGPQGQDLSTDSRTNRDMHGLFDVEISLTVQENAGSISCSMRHAHLSREVESRVQIGDTFFEPISWHLATKVLGILCCGLFFGIVGLKIFFSKFQWKIQAELDWRRKHGQAELRDARKHAVEVTLDPETAHPKLCVSDLKTVTHRKAPQEVPHSEKRFTRKSVVASQSFQAGKHYWEVDGGHNKRWRVGVCRDDVDRRKEYVTLSPDHGYWVLRLNGEHLYFTLNPRFISVFPRTPPTKIGVFLDYECGTISFFNINDQSLIYTLTCRFEGLLRPYIEYPSYNEQNGTPIVICPVTQESEKEASWQRASAIPETSNSESSSQATTPFLPRGEM

SEQ ID NO: 1210 - DNA, 2165 bp, Homo sapiens
agaacagcgcagtttgccctccgctcacgcagagcctctccgtggcctccgcaccttgagcattaggccagttctcctcttctctctaatccatccgtcacctctcctgtcatccgtttccatgccgtgaggtccattcacagaacacatccatggctctcatgctcagtttggttctgagtctcctcaagctgggatcagggcagtggcaggtgtttgggccagacaagcctgtccaggccttggtgggggaggacgcagcattctcctgtttcctgtctcctaagaccaatgcagaggccatggaagtgcggttcttcaggggccagttctctagcgtggtccacctctacagggacgggaaggaccagccatttatgcagatgccacagtatcaaggcaggacaaaactggtgaaggattctattgcggaggggcgcatctctctgaggctggaaaacattactgtgttggatgctggcctctatgggtgcaggattagttcccagtcttactaccagaaggccatctgggagctacaggtgtcagcactgggctcagttcctctcatttccatcacgggatatgttgatagagacatccagctactctgtcagtcctcgggctggttcccccggcccacagcgaagtggaaaggtccacaaggacaggatttgtccacagactccaggacaaacagagacatgcatggcctgtttgatgtggagatctctctgaccgtccaagagaacgccgggagcatatcctgttccatgcggcatgctcatctgagccgagaggtggaatccagggtacagataggagatacctttttcgagcctatatcgtggcacctggctaccaaagtactgggaatactctgctgtggcctattttttggcattgttggactgaagattttcttctccaaattccagtgtaagcgagagagagaagcatgggccggtgccttattcatggttccagcagggacaggatcagagatgctcccacatccagctgcttctcttcttctagtcctagcctccaggggcccaggcccaaaaaaggaaaatccaggcggaactggactggagaagaaagcacggacaggcagaattgagagacgcccggaaacacgcagtggaggtgactctggatccagagacggctcacccgaagctctgcgtttctgatctgaaaactgtaacccatagaaaagctccccaggaggtgcctcactctgagaagagatttacaaggaagagtgtggtggcttctcagagtttccaagcagggaaacattactgggaggtggacggaggacacaataaaaggtggcgcgtgggagtgtgccgggatgatgtggacaggaggaaggagtacgtgactttgtctcccgatcatgggtactgggtcctcagactgaatggagaacatttgtatttcacattaaatccccgttttatcagcgtcttccccaggaccccacctacaaaaataggggtcttcctggactatgagtgtgggaccatctccttcttcaacataaatgaccagtcccttatttataccctgacatgtcggtttgaaggcttattgaggccctacattgagtatccgtcctataatgagcaaaatggaactcccatagtcatctgcccagtcacccaggaatcagagaaagaggcctcttggcaaagggcctctgcaatcccagagacaagcaacagtgagtcctcctcacaggcaaccacgcccttcctccccaggggtgaaatgtaggatgaatcacatcccacattcttctttagggatattaaggtctctctcccagatccaaagtcccgcagcagccggccaaggtggcttccagatgaagggggactggcctgtccacatgggagtcaggtgtcatggctgccctgagctgggagggaagaaggctgacattacatttagtttgctctcactccatctggctaagtgatcttgaaataccacctctcaggtgaagaaccgtcaggaattcccatctcacaggctgtggtgtagattaagtagacaaggaatgtgaataatgcttagatcttattgatgacagagtgtatcctaatggtttgttcattatattacactttcagtaaaaaaaaaaaaaaaaaaaa

SEQ ID NO: 1211 - protein, 347 aa, Homo sapiens
MALMLSLVLSLLKLGSGQWQVFGPDKPVQALVGEDAAFSCFLSPKTNAEAMEVRFFRGQFSSVVHLYRDGKDQPFMQMPQYQGRTKLVKDSIAEGRISLRLENITVLDAGLYGCRISSQSYYQKAIWELQVSALGSVPLISITGYVDRDIQLLCQSSGWFPRPTAKWKGPQGQDLSTDSRTNRDMHGLFDVEISLTVQENAGSISCSMRHAHLSREVESRVQIGDTFFEPISWHLATKVLGILCCGLFFGIVGLKIFFSKFQCKREREAWAGALFMVPAGTGSEMLPHPAASLLLVLASRGPGPKKENPGGTGLEKKARTGRIERRPETRSGGDSGSRDGSPEALRF

SEQ ID NO: 1212 - DNA, 2296 bp, Homo sapiens
ttgacatcgttcatgaagagcctctccacggctcctgcgcctgagacagctggcctgacctccaaatcatccatccacccctgctgtcatctgttttcatagtgtgagatcaacccacaggaatatccatggcttttgtgctcattttggttctcagtttctacgagctggtgtcaggacagtggcaagtcactggaccgggcaagtttgtccaggccttggtgggggaggacgccgtgttctcctgctccctctttcctgagaccagtgcagaggctatggaagtgcggttcttcaggaatcagttccatgctgtggtccacctctacagagatggggaagactgggaatctaagcagatgccacagtatcgagggagaactgagtttgtgaaggactccattgcaggggggcgtgtctctctaaggctaaaaaacatcactccctcggacatcggcctgtatgggtgctggttcagttcccagatttacgatgaggaggccacctgggagctgcgggtggcagcactgggctcacttcctctcatttccatcgtgggatatgttgacggaggtatccagttactctgcctgtcctcattccagccctcaccttggcgcctggcttctattttactcgggttactctgtggtgccctgtgtggtgttgtcatggggatgataattgttttcttcaaatccaaagggaaaatccaggcggaactgggtatgtgtcatgtcctgagcctcccacacatggttctcccgggtccctccctgatccacagtttgagcctctggacgaccctggctgcaggctggacaggaagcaccgactggagaagaaagcacggacaggcagaattgagagacgcccggaaacacgcagtggaggtgactctggatccagagacggctcacccgaagctctgcgtttctgatctgaaaactgtaacccatagaaaagctccccaggaggtgcctcactctgagaagagatttacaaggaagagtgtggtggcttctcagggtttccaagcagggaaacattactgggaggtggacgtgggacaaaatgtagggtggtatgtgggagtgtgtcgggatgacgtagacagggggaagaacaatgtgactttgtctcccaacaatgggtattgggtcctcagactgacaacagaacatttgtatttcacattcaatccccattttatcagcctcccccccagcacccctcctacacgagtaggggtcttcctggactatgagggtgggaccatctccttcttcaatacaaatgaccagtcccttatttataccctgctgacatgtcagtttgaaggcttgttgagaccctatatccagcatgcgatgtatgacgaggaaaaggggactcccatattcatatgtccagtgtcctggggatgagacagagaagaccctgcttaaagggccccacaccacagacccagacacagccaagggagagtgctcccgacaggtggccccagcttcctctccggagcctgcgcacagagagtcacgccccccactctcctttagggagctgaggttcttctgccctgagccctgcagcagcggcagtcacagcttccagatgaggggggattggcctgaccctgtgggagtcagaagccatggctgccctgaagtggggacggaatagactcacattaggtttagtttgtgaaaactccatccagctaagcgatcttgaacaagtcacaacctcccaggctcctcatttgctagtcacggacagtgattcctgcctcacaggtgaagattaaagagacaacgaatgtgaatcatgcttgcaggtttgagggcacagtgtttgctaatgatgtgtttttatattatacattttcccaccataaactctgtttgcttattccacattaatttacttttctctataccaaatcacccatggaatagttattgaacacctgctttgtgaggctcaaagaataaagaggaggtaggatttttcactgattctataagcccagcattacctgataccaaaaccaggcaaagaaaacagaagaagaggaaggaaaactacaggtccatatccctcattaacacagacacaaaaattctaaataaaattttaacaaattaaactaaacaatatatttaaagatgatatataactactcagtgtggtttgtcccacaaatgcagagttggtttaatatttaaatatcaaccagtgtaattcagcacattaataaagtaaaaaagaaaaccataaaaaaaaaaaaaaa

SEQ ID NO: 1213 - protein, 432 aa, Homo sapiens
MAFVLILVLSFYELVSGQWQVTGPGKFVQALVGEDAVFSCSLFPETSAEAMEVRFFRNQFHAVVHLYRDGEDWESKQMPQYRGRTEFVKDSIAGGRVSLRLKNITPSDIGLYGCWFSSQIYDEEATWELRVAALGSLPLISIVGYVDGGIQLLCLSSFQPSPWRLASILLGLLCGALCGVVMGMIIVFFKSKGKIQAELGMCHVLSLPHMVLPGPSLIHSLSLWTTLAAGWTGSTDWRRKHGQAELRDARKHAVEVTLDPETAHPKLCVSDLKTVTHRKAPQEVPHSEKRFTRKSVVASQGFQAGKHYWEVDVGQNVGWYVGVCRDDVDRGKNNVTLSPNNGYWVLRLTTEHLYFTFNPHFISLPPSTPPTRVGVFLDYEGGTISFFNTNDQSLIYTLLTCQFEGLLRPYIQHAMYDEEKGTPIFICPVSWG

SEQ ID NO: 1214 - DNA, 2398 bp, Homo sapiens
ttgacatcgttcatgaagagcctctccacggctcctgcgcctgagacagctggcctgacctccaaatcatccatccacccctgctgtcatctgttttcatagtgtgagatcaacccacaggaatatccatggcttttgtgctcattttggttctcagtttctacgagctggtgtcaggacagtggcaagtcactggaccgggcaagtttgtccaggccttggtgggggaggacgccgtgttctcctgctccctctttcctgagaccagtgcagaggctatggaagtgcggttcttcaggaatcagttccatgctgtggtccacctctacagagatggggaagactgggaatctaagcagatgccacagtatcgagggagaactgagtttgtgaaggactccattgcaggggggcgtgtctctctaaggctaaaaaacatcactccctcggacatcggcctgtatgggtgctggttcagttcccagatttacgatgaggaggccacctgggagctgcgggtggcagcactgggctcacttcctctcatttccatcgtgggatatgttgacggaggtatccagttactctgcctgtcctcaggctggttcccccagcccacagccaagtggaaaggtccacaaggacaggatttgtcttcagactccagagcaaatgcagatgggtacagcctgtatgatgtggagatctccattatagtccaggaaaatgctgggagcatattgtgttccatccaccttgctgagcagagtcatgaggtggaatccaaggtattgataggagagacgtttttccagccctcaccttggcgcctggcttctattttactcgggttactctgtggtgccctgtgtggtgttgtcatggggatgataattgttttcttcaaatccaaagggaaaatccaggcggaactggactggagaagaaagcacggacaggcagaattgagagacgcccggaaacacgcagtggaggtgactctggatccagagacggctcacccgaagctctgcgtttctgatctgaaaactgtaacccatagaaaagctccccaggaggtgcctcactctgagaagagatttacaaggaagagtgtggtggcttctcagggtttccaagcagggaaacattactgggaggtggacgtgggacaaaatgtagggtggtatgtgggagtgtgtcgggatgacgtagacagggggaagaacaatgtgactttgtctcccaacaatgggtattgggtcctcagactgacaacagaacatttgtatttcacattcaatccccattttatcagcctcccccccagcacccctcctacacgagtaggggtcttcctggactatgagggtgggaccatctccttcttcaatacaaatgaccagtcccttatttataccctgctgacatgtcagtttgaaggcttgttgagaccctatatccagcatgcgatgtatgacgaggaaaaggggactcccatattcatatgtccagtgtcctggggatgagacagagaagaccctgcttaaagggccccacaccacagacccagacacagccaagggagagtgctcccgacaggtggccccagcttcctctccggagcctgcgcacagagagtcacgccccccactctcctttagggagctgaggttcttctgccctgagccctgcagcagcggcagtcacagcttccagatgaggggggattggcctgaccctgtgggagtcagaagccatggctgccctgaagtggggacggaatagactcacattaggtttagtttgtgaaaactccatccagctaagcgatcttgaacaagtcacaacctcccaggctcctcatttgctagtcacggacagtgattcctgcctcacaggtgaagattaaagagacaacgaatgtgaatcatgcttgcaggtttgagggcacagtgtttgctaatgatgtgtttttatattatacattttcccaccataaactctgtttgcttattccacattaatttacttttctctataccaaatcacccatggaatagttattgaacacctgctttgtgaggctcaaagaataaagaggaggtaggatttttcactgattctataagcccagcattacctgataccaaaaccaggcaaagaaaacagaagaagaggaaggaaaactacaggtccatatccctcattaacacagacacaaaaattctaaataaaattttaacaaattaaactaaacaatatatttaaagatgatatataactactcagtgtggtttgtcccacaaatgcagagttggtttaatatttaaatatcaaccagtgtaattcagcacattaataaagtaaaaaagaaaaccataaaaaaaaaaaaaaa

SEQ ID NO: 1215 - protein, 466 aa, Homo sapiens
MAFVLILVLSFYELVSGQWQVTGPGKFVQALVGEDAVFSCSLFPETSAEAMEVRFFRNQFHAVVHLYRDGEDWESKQMPQYRGRTEFVKDSIAGGRVSLRLKNITPSDIGLYGCWFSSQIYDEEATWELRVAALGSLPLISIVGYVDGGIQLLCLSSGWFPQPTAKWKGPQGQDLSSDSRANADGYSLYDVEISIIVQENAGSILCSIHLAEQSHEVESKVLIGETFFQPSPWRLASILLGLLCGALCGVVMGMIIVFFKSKGKIQAELDWRRKHGQAELRDARKHAVEVTLDPETAHPKLCVSDLKTVTHRKAPQEVPHSEKRFTRKSVVASQGFQAGKHYWEVDVGQNVGWYVGVCRDDVDRGKNNVTLSPNNGYWVLRLTTEHLYFTFNPHFISLPPSTPPTRVGVFLDYEGGTISFFNTNDQSLIYTLLTCQFEGLLRPYIQHAMYDEEKGTPIFICPVSWG

SEQ ID NO: 1216 - DNA, 2819 bp, Homo sapiens
atcattgtctatgatatctgcaatggaaatgatcactaggcaatttcagccttgcaaatctaacatccagataccaacctcaccatcgtctgactactatgtccctggtgcacaatgcctgccttcactacagcctttcacacaaagtatttaccctgttgcttaattgtctgatcgtcccactcccttggatgagaactgcatctcttccatctcttattctgagtggcttggctaagacattcactgactccatggggaaacttcacctacagaggaaagagccatcctcctgtgggcaggtgatgtgtccttgttctttccctgacgtgcccagtcctcttgcaagtgacttgaaaggatgcaccagcctggctgcaggcagaggtgtgaagaaggtccttgcttccccttcaccttctgccatgattctaagtttcctgacgcctcccagccgtgcttcctgttaagcctgtgaaactcctttggaatgagtacacatccaggagtgaagaagacaagctcaactgccattctctgagcagttcaaggcatactgagttgcgggagttgtgtggtggtccactctgactgcaagcacccctttcttgaaccgaacagagtcaagtggaatcaaaggacattacctgttgattcttgggcaaggcccagaatttggtggacatacttaaagaagaaaggaatcttcagctaaagtgtctacgatcaattcagatttggagggcatggatcttctgacagtaggggccattctaggattttttggttgaagagatgaacttcaacttggttccagatgggtggtccagctattctgctgacaacatttttcagggcaaggcttttgctactggaatgatttaaggaagatccctcagtgtttcagagtaaagatatttctaaagaagtacctgtgtcattgcccatcttgaagattgacttttatggattgctcaaatactgatatcagctcaatgtcaatatatactcctacatataaaatccatcttctaatcataatcactaggtggatattgttatgcaaggaagagatgtgaatatacaggaaatgagatccttaaaggggttgccgtccagatgttagatcaaagagattatgattcattcaaccaagtcgctggacttttgaaggcctatccaagtcatggtgcctttgaggttgcgcctgttactattcaaaacttggtatgtgttattccatgtaaatgttatgcaatgattcaaaaatgaataccaggttgaaagatgttataacagccccttgttccaatgaactctacctttgtgagcaaaggtgaccaaaaagaccacactgcatgaccagcagcccacaaaccagactgggctaagttctgctgctatctctagagcttgctgctgttcaaagcactccttgggtccagccagattgccatactttcttgatgtatttcccatggctgcttcatttgttgttcatttctcttagtgcttttagtaggttattgttttaggtggcgtatctgtacctcctcataaaagatttttgggtccacattttccactcaaaatcatagtagccatgatgaacacctggcatcctttggacaactttccataactacataataatgagccagtttttaccatccatattagatatggctagagtgactattttctgaatcaaaattgtgctgagcatttgccaaatatcagataaacttaaagccctagaagtatcttagaaagtccaaggggagtgtcattgttctagacttagttcaaaagatgctagacaatggcgtccaagttcagcctttgtagacatatagagtgaacattacccttgctgttataggttttattctccactgagggccacagagcctcaccattggtttgccccacacacaacagggtaaattcctactcctttgtcaattaggaattttccaggcaatgtgtttacctcttgggtaaatacattactttcatcagtgtaacttaactataaagtatttttagaggatcagattatttgagtatggctgtgataagtctctccttaaatggaccttaacaaagtagaaagaaaacgttagcagacatttcagactaatgatgttttctttttttcaagtgggttatttagagttgaatagcaattacttaaagctagtagcaaaggaacattttctgtaatgatgtttatttatgccttttcattctataacattcagcatgtgacaaaggaattagagaaaagactagtcgaatctggagccatgcaattaatgaaatccatatgtttgaagaaatcgtcttatataactcccatgcttctgatatttcctagaacgtcttagattgaggtcattgtgcactattaacagagtcctggttaataatgtacaatgaccttaattcagcatgtttttaatgaatagctgaacttcatgcttataacatcctgactatgcttacaaatatttttctaaattgctggtctgtttgcagatgcattatcagtgcatgcaaaaaataagattatgcctcgtttaggattctctttcttgtaaagtccaatcactgctgcattaagataggtatgggaatgtgtaggcaaagtcacatatagtgacacacattggataaaaaatataaacttcagccacatgattctttcactcaaaaacataatgtggctctcctttatatctttttttaatgatttgcatagctttccattgtgtgtatgtgctataatttgttttaataaacccccactaattgat

SEQ ID NO: 1217 - protein, 123 aa, Homo sapiens
MSLVHNACLHYSLSHKVFTLLLNCLIVPLPWMRTASLPSLILSGLAKTFTDSMGKLHLQRKEPSSCGQVMCPCSFPDVPSPLASDLKGCTSLAAGRGVKKVLASPSPSAMILSFLTPPSRASC

SEQ ID NO: 1218 - DNA, 895 bp, Homo sapiens
ttatttttctgtgtgtcccatacaggcccccaccatgaagggtttcacagccactctcttcctctggactctgatttttcccagctgcagtggaggcggcggtgggaaagcctggcccacacacgtggtctgtagcgacagcggcttggaagtgctctaccagagttgcgatccattacaagattttggcttttctgttgaaaagtgttccaagcaattaaaatcaaatatcaacattagatttggaattattctgagagaggacatcaaagagctttttcttgacctagctctcatgtctcaaggctcatctgttttgaatttctcctatcccatctgtgaggcggctctgcccaagttttctttctgtggaagaaggaaaggagagcagatttactatgctgggcctgtcaataatcctgaatttactattcctcagggagaataccaggttttgctggaactgtacactgaaaaacggtccaccgtggcctgtgccaatgctactatcatgtgctcctgactgtggcctgtagcaaaaatcacagccagctgcatctcgtgggacctccaagctcctctgactgaacctactgtgggaggagaagcagctgatgacagagagaggctctacaaagaagcgcccccaaagagtgcagctgctaattttagtcccaggaccagacatccccagactccacagatgtaatgaagtccccgaatgtatctgtttctaaggagcctcttggcagtccttaagcagtcttgagggtccatcctttttctctaattggtcgcctcccaccagactcacctgcttttcaactttttaggagtgcttcctcacagttaccaagaataaagaaagctggccaccataaaaaaaaaaaaaaaa

SEQ ID NO: 1219 - protein, 162 aa, Homo sapiens
MKGFTATLFLWTLIFPSCSGGGGGKAWPTHVVCSDSGLEVLYQSCDPLQDFGFSVEKCSKQLKSNINIRFGIILREDIKELFLDLALMSQGSSVLNFSYPICEAALPKFSFCGRRKGEQIYYAGPVNNPEFTIPQGEYQVLLELYTEKRSTVACANATIMCS

SEQ ID NO: 1220 - DNA, 7370 bp, Homo sapiens
atgccagggagccaagcgtcctgcccggccgttgctccgactgtgtgttccaggagtggtggctctgaggtgtgaccctgcccacgtttgggcccagccaggttcagccccccaataaggagggcagcttgataacacaaagaaaacagtgtcaacgagtactaccaagagaagaagacaagaggtcaacacagactcattttctactccgtgtgaatgatagctacagcaggggaaagtttcatagtctatcagtgggtcagaaaatggagttttatagcagaggcttcttagaagcttaaacccctgtcccaatgacgtcaagttcgcccgctggcttggaaggttcagacctatcttccatcaacaccatgatgtcggcggtcatgagtgtagggaaggtcacagagaatggcgggagcccccaggggatcaagtccccctcgaagcctccaggaccaaatcggattggcagaaggaaccaggaaacgaaagaggagaagtcttcctataactgccccctgtgtgagaagatttgcactacccagcaccagctgaccatgcacattcgccagcacaacacagacactggaggagccgaccactcatgcagcatctgcggaaagtcactgagctcggccagctccctcgatcgccacatgctggtgcactctggcgagaggccttacaagtgcactgtgtgtggccagtcatttaccaccaatgggaacatgcacagacatatgaagatccatgagaaggaccctaacagtgccacagccacagcccctccatctcctctgaaacgtaggcgattgtcctccaagaggaaactgagtcacgatgccgagtcagagagagaagacccagcaccagctaaaaagatggtagaagacgggcagtcaggtgacttggagaagaaagctgatgaagtctttcactgcccagtatgtttcaaggagtttgtttgcaagtatggactggagacccacatggagacccattcagataacccactaagatgtgacatttgttgtgtcacctttcgaacacatcgaggactgctgcgtcacaacgcgcttgtccacaaacaacttcccagggatgcaatgggcagacctttcatacagaacaacccttcaattcctgctggcttccacgacttaggattcacggacttctcctgtaggaagtttcctcgcatttctcaggcctggtgcgaaacaaacctgcggaggtgcatcagcgagcaacaccgttttgtctgcgacacctgtgacaaggcgttccccatgctctgctcactggctctgcacaagcagacccatgtggcggcagaccagggtcaagaaaagccgcaggccacgcccctgcctggtgacgccctggaccagaagggcttcctggccttgcttggcctgcagcacaccaaagacgtcaggcctgcccccgccgaggagcccctgccggatgacaaccaggcaattcagctccagacactcaagtgtcagctacctcaggaccccggctgcaccaacctgctgagcctgtcacctttcgaagctgcttccctaggcggttctctcacagttctccccgcgaccaaggacagcataaagcacctgtccctgcagcccttccagaagggcttcatcatccagcctgacagcagcattgtggtcaagcccatctctggcgagtcggccatcgagctggcagacatccagcaaattctgaagatggcagcctcggctccccctcagatcagtcttccgcccttctccaaggcccctgccgccccactgcaggcgatcttcaagcacatgccccctctgaagccaaagcccctggtcacaccacggacggtggtggccacctccacgcccccgcctctcatcaacgcccagcaggcttccccgggctgtatcagccccagcctgccgccaccgcccctgaagctcctcaaaggctcagtggaggcggcctccaacgcccacctgctgcagtccaagtccgggacccagccccacgcggccacgcggctctccctgcagcagccgcgggcggagctgccgggccagcctgagatgaagacgcagctggagcaggacagcatcatcgaggccctgctgccgctgagcatggaggccaagatcaagcaggagatcacagagggggaactcaaggccttcatgacagcgcccggcggcaagaagacgcccgccatgcgcaaggtgctctacccctgccgcttctgcaaccaggtgtttgccttctcgggggtcttgcgtgcccacgtgcgctcccacctgggcatctcgccataccagtgcaacatctgcgactacatcgccgccgacaaggccgcgctcatccgccacctgcgcacgcacagtggggagcggccctacatttgcaagatctgccactaccccttcactgtcaaagccaactgcgagcggcacctgcgcaagaagcacctcaaggccacccgcaaggatatcgagaagaacatcgagtatgtgagtagcagcgcggccgagctggtggacgccttctgcgccccggacaccgtgtgccggctgtgcggcgaggacctcaagcactatcgtgccctgcgcatccacatgcgcacgcactgcggccgcggcctgggcgggggccacaagggccgcaagcccttcgagtgcaaggagtgcagcgccgcgttcgcggccaagcgcaactgcatccaccacatcctcaagcagcacctgcacgtgcccgagcaggacatcgagagctacgtgctggccgccgacggcctgggccccgcagaggcgccggccgctgaggcgtcggggcgcggggaggacagtggctgcgctgcccttggtgactgcaagcccctcactgccttcctggaaccccagaacggctttcttcacaggggccccacccagcctccacctccccatgtctcgatcaagttggagcccgccagtagctttgcggtggacttcaatgagcccctggacttctcgcagaagggcctggccctggtccaagtgaagcaggaaaacatctcctttctgagcccttcttccctggtcccctatgactgctccatggagcccatcgacctgtccatccccaagaacttcaggaaaggggacaaggatttggccactcccagcgaagccaagaagcctgaggaggaggcggggagcagcgagcagccctctccctgcccagcacccggcccttctcttcctgtaactttggggcccagcggaatcctggaaagccccatggcccctgctccggcggccaccccggaacccccagcacagcccctgcagggccctgttcagctggcggtcccaatctactcctcagccctggtcagcagccctccactcgtgggcagctcagccctcctgagtggcacagccttgctgcgtccactgcggcccaagcccccgctgcttttgccaaagccccccgtgacagaagagctgcccccgctggcctccattgcccagatcatctcatctgtatcctcggcccccaccctgctgaaaaccaaggtggcggacccagggcccgcaagcactggcagtaacaccacggcttcagacagcttaggaggttctgtccccaaagccgccaccaccgccacccccgctgccaccaccagcccaaaagagtctagtgagcctcccgctccagccagcagcccagaggctgcctctcccaccgagcagggcccagcgggcacgtcgaagaagaggggccggaaaagggggatgaggagccgaccccgcgccaacagcggcggggtggacctggactccagcggggagtttgccagcatcgagaagatgctggccaccacagacaccaacaagttcagtccgtttctgcagacagcggaggacaacactcaggatgaggtggccggagcccctgccgaccaccatgggcccagtgatgaagagcagggcagtcccccagaagacaagctgctgagggccaagcggaactcgtacaccaactgcctgcagaagatcacctgtccccactgtccccgggttttcccttgggccagctccctacagaggcacatgctcacacacactgacagtcagtcggatgcggagactgcagccgccgcgggcgaagtgctagacctcacctcacgggacagagagcagccgtcggagggcgccactgagctccgccaggtcgcaggggatgcgcctgtggagcaggccacggcggaaacggcctcgccggtgcaccgggaagagcacgggcgtggggagagccatgagccggaggaggagcatggcactgaggagagcactggggacgccgacggcgcggaagaggacgcgtcgagcaaccagagcctggacctggacttcgccaccaagctcatggacttcaagctggcggagggcgacggcgaggcaggcgccgggggcgcggcctcgcaggagcagaagctcgcctgcgacacctgtgggaagagcttcaagttcctgggcaccctgagccgccaccggaaggcgcacggccgccaggagcccaaggacgagaagggagatggcgccagcactgcagaggaggggccccagcccgcccctgaacaggaggagaagccccccgagaccccggcagaggtggtggagtcggccccgggtgccggggaggccccggcggaaaagctcgcggaggagacggagggcccctccgacggggagagcgcggccgagaaaaggtcctcagagaagagcgacgatgacaagaaaccaaagacagactcccccaaaagcgtggccagcaaggcagacaagaggaagaaggtctgcagcgtgtgcaacaagcggttctggtcgctgcaggacctgacccggcacatgcgctcccacacaggggaaaggccatacaaatgtcagacctgcgagcgaaccttcaccttgaagcacagcctggttcgccaccagcggatccaccagaaagccaggcatgccaaacaccacgggaaggacagcgacaaggaagagcggggtgaggaggacagcgagaatgagtccacccacagcggcaacaacgccgtctcagagaacgaggctgagctggctcccaatgccagcaaccacatggctgtcacccggagccggaaggagggcttggccagtgccaccaaggactgcagccacagggaggagaaggtcacggcagggtggccgtctgagcctggccagggtgaccttaacccagagagcccggcggccctggggcaggacctgctggagccgcgcagcaagaggcctgcccacccaatcctggccacagctgatggcgcctcccagctcgtggggatggagtgacagcctcagtccccctcagcacagacaaaagccagcagagcaaagcgtctatacttcatggggtttcctcagtgccctttggctgttgaggagtgagagagagagagagagagagagagagagagagagagagacaagcaggagcgtggctgctcgctcagtgccatagccttaccgcagcctgcgcgggaggccacagcccgtgccgattccagtgccttaactacttaccggatccctccatattatcatgggtgttgtatttttccaaaatgacttcttaaacaaaacaaatattataatgaattgtctggagaggacctcttcatttgagcattagcgttattttgtattggtgtgtgtgagcttgttcttgtgaatctgtgatagcaccgtttgttctgtgagctggaaacagaaggaaaaaacatacccttgggtacccatagccaataactggaagaaaatgatgtgaatttcatgtaaatgaccagaggaaagatggataagatgataatttcttaaatagacattttccttttttctttgtgcttcatggtggagctgtcatctggtccttggtattacaggatgtggttgatgaaggtttccaatatggtttcaggccaaaaccagggaagattctagcttcagcctcatgtccatttccagtctgtcagcattagacatggtcactgttcaagtttcaagacatccattcttaactatagagaagagttactcccctggcgtcttaacctatggaaaacatgcacggataggatatatttgattgcctcctcttccctttcagtatatgtattattaatattattattattattattattattagttcatcagtttgctgttctctgcagtgagcagaatcaaatgggcaatatttgtcctgggagacctgtgccgcacccaggtccccgtgttaacgtgtgcctgcggttgtggttggcaccctcgggtggtagctcttctactgtaatgagacaagcctttcttctgtcactgcagaatttagaaggggccgtgagcagtcttcccaagcatggtccaggagcagctcagagagggtggagtgaggatgcatgcatccagggaacaggcatcaagaagccagggccgtgcctggagcactgcagagatgactttggagaaagcaaagcagtgacccagtgaccaggcacattactcgtgagcgaggtattcccagtcttcctgctaagcctaatccaagccttacccagctgtgctactgtcatttgcaaagcaaggaaatactactactggtaataaaactacactagcaagatgtcagataagaaataggtttatatttaccttcctgcgatgtggggttggtgcttgaagataaatgtgctgtttctagtttcttaaatagcccacacccctggatgcaaaaaggcagggttatttttacccatgagcatcctgtgcaggcaatagacttccctcactgtctccgcctgcagggaggagaatgtaccccactgcacctgagctcctggtccctcagccaagacctcaggggtccccagccagcctgctgctggggacccctgtgcttgctgcagtgtatggagcctcttgccttcccctggggaggcacccctgtaccccagcttccttcccctggccttttctggccccagtgctcctcctttacatagacttgttcacacagaaacgtgcacgcccccttttctccgccacttcaccagtttctgaaatccaacctcccagacttcacaggaagatagatattcttgagataatgaaaagtgatatcttcgcatacgaaaggaaaaaaggttgaggtatatatgatttttaactgtattaggggtgtatgaaccagtttaaaaacgaggttttatttactgtagagatgaatgcaaatcagaaccaatgatcccttggcctacttagttaaaaccagttcatacatcccttagg

SEQ ID NO: 1221 - protein, 1687 aa, Homo sapiens
MTSSSPAGLEGSDLSSINTMMSAVMSVGKVTENGGSPQGIKSPSKPPGPNRIGRRNQETKEEKSSYNCPLCEKICTTQHQLTMHIRQHNTDTGGADHSCSICGKSLSSASSLDRHMLVHSGERPYKCTVCGQSFTTNGNMHRHMKIHEKDPNSATATAPPSPLKRRRLSSKRKLSHDAESEREDPAPAKKMVEDGQSGDLEKKADEVFHCPVCFKEFVCKYGLETHMETHSDNPLRCDICCVTFRTHRGLLRHNALVHKQLPRDAMGRPFIQNNPSIPAGFHDLGFTDFSCRKFPRISQAWCETNLRRCISEQHRFVCDTCDKAFPMLCSLALHKQTHVAADQGQEKPQATPLPGDALDQKGFLALLGLQHTKDVRPAPAEEPLPDDNQAIQLQTLKCQLPQDPGCTNLLSLSPFEAASLGGSLTVLPATKDSIKHLSLQPFQKGFIIQPDSSIVVKPISGESAIELADIQQILKMAASAPPQISLPPFSKAPAAPLQAIFKHMPPLKPKPLVTPRTVVATSTPPPLINAQQASPGCISPSLPPPPLKLLKGSVEAASNAHLLQSKSGTQPHAATRLSLQQPRAELPGQPEMKTQLEQDSIIEALLPLSMEAKIKQEITEGELKAFMTAPGGKKTPAMRKVLYPCRFCNQVFAFSGVLRAHVRSHLGISPYQCNICDYIAADKAALIRHLRTHSGERPYICKICHYPFTVKANCERHLRKKHLKATRKDIEKNIEYVSSSAAELVDAFCAPDTVCRLCGEDLKHYRALRIHMRTHCGRGLGGGHKGRKPFECKECSAAFAAKRNCIHHILKQHLHVPEQDIESYVLAADGLGPAEAPAAEASGRGEDSGCAALGDCKPLTAFLEPQNGFLHRGPTQPPPPHVSIKLEPASSFAVDFNEPLDFSQKGLALVQVKQENISFLSPSSLVPYDCSMEPIDLSIPKNFRKGDKDLATPSEAKKPEEEAGSSEQPSPCPAPGPSLPVTLGPSGILESPMAPAPAATPEPPAQPLQGPVQLAVPIYSSALVSSPPLVGSSALLSGTALLRPLRPKPPLLLPKPPVTEELPPLASIAQIISSVSSAPTLLKTKVADPGPASTGSNTTASDSLGGSVPKAATTATPAATTSPKESSEPPAPASSPEAASPTEQGPAGTSKKRGRKRGMRSRPRANSGGVDLDSSGEFASIEKMLATTDTNKFSPFLQTAEDNTQDEVAGAPADHHGPSDEEQGSPPEDKLLRAKRNSYTNCLQKITCPHCPRVFPWASSLQRHMLTHTDSQSDAETAAAAGEVLDLTSRDREQPSEGATELRQVAGDAPVEQATAETASPVHREEHGRGESHEPEEEHGTEESTGDADGAEEDASSNQSLDLDFATKLMDFKLAEGDGEAGAGGAASQEQKLACDTCGKSFKFLGTLSRHRKAHGRQEPKDEKGDGASTAEEGPQPAPEQEEKPPETPAEVVESAPGAGEAPAEKLAEETEGPSDGESAAEKRSSEKSDDDKKPKTDSPKSVASKADKRKKVCSVCNKRFWSLQDLTRHMRSHTGERPYKCQTCERTFTLKHSLVRHQRIHQKARHAKHHGKDSDKEERGEEDSENESTHSGNNAVSENEAELAPNASNHMAVTRSRKEGLASATKDCSHREEKVTAGWPSEPGQGDLNPESPAALGQDLLEPRSKRPAHPILATADGASQLVGME

SEQ ID NO: 1222 - DNA, 7535 bp, Homo sapiens
atgccagggagccaagcgtcctgcccggccgttgctccgactgtgtgttccaggagtggtggctctgaggtgtgaccctgcccacgtttgggcccagccaggttcagccccccaataaggagggcagcttgataacacaaagaaaacagtgtcaacgagtactaccaagagaagaagacaagaggtcaacacagactcattttctactccgtgtgaatgatagctacagcaggggaaagtttcatagtctatcagtgggtcagaaaatggagttttatagcagaggcttcttagaagcttaaacccctgtcccaatgacgtcaagttcgcccgctggcttggaaggttcagacctatcttccatcaacaccatgatgtcggcggtcatgagtgtagggaaggtcacagagaatggcgggagcccccaggggatcaagtccccctcgaagcctccaggaccaaatcggattggcagaaggaaccaggaaacgaaagaggagaagtcttcctataactgccccctgtgtgagaagatttgcactacccagcaccagctgaccatgcacattcgccagcacaacacagacactggaggagccgaccactcatgcagcatctgcggaaagtcactgagctcggccagctccctcgatcgccacatgctggtgcactctggcgagaggccttacaagtgcactgtgtgtggccagtcatttaccaccaatgggaacatgcacagacatatgaagatccatgagaaggaccctaacagtgccacagccacagcccctccatctcctctgaaacgtaggcgattgtcctccaagaggaaactgagtcacgatgccgagtcagagagagaagacccagcaccagctaaaaagatggtagaagacgggcagtcaggtgacttggagaagaaagctgatgaagtctttcactgcccagtatgtttcaaggagtttgtttgcaagtatggactggagacccacatggagacccattcagataacccactaagatgtgacatttgttgtgtcacctttcgaacacatcgaggactgctgcgtcacaacgcgcttgtccacaaacaacttcccagggatgcaatgggcagacctttcatacagaacaacccttcaattcctgctggcttccacgacttaggattcacggacttctcctgtaggaagtttcctcgcatttctcaggcctggtgcgaaacaaacctgcggaggtgcatcagcgagcaacaccgttttgtctgcgacacctgtgacaaggcgttccccatgctctgctcactggctctgcacaagcagacccatgtggcggcagaccagggtcaagaaaagccgcaggccacgcccctgcctggtgacgccctggaccagaagggcttcctggccttgcttggcctgcagcacaccaaagacgtcaggcctgcccccgccgaggagcccctgccggatgacaaccaggcaattcagctccagacactcaagtgtcagctacctcaggaccccggctgcaccaacctgctgagcctgtcacctttcgaagctgcttccctaggcggttctctcacagttctccccgcgaccaaggacagcataaagcacctgtccctgcagcccttccagaagggcttcatcatccagcctgacagcagcattgtggtcaagcccatctctggcgagtcggccatcgagctggcagacatccagcaaattctgaagatggcagcctcggctccccctcagatcagtcttccgcccttctccaaggcccctgccgccccactgcaggcgatcttcaagcacatgccccctctgaagccaaagcccctggtcacaccacggacggtggtggccacctccacgcccccgcctctcatcaacgcccagcaggcttccccgggctgtatcagccccagcctgccgccaccgcccctgaagctcctcaaaggctcagtggaggcggcctccaacgcccacctgctgcagtccaagtccgggacccagccccacgcggccacgcggctctccctgcagcagccgcgggcggagctgccgggccagcctgagatgaagacgcagctggagcaggacagcatcatcgaggccctgctgccgctgagcatggaggccaagatcaagcaggagatcacagagggggaactcaaggccttcatgacagcgcccggcggcaagaagacgcccgccatgcgcaaggtgctctacccctgccgcttctgcaaccaggtgtttgccttctcgggggtcttgcgtgcccacgtgcgctcccacctgggcatctcgccataccagtgcaacatctgcgactacatcgccgccgacaaggccgcgctcatccgccacctgcgcacgcacagtggggagcggccctacatttgcaagatctgccactaccccttcactgtcaaagccaactgcgagcggcacctgcgcaagaagcacctcaaggccacccgcaaggatatcgagaagaacatcgagtatgtgagtagcagcgcggccgagctggtggacgccttctgcgccccggacaccgtgtgccggctgtgcggcgaggacctcaagcactatcgtgccctgcgcatccacatgcgcacgcactgcggccgcggcctgggcgggggccacaagggccgcaagcccttcgagtgcaaggagtgcagcgccgcgttcgcggccaagcgcaactgcatccaccacatcctcaagcagcacctgcacgtgcccgagcaggacatcgagagctacgtgctggccgccgacggcctgggccccgcagaggcgccggccgctgaggcgtcggggcgcggggaggacagtggctgcgctgcccttggtgactgcaagcccctcactgccttcctggaaccccagaacggctttcttcacaggggccccacccagcctccacctccccatgtctcgatcaagttggagcccgccagtagctttgcggtggacttcaatgagcccctggacttctcgcagaagggcctggccctggtccaagtgaagcaggaaaacatctcctttctgagcccttcttccctggtcccctatgactgctccatggagcccatcgacctgtccatccccaagaacttcaggaaaggggacaaggatttggccactcccagcgaagccaagaagcctgaggaggaggcggggagcagcgagcagccctctccctgcccagcacccggcccttctcttcctgtaactttggggcccagcggaatcctggaaagccccatggcccctgctccggcggccaccccggaacccccagcacagcccctgcagggccctgttcagctggcggtcccaatctactcctcagccctggtcagcagccctccactcgtgggcagctcagccctcctgagtggcacagccttgctgcgtccactgcggcccaagcccccgctgcttttgccaaagccccccgtgacagaagagctgcccccgctggcctccattgcccagatcatctcatctgtatcctcggcccccaccctgctgaaaaccaaggtggcggacccagggcccgcaagcactggcagtaacaccacggcttcagacagcttaggaggttctgtccccaaagccgccaccaccgccacccccgctgccaccaccagcccaaaagagtctagtgagcctcccgctccagccagcagcccagaggctgcctctcccaccgagcagggcccagcgggcacgtcgaagaagaggggccggaaaagggggatgaggagccgaccccgcgccaacagcggcggggtggacctggactccagcggggagtttgccagcatcgagaagatgctggccaccacagacaccaacaagttcagtccgtttctgcagacagcggaggacaacactcaggatgaggtggccggagcccctgccgaccaccatgggcccagtgatgaagagcagggcagtcccccagaagacaagctgctgagggccaagcggaactcgtacaccaactgcctgcagaagatcacctgtccccactgtccccgggttttcccttgggccagctccctacagaggcacatgctcacacacactggtcagaaacccttcccttgtcaaaaatgcgatgccttcttttctaccaaatctaactgtgaacgccaccagttgcgcaaacacggagttaccacctgttccctgagaagaaacgggcttatcccccagtcaaaagagagtgatgttggatcccatgatagcacagacagtcagtcggatgcggagactgcagccgccgcgggcgaagtgctagacctcacctcacgggacagagagcagccgtcggagggcgccactgagctccgccaggtcgcaggggatgcgcctgtggagcaggccacggcggaaacggcctcgccggtgcaccgggaagagcacgggcgtggggagagccatgagccggaggaggagcatggcactgaggagagcactggggacgccgacggcgcggaagaggacgcgtcgagcaaccagagcctggacctggacttcgccaccaagctcatggacttcaagctggcggagggcgacggcgaggcaggcgccgggggcgcggcctcgcaggagcagaagctcgcctgcgacacctgtgggaagagcttcaagttcctgggcaccctgagccgccaccggaaggcgcacggccgccaggagcccaaggacgagaagggagatggcgccagcactgcagaggaggggccccagcccgcccctgaacaggaggagaagccccccgagaccccggcagaggtggtggagtcggccccgggtgccggggaggccccggcggaaaagctcgcggaggagacggagggcccctccgacggggagagcgcggccgagaaaaggtcctcagagaagagcgacgatgacaagaaaccaaagacagactcccccaaaagcgtggccagcaaggcagacaagaggaagaaggtctgcagcgtgtgcaacaagcggttctggtcgctgcaggacctgacccggcacatgcgctcccacacaggggaaaggccatacaaatgtcagacctgcgagcgaaccttcaccttgaagcacagcctggttcgccaccagcggatccaccagaaagccaggcatgccaaacaccacgggaaggacagcgacaaggaagagcggggtgaggaggacagcgagaatgagtccacccacagcggcaacaacgccgtctcagagaacgaggctgagctggctcccaatgccagcaaccacatggctgtcacccggagccggaaggagggcttggccagtgccaccaaggactgcagccacagggaggagaaggtcacggcagggtggccgtctgagcctggccagggtgaccttaacccagagagcccggcggccctggggcaggacctgctggagccgcgcagcaagaggcctgcccacccaatcctggccacagctgatggcgcctcccagctcgtggggatggagtgacagcctcagtccccctcagcacagacaaaagccagcagagcaaagcgtctatacttcatggggtttcctcagtgccctttggctgttgaggagtgagagagagagagagagagagagagagagagagagagagacaagcaggagcgtggctgctcgctcagtgccatagccttaccgcagcctgcgcgggaggccacagcccgtgccgattccagtgccttaactacttaccggatccctccatattatcatgggtgttgtatttttccaaaatgacttcttaaacaaaacaaatattataatgaattgtctggagaggacctcttcatttgagcattagcgttattttgtattggtgtgtgtgagcttgttcttgtgaatctgtgatagcaccgtttgttctgtgagctggaaacagaaggaaaaaacatacccttgggtacccatagccaataactggaagaaaatgatgtgaatttcatgtaaatgaccagaggaaagatggataagatgataatttcttaaatagacattttccttttttctttgtgcttcatggtggagctgtcatctggtccttggtattacaggatgtggttgatgaaggtttccaatatggtttcaggccaaaaccagggaagattctagcttcagcctcatgtccatttccagtctgtcagcattagacatggtcactgttcaagtttcaagacatccattcttaactatagagaagagttactcccctggcgtcttaacctatggaaaacatgcacggataggatatatttgattgcctcctcttccctttcagtatatgtattattaatattattattattattattattattagttcatcagtttgctgttctctgcagtgagcagaatcaaatgggcaatatttgtcctgggagacctgtgccgcacccaggtccccgtgttaacgtgtgcctgcggttgtggttggcaccctcgggtggtagctcttctactgtaatgagacaagcctttcttctgtcactgcagaatttagaaggggccgtgagcagtcttcccaagcatggtccaggagcagctcagagagggtggagtgaggatgcatgcatccagggaacaggcatcaagaagccagggccgtgcctggagcactgcagagatgactttggagaaagcaaagcagtgacccagtgaccaggcacattactcgtgagcgaggtattcccagtcttcctgctaagcctaatccaagccttacccagctgtgctactgtcatttgcaaagcaaggaaatactactactggtaataaaactacactagcaagatgtcagataagaaataggtttatatttaccttcctgcgatgtggggttggtgcttgaagataaatgtgctgtttctagtttcttaaatagcccacacccctggatgcaaaaaggcagggttatttttacccatgagcatcctgtgcaggcaatagacttccctcactgtctccgcctgcagggaggagaatgtaccccactgcacctgagctcctggtccctcagccaagacctcaggggtccccagccagcctgctgctggggacccctgtgcttgctgcagtgtatggagcctcttgccttcccctggggaggcacccctgtaccccagcttccttcccctggccttttctggccccagtgctcctcctttacatagacttgttcacacagaaacgtgcacgcccccttttctccgccacttcaccagtttctgaaatccaacctcccagacttcacaggaagatagatattcttgagataatgaaaagtgatatcttcgcatacgaaaggaaaaaaggttgaggtatatatgatttttaactgtattaggggtgtatgaaccagtttaaaaacgaggttttatttactgtagagatgaatgcaaatcagaaccaatgatcccttggcctacttagttaaaaccagttcatacatcccttagg

SEQ ID NO: 1223 - protein, 1742 aa, Homo sapiens
MTSSSPAGLEGSDLSSINTMMSAVMSVGKVTENGGSPQGIKSPSKPPGPNRIGRRNQETKEEKSSYNCPLCEKICTTQHQLTMHIRQHNTDTGGADHSCSICGKSLSSASSLDRHMLVHSGERPYKCTVCGQSFTTNGNMHRHMKIHEKDPNSATATAPPSPLKRRRLSSKRKLSHDAESEREDPAPAKKMVEDGQSGDLEKKADEVFHCPVCFKEFVCKYGLETHMETHSDNPLRCDICCVTFRTHRGLLRHNALVHKQLPRDAMGRPFIQNNPSIPAGFHDLGFTDFSCRKFPRISQAWCETNLRRCISEQHRFVCDTCDKAFPMLCSLALHKQTHVAADQGQEKPQATPLPGDALDQKGFLALLGLQHTKDVRPAPAEEPLPDDNQAIQLQTLKCQLPQDPGCTNLLSLSPFEAASLGGSLTVLPATKDSIKHLSLQPFQKGFIIQPDSSIVVKPISGESAIELADIQQILKMAASAPPQISLPPFSKAPAAPLQAIFKHMPPLKPKPLVTPRTVVATSTPPPLINAQQASPGCISPSLPPPPLKLLKGSVEAASNAHLLQSKSGTQPHAATRLSLQQPRAELPGQPEMKTQLEQDSIIEALLPLSMEAKIKQEITEGELKAFMTAPGGKKTPAMRKVLYPCRFCNQVFAFSGVLRAHVRSHLGISPYQCNICDYIAADKAALIRHLRTHSGERPYICKICHYPFTVKANCERHLRKKHLKATRKDIEKNIEYVSSSAAELVDAFCAPDTVCRLCGEDLKHYRALRIHMRTHCGRGLGGGHKGRKPFECKECSAAFAAKRNCIHHILKQHLHVPEQDIESYVLAADGLGPAEAPAAEASGRGEDSGCAALGDCKPLTAFLEPQNGFLHRGPTQPPPPHVSIKLEPASSFAVDFNEPLDFSQKGLALVQVKQENISFLSPSSLVPYDCSMEPIDLSIPKNFRKGDKDLATPSEAKKPEEEAGSSEQPSPCPAPGPSLPVTLGPSGILESPMAPAPAATPEPPAQPLQGPVQLAVPIYSSALVSSPPLVGSSALLSGTALLRPLRPKPPLLLPKPPVTEELPPLASIAQIISSVSSAPTLLKTKVADPGPASTGSNTTASDSLGGSVPKAATTATPAATTSPKESSEPPAPASSPEAASPTEQGPAGTSKKRGRKRGMRSRPRANSGGVDLDSSGEFASIEKMLATTDTNKFSPFLQTAEDNTQDEVAGAPADHHGPSDEEQGSPPEDKLLRAKRNSYTNCLQKITCPHCPRVFPWASSLQRHMLTHTGQKPFPCQKCDAFFSTKSNCERHQLRKHGVTTCSLRRNGLIPQSKESDVGSHDSTDSQSDAETAAAAGEVLDLTSRDREQPSEGATELRQVAGDAPVEQATAETASPVHREEHGRGESHEPEEEHGTEESTGDADGAEEDASSNQSLDLDFATKLMDFKLAEGDGEAGAGGAASQEQKLACDTCGKSFKFLGTLSRHRKAHGRQEPKDEKGDGASTAEEGPQPAPEQEEKPPETPAEVVESAPGAGEAPAEKLAEETEGPSDGESAAEKRSSEKSDDDKKPKTDSPKSVASKADKRKKVCSVCNKRFWSLQDLTRHMRSHTGERPYKCQTCERTFTLKHSLVRHQRIHQKARHAKHHGKDSDKEERGEEDSENESTHSGNNAVSENEAELAPNASNHMAVTRSRKEGLASATKDCSHREEKVTAGWPSEPGQGDLNPESPAALGQDLLEPRSKRPAHPILATADGASQLVGME

SEQ ID NO: 1224 - DNA, 7555 bp, Homo sapiens
ttcagacacctgagagcatcctgttctgggtacagtgtgtgtatgtatatgtttgtttgaagccgctggtcctcgccttttactccttagctggacagcgggttcgggatctgccccatgactaaggctgaagtggaaagttgcgaagatagaacaagagttgttccttagggtggtgtccctaaacttgaaagtggacttggtcctgctcgcaggttgctccgactgtgtgttccaggagtggtggctctgaggtgtgaccctgcccacgtttgggcccagccaggttcagccccccaataaggagggcagcttgataacacaaagaaaacagtgtcaacgagtactaccaagagaagaagacaagaggtcaacacagactcattttctactccgtgtgaatgatagctacagcaggggaaagtttcatagtctatcagtgggtcagaaaatggagttttatagcagaggcttcttagaagcttaaacccctgtcccaatgacgtcaagttcgcccgctggcttggaaggttcagacctatcttccatcaacaccatgatgtcggcggtcatgagtgtagggaaggtcacagagaatggcgggagcccccaggggatcaagtccccctcgaagcctccaggaccaaatcggattggcagaaggaaccaggaaacgaaagaggagaagtcttcctataactgccccctgtgtgagaagatttgcactacccagcaccagctgaccatgcacattcgccagcacaacacagacactggaggagccgaccactcatgcagcatctgcggaaagtcactgagctcggccagctccctcgatcgccacatgctggtgcactctggcgagaggccttacaagtgcactgtgtgtggccagtcatttaccaccaatgggaacatgcacagacatatgaagatccatgagaaggaccctaacagtgccacagccacagcccctccatctcctctgaaacgtaggcgattgtcctccaagaggaaactgagtcacgatgccgagtcagagagagaagacccagcaccagctaaaaagatggtagaagacgggcagtcaggtgacttggagaagaaagctgatgaagtctttcactgcccagtatgtttcaaggagtttgtttgcaagtatggactggagacccacatggagacccattcagataacccactaagatgtgacatttgttgtgtcacctttcgaacacatcgaggactgctgcgtcacaacgcgcttgtccacaaacaacttcccagggatgcaatgggcagacctttcatacagaacaacccttcaattcctgctggcttccacgacttaggattcacggacttctcctgtaggaagtttcctcgcatttctcaggcctggtgcgaaacaaacctgcggaggtgcatcagcgagcaacaccgttttgtctgcgacacctgtgacaaggcgttccccatgctctgctcactggctctgcacaagcagacccatgtggcggcagaccagggtcaagaaaagccgcaggccacgcccctgcctggtgacgccctggaccagaagggcttcctggccttgcttggcctgcagcacaccaaagacgtcaggcctgcccccgccgaggagcccctgccggatgacaaccaggcaattcagctccagacactcaagtgtcagctacctcaggaccccggctgcaccaacctgctgagcctgtcacctttcgaagctgcttccctaggcggttctctcacagttctccccgcgaccaaggacagcataaagcacctgtccctgcagcccttccagaagggcttcatcatccagcctgacagcagcattgtggtcaagcccatctctggcgagtcggccatcgagctggcagacatccagcaaattctgaagatggcagcctcggctccccctcagatcagtcttccgcccttctccaaggcccctgccgccccactgcaggcgatcttcaagcacatgccccctctgaagccaaagcccctggtcacaccacggacggtggtggccacctccacgcccccgcctctcatcaacgcccagcaggcttccccgggctgtatcagccccagcctgccgccaccgcccctgaagctcctcaaaggctcagtggaggcggcctccaacgcccacctgctgcagtccaagtccgggacccagccccacgcggccacgcggctctccctgcagcagccgcgggcggagctgccgggccagcctgagatgaagacgcagctggagcaggacagcatcatcgaggccctgctgccgctgagcatggaggccaagatcaagcaggagatcacagagggggaactcaaggccttcatgacagcgcccggcggcaagaagacgcccgccatgcgcaaggtgctctacccctgccgcttctgcaaccaggtgtttgccttctcgggggtcttgcgtgcccacgtgcgctcccacctgggcatctcgccataccagtgcaacatctgcgactacatcgccgccgacaaggccgcgctcatccgccacctgcgcacgcacagtggggagcggccctacatttgcaagatctgccactaccccttcactgtcaaagccaactgcgagcggcacctgcgcaagaagcacctcaaggccacccgcaaggatatcgagaagaacatcgagtatgtgagtagcagcgcggccgagctggtggacgccttctgcgccccggacaccgtgtgccggctgtgcggcgaggacctcaagcactatcgtgccctgcgcatccacatgcgcacgcactgcggccgcggcctgggcgggggccacaagggccgcaagcccttcgagtgcaaggagtgcagcgccgcgttcgcggccaagcgcaactgcatccaccacatcctcaagcagcacctgcacgtgcccgagcaggacatcgagagctacgtgctggccgccgacggcctgggccccgcagaggcgccggccgctgaggcgtcggggcgcggggaggacagtggctgcgctgcccttggtgactgcaagcccctcactgccttcctggaaccccagaacggctttcttcacaggggccccacccagcctccacctccccatgtctcgatcaagttggagcccgccagtagctttgcggtggacttcaatgagcccctggacttctcgcagaagggcctggccctggtccaagtgaagcaggaaaacatctcctttctgagcccttcttccctggtcccctatgactgctccatggagcccatcgacctgtccatccccaagaacttcaggaaaggggacaaggatttggccactcccagcgaagccaagaagcctgaggaggaggcggggagcagcgagcagccctctccctgcccagcacccggcccttctcttcctgtaactttggggcccagcggaatcctggaaagccccatggcccctgctccggcggccaccccggaacccccagcacagcccctgcagggccctgttcagctggcggtcccaatctactcctcagccctggtcagcagccctccactcgtgggcagctcagccctcctgagtggcacagccttgctgcgtccactgcggcccaagcccccgctgcttttgccaaagccccccgtgacagaagagctgcccccgctggcctccattgcccagatcatctcatctgtatcctcggcccccaccctgctgaaaaccaaggtggcggacccagggcccgcaagcactggcagtaacaccacggcttcagacagcttaggaggttctgtccccaaagccgccaccaccgccacccccgctgccaccaccagcccaaaagagtctagtgagcctcccgctccagccagcagcccagaggctgcctctcccaccgagcagggcccagcgggcacgtcgaagaagaggggccggaaaagggggatgaggagccgaccccgcgccaacagcggcggggtggacctggactccagcggggagtttgccagcatcgagaagatgctggccaccacagacaccaacaagttcagtccgtttctgcagacagcggaggacaacactcaggatgaggtggccggagcccctgccgaccaccatgggcccagtgatgaagagcagggcagtcccccagaagacaagctgctgagggccaagcggaactcgtacaccaactgcctgcagaagatcacctgtccccactgtccccgggttttcccttgggccagctccctacagaggcacatgctcacacacactgacagtcagtcggatgcggagactgcagccgccgcgggcgaagtgctagacctcacctcacgggacagagagcagccgtcggagggcgccactgagctccgccaggtcgcaggggatgcgcctgtggagcaggccacggcggaaacggcctcgccggtgcaccgggaagagcacgggcgtggggagagccatgagccggaggaggagcatggcactgaggagagcactggggacgccgacggcgcggaagaggacgcgtcgagcaaccagagcctggacctggacttcgccaccaagctcatggacttcaagctggcggagggcgacggcgaggcaggcgccgggggcgcggcctcgcaggagcagaagctcgcctgcgacacctgtgggaagagcttcaagttcctgggcaccctgagccgccaccggaaggcgcacggccgccaggagcccaaggacgagaagggagatggcgccagcactgcagaggaggggccccagcccgcccctgaacaggaggagaagccccccgagaccccggcagaggtggtggagtcggccccgggtgccggggaggccccggcggaaaagctcgcggaggagacggagggcccctccgacggggagagcgcggccgagaaaaggtcctcagagaagagcgacgatgacaagaaaccaaagacagactcccccaaaagcgtggccagcaaggcagacaagaggaagaaggtctgcagcgtgtgcaacaagcggttctggtcgctgcaggacctgacccggcacatgcgctcccacacaggggaaaggccatacaaatgtcagacctgcgagcgaaccttcaccttgaagcacagcctggttcgccaccagcggatccaccagaaagccaggcatgccaaacaccacgggaaggacagcgacaaggaagagcggggtgaggaggacagcgagaatgagtccacccacagcggcaacaacgccgtctcagagaacgaggctgagctggctcccaatgccagcaaccacatggctgtcacccggagccggaaggagggcttggccagtgccaccaaggactgcagccacagggaggagaaggtcacggcagggtggccgtctgagcctggccagggtgaccttaacccagagagcccggcggccctggggcaggacctgctggagccgcgcagcaagaggcctgcccacccaatcctggccacagctgatggcgcctcccagctcgtggggatggagtgacagcctcagtccccctcagcacagacaaaagccagcagagcaaagcgtctatacttcatggggtttcctcagtgccctttggctgttgaggagtgagagagagagagagagagagagagagagagagagagagacaagcaggagcgtggctgctcgctcagtgccatagccttaccgcagcctgcgcgggaggccacagcccgtgccgattccagtgccttaactacttaccggatccctccatattatcatgggtgttgtatttttccaaaatgacttcttaaacaaaacaaatattataatgaattgtctggagaggacctcttcatttgagcattagcgttattttgtattggtgtgtgtgagcttgttcttgtgaatctgtgatagcaccgtttgttctgtgagctggaaacagaaggaaaaaacatacccttgggtacccatagccaataactggaagaaaatgatgtgaatttcatgtaaatgaccagaggaaagatggataagatgataatttcttaaatagacattttccttttttctttgtgcttcatggtggagctgtcatctggtccttggtattacaggatgtggttgatgaaggtttccaatatggtttcaggccaaaaccagggaagattctagcttcagcctcatgtccatttccagtctgtcagcattagacatggtcactgttcaagtttcaagacatccattcttaactatagagaagagttactcccctggcgtcttaacctatggaaaacatgcacggataggatatatttgattgcctcctcttccctttcagtatatgtattattaatattattattattattattattattagttcatcagtttgctgttctctgcagtgagcagaatcaaatgggcaatatttgtcctgggagacctgtgccgcacccaggtccccgtgttaacgtgtgcctgcggttgtggttggcaccctcgggtggtagctcttctactgtaatgagacaagcctttcttctgtcactgcagaatttagaaggggccgtgagcagtcttcccaagcatggtccaggagcagctcagagagggtggagtgaggatgcatgcatccagggaacaggcatcaagaagccagggccgtgcctggagcactgcagagatgactttggagaaagcaaagcagtgacccagtgaccaggcacattactcgtgagcgaggtattcccagtcttcctgctaagcctaatccaagccttacccagctgtgctactgtcatttgcaaagcaaggaaatactactactggtaataaaactacactagcaagatgtcagataagaaataggtttatatttaccttcctgcgatgtggggttggtgcttgaagataaatgtgctgtttctagtttcttaaatagcccacacccctggatgcaaaaaggcagggttatttttacccatgagcatcctgtgcaggcaatagacttccctcactgtctccgcctgcagggaggagaatgtaccccactgcacctgagctcctggtccctcagccaagacctcaggggtccccagccagcctgctgctggggacccctgtgcttgctgcagtgtatggagcctcttgccttcccctggggaggcacccctgtaccccagcttccttcccctggccttttctggccccagtgctcctcctttacatagacttgttcacacagaaacgtgcacgcccccttttctccgccacttcaccagtttctgaaatccaacctcccagacttcacaggaagatagatattcttgagataatgaaaagtgatatcttcgcatacgaaaggaaaaaaggttgaggtatatatgatttttaactgtattaggggtgtatgaaccagtttaaaaacgaggttttatttactgtagagatgaatgcaaatcagaaccaatgatcccttggcctacttagttaaaaccagttcatacatcccttagg

SEQ ID NO: 1225 - protein, 1687 aa, Homo sapiens; identical to SEQ ID NO: 1221

SEQ ID NO: 1226 - DNA, 3285 bp, Homo sapiens
ctagaattcagcggccgctgaattctagacccggatgaagagtaacgccattaccgcccgagccgccgagagccttagccgacggaaactggacactggaccggcagcgccatgagactcctcccccgcttgctgctgcttctcttactcgtgttccctgccactgtcttgttccgaggcggccccagaggctcgttagcagtggcacaagatcttacagaggatgaagaaacagtagaagattccataattgaggatgaagatgatgaagccgaggtagaagaagatgaacccacagatttggtagaagataaagaggaagaagatgtgtctggtgaacctgaagcttcaccgagtgcagatacaactatactgtttgtaaaaggagaagattttccagcaaataacattgtgaagttcctggtaggctttaccaacaagggtacagaagattttattgttgaatccttagatgcctcattccgttatcctcaggaccaccagttttatatccagaatttcacagctcttcctctgaacactgtagtgccaccccagagacaggcaacttttgagtactctttcattcctgcagagcccatgggcggacgaccatttggtttggtcatcaatctgaactacaaagatttgaacggcaatgtattccaagatgcagtcttcaatcaaacagttacagttattgaaagagaggatgggttagatggagaaacaatctttatgtatatgttccttgctggtcttgggcttctggttattgttggccttcatcaactcctagaatctagaaagcgtaagagacccatacagaaagtagaaatgggtacatcaagtcagaatgatgttgacatgagttggattcctcaggaaacattgaatcaaatcaataaagcttcaccaagaaggttgcccaggaaacgggcacagaagagatcagtgggatctgatgagtaaatgttcctttgtgcaacaattcggtctttacttaacctgccctaatatttttcggcctgatgggaattagtgcagagaagccagtcaccatagaaggcaactcctacttgtgtgtggactgagcaatcagagtctgtggcgataatattgctgaaaatgcactgcattcatttttctaaagtaacaaatttggtttttttttaaaccattaaaatctatgtgtgtgcgtgtgtatgtatgtgagcagttggtcttaccagaatcattgttgaactacctgaaacaagtctttagaatactaaatataatgctgttgtctcttcctttttgacattttctgattttttcccccaaaactcagttaatatttacccactatgattattgatgtcctgccttgaacagttttaaagaaaacaatttttggaatagctcaaatttcaattgatggcacaaatcagcattttgttgttgttactgtattacaattagtattctaaaggcagaagcagaagtagctgctttttagcaatagaattgtttcagtattttgctgctgtttaatgcgcatcttcagaaaacttcccagtggcttcaaggaatttggggatctctctggcaacaaattgtgaaacatgaaatttctgctgactttaatatatgaaacctaatcctacccccttttttaacaaaaagaaactagtacatttgtgaaaattgtgttgtgttgtccattgttgctctagttctgacccagaggtagctctggagtgattttagacctactcactcagttgtgtgtaggtttttttgttttgttttgagagagaatttttctctccttaatagaagcatcctttttaaagagaagttgccttggtccacacactaagcagaaaaccaagttatcaggacagagatatttcccagttactcctaatcaatgaagaaagtgagttggatatttttaaagcagttaactaattttttcttacctaatcttttgggagttttgcttgttgatataacctttttagttaacctgaaagattccaaaaattgttcttaagtgcttgagactggaaccaaaattaaattgtacttcataaaatcctcttatagagttactcttgccctagattgtaaattaagtttggcattattgtcagactggatggagggtgaagtaaaatagtatgaacaattaagaggctctccccctcttgtctttaagccatattctcctacatgtattttataagaaaatgttaagtcaaattttagtggctctttaattcctgacctcttcattctccttttcagtataacctcccctatgctcatgcccacacagacaaaaaaacaaaacgaaatacacacagaaaaaagtctttccaaactgtttaagtatttaaacatctgagccaaagcagatagaagttattgtataattgttaatcactttgcaaataggggctatcaaattacctatattggcattgctggattataaactctatatctgtaatataaagtgtttgagtttttaattgggctgttatgatcagtaattgattttgagaaagctctatgagctctaagtaactgcatggttttttgtttaatgtaatataggagacccttcacattcccaaggaatatattccaaaacatttttgtgaatatctaagtttgtgaaactactagggcatgatacagtaaggtgtaattacagaatttacgaaatgtaaatggcctctacagagttttatggaatacctggtactaacgtaggcagctgcaaaaccacactgagttacagctgtcagccctcctcattcctaaataacttgccttacatatcagccctcccacttctgaagttcaaattagtgcctcggaaatgtagaatttattatttgtcattttttttttttagcatagattgagaacagttgaactcttaaatcctcagatgccaggggtctgctctagcatcagtaagtatttagcagaaactaactccgtaatgaatggaattcaattccacacatggtttgttcaagcacacttaataagtagcctattttttaaatgtctttttaaaatgtaaatatttggatgaagtttttctttgttttgatatattcatttgctacaccaactatgttttcagaattcatcttttgaacaacttggtttcagaatatgtaaaatgactttaaggatcttgtgtatcaaacctatccccggatgtgtgagaataatgtgttcataaagcatggatctcgtaaaaaaaaaaaaaaaaaaaaa

SEQ ID NO: 1227 - protein, 286 aa, Homo sapiens
MRLLPRLLLLLLLVFPATVLFRGGPRGSLAVAQDLTEDEETVEDSIIEDEDDEAEVEEDEPTDLVEDKEEEDVSGEPEASPSADTTILFVKGEDFPANNIVKFLVGFTNKGTEDFIVESLDASFRYPQDHQFYIQNFTALPLNTVVPPQRQATFEYSFIPAEPMGGRPFGLVINLNYKDLNGNVFQDAVFNQTVTVIEREDGLDGETIFMYMFLAGLGLLVIVGLHQLLESRKRKRPIQKVEMGTSSQNDVDMSWIPQETLNQINKASPRRLPRKRAQKRSVGSDE

SEQ ID NO: 1228 - DNA, 3019 bp, Homo sapiens
ttgcgagtttgtgagagtccttggtggaggaggttggaaagcgttctccctcccacaaaacccggtgcagagggagggagagccaggtccgtagcgtgggtccaagaaactatggatcctggaagtgagcacacttttgtgtcttaaaaagtttggtgtctcgttttgaggtgaaaaatgaatgagataagtgctttttaaaaagaagtcttctattgttcaacagttatgaacaaggactatcaaaaattttggtcatcaccttcagatcctgtacattttgaagtggatacttctcatgaaaaagtagaaagcatgtcagaatcggataccatgaatgtcagcaatctttctcaaggtgtaatgctttcacattctccaatctgtatggaaaccaccggcaccacttgtgacttgcctcagaacgaaataaagaattttgaaagggaaaatgagtatgaatccacactttgtgaagatgcttatggcacactagacaatttgttaaatgataacaacattgaaaattactcaacgaatgcactaattcagccagttgacaccatcagcatatcttccttgagacaatttgaaaccgtttgcaaatttcactgggtagaagcatttgatgatgaaatgacagagaagccagaatttcaaagtcaagtgtataattatgcaaaagacaacaatataaagcaagactcatttaaggaagaaaatccaatggaaactagtgtttctgcaaatacagaccaacttggtaacgagtattttagacagcctcctcctagaagcccgcctctaatccactgcagtggagagatgctgaaatttacagaaaagtcactggctaaaagtattgccaaggaatctgccctcaaccctagccaacctccaagcttcttatgtaagactgcagttccttcaaaagaaatacagaattatggggagattcctgagatgtcagtcagttatgaaaaggaagtcacagcagagggtgtggagaggccagaaattgtctcaacttggtcttcggcaggcatttcctggaggagtgaagcatgtcgggagaactgtgagatgcctgactgggagcaaagtgctgaaagcttacaacctgttcaagaggacatggctttaaatgaagtcttgcagaaattaaaacatactaacagaaagcaggaagtgcgaatccaagaactccagtgtagtaacctgtatttagagaagagggttaaagaactacagatgaagattaccaaacagcaagtgttcattgatgtcatcaataagctaaaggagaatgttgaagaattaattgaagacaaatacaaaataatcctagagaagaatgatactaaaaagacattgcagaatttggaagaggttttagctaacacgcaaaaacatcttcaggaatccaggaatgacaaggaaatgttacagcttcaatttaagaagatcaaggctaattatgtgtgtttacaggaaaggtacatgactgaaatgcaacaaaaaaataaatctgtaagtcagtatttagagatggacaaaaccttaagcaagaaagaagaagaggtagagagactacaacaactcaaaaaagaactggaaaaggccacagcttctgctttggacttgttgaaacgggaaaaagaggcccaagaacaagagttcttgtctttacaggaggaattccagaaacttgaaaaggaaaacctggaagaaagacagaaactgaaatctagacttgagaaattgctcactcaagttagaaatttgcaatttatgtctgaaaatgaaagaacgaagaatataaaacttcagcagcaaatcaacgaagtaaaaaatgagaatgcaaaacttaaacagcaggttgcaaggagtgaagagcaaaattatgtccctaaatttgagacagctcagttaaaggatcaattagaggaagtcttgaagtcagatattaccaaggatacaaaaacgacacattctaatctgctcccggattgctcaccttgtgaagagaggctgaatcctgcagatataaaaagagcttctcagctggcctccaaaatgcacagtcttctggctctgatggtgggacttctcacatgccaggacatcatcaattctgatgctgaacatttcaaagagagtgagaaggttagtgatataatgctgcaaaaactgaagagcctccatcttaaaaagaaaactttagataaagagctactgaaacataaagatagaatcacaacctttagagagttaattgctaaggaaaaagcatttcaagatcatgctattaaggtattccaaggagtatgaaatgattgaaagtgagaacaaatatatttaatctcaggtcatagactgtgattcagatgaagccaagagtatcagagatgtacctacccttctgggagccaaactggataagtaccacagtctaaatgaggagcttgatttcttgatcacaaaactgggacatctcctagagtcaaaagaaaaccactgcaacagactcattgaagaaaatgacaagtatcaaagacatttaggcaacttaataaagaaggttacatcatatgaagaaatcattgaatgtgctgaccaaaggcttgcaatatcccactcccagattgcacatttggaagagagaaataaacatttagaggatttaattagaaagcccagagaaaaagccagaaaaccaagatcaaaaagcttagaaaatcatccgaagtccatgaccatgatgccagctctttttaaagaaaatagaaatgatttagattaaacaagcctgaagattaaacagtaatcatttttgtcaaccactccaggaagagtcattactacatatgctagccaaatcaatccatgcaggtgatatattaaaatctgtataaagggtaaagtcttacattccaaagatgtgattacttttcttctaatttcttcctgtgaataatcaaatatattctatttaacataaacggaaaaaaaaaaaaaa

SEQ ID NO: 1229 - protein, 700 aa, Homo sapiens
MNKDYQKFWSSPSDPVHFEVDTSHEKVESMSESDTMNVSNLSQGVMLSHSPICMETTGTTCDLPQNEIKNFERENEYESTLCEDAYGTLDNLLNDNNIENYSTNALIQPVDTISISSLRQFETVCKFHWVEAFDDEMTEKPEFQSQVYNYAKDNNIKQDSFKEENPMETSVSANTDQLGNEYFRQPPPRSPPLIHCSGEMLKFTEKSLAKSIAKESALNPSQPPSFLCKTAVPSKEIQNYGEIPEMSVSYEKEVTAEGVERPEIVSTWSSAGISWRSEACRENCEMPDWEQSAESLQPVQEDMALNEVLQKLKHTNRKQEVRIQELQCSNLYLEKRVKELQMKITKQQVFIDVINKLKENVEELIEDKYKIILEKNDTKKTLQNLEEVLANTQKHLQESRNDKEMLQLQFKKIKANYVCLQERYMTEMQQKNKSVSQYLEMDKTLSKKEEEVERLQQLKKELEKATASALDLLKREKEAQEQEFLSLQEEFQKLEKENLEERQKLKSRLEKLLTQVRNLQFMSENERTKNIKLQQQINEVKNENAKLKQQVARSEEQNYVPKFETAQLKDQLEEVLKSDITKDTKTTHSNLLPDCSPCEERLNPADIKRASQLASKMHSLLALMVGLLTCQDIINSDAEHFKESEKVSDIMLQKLKSLHLKKKTLDKELLKHKDRITTFRELIAKEKAFQDHAIKVFQGV

SEQ ID NO: 1230 - DNA, 2865 bp, Homo sapiens
tggatgttctgtgctctcaggaaggcgtgttgagtagccggcacggcgaggcccgtgctggccgtttcttcccggagttttcgtttctgtaccccactttgtgtttactgcggcaggaggcgccagctagcccacaggctgttcggcctagggggtcgtaccttcctaacttcaccactctctgggaagacaccgcacccacagtagggtcgctcgggcctcgcgggctgcacctgtctctgcggagttcccccggcgcgggcggacgtcacacaggggcgttccagcactccgggagcccgattgcgagtttgtgagagtccttggtggaggaggttggaaagcgttctccctcccacaaaacccggtgcagagggagggagagccaggtccgtagcgtgggtccaagaaactatggatcctggaagtgagcacacttttgtgtcttaaaaagtttggtgtctcgttttgaggtgaaaaatgaatgagataagtgctttttaaaaagaacgaaataaagaattttgaaagggaaaatgagtatgaatccacactttgtgaagatgcttatggcacactagacaatttgttaaatgataacaacattgaaaattactcaacgaatgcactaattcagccagttgacaccatcagcatatcttccttgagacaatttgaaaccgtttgcaaatttcactgggtagaagcatttgatgatgaaatgacagagaagccagaatttcaaagtcaagtgtataattatgcaaaagacaacaatataaagcaagactcatttaaggaagaaaatccaatggaaactagtgtttctgcaaatacagaccaacttggtaacgagtattttagacagcctcctcctagaagcccgcctctaatccactgcagtggagagatgctgaaatttacagaaaagtcactggctaaaagtattgccaaggaatctgccctcaaccctagccaacctccaagcttcttatgtaagactgcagttccttcaaaagaaatacagaattatggggagattcctgagatgtcagtcagttatgaaaaggaagtcacagcagagggtgtggagaggccagaaattgtctcaacttggtcttcggcaggcatttcctggaggagtgaagcatgtcgggagaactgtgagatgcctgactgggagcaaagtgctgaaagcttacaacctgttcaagaggacatggctttaaatgaagtcttgcagaaattaaaacatactaacagaaagcaggaagtgcgaatccaagaactccagtgtagtaacctgtatttagagaagagggttaaagaactacagatgaagattaccaaacagcaagtgttcattgatgtcatcaataagctaaaggagaatgttgaagaattaattgaagacaaatacaaaataatcctagagaagaatgatactaaaaagacattgcagaatttggaagaggttttagctaacacgcaaaaacatcttcaggaatccaggaatgacaaggaaatgttacagcttcaatttaagaagatcaaggctaattatgtgtgtttacaggaaaggtacatgactgaaatgcaacaaaaaaataaatctgtaagtcagtatttagagatggacaaaaccttaagcaagaaagaagaagaggtagagagactacaacaactcaaaaaagaactggaaaaggccacagcttctgctttggacttgttgaaacgggaaaaagaggcccaagaacaagagttcttgtctttacaggaggaattccagaaacttgaaaaggaaaacctggaagaaagacagaaactgaaatctagacttgagaaattgctcactcaagttagaaatttgcaatttatgtctgaaaatgaaagaacgaagaatataaaacttcagcagcaaatcaacgaagtaaaaaatgagaatgcaaaacttaaacagcaggttgcaaggagtgaagagcaaaattatgtccctaaatttgagacagctcagttaaaggatcaattagaggaagtcttgaagtcagatattaccaaggatacaaaaacgacacattctaatctgctcccggattgctcaccttgtgaagagaggctgaatcctgcagatataaaaagagcttctcagctggcctccaaaatgcacagtcttctggctctgatggtgggacttctcacatgccaggacatcatcaattctgatgctgaacatttcaaagagagtgagaaggttagtgatataatgctgcaaaaactgaagagcctccatcttaaaaagaaaactttagataaagaggtcatagactgtgattcagatgaagccaagagtatcagagatgtacctacccttctgggagccaaactggataagtaccacagtctaaatgaggagcttgatttcttggttacatcatatgaagaaatcattgaatgtgctgaccaaaggcttgcaatatcccactcccagattgcacatttggaagagagaaataaacatttagaggatttaattagaaagcccagagaaaaagccagaaaaccaagatcaaaaagcttagaaaatcatccgaagtccatgaccatgatgccagctctttttaaagaaaatagaaatgatttagattaaacaagcctgaagattaaacagtaatcatttttgtcaaccactccaggaagagtcattactacatatgctagccaaatcaatccatgcagatgatatattaaaatctgtataaagggtaaagtcttacattccaaagatgtgattacttttcttctaatttcttcctgtgaataatcaaatatattctatttaacataaacggaaaaaaaaaaaaaaaa

SEQ ID NO: 1231 - protein, 641 aa, Homo sapiens
MTEKPEFQSQVYNYAKDNNIKQDSFKEENPMETSVSANTDQLGNEYFRQPPPRSPPLIHCSGEMLKFTEKSLAKSIAKESALNPSQPPSFLCKTAVPSKEIQNYGEIPEMSVSYEKEVTAEGVERPEIVSTWSSAGISWRSEACRENCEMPDWEQSAESLQPVQEDMALNEVLQKLKHTNRKQEVRIQELQCSNLYLEKRVKELQMKITKQQVFIDVINKLKENVEELIEDKYKIILEKNDTKKTLQNLEEVLANTQKHLQESRNDKEMLQLQFKKIKANYVCLQERYMTEMQQKNKSVSQYLEMDKTLSKKEEEVERLQQLKKELEKATASALDLLKREKEAQEQEFLSLQEEFQKLEKENLEERQKLKSRLEKLLTQVRNLQFMSENERTKNIKLQQQINEVKNENAKLKQQVARSEEQNYVPKFETAQLKDQLEEVLKSDITKDTKTTHSNLLPDCSPCEERLNPADIKRASQLASKMHSLLALMVGLLTCQDIINSDAEHFKESEKVSDIMLQKLKSLHLKKKTLDKEVIDCDSDEAKSIRDVPTLLGAKLDKYHSLNEELDFLVTSYEEIIECADQRLAISHSQIAHLEERNKHLEDLIRKPREKARKPRSKSLENHPKSMTMMPALFKENRNDLD

SEQ ID NO: 1232 - DNA, 2495 bp, Homo sapiens
gggtggtggatctgtcggtcccgttttcccgtcgcacgtggtggccactgttggcttctgaatggtttgcaaggcggatatccacgccaaggcctttggatcggccgtgggtacatccgtctgagccgttcctttccatcgcagagcggcggcctccggcggcgctctccagtcatggactaccggcggcttctcatgagccgggtggtccccgggcaattcgacgacgcggactcctctgacagtgaaaacagagacttgaagacagtcaaagagaaggatgacattctgtttgaagaccttcaagacaatgtgaatgagaatggtgaaggtgaaatagaagatgaggaggaggagggttatgacgatgatgatgatgactgggactgggatgaaggagttggaaaactcgccaagggttatgtctggaatggaggaagcaacccacaggcaaatcgacagacctccgacagcagttcagccaaaatgtctactccagcagacaaggtcttacggaaatttgagaataaaattaatttagataagctaaatgttactgattccgtcataaataaagtcaccgaaaagtctagacaaaaggaagcagatatgtatcgcatcaaagataaggcagacagagcaactgtagaacaggtgttggatcccagaacaagaatgattttattcaagatgttgactagaggaatcataacagagataaatggctgcattagcacaggaaaagaagctaatgtataccatgctagcacagcaaatggagagagcagagcaatcaaaatttataaaacttctattttggtgttcaaagatcgggataaatatgtaagtggagaattcagatttcgtcatggctattgtaaaggaaaccctaggaaaatggtgaaaacttgggcagaaaaagaaatgaggaacttaatcaggctaaacacagcagagataccatgtccagaaccaataatgctaagaagtcatgttcttgtcatgagtttcatcggtaaagatgacatgcctgcaccactcttgaaaaatgtccagttatcagaatccaaggctcgggagttgtacctgcaggtcattcagtacatgagaagaatgtatcaggatgccagacttgtccatgcagatctcagtgaatttaacatgctgtaccacggtggaggcgtgtatatcattgacgtgtctcagtccgtggagcacgaccacccacatgccttggagttcttgagaaaggattgcgccaacgtcaatgatttctttatgaggcacagtgttgctgtcatgactgtgcgggagctctttgaatttgtcacagatccatccattacacatgagaacatggatgcttatctctcaaaggccatggaaatagcatctcaaaggaccaaggaagaacggtctagccaagatcatgtggatgaagaggtgtttaagcgagcatatattcctagaaccttgaatgaagtgaaaaattatgagagggatatggacataattatgaaattgaaggaagaggacatggccatgaatgcccaacaagataatattctataccagactgttacaggattgaagaaagatttgtcaggagttcagaaggtccctgcactcctagaaaatcaagtggaggaaaggacttgttctgattcagaagatattggaagctctgagtgctctgacacagactctgaagagcagggagaccatgcccgccccaagaaacacaccacggaccctgacattgataaaaaagaaagaaaaaagatggtcaaggaagcccagagagagaaaagaaaaaacaaaattcctaaacatgtgaaaaaaagaaaggagaagacagccaagacgaaaaaaggcaaatagaatgagaaccatattatgtacagtcattttcctcagttccttttctcgcctgaactcttaagctgcatctggaagatggcttattggttttaaccagattgtcatcgtggcactgtctgtgaagacggattcaaatgttttcatgtaactatgtaaaaagctctaagctctagagtctagatccagtcactgactctgtctggtgttgacagaggatttatttaagctattattttaataaagaactttgtacatttttatttttatatttttttctcttacaaatatgtttttggaagcatgataaatgtttaaatgtagtcaacatctgtaactcttacatgagtgtccagaggcactcatgggaaaattggttttgctttctttgtacacaccagagacccatctgaggtcatctgattataaggccatgtttatataaagggaatttcacccacagttcagctggctgttgattttcactgcaactctgcctttgtgtgtattggcgatcatttgtaatgctcttacacttcgtctttaatgttctttttggagttaggacctctcagttcataaagttttttacaattcaaaaaaaaaaaaaaaaaaaa

SEQ ID NO: 1233 - protein, 568 aa, Homo sapiens
MDYRRLLMSRVVPGQFDDADSSDSENRDLKTVKEKDDILFEDLQDNVNENGEGEIEDEEEEGYDDDDDDWDWDEGVGKLAKGYVWNGGSNPQANRQTSDSSSAKMSTPADKVLRKFENKINLDKLNVTDSVINKVTEKSRQKEADMYRIKDKADRATVEQVLDPRTRMILFKMLTRGIITEINGCISTGKEANVYHASTANGESRAIKIYKTSILVFKDRDKYVSGEFRFRHGYCKGNPRKMVKTWAEKEMRNLIRLNTAEIPCPEPIMLRSHVLVMSFIGKDDMPAPLLKNVQLSESKARELYLQVIQYMRRMYQDARLVHADLSEFNMLYHGGGVYIIDVSQSVEHDHPHALEFLRKDCANVNDFFMRHSVAVMTVRELFEFVTDPSITHENMDAYLSKAMEIASQRTKEERSSQDHVDEEVFKRAYIPRTLNEVKNYERDMDIIMKLKEEDMAMNAQQDNILYQTVTGLKKDLSGVQKVPALLENQVEERTCSDSEDIGSSECSDTDSEEQGDHARPKKHTTDPDIDKKERKKMVKEAQREKRKNKIPKHVKKRKEKTAKTKKGK

SEQ ID NO: 1234 - DNA, 1796 bp, Homo sapiens
aatcaaaatttataaaacttctattttggtgttcaaagatcgggataaatatgtaagtggagaattcaggtaagttcagatttttccctccagttggtttaatttctatttcctaaaacattaaaataataatggaatgattgaaataataaacatttttcttattcaagatttcgtcatggctattgtaaaggaaaccctaggaaaatggtgaaaacttgggcagaaaaagaaatgaggaacttaatcaggctaaacacagcagagataccatgtccagaaccaataatgctaagaagtcatgttcttgtcatgagtttcatcggtaaagatgacatgcctgcaccactcttgaaaaatgtccagttatcagaatccaaggctcgggagttgtacctgcaggtcattcagtacatgagaagaatgtatcaggatgccagacttgtccatgcagatctcagtgaatttaacatgctgtaccacggtggaggcgtgtatatcattgacgtgtctcagtccgtggagcacgaccacccacatgccttggagttcttgagaaaggattgcgccaacgtcaatgatttctttatgaggcacagtgttgctgtcatgactgtgcgggagctctttgaatttgtcacagatccatccattacacatgagaacatggatgcttatctctcaaaggccatggaaatagcatctcaaaggaccaaggaagaacggtctagccaagatcatgtggatgaagaggtgtttaagcgagcatatattcctagaaccttgaatgaagtgaaaaattatgagagggatatggacataattatgaaattgaaggaagaggacatggccatgaatgcccaacaagataatattctataccagactgttacaggattgaagaaagatttgtcaggagttcagaaggtccctgcactcctagaaaatcaagtggaggaaaggacttgttctgattcagaagatattggaagctctgagtgctctgacacagactctgaagagcagggagaccatgcccgccccaagaaacacaccacggaccctgacattgataaaaaagaaagaaaaaagatggtcaaggaagcccagagagagaaaagaaaaaacaaaattcctaaacatgtgaaaaaaagaaaggagaagacagccaagacgaaaaaaggcaaatagaatgagaaccatattatgtacagtcattttcctcagttccttttctcgcctgaactcttaagctgcatctggaagatggcttattggttttaaccagattgtcatcgtggcactgtctgtgaagacggattcaaatgttttcatgtaactatgtaaaaagctctaagctctagagtctagatccagtcactgactctgtctggtgttgacagaggatttatttaagctattattttaataaagaactttgtacatttttatttttatatttttttctcttacaaatatgtttttggaagcatgataaatgtttaaatgtagtcaacatctgtaactcttacatgagtgtccagaggcactcatgggaaaattggttttgctttctttgtacacaccagagacccatctgaggtcatctgattataaggccatgtttatataaagggaatttcacccacagttcagctggctgttgattttcactgcaactctgcctttgtgtgtattggcgatcatttgtaatgctcttacacttcgtctttaatgttctttttggagttaggacctctcagttcataaagttttttacaattcaaaaaaaaaaa

SEQ ID NO: 1235 - protein, 327 aa, Homo sapiens
MVKTWAEKEMRNLIRLNTAEIPCPEPIMLRSHVLVMSFIGKDDMPAPLLKNVQLSESKARELYLQVIQYMRRMYQDARLVHADLSEFNMLYHGGGVYIIDVSQSVEHDHPHALEFLRKDCANVNDFFMRHSVAVMTVRELFEFVTDPSITHENMDAYLSKAMEIASQRTKEERSSQDHVDEEVFKRAYIPRTLNEVKNYERDMDIIMKLKEEDMAMNAQQDNILYQTVTGLKKDLSGVQKVPALLENQVEERTCSDSEDIGSSECSDTDSEEQGDHARPKKHTTDPDIDKKERKKMVKEAQREKRKNKIPKHVKKRKEKTAKTKKGK

SEQ ID NO: 1236 - DNA, 2068 bp, Homo sapiens
gacgccacgcaggctgccgtcacccttccgggtgacataccggccttggggtacgcgtgccttcggggcctttcctgtgtttgggacccagatctcctctcctccagaaaaccttgacactgcccatcttcctcatccagaaggagcgttcgaggaatggatgaggtcggggtggaagaaacgggtgattccctttttttgaaagagcggaaaccggccgggcggtttccagggaggagcatctgttcctcctcgcccgtttttcgccctcgggctggcgagaactccctcaggtcccaatccgtggactcgcaggggccatgattgattccggagcgcagttaatcaaggcataatggcatggacttgacacagcaagcaaaagacatacagaacataacagtccaggaaaccaacaaaaataactctgaaagcattgaatgcagcaaaataacaatggatctcaagttcaacaattccaggaaatatatttctatcactgtgccatccaaaacccaaacaatgtcaccacacatcaagtcagttgacgacgttgtggtacttggcatgaatctcagcaagtttaacaaacttactcagtttttcatatgtgttgctggagtttttgtattttacctaatttatgggtatttacaggaattaatattttcagtggagggttttaagtcctgtggctggtaccttaccttagtgcagtttgccttttactccatatttggcctaatagaacttcagcttattcaggacaaaaggaggagaataccaggaaaaacctacatgataatagcttttctaactgtgggtactatggggttatcaaacacttccttgggctacctgaattaccctacccaagtcatcttcaagtgctgcaaattgattcctgttatgctaggaggagtttttattcaaggaaagcgttataatgttgcagatgtgtctgctgccatatgtatgagccttggcctgatatggtttaccctcgctgacagcacaactgcaccaaatttcaacctgacgggtgtggtgcttatttccctggcactatgtgcagatgccgtcattggaaatgttcaagagaaagctatgaaacttcataatgcttctaattctgaaatggtattgtattcgtattcaattggttttgtatacattttactgggattgacatgcactagtggattaggccctgcagtaacattttgtgcaaagaatccagttcggacctatggttatgcgttccttttttccctcactggatattttggaatctcctttgttctggctttgattaaaatttttggtgcacttattgctgtaacagtgacaacaggaagaaaagcaatgaccattgtactttcgtttatattctttgctaaaccattcacgtttcagtatgtatggtctggtttgttagttgtccttggtatatttctcaatgtttacagcaaaaatatggataaaataagactaccatcactgtatgatttgataaacaaatcagtggaagcaagaaagtcaaggacgctggcacagactgtatagacagtgattgtcctatttaaaatagaattttaagggaacaatcatcaattaattaactttccaaagggactgataaaaaccaaaggatctggaggcattgctatcccatttgtgggcagatttcatatgaagttgttttgcggtgtcagccttttcttcagagcatttgtttgactgacttccaaagcaatcaagagagccacgtctagcagactttacaataaaatgtcaatatgaaggactgtaattcctagcagtttattgagaatttcactggaaatggaccatgtgttgcaagactaattggctataattatatcctatcaaagaaatcgatacgtaatagcagattgttttatattcattccattttgatggtgttatttaaattgattctctgttataagagtaaactgatgagttgaagtctggagagaataacattcattataaataaaattattctgtgatctttaaaaaaaaaaaaaaaaaaaaaaaaaaa

SEQ ID NO: 1237 - protein, 401 aa, Homo sapiens
MDLTQQAKDIQNITVQETNKNNSESIECSKITMDLKFNNSRKYISITVPSKTQTMSPHIKSVDDVVVLGMNLSKFNKLTQFFICVAGVFVFYLIYGYLQELIFSVEGFKSCGWYLTLVQFAFYSIFGLIELQLIQDKRRRIPGKTYMIIAFLTVGTMGLSNTSLGYLNYPTQVIFKCCKLIPVMLGGVFIQGKRYNVADVSAAICMSLGLIWFTLADSTTAPNFNLTGVVLISLALCADAVIGNVQEKAMKLHNASNSEMVLYSYSIGFVYILLGLTCTSGLGPAVTFCAKNPVRTYGYAFLFSLTGYFGISFVLALIKIFGALIAVTVTTGRKAMTIVLSFIFFAKPFTFQYVWSGLLVVLGIFLNVYSKNMDKIRLPSLYDLINKSVEARKSRTLAQTV

SEQ ID NO: 1238 - DNA, 958 bp, Homo sapiens
cagggggaagagacaagtctggaaagaaccctgcccttggagagactggattgaaatctgtgcattgccaagggcaagaagctgagaacatggagagagagaagtttcagcagaaggctctgaagcaaactaagcagaagaaatccaagtcggctgaatttctgatggttaaagaagatagagaagctacagaaggcactggaaatccagcttttaacatgagcagtccagatctctcagcatgtcagactgcagaaaagaaagttattagacacgacatgccggatcgcacccttgcagctcaccaacaaaaattcaggctgccagcctctgcagaaccaaaaggaaatgaatacggcagaaattactttgacccactgatggatgaggaaataaacccaaggcagtgtgcgacggaggtcagcagagaagatgacgatagaattttctataatcgattaacgaagctttttgatgagagcagacaaggagaaccccaagatgagagtggccgggaggagactctgaattctgaagcacctgggagttccaataagagtcacgaaatccacaaagaagccagcgaagccaccactgctcaccttgaggagttccaaagatctcagaaaactataattctgcttggaagttctccattagaacaggaaattagatctacttcattgcattgtatggaggatgagatgagtcatccatggatactcttgctcaaagtaactgctgtaatcagaagcaggaggtactatagagagcaaagattctaaaacccattctcaggtcagtgctcgcaatgttcttatgttcactgtgtcgggaagttccatgaacacacaaggcaacatcataagtaggaaaaaccttcagatttggtgttagaactcagagctgtcatccttgattcagatatttatgtgaacttaaacctctttgtaaaata

SEQ ID NO: 1239 - protein, 231 aa, Homo sapiens
MEREKFQQKALKQTKQKKSKSAEFLMVKEDREATEGTGNPAFNMSSPDLSACQTAEKKVIRHDMPDRTLAAHQQKFRLPASAEPKGNEYGRNYFDPLMDEEINPRQCATEVSREDDDRIFYNRLTKLFDESRQGEPQDESGREETLNSEAPGSSNKSHEIHKEASEATTAHLEEFQRSQKTIILLGSSPLEQEIRSTSLHCMEDEMSHPWILLLKVTAVIRSRRYYREQRF

SEQ ID NO: 1240 - DNA, 8192 bp, Homo sapiens
gaggagagagcagagtataccgcagacatcatttctactacagtggcggagccgtacaggacctgtttcactgcagggggatccaaaacaagccccgtggagcagcagccagagcaacagcagccgcaagacattgtttctctccctctgcccccccttccccacgcaaccccagatccatttacactttacagttttacctcacaaaaactactacaagcaccaagctccctgatggaaaggagcatcgtgcatcaagtcaccagggtggtccattcaagctgcagatttgtttgtcatccttgtacagcaatctcctcctccactgccactacagggaagtgcatcacatgtcagcatactggagcatagtgaaagagtctattttgaagcttcaaacttagtgctgctgcagaccaggaacaagagagaaagagtggatttcagcctgcacggatggtcttgaaacacaaatggtttttggtctaggcgttttacactgagattctccactgccaccctttctactcaagcaaaatcttcgtgaaaagatctgctgcaaggaactgatagcttatggttctccattgtgatgaaagcacatggtacagttttccaaagaaattagaccattttcttcgtgagaaagaaatcgacgtgctgttttcatagggtatttctcacttctctgtgaaaggaagaaagaacacgcctgagcccaagagccctcaggagccctccagagcctgtgggaagtctccatggtgaagtataggctgaggctacctgtgaacagtacgcagtgaatgttcatccagagctgctgttggcggattgtacccacggggagatgattcctcatgaagagcctggatcccctacagaaatcaaatgtgactttccgtttatcagactaaaatcagagccatccagacagtgaaacagtcaccgtggaggggggacggcgaaaaatgaaatccaaccaagagcggagcaacgaatgcctgcctcccaagaagcgcgagatccccgccaccagccggtcctccgaggagaaggcccctaccctgcccagcgacaaccaccgggtggagggcacagcatggctcccgggcaaccctggtggccggggccacgggggcgggaggcatgggccggcagggacctcggtggagcttggtttacaacagggaataggtttacacaaagcattgtccacagggctggactactccccgcccagcgctcccaggtctgtccccgtggccaccacgctgcctgccgcgtacgccaccccgcagccagggaccccggtgtcccccgtgcagtacgctcacctgccgcacaccttccagttcattgggtcctcccaatacagtggaacctatgccagcttcatcccatcacagctgatccccccaaccgccaaccccgtcaccagtgcagtggcctcggccgcaggggccaccactccatcccagcgctcccagctggaggcctattccactctgctggccaacatgggcagtctgagccagacgccgggacacaaggctgagcagcagcagcagcagcagcagcagcagcagcagcagcatcagcatcagcagcagcagcagcagcagcagcagcagcagcagcagcagcacctcagcagggctccggggctcatcaccccggggtcccccccaccagcccagcagaaccagtacgtccacatttccagttctccgcagaacaccggccgcaccgcctctcctccggccatccccgtccacctccacccccaccagacgatgatcccacacacgctcaccctggggcccccctcccaggtcgtcatgcaatacgccgactccggcagccactttgtccctcgggaggccaccaagaaagctgagagcagccggctgcagcaggccatccaggccaaggaggtcctgaacggtgagatggagaagagccggcggtacggggccccgtcctcagccgacctgggcctgggcaaggcaggcggcaagtcggttcctcacccgtacgagtccaggcacgtggtggtccacccgagcccctcagactacagcagtcgtgatccttcgggggtccgggcctctgtgatggtcctgcccaacagcaacacgcccgcagctgacctggaggtgcaacaggccactcatcgtgaagcctccccttctaccctcaacgacaaaagtggcctgcatttagggaagcctggccaccggtcctacgcgctctcaccccacacggtcattcagaccacacacagtgcttcagagccactcccggtgggactgccagccacggccttctacgcagggactcaaccccctgtcatcggctacctgagcggccagcagcaagcaatcacctacgccggcagcctgccccagcacctggtgatccccggcacacagcccctgctcatcccggtcggcagcactgacatggaagcgtcgggggcagccccggccatagtcacgtcatccccccagtttgctgcagtgcctcacacgttcgtcaccaccgcccttcccaagagcgagaacttcaaccctgaggccctggtcacccaggccgcctacccagccatggtgcaggcccagatccacctgcctgtggtgcagtccgtggcctccccggcggcggctccccctacgctgcctccctacttcatgaaaggctccatcatccagttggccaacggggagctaaagaaggtggaagacttaaaaacagaagatttcatccagagtgcagagataagcaacgacctgaagatcgactccagcaccgtagagaggattgaagacagccatagcccgggcgtggccgtgatacagttcgccgtcggggagcaccgagcccaggtcagcgttgaagttttggtagagtatcctttttttgtgtttggacagggctggtcatcctgctgtccggagagaaccagccagctctttgatttgccgtgttccaaactctcagttggggatgtctgcatctcgcttaccctcaagaacctgaagaacggctctgttaaaaagggccagcccgtggatcccgccagcgtcctgctgaagcactcaaaggccgacggcctggcgggcagcagacacaggtatgccgagcaggaaaacggaatcaaccaggggagtgcccagatgctctctgagaatggcgaactgaagtttccagagaaaatgggattgcctgcagcgcccttcctcaccaaaatagaacccagcaagcccgcggcaacgaggaagaggaggtggtcggcgccagagagccgcaaactggagaagtcagaagacgaaccacctttgactcttcctaagccttctctaattcctcaggaggttaagatttgcattgaaggccggtctaatgtaggcaagtagaggcagcgtgggggaaaggaaacgtggctctcccttatcatttgtatccagattactgtactgtaggctaaaataacacagtatttacatgttatcttcttaattttaggtttctgttctaaccttgtcattagagttacagcaggtgtgtcgcaggagactggtgcatatgctttttccacgagtgtctgtcagtgagcgggcgggaggaagggcacagcaggagcggtcagggctccaggcatccccggggaagaaaggaacggggcttcacagtgcctgccttctctagcggcacagaagcagccgggggcgctgactcccgctagtgtcaggagaaaagtcccgtgggaagagtcctgcaggggtgcagggttgcacgcatgtgggggtgcacaggcgctgtggcggcgagtgagggtctctttttctctgcctccctctgcctcactctcttgctatcggcatgggccgggggggttcagagcagtgtcctcctggggttcccacgtgcaaaatcaacatcaggaacccagcttcagggcatcgcggagacgcgtcagatggcagatttggaaagttaaccatttaaaagaacatttttctctccaacatattttacaataaaagcaacttttaattgtatagatatatatttccccctatggggcctgactgcactgatatatattttttttaaagagcaactgccacatgcgggatttcatttctgctttttactagtgcagcgatgtcaccagggtgttgtggtggacagggaagcccctgctgtcatggccccacatggggtaaggggggttgggggtgggggagagggagagagcgaacacccacgctggtttctgtgcagtgttaggaaaaccaatcaggttattgcattgacttcactcccaagaggtagatgcaaactgcccttcagtgagagcaacagaagctcttcacgttgagtttgcgaaatctttttgtctttgaactctagtactgtttatagttcatgactatggacaactcgggtgccactttttttttttttcagattccagtgtgacatgaggaattagattttgaagatgagcatatattactatctttaagcatttaaaaatactgttcacactttattaccaagcatcttggtctctcattcaacaagtactgtatctcactttaaactctttggggaaaaaacaaaaacaaaaaaaactaagttgctttctttttttcaacactgtaactacatttcagctctgcagaattgctgaagagcaagatattgaaagtttcaatgtggtttaaagggatgaatgtgaattatgaactagtatgtgacaataaatgaccaccaagtactacctgacgggaggcacttttcactttgatgtctgagaatcagttcaaggcatatgcagagttggcagagaaactgagagaaaagggatggagaagagaatactcatttttgtccagtgtttttctttttaagatgaacttttaaagaaccttgcgatttgcacatattgagtttataacttgtgtgatattcctgcagtttttatccaataacattgtgggaaaggtttgggggactgaacgagcataaataaatgtagcaaaatttctttctaacctgcctaaactctaggccattttataaggttatgttcctttgaaaattcattttggtctttttaccacatctgtcacaaaaagccaggtcttagcgggctcttagaaactctgagaattttcttcagattcattgagagagttttccataaagacatttatatatgtgagcaagattttttttaaacaattactttattattgttgttattaatgttattttcagaatggcttttttttttctattcaaaatcaaatcgagatttaatgtttggtacaaacccagaaagggtatttcatagtttttaaacctttcattcccagagatccgaaatatcatttgtgggttttgaatgcatctttaaagtgctttaaaaaaaagttttataagtagggagaaatttttaaatattcttacttggatggctgcaactaaactgaacaaatacctgacttttcttttaccccattgaaaatagtactttcttcgtttcacaaattaaaaaaaaaatctggtatcaacccacattttggctgtctagtattcatttacatttagggttcaccaggactaatgatttttataaaccgttttctggggtgtaccaaaaacatttgaataggtttagaatagctagaatagttccttgactttcctcgaatttcattaccctctcagcatgcttgcagagagctgggtgggctcattcttgcagtcatactgcttatttagtgctgtattttttaaacgtttctgttcagagaacttgcttaatcttccatatattctgctcagggcacttgcaattattaggttttgtttttctttttgttttttagcctttgatggtaagaggaatacgggctgccacatagactttgttctcattaatatcactatttacaactcatgtggactcagaaaaacacacaccaccttttggcttacttcgagtattgaattgactggatccactaaaccaacactaagatgggaaaacacacatggtttggagcaataggaacatcatcataatttttgtggttctatttcaggtataggaattataaaataattggttctttctaaacacttgtcccatttcattctcttgcttttttagcatgtgcaatactttctgtgccaatagagtctgaccagtgtgctatatagttaaagctcattcccttttggctttttccttgtttggttgatcttccccattctggccagagcagggctggagggaaggagccaggagggagagagcctcccacctttcccctgctgcggatgctgagtgctggggcggggagccttcaggagccccgtgcgtctgccgccacgttgcagaaagagccagccaaggagacccgggggaggaaccgcagtgtcccctgtcaccacacggaatagtgaatgtggagtgtggagaggaaggaggcagattcatttctaagacgcactctggagccatgtagcctggagtcaacccattttccacggtcttttctgcaagtgggcaggcccctcctcggggtctgtgtccttgagacttggagccctgcctctgagcctggacgggaagtgtggcctgttgtgtgtgtgcgttctgagcgtgttggccagtggctgtggaggggaccacctgccacccacggtcaccactcccttgtggcagctttctcttcaaataggaagaacgcacagagggcaggagcctcctgtttgcagacgttggcgggccccgaggctcccagagcagcctctgtcaccgcttctgtgtagcaaacattaacgatgacaggggtagaaattcttcggtgccgttcagcttacaaggatcagccatgtgcctctgtactatgtccactttgcaatatttaccgacagccgtcttttgttctttctttcctgttttccatttttaaactagtaacagcaggccttttgcgtttacaatggaacacaatcaccaagaaattagtcagggcgaaaagaaaaaaataatactattaataagaaaccaacaaacaagaacctctctttctagggatttctaaatatataaaatgactgttccttagaatgtttaacttaagaattatttcagtttgtctgggccacactggggcagaggggggagggagggatacagagatggatgccacttacctcagatcttttaaagtggaaatccaaattgaattttcatttggactttcaggataattttctatgttggtcaacttttcgttttccctaactcacccagtttagtttgggatgatttgatttctgttgttgttgatcccatttctaacttggaattgtgagcctctatgttttctgttaggtgagtgtgttgggttttttccccccaccaggaagtggcagcatccctccttctcccctaaagggactctgcggaacctttcacacctctttctcagggacggggcaggtgtgtgtgtggtacactgacgtgtccagaagcagcactttgactgctctggagtagggttgtacaatttcaaggaatgtttggatttcctgcatcttgtggattactccttagataccgcatagattgcaatataatgctgcatgttcaagatgaacagtagctcctagtaatcataaaatccactctttgcacagtttgatctttactgaaatatgttgccaaaatttatttttgttgttgtagctctggattttgttttgttttgttttttaaggaaacgattgacaataccctttaacatctgtgactactaaggaaacctatttctttcatagagagaaaaatctccaatgcttttgaagacactaataccgtgctatttcagatatgggtgaggaagcagagctctcggtaccgaaggccgggcttcttgagctgtgttggttgtcatggctactgtttcatgaaccacaagcagctcaacagactggtctgttgccttctgaaaccctttgcacttcaatttgcaccaggtgaaaacagggccagcagactccatggcccaattcggtttcttcggtggtgatgtgaaaggagagaattacactttttttttttttaagtggcgtggaggcctttgcttccacatttgttttta

SEQ ID NO: 1241 - protein, 815 aa, Homo sapiens
MKSNQERSNECLPPKKREIPATSRSSEEKAPTLPSDNHRVEGTAWLPGNPGGRGHGGGRHGPAGTSVELGLQQGIGLHKALSTGLDYSPPSAPRSVPVATTLPAAYATPQPGTPVSPVQYAHLPHTFQFIGSSQYSGTYASFIPSQLIPPTANPVTSAVASAAGATTPSQRSQLEAYSTLLANMGSLSQTPGHKAEQQQQQQQQQQQQHQHQQQQQQQQQQQQQQHLSRAPGLITPGSPPPAQQNQYVHISSSPQNTGRTASPPAIPVHLHPHQTMIPHTLTLGPPSQVVMQYADSGSHFVPREATKKAESSRLQQAIQAKEVLNGEMEKSRRYGAPSSADLGLGKAGGKSVPHPYESRHVVVHPSPSDYSSRDPSGVRASVMVLPNSNTPAADLEVQQATHREASPSTLNDKSGLHLGKPGHRSYALSPHTVIQTTHSASEPLPVGLPATAFYAGTQPPVIGYLSGQQQAITYAGSLPQHLVIPGTQPLLIPVGSTDMEASGAAPAIVTSSPQFAAVPHTFVTTALPKSENFNPEALVTQAAYPAMVQAQIHLPVVQSVASPAAAPPTLPPYFMKGSIIQLANGELKKVEDLKTEDFIQSAEISNDLKIDSSTVERIEDSHSPGVAVIQFAVGEHRAQVSVEVLVEYPFFVFGQGWSSCCPERTSQLFDLPCSKLSVGDVCISLTLKNLKNGSVKKGQPVDPASVLLKHSKADGLAGSRHRYAEQENGINQGSAQMLSENGELKFPEKMGLPAAPFLTKIEPSKPAATRKRRWSAPESRKLEKSEDEPPLTLPKPSLIPQEVKICIEGRSNVGK

SEQ ID NO: 1242 - DNA, 2034 bp, Homo sapiens
agaaccagctatgtcggcctacggcatgcccatgtacaagagcggggacctggtgtttgccaagttaaagggctatgcccactggccggcggggatagagcgcatgacccagcccaaccgctaccaggtgtttttcttcgggacccacgagacggccttcctgagtcccaaacgcctgttcccgtacaaggagtgcaaggagaagttcggcaagcccaacaagaggcgcggcttcagcgcggggctgtgggaaatcgagaacaaccccacggtccaggcctcctactgcccattagcctcagagaagggcagcggagacgggccttggccggagcccgaggccgcagagggcgacgaggacaagccgacccacgctggtggcggcggcgacgaattggggaagccggacgacgacaagcccactgaggaggagaaggggccgctgaagaggagcgcgggggacccgccggaggacgcccccaaacgacccaaggaggcagcccccgaccaagaggaggaggcggaggcggagagggcggcggaagcggagagggcggcggcggcggcggcggcgacggccgtcgacgaggagagtccgttccccgtggcggtggagaacggcagcgcccctagcgagccgggcctggtctgcgagccgcctcagccagaggaggaggagctccgggaggaagaagtcgcggacgaggaggcctcccaggagtggcatgccgaggcaccgggcggcggagatcgcgacagcctgtagttaccagcgtttccagaagagcccctgccccgttcctgctgcggcctggccgttcttggggaatctgaccacggcgtgcaaactgggactgcctttccctctcctcagcccgtcctcctccaacccgcgctcctttgccctgccgggccccaggatggcaggccacctgactctcacctctgtgcccccagcttccggctccctcttctcccccctctacccgccaccccaccccaccccacccccgcccactcgttgcctgattccgtttccgacttggggttcaggcaggctgttttcacctctagacacccctctccacccctcctgcttccccaggcattatgaacctctgcttaggaatatgggtaggagtgaaaggcctggcagataaagagcagagggcacttgcagggcctgggatgagcagtcttcaagctgtggtagttagcgggcaggagagcgacatcttcctgagctcctgtccatgcctgccatacctgccagcttcagacatttagggaaaaggggcagcatgtggggaatgccccccgccttccacaaatccttttgctgacccaggaagttctgggagttgccgtttttcatcaaaacgtttgggggcttccaagttgtttgtgagatctgaaaacttaactttgcccaatatcctggttggggaccgtgagaaatatctgtcccatttagatctctggggccactgatgggatgccctgggaagatccttggctgccgctttctctccccacagcctcaaggccaccctaccgtcatatatatcactcaggcgtagaagaaaagacacatattttataaaatctttttaataaaaggaagttccaagaagaatttttaagaactacctctaggtgtgcctccacgctggccctagctttcccattgctgttccattgctgagacaaactggaaggctccctttctgtttgaagttttatgacttgtagtcaggctttgctgttcgtcacagtgtcattttccattcaggtaccatcacctggtcccatcaacaggtctagtatgtagctcactgataacagaggaagatgtgtctcctcccaccctcttcctaatggtcattatgcctttctccatctattgtctctttcaccccttcccctctcccttgggctctgatgaaaaattgttgactgcagtttcggaagtttgatctgagaaccaaccatagaatgtttcagttctaggaaataaaaccagttgattaaagc

SEQ ID NO: 1243 - protein, 251 aa, Homo sapiens
MSAYGMPMYKSGDLVFAKLKGYAHWPAGIERMTQPNRYQVFFFGTHETAFLSPKRLFPYKECKEKFGKPNKRRGFSAGLWEIENNPTVQASYCPLASEKGSGDGPWPEPEAAEGDEDKPTHAGGGGDELGKPDDDKPTEEEKGPLKRSAGDPPEDAPKRPKEAAPDQEEEAEAERAAEAERAAAAAAATAVDEESPFPVAVENGSAPSEPGLVCEPPQPEEEELREEEVADEEASQEWHAEAPGGGDRDSL

SEQ ID NO: 1244 - DNA, 746 bp, Homo sapiens
gatctgactaacctctttcattctttgccctatgttatatggcttagaccaaagcctgagacatttaaccaatttataaatattaaatgcagaaggcatactttatcagttcctggaaacatcaaagaagctggaaggggaatggaaattggatggcactttgtggaggtcactttgctgacagtcaagtattcaaagatctcctaagatacccggtctttaaagtattatacaaaatatcaggcccagtcccaaggcgcaacttgtgccagcagcccgcgccagcagcctgcaccagcaaaatagcagtagcaagaagagagccagcagaagacacctaccctggccggaagacgcgtacccctgaagattgaggaagaggccatccgggtacaacgtagcagttacgtcagactaagacacttcctgtttataggagactataaaacctttgccctgtcctcactaggggctgacaccattttagtcctcagaccgcctgcacccaggcgctcattaaaacagcatgttgcttccaccgcctcatgttgtctgttggcgcgctctcggggttcgaaccagtacaagaaccttagatatatgatactgcacctaataaaaatagtctaaaataacaacagccaatataggcacaaacctgaaagtgtctgcatagaagtaacacatccatgtacttgataaactaaagtgtagatattttatgcggaataaactttgaagtgagg

SEQ ID NO: 1245 - protein, 73 aa, Homo sapiens
MALCGGHFADSQVFKDLLRYPVFKVLYKISGPVPRRNLCQQPAPAACTSKIAVARREPAEDTYPGRKTRTPED

SEQ ID NO: 1246 - DNA, 285 bp, Homo sapiens
atgatggtggcaattgactctgagatggtgggcacaggacccaaggggcatgttagtttcttggctcaatgtagcattgtcaactacaacggagatgtgctttatgatgagtacatccttcccccctgccacactgtggactactggaccagatggagtggtatccagaagcagcacatggtgaatgccacacccttcaagattgctcggggccagatcttgaagatactcacagggaagatagtggtggggcatgccatccacgacgacctcaaagccctttag

SEQ ID NO: 1247 - DNA, 2358 bp, Homo sapiens
aaaagctggaaccctgcccctttggagggggaggcggcggcggcggcggcggcggcggcggcggctgcgcgggcctcgggtgcgcgggcacgcgggactcccagctgtcaatcaggcgcgggctgagctctacgaggcggagcggcggcggtggcgacggcgatgggaccccagcgagagatctgcagctaggctggctgcacttgctccacgggtcaggggatcggagggggattgaagaatgcgccattaaaaggaaagatcaaggagtaaaccagaagaagaagaaaaagaggacttcaaagctgggaaggatgagttcttgcagcaacgtctgtgggtccaggcaggcacaggctgcagctgagggtggttaccagcgctatggagtccggtcctacctgcaccagttttatgaggactgtacagcctcaatttgggagtatgaggatgatttccagatccaaagatcacctaacaggtggagctcagtattctggaaggttggactcatctcaggtacagtttttgtgatcctcggattgactgttctggcagtgggctttcttgtgccccccaaaatcgaagcatttggcgaagccgattttgtggtggtcgacacacatgctgtccagtttaacagtgctctggacatgtacaagctggcaggagctgttctcttctgcattggaggcacgtccatggcagggtgcctgctgatgtcggtgtttgtaaagagctactccaaagaagaaaaattcctccagcagaagtttaaagaacgaatcgcagacaccaaagcccacacccagccggttacaaaagctccagggccaggggaaacaaagattccagtcactttgtccagggttcaaaatgtccagcctctactggcaacctgaaacctttcccaccccagttcttcttgtctgatttatgcccgtggttaaaaagagcaggccagttttcgagataaagaagatttggcgttgactgccctagggctgtgttcagctgtgggcaatataatgggtggactcacacttgctcagttcaggcagctctgctggagggcggtgccatgcctaagcctgtgcacatgcatccagctgcttaagatgggtgcttccttgtacccggccaccagaaaacccctggaactcctctttcatagatcgtgactttgtgttattttccgtgttgtttgaaagtgccgaacagtttagaccagctcaccaatggctaatgtggtccattttattttctaatattggtttatctaatgttttctgcgtggtgccgtcttccattcctgtctcactatgtgtaagattttgtcatatgtgttcatagaaacatggaattctctgattttgagccgaacatgagtttttagactgtatcttgacatgaggttcctgacattggatacaaagttatcagcattcacaaatctttttgttttctccattttttttccctttgagatgaagtgctgttcttttgcctaggttggagtacagcggtgaaatcatagcgcactgcagccttgaactcctgggctcaagcgatcctcccacctcagcctcccaagtagctgggactacaggcacctgccaccacccccagttaatattttttttaattttttttagaggcaggatcttgctgtccaattttttttaaaaagctaaaattgccaactttagaatcttgaccaaaaaaaattaattttaggagcatctatttatgcagtgttcaaaagtactgaattagaaaccaggaagttttagttccttctactacctgtgtgatcttggggaaattatttaacctctcagtcctaattttccccttctgtataatgggagttctggatcacaatatgtctgggctctcattacccaaacatctgagattccatttttgccatgtgtcatcgagtcgctccccaacagatgtttgtgatgtttttgtggctgtcaccatggtgggattctttcagaatgagactcctggaaattcactgagtcagcagccttcacaccatctacccttaaatatccaaccccagcaatttatacaacgctgtcatatttttaaaaaaacaaaagtaagccatcctcaaataaggaaccccttggtagatattaaccttaaaaagggttttcattctcaaacaagatgctttgttctccaacaagatgttcgtctcatcacttgcacttttgttttaatgtatggattcagattagactgagaaaaatggatggtattttcttaaaattgtgccaccttaaagcccccccccttttttttttcttccttcactggataaataaaatatgtgaacaagtg

SEQ ID NO: 1248 - protein, 195 aa, Homo sapiens
MSSCSNVCGSRQAQAAAEGGYQRYGVRSYLHQFYEDCTASIWEYEDDFQIQRSPNRWSSVFWKVGLISGTVFVILGLTVLAVGFLVPPKIEAFGEADFVVVDTHAVQFNSALDMYKLAGAVLFCIGGTSMAGCLLMSVFVKSYSKEEKFLQQKFKERIADTKAHTQPVTKAPGPGETKIPVTLSRVQNVQPLLAT

SEQ ID NO: 1249 - DNA, 4612 bp, Homo sapiens
tgccatcttggctcaccgcaacctctgccttccaggttcaagcaattctcctgccttagcctcctgagtagctgggattacaggcatgcgccaccacgcccaggaggcgatcccgcgccctgggtgcggtgaggccgctgggacagcggaggtgcctcccgacgcgaagcagcgagctgaggcggcggccagcggggaagatgagcggcagcagcgccaggtccagccacctgtctcagcccgtcgtgaagagcgtgcttgtgtaccgcaacggggaccccttctacgcggggcgccgcgtcgtcatccatgagaagaaggtgtccagcttcgaagtcttcctgaaggaggtgaccggcggcgttcaggcaccctttggggccgtcaggaacatctacaccccgcggactggccaccgaatccggaagctagaccagatccagagcgggggcaattacgtggctggaggccaggaagccttcaagaaactcaattacttggacataggagaaatcaagaaaagaccaatggaagttgttaatacagaggtaaaaccagtaatccatagcaggatcaacgtgtcagctcgctttagaaaaccgcttcaggagccgtgcactatcttcttgattgcaaatggagacctcataaacccagcttctcgcctccttatccccagaaaaaccttgaatcagtgggatcatgtactacaaatggtcacagaaaaaatcactctgaggagcggggctgttcacaggctttatactttagaaggaaaacttgttgagagtggagcagagttggagaatgggcagttttatgtggctgttggcagagataagtttaagaaactgccttacggtgagttactttttgacaagtcaacgatgagaaggccttttggtcagaaagcttcttcactacctcctattgtaggatccagaaagtctaaagggagtggaaatgatcgccactctaagtcaacagttggatccagtgacaactcatctcctcagcccctgaagaggaaagggaaaaaagaagacgtgaattcagaaaaactgacgaaattgaaacaaaatgtaaaattaaagaattcacaagaaaccattccaaatagtgatgaaggcattttcaaagctggagcagagaggtctgaaacacggggggcagcagaagtccaagaagatgaagatactcaggttgaggttccagtcgatcagaggccagcagaaatagtagacgaggaagaagatggagagaaggcaaacaaggatgcagaacagaaagaagacttttcaggaatgaatggtgaccttgaagaggaaggaggtagggaggctacagatgcccctgagcaagtcgaggagattctggatcacagtgagcagcaggcacgccctgctcgtgtaaatggaggcaccgatgaggagaatggtgaggagctgcagcaggttaataatgagcttcaactggtcctagacaaggaaagaaagtctcaaggagctggcagtggacaagatgaggctgatgtagaccctcaaagaccaccaaggccagaagtaaaaattaccagtccagaagaaaatgaaaacaaccaacaaaacaaggactatgctgccgtggcttagaacatttttaaaaagagagtatatggatcgcaagaaaaatgaagggttatcatacttgaaagataagcacatagttattgctgaatataatgtgacactatggtcgaatactacctacgaattataacattagaagcctagtggaaagaccagataactttaaatggctactaaaggataattacttacttttattgcatgtgttttaaaagtcatatagaaatattaaataagacggacagaggagaatttgcactggaagacaattgccacttgtaaaggatgaaaaataggatcactcttattgtacgctttattataagtttagaaggcagtttattctaaataatttttctctaggaaggcgtagaattttaaagaactggtaataggaaagcatgtactattttcttaaagcaataaactcttgaatgaacagattgcgatttactttcagacataatttggagatggcagtagatcaaaatgtgtccatgacttgttaacatgcctttctttcttcctccttagccaaaatccacctttgaactacaaagacagagcaaggcgttcattttggtgggaggaagcattggttcagagtgttagtgactagtatcgccatgccgtcacttaaatgctttcaggcttgcatgcttgtggctccaatggcgcacactcaggaaggaattgtaaaggagcacccagttatattataaagcctggatgtatggtttgcagataatggaaatcctgtggattttcactgatccagtctatctttaccaatagtatctctctcttctcccttatgttattagagaacctgatattggctattccaaagattaaattattttcaaatagttttcaacaaaaataaaagtgtattaggaagaaaaaagtagactatatgaagagtttgtgactgctcaatttaacttgttttttgccttatttctattaagactgttttactatgtttttgccctagggatatcagcaaatatttatttttcctagcatgatatagttagaatttcaagcagatttctttgtaattagaaggcatctgatagaaattgtaaaactttagaagttattataatgaaaccaattcctgaatcacaacttcatggactgactaaattgatttatagttgccttgtgaggtatgtatggggaaaacataaaaacataattaaaacataatttcgtcctttttatgaattcttaagagatgttcttccataaatatagaaataatatatttttcttaaaggatatatttttaattatgtggaagttgtaagcttgaaattttaacttctagtgcttttctaaaattcacaattacaagtttaaaacattttttctcttccaggtttcatttggaataaagagttggcagttatataaagcacttaataatactatagaaaatagatgtgttttttcttaatatgattttggtattttccacagatcagaagtgtaaacagagagataatgtaacagtatttggaagagataatgacacaaggatatagtgatctgggagcatgaattagaaacagggtactatgtttctggtgtaaaatctaaattgtgctttctactagcgttactttttcaaatgggatgatataaagcactgtgggctataagcaacaatcttgggttggtaggcaaatagaccaattgatctttattattattattattattattattattattttttgagatgaagtcttgctcttgtcgcccaggctgggtgcagtggcatgatcttggcttactgcaacctctgcctcctgggttcaagcacctgagcctcccgagtagctgggattacaggcatctgccaccacacctggctaatttttgtattttttgtagagacagatgtttcaccatgttggccaggctggtctcaaactcctgacctcaggtgatccgcccgcctttgcatcccaaaatgctgggattacaggtgtgagccacagcacccggtcccagttggtcttttaatattaaatttgtgcactattactgggtctggagttaatgatttcaaatagtttctaaaaataactgattaaatgtaagaaattataactaattatcaaggtgattctcttttgtttcttcaatggagagtttctctttctcttttcctcctctaataaaaatatttctttttttcctgtccttttattcattatattatgaaacttaggttttaggaaacaccttaagcgtcattttaatgaagcacaacattgatattttacatgaataataacgtttggtattttaaatatacttcaagggggtaataagccacaataactgtaccaaaaaaacttaaaaatggggacatattcatcccttgtgtgtgcatattttaccacttgttgacaagatacaattgtgacctactttgaggggatgaataacgacttatcactttaagacactttgcaaacatgttactaaaaaaaggtgcctagccaaggaaaaaaccattcacttggaattaaaattgtggatgtcacttcagagatgactttaacataaatgctgaaagttcattcacctcacaaatgtggcagttttctctgtggagaatggtggtctccgtggcagactggctctccaaattaaatgaaactcattgacagacctgggaccttttatgtgagtggacagacaagatcttggtttggcttcatgtactgttttctagagagagtgctacgaaaaacttatgatgcttttatgtgataaccaatataatgctttaatatgttaattctttgtgatgctatatacatagtttttatagttttatgaaaccactttgttaaacttatctggattttaagacacttgtaaacaaatggtttgttagtaaaattggggcattaagagttttacagagcaaataaagaagattttgacaaaagtcaaaaaaa

SEQ ID NO: 1250 - protein, 476 aa, Homo sapiens
MSGSSARSSHLSQPVVKSVLVYRNGDPFYAGRRVVIHEKKVSSFEVFLKEVTGGVQAPFGAVRNIYTPRTGHRIRKLDQIQSGGNYVAGGQEAFKKLNYLDIGEIKKRPMEVVNTEVKPVIHSRINVSARFRKPLQEPCTIFLIANGDLINPASRLLIPRKTLNQWDHVLQMVTEKITLRSGAVHRLYTLEGKLVESGAELENGQFYVAVGRDKFKKLPYGELLFDKSTMRRPFGQKASSLPPIVGSRKSKGSGNDRHSKSTVGSSDNSSPQPLKRKGKKEDVNSEKLTKLKQNVKLKNSQETIPNSDEGIFKAGAERSETRGAAEVQEDEDTQVEVPVDQRPAEIVDEEEDGEKANKDAEQKEDFSGMNGDLEEEGGREATDAPEQVEEILDHSEQQARPARVNGGTDEENGEELQQVNNELQLVLDKERKSQGAGSGQDEADVDPQRPPRPEVKITSPEENENNQQNKDYAAVA

SEQ ID NO: 1251 - DNA, 1382 bp, Homo sapiens
cattatgctaacagcataaacatgcagggggtgggagcagggtcacaaaagtgagtgttgtcaattctacttggaatgaaaggttgaaataatttaaacagtacgggaaatgcagagcaattttctcctctggtgacaatatagtgtccaacacttggaagtgatttttaagaatgtttatttaaattaaaaggatggatttccaaggaaaaaaaataaggaaaaggaaagaaaaaactgaacagaaaacgcaaaagtatcagtttggtcactaacctttgcaaggatacctttttattttctttaagattcctgttgtttatacacagattttaagtttactcctactgctgacccaagtgaaattccttctccagtcacagtgtcaacctctaccccccaactgcaacgagagttttgaggggcatcaatcacaccgagaagtcacagcccctcaaccactgaggtgtgggggggtagggatctgcatttcttcatatcaaccccacactatagggcacctaaatgggtgggcggtgggggagaccgactcacttgagtttcttgaaggcttcctggcctccagccacgtaattgcccccgctctggatctggtctagcttccggattcggtggccagtccgcggggtgtagatgttcctgacggccccaaagggtgcctgaacgccgccggtcacctccttcaggaagacttcgaagctggacaccttcttctcatggatgacgacgcggcgccccgcgtagaaggggtccccgttgcggtacacaagcacgctcttcacgacgggctgagacaggtggctggacctggcgctgctgccgctcatcttccccgctggccgccgcctcagctcgctgcttcgcgtcgggaggcacctccgctgtcccagcggcctcaccgcacccagggcgcgggatcgcctcctgaaacgaacgagaaactgacgaatccacaggtgaaagagaagtaacggccgtgcgcctaggcgtccacccagaggagacactaggagcttgcaggactcggagtagacgctcaagtttttcaccgtggcgtgcacagccaatcaggacccgcagtgcgcgcaccacaccaggttcacctgctacgggcagaatcaaggtggacagcttctgagcaggagccggaaacgcgcggggccttcaaacaggcacgcctagtgagggcaggagagaggaggacgcacacacacacacacacacaaatatggtgaaacccaatttcttacatcatatctgtgctaccctttccaaacagcctaatttttcttttctctcttcttgcacctttacccctcaatctcctgcttcctcccaaattaaagcaattaagttcctgg

SEQ ID NO: 1252 - protein, 84 aa, Homo sapiens
MDDDAAPRVEGVPVAVHKHALHDGLRQVAGPGAAAAHLPRWPPPQLAASRREAPPLSQRPHRTQGAGSPPETNEKLTNPQVKEK

SEQ ID NO: 1253 - DNA, 3348 bp, Homo sapiens
atgcctggtgcacagagtctgcaggtcgggcggtagcgacaggtcagagctgcggcctgagcagccagcgtccggcatgaaggtctggggtctggctgctgcctgcttcttgctccagcaccatggaatgcctgcgcagtttaccctgcctcctgccccgcgcgatgagacttccccggcggacgctgtgtgccctggccttggacgtgacctctgtgggtcctcccgttgctgcctgcggccgccgagccaacctgattggaaggagccgagcggcgcagctttgcgggcccgaccggctccgcgtggcaggtgaagtgcaccggtttagaacctctgacgtctctcaagccactttagccagtgtagccccagtatttactgtgacaaaatttgacaaacagggaaacgttacttcttttgaaaggaagaaaactgaattataccaagagttaggtcttcaagccagagatttgagatttcagcatgtaatgagtatcacagtcagaaacaataggattatcatgagaatggagtatttgaaagctgtgataactccagagtgtcttctgatattagattatcgtaatttaaacttagagcaatggctgttccgggaactcccttcacagttgtctggagagggtcaactcgttacataccctttaccttttgagtttagagctatagaagcactcctgcaatattggatcaacacccttcaggggaaacttagcattttgcagccactgatccttgagaccttggatgctttggtggaccccaaacattcttctgtagacagaagcaaactgcacattttactacagaatggcaaaagtctatcagagttagaaacagatattaaaattttcaaagagtcaattttggagatcttggatgaggaagagttgctagaagagctctgtgtatcaaaatggagtgacccacaagtctttgaaaagagcagtgctgggattgaccatgcagaagagatggagttgctgttggaaaactactaccgattggctgacgatctctccaatgcagctcgtgagcttagggtgctgattgatgattcacaaagtattattttcattaatctggacagccaccgaaacgtgatgatgaggttgaatctacagctgaccatgggaaccttctctctttcgctctttggactaatgggagttgcttttggaatgaatttggaatcttcccttgaagaggaccatagaattttttggctgattacaggaattatgttcatgggaagtggcctcatctggaggcgcctgctttcattccttggacgacagctagaagctccattgcctcctatgatggcttctttacctaaaaagactcttctggcagatagaagcatggaattgaaaaatagcctcagactggatggacttggatcaggaaggagcatcctaacaaaccgttaggaacagccccgtggatactgaagttttttttatggtagttacaggaaacttctgatactctttttattattttcttgtatagagtcagacacttgaaaaaaactaatgtttgaagacaaaaatattttggcagtcacaataccagaactggattgcatttccagaattctgagttaaagaaacaaagtatttgctttgtaaaaggccaaaattctatttcctacaaactttaaatgctgtttttatagatgtgatatgaggcaacacaagcacagacagttgcatagattttaatttatacatatcaagaaaagtgcaatttcatgctgaatgaagcgtaggaacttgacaagcccataggtagctatagttctttgtcagtatagggaattatgttcatgtgaatttcctgattctcaggtgactaaaaagctagcattctatgtattaaccttacaacagactctgtaagtttgagctttaaaaaccaaactttgacataaccttatttcttgtatttgcccccttttttttataaaaggtgaataaaaagaaataatttaatatcaccattgtatggattcctaatcaagatttcacgttctcagcccctgagactagttttctttgctctctgtaattagagcctttggaagcaaagttgaaaggaagtatttccattctgttactgttttgtagcactttgtccatttattgatttttaaagtagatatttagataccacccctgccctgccccaaaaagaaaaatgtttattgtcctgctaatctatatgcctacacctcagaagctgacagatgagcttcctaaaacatgaggatgaataaatgttagaactgtgatatcttctcatttccacagagatttgggtttaaaacaaatggctaatatttgtaagcctgaaagctgccatcctctttaacatcctacctaccttttaaaatattttctggaggttaagtacagttaggcactagaacatttgttaagcctcccaaagtagtgtgcatggaagattctagagtgtccagctcttgcactacaaatgtaataataacagaataaatacacttaccctgatgatattgagggtacatgattagcctaatgtgatgtcatatgaggaagtttaggagtccatttttcaggtggtttggtgataggaataaaaatgttactcccgtcgctgatttggaagaaaaccgatgaagtacaagtaaggtttccccactcctgtgtgtggtcatgggaagccattagagggaagctgcagaacagaatggaacaggacaggctgggctagactcgagcacgcagtggcccctgtgccaccacactgtgggtcaggaacacgcgtcatggtgttcttgtcggaatgtgaacatacagcaccctctagcattacgaatctcttaggatttttaagattgtatttgataatacttatatttcacagggcacacttttggcacacctcagagcacactgctgctattttgggtcgtatcactgtaaaatacataataagtactacttaactgtgacatgaagaattggaatcccagagggcaacatttgatttgactaagatcaggcataagatagaatttttgtcatttttccttgcagttttattgacttagtttatgagcttggataaaataattttttgatgaatcatgtcaataaaaggaaaaataatgtaactacctcataagtctgataaaaggaagttgctagtgttttatagaatttctgaaggtggttaaatcaagtatgatttcaaaatatcaactagttccacttttgtgattgcaggatgcttcttatactaaagttctcataaataataaatcagcttatgccaaaaata

SEQ ID NO: 1254 - protein, 443 aa, Homo sapiens
MECLRSLPCLLPRAMRLPRRTLCALALDVTSVGPPVAACGRRANLIGRSRAAQLCGPDRLRVAGEVHRFRTSDVSQATLASVAPVFTVTKFDKQGNVTSFERKKTELYQELGLQARDLRFQHVMSITVRNNRIIMRMEYLKAVITPECLLILDYRNLNLEQWLFRELPSQLSGEGQLVTYPLPFEFRAIEALLQYWINTLQGKLSILQPLILETLDALVDPKHSSVDRSKLHILLQNGKSLSELETDIKIFKESILEILDEEELLEELCVSKWSDPQVFEKSSAGIDHAEEMELLLENYYRLADDLSNAARELRVLIDDSQSIIFINLDSHRNVMMRLNLQLTMGTFSLSLFGLMGVAFGMNLESSLEEDHRIFWLITGIMFMGSGLIWRRLLSFLGRQLEAPLPPMMASLPKKTLLADRSMELKNSLRLDGLGSGRSILTNR

SEQ ID NO: 1255 - DNA, 3489 bp, Homo sapiens
gtgacctgcttagagagaagcggtgggtctgcacctggattttggagtcccagtgctgctgcagctctgagcattcccacgtcaccagagaagccggtgggcaatgagatcatgtctgctttcaggttgtggcctggcctgctgatcatgttgggttctctctgccatagaggttcaccgtgtggcctttcaacacacgtagaaataggacacagagctctggagtttcttcagcttcacaatgggcgtgttaactacagagagctgttactagaacaccaggatgcgtatcaggctggaatcgtgtttcctgattgtttttaccctagcatctgcaaaggaggaaaattccatgatgtgtctgagagcactcactggactccgtttcttaatgcaagcgttcattatatccgagagaactatccccttccctgggagaaggacacagagaaactggtagctttcttgtttggaattacttctcacatggcggcagatgtcagctggcatagtctgggccttgaacaaggattccttaggaccatgggagctattgattttcacggctcctattcagaggctcattcggctggtgattttggaggagatgtgttgagccagtttgaatttaattttaattaccttgcacgacgctggtatgtgccagtcaaagatctactgggaatttatgagaaactgtatggtcgaaaagtcatcaccgaaaatgtaatcgttgattgttcacatatccagttcttagaaatgtatggtgagatgctagctgtttccaagttatatcccacttactctacaaagtccccgtttttggtggaacaattccaagagtattttcttggaggactggatgatatggcattttggtccactaatatttaccatctaacaagcttcatgttggagaatgggaccagtgactgcaacctgcctgagaaccctctgttcattgcatgtggcggccagcaaaaccacacccagggctcaaaaatgcagaaaaatgattttcacagaaatttgactacatccctaactgaaagtgttgacaggaatataaactatactgaaagaggagtgttctttagtgtaaattcctggaccccggattccatgtcctttatctacaaggctttggaaaggaacataaggacaatgttcataggtggctctcagttgtcacaaaagcacgtctccagccccttagcatcttacttcttgtcatttccttatgcgaggcttggctgggcaatgacctcagctgacctcaaccaggatgggcacggtgacctcgtggtgggcgcaccaggctacagccgccccggccacatccacatcgggcgcgtgtacctcatctacggcaatgacctgggcctgccacctgttgacctggacctggacaaggaggcccacaggatccttgaaggcttccagccctcaggtcggtttggctcggccttggctgtgttggactttaacgtggacggcgtgcctgacctggccgtgggagctccctcggtgggctccgagcagctcacctacaaaggtgccgtgtatgtctactttggttccaaacaaggaggaatgtcttcttcccctaacatcaccatttcttgccaggacatctactgtaacttgggctggactctcttggctgcagatgtgaatggagacagtgaacccgatctggtcatcggctccccttttgcaccaggtggagggaagcagaagggaattgtggctgcgttttattctggccccagcctgagcgacaaagaaaaactgaacgtggaggcagccaactggacggtgagaggcgaggaagacttctcctggtttggatattcccttcacggtgtcactgtggacaacagaaccttgctgttggttgggagcccgacctggaagaatgccagcaggctgggccatttgttacacatccgagatgagaaaaagagccttgggagggtgtatggctacttcccaccaaacggccaaagctggtttaccatttctggagacaaggcaatggggaaactgggtacttccctttccagtggccacgtactgatgaatgggactctgaaacaagtgctgctggttggagcccctacgtacgatgacgtgtctaaggtggcattcctgaccgtgaccctacaccaaggcggagccactcgcatgtacgcactcacatctgacgcgcagcctctgctgctcagcaccttcagcggagaccgccgcttctcccgatttggtggcgttctgcacttgagtgacctggatgatgatggcttagatgaaatcatcatggcagcccccctgaggatagcagatgtaacctctggactgattgggggagaagacggccgagtatatgtatataatggcaaagagaccacccttggtgacatgactggcaaatgcaaatcatggataactccatgtccagaagaaaaggcccaatatgtattgatttctcctgaagccagctcaaggtttgggagctccctcatcaccgtgaggtccaaggcaaagaaccaagtcgtcattgctgctggaaggagttctttgggagcccgactctccggggcacttcacgtctatagccttggctcagattgaagatttcactgcatttccccactctgcccacctctctcatgctgaatcacatccatggtgagcattttgatggacaaagtggcacatccagtggagcggtggtagatcctgatagacatggggctcctgggagtagagagacacactaacagccacaccctctggaaatctgatacagtaaatatatgactgcaccagaaatatgtgaaatagcagacattctgcttactcatgtctccttccacagtttacttcctcgctccctttgcatctaaacctttcttctttcccaacttattgcctgtagtcagacctgctgtacaacctatttcctcttcctcttgaatgtctttccaatggctggaaaggtccctctgtggttatctgttagaacagtctctgtacacaattcctcctaaaaacatccttttttaaaaaaagaattgttcagccataaagaaagaacaagatcatgccctttgcagggacatggatggagctggaggccattatccttcataaactattgcaggaacagaaaaccaaacactccatattctcacttgtaagtgggagctaaatgagaacacgtggacacatagagggaaacaacacacactggggcctatgagagggcggaaggtgggaggagggagagatcaggaaaaataactaatggatacttagggtgatgaaataatctgtgtaacaaacccccatgacacacctttatgtatgtaacaaaccagcacttcctgcgcatgtacccctgaacttaaaagttaaaaaaaagttgaacttaaaaataacagattggcccatgccaatcaaagtataatagaaagcatagtatac

SEQ ID NO: 1256 - protein, 840 aa, Homo sapiens
MSAFRLWPGLLIMLGSLCHRGSPCGLSTHVEIGHRALEFLQLHNGRVNYRELLLEHQDAYQAGIVFPDCFYPSICKGGKFHDVSESTHWTPFLNASVHYIRENYPLPWEKDTEKLVAFLFGITSHMAADVSWHSLGLEQGFLRTMGAIDFHGSYSEAHSAGDFGGDVLSQFEFNFNYLARRWYVPVKDLLGIYEKLYGRKVITENVIVDCSHIQFLEMYGEMLAVSKLYPTYSTKSPFLVEQFQEYFLGGLDDMAFWSTNIYHLTSFMLENGTSDCNLPENPLFIACGGQQNHTQGSKMQKNDFHRNLTTSLTESVDRNINYTERGVFFSVNSWTPDSMSFIYKALERNIRTMFIGGSQLSQKHVSSPLASYFLSFPYARLGWAMTSADLNQDGHGDLVVGAPGYSRPGHIHIGRVYLIYGNDLGLPPVDLDLDKEAHRILEGFQPSGRFGSALAVLDFNVDGVPDLAVGAPSVGSEQLTYKGAVYVYFGSKQGGMSSSPNITISCQDIYCNLGWTLLAADVNGDSEPDLVIGSPFAPGGGKQKGIVAAFYSGPSLSDKEKLNVEAANWTVRGEEDFSWFGYSLHGVTVDNRTLLLVGSPTWKNASRLGHLLHIRDEKKSLGRVYGYFPPNGQSWFTISGDKAMGKLGTSLSSGHVLMNGTLKQVLLVGAPTYDDVSKVAFLTVTLHQGGATRMYALTSDAQPLLLSTFSGDRRFSRFGGVLHLSDLDDDGLDEIIMAAPLRIADVTSGLIGGEDGRVYVYNGKETTLGDMTGKCKSWITPCPEEKAQYVLISPEASSRFGSSLITVRSKAKNQVVIAAGRSSLGARLSGALHVYSLGSD

SEQ ID NO: 1257 - DNA, 1096 bp, Homo sapiens
agtgctgctgcagctctgagcattcccacgtcaccagagaagccggtgggcaatgagatcatgtctgctttcaggttgtggcctggcctgctgatcatgttgggttctctctgccatagaggttcaccgtgtggcctttcaacacacgtagaaataggacacagagctctggagtttcttcagcttcacaatgggcgtgttaactacagagagctgttactagaacaccaggatgcgtatcaggctggaatcgtgtttcctgattgtttttaccctagcatctgcaaaggaggaaaattccatgatgtgtctgagagcactcactggactccgtttcttaatgcaagcgttcattatatccgagagaactatccccttccctgggagaaggacacagagaaactggtagctttcttgtttggaattacttctcacatggcggcagatgtcagctggcatagtctgggccttgaacaaggattccttaggaccatgggagctattgattttcacggctcctattcagaggctcattcggctggtgattttggtactgtttatttacatttgctaaattttctcgtggtatagttcacttataatgacatcactactgtgctttaaatatgtgtgtctttaatattttgctggttgcatgtattttctatttaatgttgcagttcatttagagtagagatgtacctcatttaacatagagatgtatttctaaaaacttgtgtctatatgtatttttttgttaaaaaattctacactttgttgttgacatgtcataattttagaaaaactttacttatacattgggttaaaattcattagctagtgtctcctactttcctaatactttagctttaaactagtaaactccaccttttgcctgtagtagtaaattgcttttaaatatttaaactaggtggtgaatggtgtttattaaacccttatggtcgatatttccttaaagtaaaacaaaaaacacctttggttatatggccagttctttcttaatttatatgtttcactaactaagatttttaaaagataattttttcttaaaaaaaaaaaaaaaaaaaaaaaaaaa

SEQ ID NO: 1258 - protein, 176 aa, Homo sapiens
MSAFRLWPGLLIMLGSLCHRGSPCGLSTHVEIGHRALEFLQLHNGRVNYRELLLEHQDAYQAGIVFPDCFYPSICKGGKFHDVSESTHWTPFLNASVHYIRENYPLPWEKDTEKLVAFLFGITSHMAADVSWHSLGLEQGFLRTMGAIDFHGSYSEAHSAGDFGTVYLHLLNFLVV

SEQ ID NO: 1259 - DNA, 5131 bp, Homo sapiens
gtttcctgtcgccgtcgttgcccgggccatggcgacctgcatttggctgcggagctgtggggcccggcgcctcgggtcgacgtttccaggctgccgcctccgcccccgcgccggcggcctggtccctgcctccgggcctgcgcccggcccggcccagctccgctgctacgctgggcgcctggcgggcctctctgcggcgctgctgcgcaccgacagcttcgtgggcggccgctggctcccggccgccgccaccttccccgtgcaagacccggccagcggcgccgctctgggcatggtagccgactgcggggtgcgagaggcccgcgccgccgtgcgcgctgcctacgaggctttctgccgctggagggaggtctccgccaaggagaggagttcattacttcggaagtggtacaatttaatgatacaaaataaggatgaccttgccagaataatcacagctgaaagtggaaagccactgaaggaggcacatggagaaattctctattccgcctttttcctagagtggttctctgaggaagcccgccgtgtttacggagacattatccacaccccggcaaaggacaggcgggccctggtcctcaagcagcccataggcgtggctgcagtcatcaccccgtggaatttccccagtgccatgatcacccggaaggtgggggccgccctggcagccggctgtactgtcgtggtgaagcctgccgaagacacgcccttctccgccctggccctggctgagcttgcaagccaggctgggattccttcaggtgtatacaatgttattccctgttctcgaaagaatgccaaggaagtaggggaggcaatttgtactgatcctctggtgtccaaaatttcctttactggttcaacaactacaggaaagatcctgttgcaccacgcagcaaactctgtgaaaagggtctctatggagctgggcggccttgctccatttatagtatttgacagtgccaacgtggaccaggctgtagcaggggccatggcatctaaatttaggaacactggacagacttgtgtttgctcaaaccaattcttggtgcaaaggggcatccatgatgcctttgtaaaagcattcgccgaggccatgaagaagaacctgcgcgtaggtaatggatttgaggaaggaactactcagggcccattaattaatgaaaaagcggtagaaaaggtggagaaacaggtgaatgatgccgtttctaaaggtgccaccgttgtgacaggtggaaaacgacaccaacttggaaaaaatttctttgagcctaccctgctgtgcaatgtcacccaggacatgctgtgcactcatgaagagactttcgggcctctggcaccagttatcaagttcgatacagaggaggaggctatagcaatcgctaacgcagctgatgttgggttagcaggttatttttactctcaagacccagcccagatctggagagtggcagagcagctggaagtgggcatggttggcgtcaacgaaggattaatttcctctgtggagtgcccttttggtggagtgaagcagtccggccttgggcgagaggggtccaagtatggcattgatgagtatctggaactcaagtatgtgtgttacgggggcttgtaggattctttggttctttaaaaaaatttaaaaggagacttatctacatatataggtacatgccatccattattttaaataaactaataggttttcagaattatgaatttttcagaactcatccagtccttgtaatcttaaacagatgcaaatcctacccctgcccttaatgtaactagggaccaatatgtgccacgtgcctgtggctgcagactcccagagaaccagcactgggtttacagaatgaggccctggctccccaccacagccccagctgcctcagagcaggcacagcacaaggcaggcccagccccatgggccgtcacaaaggcttgatcactgcctgggcagtggcacaaccatcccccatgtcgctacagaacatgggcccagagcaccttgaaggagacccttgactgtgactggcaggcaggtgaggggcacagcacccctccccggcatctgccagctcagcacagaagacaccgaatgtgcatctggaggtgttgcggcagaggtttgagtgaaccctctttcaaagacaataaatagcacagaattgtccgtgcttctgtgaggcacgaaggagcacctctccctattcctgaaccatattttaattgatgcctttattgtcccaaatttaccacttaaagaattctattttcatttctgtcctgtttgccacttcatttcatttccttgagtaaatgagctgaagtgtaaagcaaagaatagcagaagcagcttggtaggatggaaggcacgcagtggcatggcctggctccttccctgagtggccttgttgccttgggcgtgtgttcagcacctcccatcccatggatacagtggagattccatacaggccttacttagctccttgcgatactgtgagccagagagaaagtaaaagcacttcacaaaaaaatgaaaattctaaggacatacaagagccattgttacgagcagcaccgcccagcccttccttgcctactgtcagtggctttgccaagatgggaggaggccagtgcccacttgcccaccgacctgagcctgagtaagtggctgtcacctgagcctgttctttctgtcctggtgtggtgctgctccctcacctccaaaagagcaaaagtactttcaccacagtcaacccaaaagggaaagaatttctgtaattgccaacccactttgtagaagaggcatgagcccttgaatttcaggcaccttttatctaatgagagtttttacagctcatcattcaaataacgcacaaaaaacaaaagccgctatgaccggcgttgcctctcactttgaaagaaagactccgtaatcttaaacagatgcaaatccaattaggcggccaagtaggtggagacgaagcaccttcctttccccatctctgtctgtgtagactccacttacatcttgtggttattctgggttgtggaaggaaaatgtgaatgaaagtagtgctggatgcaattactcctgaaccccacctaggatttaacatccctcattgagccactgggaagctatggttgagtaactaaaggtctggcaagaccctgggcacacagggagctgcctagcatctggcctggagtgtactagccacattcccaaggtcccaaggagaaggaagagctgaaattcatctcctagtgacagtgccccggccctgtcaagaatcacatactcagcattttgacagttaatgtcttctctttatttgtgtagtttttaggtggttttatataacattttaattacttgtgatttagatgtatccatcctttttctattaagaatacaaatgctgggctgggcacagtggctcacgcctgtaatcccaacaccttgggaggccaaggcaggcagatcacgacatcaggagatcgagaccatcctggctaacacggtgaaaccccgtctctactaaaaatacaaaaaaaattagtcggatgtggtggcaggtgcctgtagtcccagctactctggaggctgaggcaggagaatggcgtgaacccaggaggcggagcttgcagtgagcagagatcacgccactgcactccagcctggatgacagagcgagactccgcctcaaaaaaagaatacaaatgctccaacattattttttataactctggattaccgatgctgagatgtgtgcaggaatacttccaaataaatttttaacattgtaagccagtagattctttggctgggtggcaaattttgagtcttcttgcatatttggctcatgggttcataaattgaggccagagactcattgtatatccttgatcaattttctaattaaaggaaatagcttattgtttagtaaaatggcccttggttgtgggaagaaagagaattatttttaactgaacgtttttgttgttttttaaataaagtagccatatgtaacgggattttaaaaatatatacattttacaacatggactagaaaaggaccattagatcaggggttggcaaactatggcccacgaatcaaacctggcctgccacctgtttttatacaacctgtgagctaagaatggtttatatgttttcaaatgattgggcagaaaatcaaaagaagaacaatatttcatgacacctgaaaattctatgaaattcagatttcagtgtccataaacaaaatgttattagagcatagccacacccattcatttatggtattgtctgggactgctttcttggcagagttgaatagttgggacagggacagtatagcctgcaaagcctaaaagatttactacttgtctccttaaagaaaaagtttgccagctcctgatctagaccaagagggagatattgaccttacttgcatttatccggcattatttcaacacctcctgtgaagaaagtacttttctggcatagctaccgtgagttctcagcaggaacttcccagcgatgataatgtacatgaaattagccacgtaacaagagtctatttgccttgaaaaaacaattatccttgaacttcctccagctatgcagggattctcattaaagagctgatctgcatctgtttatccattttagtagcttttaaatatgattttatgtgaagtgccatttctttattctactaaagagagacagcagaaataaagatcagaagcaaatgtgagcaaatctgttttactgttaacttcaattatgaacttgaaattgtgccacatgactttttcctctaaaaactggatcctagtgttttaattacctgtgtgcagctattttaaatagcattttacttgaataatatgtatgttgtcattgtttcatgctatactttgtgggataaaacttgggaatgagtgtggtaagaaatttataaagttttgcttttaaaacgtggacataactcatttttctagtttttgacaattgtgtgttttagtgtctagtctgcagagagctgtgtgattaataaacgtggaattaacagaatttcctctccctgta

SEQ ID NO: 1260 - protein, 535 aa, Homo sapiens
MATCIWLRSCGARRLGSTFPGCRLRPRAGGLVPASGPAPGPAQLRCYAGRLAGLSAALLRTDSFVGGRWLPAAATFPVQDPASGAALGMVADCGVREARAAVRAAYEAFCRWREVSAKERSSLLRKWYNLMIQNKDDLARIITAESGKPLKEAHGEILYSAFFLEWFSEEARRVYGDIIHTPAKDRRALVLKQPIGVAAVITPWNFPSAMITRKVGAALAAGCTVVVKPAEDTPFSALALAELASQAGIPSGVYNVIPCSRKNAKEVGEAICTDPLVSKISFTGSTTTGKILLHHAANSVKRVSMELGGLAPFIVFDSANVDQAVAGAMASKFRNTGQTCVCSNQFLVQRGIHDAFVKAFAEAMKKNLRVGNGFEEGTTQGPLINEKAVEKVEKQVNDAVSKGATVVTGGKRHQLGKNFFEPTLLCNVTQDMLCTHEETFGPLAPVIKFDTEEEAIAIANAADVGLAGYFYSQDPAQIWRVAEQLEVGMVGVNEGLISSVECPFGGVKQSGLGREGSKYGIDEYLELKYVCYGGL

SEQ ID NO: 1261 - DNA, 5170 bp, Homo sapiens
gtttcctgtcgccgtcgttgcccgggccatggcgacctgcatttggctgcggagctgtggggcccggcgcctcgggtcgacgtttccaggctgccgcctccgcccccgcgccggcggcctggtccctgcctccgggcctgcgcccggcccggcccagctccgctgctacgctgggcgcctggcgggcctctctgcggcgctgctgcgcaccgacagcttcgtgggcggccgctggctcccggccgccgccaccttccccgtgcaagacccggccagcggcgccgctctgggcatggtagccgactgcggggtgcgagaggcccgcgccgccgtgcgcgctgcctacgaggctttctgccgctggagggaggtctccgccaaggagaggagttcattacttcggaagtggtacaatttaatgatacaaaataaggatgaccttgccagaataatcacagctgaaagtggaaagccactgaaggaggcacatggagaaattctctattccgcctttttcctagagtggttctctgaggaagcccgccgtgtttacggagacattatccacaccccggcaaaggacaggcgggccctggtcctcaagcagcccataggcgtggctgcagtcatcaccccgtggaatttccccagtgccatgatcacccggaaggtgggggccgccctggcagccggctgtactgtcgtggtgaagcctgccgaagacacgcccttctccgccctggccctggctgaggtaaatcagggatttcttcttgatttggatccattgttgcttgcaagccaggctgggattccttcaggtgtatacaatgttattccctgttctcgaaagaatgccaaggaagtaggggaggcaatttgtactgatcctctggtgtccaaaatttcctttactggttcaacaactacaggaaagatcctgttgcaccacgcagcaaactctgtgaaaagggtctctatggagctgggcggccttgctccatttatagtatttgacagtgccaacgtggaccaggctgtagcaggggccatggcatctaaatttaggaacactggacagacttgtgtttgctcaaaccaattcttggtgcaaaggggcatccatgatgcctttgtaaaagcattcgccgaggccatgaagaagaacctgcgcgtaggtaatggatttgaggaaggaactactcagggcccattaattaatgaaaaagcggtagaaaaggtggagaaacaggtgaatgatgccgtttctaaaggtgccaccgttgtgacaggtggaaaacgacaccaacttggaaaaaatttctttgagcctaccctgctgtgcaatgtcacccaggacatgctgtgcactcatgaagagactttcgggcctctggcaccagttatcaagttcgatacagaggaggaggctatagcaatcgctaacgcagctgatgttgggttagcaggttatttttactctcaagacccagcccagatctggagagtggcagagcagctggaagtgggcatggttggcgtcaacgaaggattaatttcctctgtggagtgcccttttggtggagtgaagcagtccggccttgggcgagaggggtccaagtatggcattgatgagtatctggaactcaagtatgtgtgttacgggggcttgtaggattctttggttctttaaaaaaatttaaaaggagacttatctacatatataggtacatgccatccattattttaaataaactaataggttttcagaattatgaatttttcagaactcatccagtccttgtaatcttaaacagatgcaaatcctacccctgcccttaatgtaactagggaccaatatgtgccacgtgcctgtggctgcagactcccagagaaccagcactgggtttacagaatgaggccctggctccccaccacagccccagctgcctcagagcaggcacagcacaaggcaggcccagccccatgggccgtcacaaaggcttgatcactgcctgggcagtggcacaaccatcccccatgtcgctacagaacatgggcccagagcaccttgaaggagacccttgactgtgactggcaggcaggtgaggggcacagcacccctccccggcatctgccagctcagcacagaagacaccgaatgtgcatctggaggtgttgcggcagaggtttgagtgaaccctctttcaaagacaataaatagcacagaattgtccgtgcttctgtgaggcacgaaggagcacctctccctattcctgaaccatattttaattgatgcctttattgtcccaaatttaccacttaaagaattctattttcatttctgtcctgtttgccacttcatttcatttccttgagtaaatgagctgaagtgtaaagcaaagaatagcagaagcagcttggtaggatggaaggcacgcagtggcatggcctggctccttccctgagtggccttgttgccttgggcgtgtgttcagcacctcccatcccatggatacagtggagattccatacaggccttacttagctccttgcgatactgtgagccagagagaaagtaaaagcacttcacaaaaaaatgaaaattctaaggacatacaagagccattgttacgagcagcaccgcccagcccttccttgcctactgtcagtggctttgccaagatgggaggaggccagtgcccacttgcccaccgacctgagcctgagtaagtggctgtcacctgagcctgttctttctgtcctggtgtggtgctgctccctcacctccaaaagagcaaaagtactttcaccacagtcaacccaaaagggaaagaatttctgtaattgccaacccactttgtagaagaggcatgagcccttgaatttcaggcaccttttatctaatgagagtttttacagctcatcattcaaataacgcacaaaaaacaaaagccgctatgaccggcgttgcctctcactttgaaagaaagactccgtaatcttaaacagatgcaaatccaattaggcggccaagtaggtggagacgaagcaccttcctttccccatctctgtctgtgtagactccacttacatcttgtggttattctgggttgtggaaggaaaatgtgaatgaaagtagtgctggatgcaattactcctgaaccccacctaggatttaacatccctcattgagccactgggaagctatggttgagtaactaaaggtctggcaagaccctgggcacacagggagctgcctagcatctggcctggagtgtactagccacattcccaaggtcccaaggagaaggaagagctgaaattcatctcctagtgacagtgccccggccctgtcaagaatcacatactcagcattttgacagttaatgtcttctctttatttgtgtagtttttaggtggttttatataacattttaattacttgtgatttagatgtatccatcctttttctattaagaatacaaatgctgggctgggcacagtggctcacgcctgtaatcccaacaccttgggaggccaaggcaggcagatcacgacatcaggagatcgagaccatcctggctaacacggtgaaaccccgtctctactaaaaatacaaaaaaaattagtcggatgtggtggcaggtgcctgtagtcccagctactctggaggctgaggcaggagaatggcgtgaacccaggaggcggagcttgcagtgagcagagatcacgccactgcactccagcctggatgacagagcgagactccgcctcaaaaaaagaatacaaatgctccaacattattttttataactctggattaccgatgctgagatgtgtgcaggaatacttccaaataaatttttaacattgtaagccagtagattctttggctgggtggcaaattttgagtcttcttgcatatttggctcatgggttcataaattgaggccagagactcattgtatatccttgatcaattttctaattaaaggaaatagcttattgtttagtaaaatggcccttggttgtgggaagaaagagaattatttttaactgaacgtttttgttgttttttaaataaagtagccatatgtaacgggattttaaaaatatatacattttacaacatggactagaaaaggaccattagatcaggggttggcaaactatggcccacgaatcaaacctggcctgccacctgtttttatacaacctgtgagctaagaatggtttatatgttttcaaatgattgggcagaaaatcaaaagaagaacaatatttcatgacacctgaaaattctatgaaattcagatttcagtgtccataaacaaaatgttattagagcatagccacacccattcatttatggtattgtctgggactgctttcttggcagagttgaatagttgggacagggacagtatagcctgcaaagcctaaaagatttactacttgtctccttaaagaaaaagtttgccagctcctgatctagaccaagagggagatattgaccttacttgcatttatccggcattatttcaacacctcctgtgaagaaagtacttttctggcatagctaccgtgagttctcagcaggaacttcccagcgatgataatgtacatgaaattagccacgtaacaagagtctatttgccttgaaaaaacaattatccttgaacttcctccagctatgcagggattctcattaaagagctgatctgcatctgtttatccattttagtagcttttaaatatgattttatgtgaagtgccatttctttattctactaaagagagacagcagaaataaagatcagaagcaaatgtgagcaaatctgttttactgttaacttcaattatgaacttgaaattgtgccacatgactttttcctctaaaaactggatcctagtgttttaattacctgtgtgcagctattttaaatagcattttacttgaataatatgtatgttgtcattgtttcatgctatactttgtgggataaaacttgggaatgagtgtggtaagaaatttataaagttttgcttttaaaacgtggacataactcatttttctagtttttgacaattgtgtgttttagtgtctagtctgcagagagctgtgtgattaataaacgtggaattaacagaatttcctctccctgta

SEQ ID NO: 1262 - protein, 548 aa, Homo sapiens
MATCIWLRSCGARRLGSTFPGCRLRPRAGGLVPASGPAPGPAQLRCYAGRLAGLSAALLRTDSFVGGRWLPAAATFPVQDPASGAALGMVADCGVREARAAVRAAYEAFCRWREVSAKERSSLLRKWYNLMIQNKDDLARIITAESGKPLKEAHGEILYSAFFLEWFSEEARRVYGDIIHTPAKDRRALVLKQPIGVAAVITPWNFPSAMITRKVGAALAAGCTVVVKPAEDTPFSALALAEVNQGFLLDLDPLLLASQAGIPSGVYNVIPCSRKNAKEVGEAICTDPLVSKISFTGSTTTGKILLHHAANSVKRVSMELGGLAPFIVFDSANVDQAVAGAMASKFRNTGQTCVCSNQFLVQRGIHDAFVKAFAEAMKKNLRVGNGFEEGTTQGPLINEKAVEKVEKQVNDAVSKGATVVTGGKRHQLGKNFFEPTLLCNVTQDMLCTHEETFGPLAPVIKFDTEEEAIAIANAADVGLAGYFYSQDPAQIWRVAEQLEVGMVGVNEGLISSVECPFGGVKQSGLGREGSKYGIDEYLELKYVCYGGL

SEQ ID NO: 1263 - DNA, 6801 bp, Homo sapiens
gctgccgcgggcggtgggcggggatcccccgggggtgcaaccttgctccacctgtgctgccctcggcgggcctggctggccccgcgcagagcggcggcggcgctcgctgtcactgccggaggtgagagcgcagcagtagcttcagcctgtcttgggcttggtccagattcgctcctctggggctacgtcccggggaagaggaagcgaggattttgctggggtggggctgtacctcttaacagcaggtgcgcgcgcgagggtgtgaacgtgtgtgtgtgtgtgtgtgtgtgtgtgtgtgtgtgtgtgtgtgtaagacctgcgatgacgacgaggaggaacaagtgggacggcgagtgatgctcagggccagcagcaacgcatggggcgagcttcagtgtcgccagcagtgaccacagttcttgaggccaaatctggctcctaaaaaacatcaaaggaagcttgcaccaaactctcttcagggccgcctcagaagcctgccatcacccactgtgtggtgcacaatggcgccccccacaggtgtgctctcttcattgctgctgctggtgacaattgcaggttgtgcccgtaagcagtgcagcgaggggaggacatattccaatgcagtcatttcacctaacttggaaaccaccagaatcatgcgggtgtctcacaccttccctgtcgtagactgcacggccgcttgctgtgacctgtccagctgtgacctggcctggtggttcgagggccgctgctacctggtgagctgcccccacaaagagaactgtgagcccaagaagatgggccccatcaggtcttatctcacttttgtgctccggcctgttcagaggcctgcacagctgctggactatggggacatgatgctgaacaggggctccccctcggggatctggggggactcacctgaggatatcagaaaggacttgccctttctaggcaaagattggggcctagaggagatgtctgagtacgcagatgactaccgggagctggagaaggacctcttgcaacccagtggcaagcaggagcccagagggagtgccgagtacacggactggggcctactgccgggcagcgagggggccttcaactcctctgttggagacagtcctgcggtgccagcggagacgcagcaggaccctgagctccattacctgaatgagtcggcttcaacccctgccccaaaactccctgagagaagtgtgttgcttcccttgccgactactccatcttcaggagaggtgttggagaaagaaaaggcttctcagctccaggaacaatccagcaacagctctggaaaagaggttctaatgccttcccatagtcttcctccggcaagcctggagctcagctcagtcaccgtggagaaaagcccagtgctcacagtcaccccggggagtacagagcacagcatcccaacacctcccactagcgcagccccctctgagtccaccccatctgagctacccatatctcctaccactgctcccaggacagtgaaagaacttacggtatcggctggagataacctaattataactttacccgacaatgaagttgaactgaaggcctttgttgcgccagcgccacctgtagaaacaacctacaactatgaatggaatttaataagccaccccacagactaccaaggtgaaataaaacaaggacacaagcaaactcttaacctctctcaattgtccgtcggactttatgtcttcaaagtcactgtttctagtgaaaacgcctttggagaaggatttgtcaatgtcactgttaagcctgccagaagagtcaacctgccacctgtagcagttgtttctccccaactgcaagagctcactttgcctttgacgtcagccctcattgatggcagccaaagtacagatgatactgaaatagtgagttatcattgggaagaaataaacgggcccttcatagaagagaagacttcagttgactctcccgtcttacgcttgtctaaccttgatcctggtaactatagtttcaggttgactgttacagactcggacggagccactaactctacaactgcagccctaatagtgaacaatgctgtggactacccaccagttgctaatgcaggaccaaatcacaccataactttgccccaaaactccatcactttgaatggaaaccagagcagtgacgatcaccagattgtcctctatgagtggtccctgggtcctgggagtgagggcaaacatgtggtcatgcagggagtacagacgccataccttcatttatctgcaatgcaggaaggagattatacatttcagctgaaggtgacagattcttcaaggcaacagtctactgctgtggtgactgtgattgtccagcctgaaaacaatagacctccagtggctgtggccggccctgataaagagctgatcttcccagtggaaagtgctaccctggatgggagcagcagcagcgatgaccacggcattgtcttctaccactgggagcacgtcagaggccccagtgcagtggagatggaaaatattgacaaagcaatagccactgtgactggtctccaggtggggacctaccacttccgtttgacagtgaaagaccagcagggactgagcagcacgtccaccctcactgtggctgtgaagaaggaaaataatagtcctcccagagcccgggctggtggcagacatgttcttgtgcttcccaataattccattactttggatggttcaaggtctactgatgaccaaagaattgtgtcctatctgtggatccgggatggccagagtccagcagctggagatgtcatcgatggctctgaccacagtgtggctctgcagcttacgaatctggtggagggggtgtacactttccacttgcgagtcaccgacagtcagggggcctcggacacagacactgccactgtggaagtgcagccagaccctaggaagagtggcctggtggagctgaccctgcaggttggtgttgggcagctgacagagcagcggaaggacacccttgtgaggcagctggctgtgctgctgaacgtgctggactcggacattaaggtccagaagattcgggcccactcggatctcagcaccgtgattgtgttttatgtacagagcaggccgcctttcaaggttctcaaagctgctgaagtggcccgaaatctgcacatgcggctctcaaaggagaaggctgacttcttgcttttcaaggtcttgagggttgatacagcaggttgccttctgaagtgttctggccatggtcactgcgaccccctcacaaagcgctgcatttgctctcacttatggatggagaaccttatacagcgttatatctgggatggagagagcaactgtgagtggagtatattctatgtgacagtgttggcttttactcttattgtgctaacaggaggtttcacttggctttgcatctgctgctgcaaaagacaaaaaaggactaaaatcaggaaaaaaacaaagtacaccatcctggataacatggatgaacaggaaagaatggaactgaggcccaaatatggtatcaagcaccgaagcacagagcacaactccagcctgatggtatccgagtctgagtttgacagtgaccaggacacaatcttcagccgagaaaagatggagagagggaatccaaaggtttccatgaatggttccatcagaaatggagcttccttcagttattgctcaaaggacagataatggcgcagttcattgtaaagtggaaggaccccttgaatccaagaccagtcagtgggagttacagcacaaaacccactcttttagaatagttcattgaccttcttccccagtgggttagatgtgtatccccacgtactaaaagaccggtttttgaaggcacaaaacaaaaactttgctcttttaactgagatgcttgttaatagaaataaaggctgggtaaaactctaaggtatatacttaaaagagttttgagtttttgtagctggcacaatctcatattaaagatgaacaacgatttctatctgtagaaccttagagaaggtgaatgaaacaaggttttaaaaagggatgatttctgtcttagctgctgtgattgcctctaaggaacagcattctaaacacggtttctcttgtaggacctgcagtcagatggctgtgtatgttaaaatagcttgtctaagaggcacgggccatctgtggaggtacggagtcttgcatgtagcaagctttctgtgctgacggcaacactcgcacagtgccaagccctcctggtttttaattctgtgctatgtcaatggcagttttcatctctctcaagaaagcagctgttggccattcaagagctaaggaagaatcgtattctaaggactgaggcaatagaaaggggaggaggagcttaatgccgtgcaggttgaaggtagcattgtaacattatcttttctttctctaagaaaaactacactgactcctctcggtgttgtttagcagtatagttctctaatgtaaacggatccccagtttacattaaatgcaatagaagtgattaattcattaagcatttattatgttctgtaggctgtgcgtttggactgccatagatagggataacgactcagcaattgtgtatatattccaaaactctgaaatacagtcagtcttaacttggatggcgtggttatgatactctggtccccgacaggtactttccaaaataacttgacatagatgtattcacttcatatgtttaaaaatacatttaagtttttctaccgaataaatcttatttcaaacatgaaagacaattaaaacattcccacccacaaagcagtactcccgagcaattaactggagttaattgtagcctgctacgttgactggttcagggtagttccccatccacccttggtcctgaggctggtggccttggtggtgcccttggcattttttgtgggaagattagaatgagagatagaaccagtgttgtggtaccaagtgtgagcacacctaaacaatatcctgttgcacaatgcttttttaacacatgggaaaactaggaatgcattgctgatgaagaagcaaggtatttaaacaccagggcaggagtgccagagaaaatgtttccccatgggttcttaaaaaaaattcagcttttaggtgcttttgtcatctcccgcagtattcatcctcatgggaccatcttatttttacttattgtaatttactggggaaaggcagaactaaaaagtgtgtcattttatttttaaaataattgctttgcttatgcctacactttctgtataactagccaattcaatactgtctatagtgttagaaggaaaatgtgatttttttttttaaccagtattgagcttcataagcctagaatctgccttatcaggtgaccagggttatggttgtttgcatgcaaatgtgaatttctggcataggggacagcagcccaaatgtaaagtcatcgggcgtaatgaggaagaagggagtgaacatttaccgctttatgtacataacatatgcagtttacatactcatttgatccttataatcaaccttgaagaggagatactatcattcttatgttgcagatagccctctgaaggcccagagaggttaaataacttcccagaggtcatggccaagaagtagtggctccaagaactgaatgcaaattttttaaactgtagagttctgctttccactaaacaaagaactcctgccttgatggatggagggcaaattctggtggaacttttgggccacctgaaagttctattcccaggactaagaggaatttcttttaatggatccagagagccaaggtcagagggagagatggcctgcatagtctcctgtggatcacacccgggccacccctccctctaggtttacagtggacttcttctgcccctcctccttttctgtccttggccatctcagcctggcctctctgatccttccatcacagaaggatcttgaatctctgggaaatcaaacatcacagtagtgatcagaaagtgagtcctgtcttgtcaccccatttctcatcagaacaaagcacgagatggaatgaccaaccagcattcttcatggtggactgcttatcattgaggatctttgggagataaagcacgctaagagctctggacagagaaaaacaggccctagaatatgggagtgggtgtttgtagggctcacaggctaacaagcactttagttgctggtttacattcaatgaaggaggattcatacccatggcattacaaggctaagcatgtgtatgactaaggaactatctgaaaaacatgcagcaaggtaagaaaatgtaccactcaacaagccagtgatgccaccttttgtgcgcggggaggagagtgactaccattgttttttgtgtgacaaagctatcatggactattttaatcttggttttattgcttaaaatatattatttttccctatgtgttgacaaggtatttctaatatcacactattaaatatatgcactaatctaaataaaggtgtctgtattttctgtaatgcttatttttagggggaaatttgttttctttatgcttcagggtagagggatttcccttgagtataggtcagcaaactgtggcctacagcctgtgtgtgcacgccccatgagccgaaaagtgggtcttatgttttcaaatggttaaaaataaataaaaaaatttgaaacatgtgaactatatgacattcagatttgtgttcataaataaagttttattggaacatatcc

SEQ ID NO: 1264 - protein, 1072 aa, Homo sapiens
MAPPTGVLSSLLLLVTIAGCARKQCSEGRTYSNAVISPNLETTRIMRVSHTFPVVDCTAACCDLSSCDLAWWFEGRCYLVSCPHKENCEPKKMGPIRSYLTFVLRPVQRPAQLLDYGDMMLNRGSPSGIWGDSPEDIRKDLPFLGKDWGLEEMSEYADDYRELEKDLLQPSGKQEPRGSAEYTDWGLLPGSEGAFNSSVGDSPAVPAETQQDPELHYLNESASTPAPKLPERSVLLPLPTTPSSGEVLEKEKASQLQEQSSNSSGKEVLMPSHSLPPASLELSSVTVEKSPVLTVTPGSTEHSIPTPPTSAAPSESTPSELPISPTTAPRTVKELTVSAGDNLIITLPDNEVELKAFVAPAPPVETTYNYEWNLISHPTDYQGEIKQGHKQTLNLSQLSVGLYVFKVTVSSENAFGEGFVNVTVKPARRVNLPPVAVVSPQLQELTLPLTSALIDGSQSTDDTEIVSYHWEEINGPFIEEKTSVDSPVLRLSNLDPGNYSFRLTVTDSDGATNSTTAALIVNNAVDYPPVANAGPNHTITLPQNSITLNGNQSSDDHQIVLYEWSLGPGSEGKHVVMQGVQTPYLHLSAMQEGDYTFQLKVTDSSRQQSTAVVTVIVQPENNRPPVAVAGPDKELIFPVESATLDGSSSSDDHGIVFYHWEHVRGPSAVEMENIDKAIATVTGLQVGTYHFRLTVKDQQGLSSTSTLTVAVKKENNSPPRARAGGRHVLVLPNNSITLDGSRSTDDQRIVSYLWIRDGQSPAAGDVIDGSDHSVALQLTNLVEGVYTFHLRVTDSQGASDTDTATVEVQPDPRKSGLVELTLQVGVGQLTEQRKDTLVRQLAVLLNVLDSDIKVQKIRAHSDLSTVIVFYVQSRPPFKVLKAAEVARNLHMRLSKEKADFLLFKVLRVDTAGCLLKCSGHGHCDPLTKRCICSHLWMENLIQRYIWDGESNCEWSIFYVTVLAFTLIVLTGGFTWLCICCCKRQKRTKIRKKTKYTILDNMDEQERMELRPKYGIKHRSTEHNSSLMVSESEFDSDQDTIFSREKMERGNPKVSMNGSIRNGASFSYCSKDR

SEQ ID NO: 1265 - DNA, 1940 bp, Homo sapiens
ggggcggtgcagaggcggcaggaagatggagttggggagttgcctggagggcgggagggaggcggcggaggaagagggcgagcctgaggtgaaaaagcggcgacttctgtgtgtggagtttgcctcggtcgcaagctgcgatgccgcagtggctcagtgcttcctggccgagaacgactgggagatggaaagggctctgaactcctacttcgagcctccggtggaggagagcgccttggaacgccgacctgaaaccatctctgagcccaagacctatgttgacctaaccaatgaagaaacaactgattccaccacttctaaaatcagcccatctgaagatactcagcaagaaaatggcagcatgttctctctcattacctggaatattgatggattagatctaaacaatctgtcagagagggctcgaggggtgtgttcctacttagctttgtacagcccagatgtgatatttctacaggaagttattcccccatattatagctacctaaagaagagatcaagtaattatgagattattacaggtcatgaagaaggatatttcacagctataatgttgaagaaatcaagagtgaaattaaaaagccaagagattattccttttccaagtaccaaaatgatgagaaaccttttatgtgtgcatgtgaacgtgtcaggaaatgagctttgccttatgacatcccatttggagagcaccagagggcatgctgcggaacgaatgaatcagttaaaaatggttttaaagaaaatgcaagaggctccagagtcagctacagttatatttgcaggagatacaaatctaagggatcgagaggttaccagatgtggtggtttacccaacaacattgtggatgtctgggagtttttgggcaaacctaaacattgccagtatacatgggatacacaaatgaactctaatcttggaataactgctgcttgtaaacttcgttttgatcgaatatttttcagagcagcagcagaagagggacacattattccccgaagtttggaccttcttggattagaaaaactggactgtggtagatttcctagtgatcactggggtcttctgtgcaacttagatataatattgtaaaatgcttttcaagtgtgggttttgccctgattgttgcaaatacaatttccaccttctggaaaggtaggtttgctgtggaggaaataatgtactagatcattgtcacagaaaaaccaactatgatttatggttgtgttttcagaattcaacattaaagattaatgtttatttaaacgaacacattcctgcattcaggatgtgaggccatttaataaaaagggcacaaagcctgtcagagttttcaacggtgcttatagctgccagctggattccaaacaggtaccacattgtctctgagctaatgtttatatttttccattcaggcaccgaaatagttaatatttgaaataagtcttcaaaagaaaacataagagattattgagttcttgggactggatcctttatttcataagttcagatcatcttaaatgaaaatgccatgattatctgcagttaagtagatgacagctattctacatcagacttgatttttgtcagctaattacataattggtaagctataattgaaaccttatggcttaaaattccttaactcctttttgattcatgtttgtagtcatgttgtcaacagaggcaaagttaagcttgatgatggttaaaatcggtttgatagcaccatgggacatttttctaacaaaaataaatgcatgaagagacatagccttttagttttgctaattgtgaaatggaaatgctttacaggaagtaaatgcaaattacttttaagtgtgctttaaagaaaaatattttccccacaagagaaatttaaataaagaattttatttgtttaaaaaaaaaaaaaaaa

SEQ ID NO: 1266 - protein, 362 aa, Homo sapiens
MELGSCLEGGREAAEEEGEPEVKKRRLLCVEFASVASCDAAVAQCFLAENDWEMERALNSYFEPPVEESALERRPETISEPKTYVDLTNEETTDSTTSKISPSEDTQQENGSMFSLITWNIDGLDLNNLSERARGVCSYLALYSPDVIFLQEVIPPYYSYLKKRSSNYEIITGHEEGYFTAIMLKKSRVKLKSQEIIPFPSTKMMRNLLCVHVNVSGNELCLMTSHLESTRGHAAERMNQLKMVLKKMQEAPESATVIFAGDTNLRDREVTRCGGLPNNIVDVWEFLGKPKHCQYTWDTQMNSNLGITAACKLRFDRIFFRAAAEEGHIIPRSLDLLGLEKLDCGRFPSDHWGLLCNLDIIL

SEQ ID NO: 1267 - DNA, 753 bp, Homo sapiens
gcgcttcgtcacaagggtgcgaggaaagtcagtgagcaaatcgcggaccaccggggctgccagctcgcctgactcccggcctcttgcgctcctaggggcggagaagggtgcgggctcttcgccctttgtgtcctccttctttcactaacttctggactttccagctcttccgaagttcgttcttgcgcaaagcccaaaggctggaaaaccgtccacgatgaccagcatgactcagtctctgcgggaggtgataaaggccatgaccaaggctcgcaattttgagagagttttgggaaagattactcttgtctctgctgctcctgggaaagtgatttgtgaaatgaaagtagaagaagagcataccaatgcaataggcactctccacggcggtttgacagccacgttagtagataacatatcaacaatggctctgctatgcacggaaaggggagcacccggagtcagtgtcgatatgaacataacgtacatgtcacctgcaaaattaggagaagatatagtgattacagcacatgttctgaagcaaggaaaaacacttgcatttacctctgtggatctgaccaacaaggccacaggaaaattaatagcacaaggaagacacacaaaacacctgggaaactgagagaacagcagaatgacctaaagaaacccaacaatgaatatcaagtatagatttgactcaaacaattgtaatttttgaaataaactagcaaaaccagaaaaaaaaaaaaaaaa

SEQ ID NO: 1268 - protein, 140 aa, Homo sapiens
MTSMTQSLREVIKAMTKARNFERVLGKITLVSAAPGKVICEMKVEEEHTNAIGTLHGGLTATLVDNISTMALLCTERGAPGVSVDMNITYMSPAKLGEDIVITAHVLKQGKTLAFTSVDLTNKATGKLIAQGRHTKHLGN

SEQ ID NO: 1269 - DNA, 2424 bp, Homo sapiens
tggtcgagtttttttttttttttttttttttggaaagcaaggatcacacttccccctccctgttccttaatcccttttctaaaaaggggggaaaatccggatggattttagggattggtctggtgtcagctgtgtcttattgcacacctaaatcctgattataggcttttcatttctccgcaaagcctttattttggcagttaagccaaatgtgttttccagaaagttagttattttctcctctttctttcctttctttcctccctttttcccgtctgaccccaaacgttattgtccaaacatgactggacagcagcttttgtttcttgaccctgtaatatgacagtctgctaatattgacagaaggtgcagtttttgggttatagtcgtgattttcgctaatcaatcatattagcaggaaaaaaaatgacttgtttctgttgtacttgagtcttaagaaaaagtgcccatagtttagtgacaatttccaaaggctttagtaccacctgtatttcaaaatgggggacccaaactcccggaagaaacaagctctgaacagactacgtgctcagcttagaaagaaaaaagaatctctagctgaccagtttgacttcaagatgtatattgcctttgtattcaaggagaagaagaaaaagtcagcactttttgaagtgtctgaggttataccagtcatgacaaataattatgaagaaaatatcctgaaaggtgtgcgagattccagctattccttggaaagttccctagagcttttacagaaggatgtggtacagctccatgctcctcgatatcagtctatgagaagggatgtaattggctgtactcaggagatggatttcattctttggcctcggaatgatattgaaaaaatcgtctgtctcctgttttctaggtggaaagaatctgatgagccttttaggcctgttcaggccaaatttgagtttcatcatggtgactatgaaaaacagtttctgcatgtactgagccgcaaggacaagactggaatcgttgtcaacaatcctaaccagtcagtgtttctcttcattgacagacagcacttgcagactccaaaaaacaaagctacaatcttcaagttatgcagcatctgcctctacctgccacaggaacagctcacccactgggcagttggcaccatagaggatcacctccgtccttatatgccagagtagagtactgaccagcaaaatggagaagatcagagaatgcagcagcagttttttttcttgttttcttaccactttattctttcagagtttaaagaaaatggactcatgcacagaacactatgcattttgaaacttgttcatcctggatttttttaaatcatttttatctcagaacttaaacaaaaattagatgtcgtgcacggactgtgtgaaagaagatgctttgcatatttgctgcactgcatcagtatcttactaaaaatgtgaaatgaaaggactattgtacactgaaatgcttaaatgtatctgaaagcacaaggtgatactcatttttatggtcttcccatttgtgctggtttttgcctctttgacatctgtcatcagtatttagagggtgagaagtgaatgtaacaggtataaataacatttttaaaaacaataactttgctataatcacagttgttccagagcactgtcagatacattctaatgaccagaactggtttaaaaaaagaaaatacaaccatgggaaagaaatcttaaatgaaaaacgcatctcattgtaggcatttttgcctcatattttactgggccatgtttgtttcctggtactcatgtattttttttttttccagatctctttccccaagttgctattgtaagagtattctgctgcgtgtggatgcagttatacacattaaagcagatctggagtctgaagtagctataaagcagctataaaacagaaatacatgcatagctgcagaaaccatgataggtagaggacttttcttttggttttgttttgttttgttttgttttgtttttggttttacagagaagagatttttattacaaagaaaaaaattccagtgaattgtgcagaaatgctggtttttacaccatcctaaagaaaaactttacaagggtgttttggagtagaaaaaaggttataaagttggaatcttaaattgtaaaattaaccattgagtgtcaaagttctaaaagcagaactcatttcgtgcaatgaacataaggaaagactactgtataggtttttttttttctccttttaaatgaagaaaagctttgcttaagggttgcatacttttattggagtaaatctgaatgatcctactcctttggagtaagactagtgcttaccagtttccaattgtatttagcttctgttggaatttgaaaaaaaaaaaaaaaaaaa

SEQ ID NO: 1270 - protein, 229 aa, Homo sapiens
MGDPNSRKKQALNRLRAQLRKKKESLADQFDFKMYIAFVFKEKKKKSALFEVSEVIPVMTNNYEENILKGVRDSSYSLESSLELLQKDVVQLHAPRYQSMRRDVIGCTQEMDFILWPRNDIEKIVCLLFSRWKESDEPFRPVQAKFEFHHGDYEKQFLHVLSRKDKTGIVVNNPNQSVFLFIDRQHLQTPKNKATIFKLCSICLYLPQEQLTHWAVGTIEDHLRPYMPE

SEQ ID NO: 1271 - DNA, 1215 bp, Homo sapiens
cgtcagttggtcacgtggttgttcggagcgggcgagcggagttagcagggctttactgcagagcgcgccgggcactccagcgaccgtggggatcagcgtaggtgagctgtggccttttgcgaggtgctgcagccatagctacgtgcgttcgctacgaggattgagcgtctccacccagtaagtgggcaagaggcggcaggaagtgggtacgcaggggcgcaaggcgcacagcctctagacgactcgctttccctccggccaacctctgaagccgcgtcctactttgacagctgcagggccgcggcctggtcttctgtgcttcaccatctacataatgaatcccagtatgaagcagaaacaagaagaaatcaaagagaatataaagaatagttctgtcccaagaagaactctgaagatgattcagccttctgcatctggatctcttgttggaagagaaaatgagctgtccgcaggcttgtccaaaaggaaacatcggaatgaccacttaacatctacaacttccagccctggggttattgtcccagaatctagtgaaaataaaaatcttggaggagtcacccaggagtcatttgatcttatgattaaagaaaatccatcctctcagtattggaaggaagtggcagaaaaacggagaaaggcgctgtatgaagcacttaaggaaaatgagaaacttcataaagaaattgaacaaaaggacaatgaaattgcccgcctgaaaaaggagaataaagaactggcagaagtagcagaacatgtacagtatatggcagagctaatagagagactgaatggtgaacctctggataattttgaatcactggataatcaggaatttgattctgaagaagaaactgttgaggattctctagtggaagactcagaaattggcacgtgtgctgaaggaactgtatcttcctctacggatgcaaagccatgtatatgaaatgcattaatatttgactgttgagaattttactgccgaagtttacctccactagttctttgtagcagagtacataactacataatgccaactctggaatcaaatttccttgtttgaatcctgggaccctattgcattaaagtacaaatactatgtatttttaatctatgatggtttatgtgaataggattttctcagttgtcagccatgacttatgtttattactaaataaacttcaaactcctgttgaa

SEQ ID NO: 1272 - protein, 209 aa, Homo sapiens
MNPSMKQKQEEIKENIKNSSVPRRTLKMIQPSASGSLVGRENELSAGLSKRKHRNDHLTSTTSSPGVIVPESSENKNLGGVTQESFDLMIKENPSSQYWKEVAEKRRKALYEALKENEKLHKEIEQKDNEIARLKKENKELAEVAEHVQYMAELIERLNGEPLDNFESLDNQEFDSEEETVEDSLVEDSEIGTCAEGTVSSSTDAKPCI

SEQ ID NO: 1273 - DNA, 2452 bp, Homo sapiens
cgcaagaatgcatacaaactccagggctgctctctcctggagagggagggaggggatttaaaaacctgcagcaacatgggggaggaggctgtttgtccttctctctctggggaagtaactcgctcaaactgccttccttgctgagctgcttcgcgtagctttgaggaaggtctagtgaaattggtctttccattacatctggatgtactaccagagagttctgctgctgttgttttttttagcttttctttctttgagtctttaaagggcaattgtcgacactctgcaaacataccgatttgttgtctgcccactttggagtcttcaatctgggcagtaactatttaccctttttcctgctagcctgtccccctctctggattgaagtcacctgctaagacaatggactaccgaccagactcccggaaatcatgttggtaggatcccagtctttttcgcctggagggcccaatgggatcattagaagccagtcctttgcgggtttcagcggcctccaggaaaggcgatccaggtgtaactccttcattgaaaattcctccgctctcaagaagcctcaggccaaactgaagaaaatgcacaatttaggccacaaaaacaacaatccccccaaagagcctcagcctaaaagggtggaagaagtctacagggccttgaaaaatggacttgatgaatatctggaggttcaccagacggagctggacaagttgacagctcagttaaaagatatgaaaagaaactctcgcctgggtgtactgtatgacctagacaagcaaattaaaacaattgaaagatacatgagacgcctggagtttcatataagtaaggtagatgaactctatgaagcttattgtatccagcgacgcctccaggatggtgccagcaaaatgaagcaagccttcgcaacatcccctgccagcaaagctgcccgggagagtctgacagagatcaatcggagcttcaaggagtacacagagaatatgtgcaccattgaagtggagctagagaatctgctgggagaattctccatcaagatgaaaggtctggctggctttgcacgcctctgtcctggagatcaatatgaaattttcatgaagtatggccggcagcggtggaaactgaaaggcaaaatagaagtaaatggcaagcagagctgggatggagaagaaacagtttttctgcccctgatagttgggttcatctccatcaaggtcacggagctcaaagggctagcaactcacatcctggtaggtagcgtgacctgtgagaccaaagagctgtttgcagcccgacctcaggtagtggctgtcgacatcaatgaccttggtaccatcaaactgaacctggaaatcacctggtatccatttgacgtggaggacatgaccgcatcctcaggcgctgggaacaaggcagcagcccttcagaggagaatgtccatgtacagccagggtaccccggaaacgcccaccttcaaagaccactccttcttttcaaatctacctgatgacatctttgaaaatggaaaggcagccgaggagaaaatgccactgtcgctcagcttcagtgacctgcccaacggggactgcgccctcacctcccactcaacaggctccccttccaactcaacaaatccagaaattaccatcacccctgcggagtttaacctcagcagcttggcctcccagaatgagggtatggatgacaccagctcagcatcttccaggaactccctgggagaaggccaagagccaaagtcacacctgaaggaggaagacccagaggagcccagaaaacctgcctcggccccatctgaggcttgccgccgacagtcctcaggtgctggggctgagcacctgttccttgagaatgatgttgcagaagcacttctgcaagagtctgaggaggcctctgagctcaagcctgtggaactggacacttcggaaggaaacatcacaaagcagctggtcaagaggctcacatctgcagaggtgccaatggccacagacaggctgctctctgagggttctgttggtggagaatctgaaggctgcagatcctttctagatggaagcttagaggatgcttttaatgggcttttacttgcattagaaccacataaagagcagtataaagagtttcaggatctgaaccaagaagtcatgaatttggatgatattctaaaaaagtagagaagatcctctaatggatcccagtgtgcccatccctcaacctcctcagtgatcaactcatggccaatcttgtttcctattcttcaacctgctgacttccctctggattcttctgcaaccagtcccagatattgtgccattttatccatggttgtacttcttttttggatataaagatttttaaatgcattttttaaatgctaacaaaaaataaaaacttgaaacaaaaaaaaaaaaaaaaaaaa

SEQ ID NO: 1274 - protein, 591 aa, Homo sapiens
MLVGSQSFSPGGPNGIIRSQSFAGFSGLQERRSRCNSFIENSSALKKPQAKLKKMHNLGHKNNNPPKEPQPKRVEEVYRALKNGLDEYLEVHQTELDKLTAQLKDMKRNSRLGVLYDLDKQIKTIERYMRRLEFHISKVDELYEAYCIQRRLQDGASKMKQAFATSPASKAARESLTEINRSFKEYTENMCTIEVELENLLGEFSIKMKGLAGFARLCPGDQYEIFMKYGRQRWKLKGKIEVNGKQSWDGEETVFLPLIVGFISIKVTELKGLATHILVGSVTCETKELFAARPQVVAVDINDLGTIKLNLEITWYPFDVEDMTASSGAGNKAAALQRRMSMYSQGTPETPTFKDHSFFSNLPDDIFENGKAAEEKMPLSLSFSDLPNGDCALTSHSTGSPSNSTNPEITITPAEFNLSSLASQNEGMDDTSSASSRNSLGEGQEPKSHLKEEDPEEPRKPASAPSEACRRQSSGAGAEHLFLENDVAEALLQESEEASELKPVELDTSEGNITKQLVKRLTSAEVPMATDRLLSEGSVGGESEGCRSFLDGSLEDAFNGLLLALEPHKEQYKEFQDLNQEVMNLDDILKK

SEQ ID NO: 1275 - DNA, 811 bp, Homo sapiens
tttgcagacgccgccgccgaggaaaaccgtgtgctattagccatggtcaaccccaccatgttcttcgacattgccgtcgacggtgagcccttgggccgcatctcctttgaggtaaggggcctggaaaccaagaagtgactgctcatctaatccataaagctatgttaacagattggagctgtttgcagacaaggtcccaaagacagcagaaaattttcgtgctctgagcactggagagaaaggatttggttataagggttcctgctttcacagaattattccagggtttatgtgtcagggtggtgacttcacacgccataatggcactggtggcaagtcaccactgggagaaatttgaagatgagaacttcatcctaaagcatacaggtcctgaaatcttgtccatggcaaatgctggacccaacacaaatggttcccagtttttcatctgcactgccaagactgagtggttggatggcaagcatgtggtctttggcaaagtgaaagaaggcatgaatattgtggaggccatggagcgctttgggtccaggaatggcaagaccagcaagaagatcaccattgctgactgtggacaactcgaataagtttgacttgtgttttatcttaaccaccagatcattccttctgtagctcaggagagcacccctccaccccatttgcttgcagtatcccagtatctttgtgctcttgctgcagttccctttgggttccatgttttccttgttccctcccatgcctagctggattgcagagttaagtttatgattatgaaataaaaactaaataacaa

SEQ ID NO: 1276 - DNA, 2201 bp, Homo sapiens
atcctgttgtgcctatcacctgttgaagttgccagtcttaaggaagggatcaatttctttcgcaataagagcactggcaaagactacgtcttgtacaagaataagagccgactgagggcatgcaagaatatgtgcaagcaccaaggaggcctgttcataaaagatatcgaggatttagccggaagttgttgaaatggatgaaaacaacggacttttgcttttagaactgaatcctcctaacccttgggacttacagcccagatctcctgaagagttggcttttggagaagtacagataacatatctcactcatgcctgcatggacctcaagttaggagacaagagaatggtgtttgacccttggttaatcggtcctgcttttgcccgtggatggtggttgctccatgagcctccatctgattggctggagaggctgtgccaggcagacctcgtttacatcagtcatctgcactcagaccacctgagttaccccacactgaaaaagcttgctgggagaagaccagatattcccatttatgttggaaacacagaaaggcctgtattttggaatctgaatcagagcggtgtccagttgactaatatcaatgtcgtgccatttggaatatggcagcaggtggacaaaaatcttcgattcatgatcttgatggatggtgttcatcctgagatggacacttgcattattgtggagtacaaaggtcataaaatactcaatacagtagactgcaccagacccaatgggggaaggctgcctatgaaggttgctctaatgatgagtgattttgctggaggagcatcaggctttccaatgactttcagtggtggaaaatttacggaggaatggaaagcccaattcattaaaacagaaaggaagaagctcctgaactacaaggcttggctggtgaagaacctgcaaccccgaatttattgtccctttgctgggtattttgtggaatctcacccatcagacaagtacatcaaggaaacaaacaccaaaaatgacccaaatgaactcaacaatcttatcaagaaaaactctgatgtgataacatggacccctcgaccgggagccacccttgatctgggaagaatgctgaaggatccaacagacagcaagggcatcatagagcctccagaggggacaaaaatttacaaggattcctgggattttgaaccttatttggaaatcttgaatgctgctctaggagatgaaatatttcttcactcatcctggataaaagaatacttcacttgggctggatttaaagattacaaccttgtggtcaggatgattgagacagatgaggacttcaatccttttcctggaggatatgactatttggttgactttttagatttatccttcccaaaagaaagaccacaacgagaacatccctatgaggaaatccatagccgggtggatgtcatcagacacgtggtgaagaatggtctactctgggatgagttgtatataggattccaaacacggctccagcgggatcctgacatataccatcacctgttttggaatcattttcaaataaaactccccctcacaccacccaactggaagtcattcctgatgtgctgtgagcagaatgggcctgcgattttgcaagaatgcaaaaccacatgaaaatttcaagaattcactgatctgatgcaaaataaaaatttatcattacatcttgaacccaggaagcttacagcaaagagactatgctttatgacgtcagcaatagataattccacgttgcctttgtgatttgtatatatagcttacatttgtggaccactacatagccagattcaaaaatattttacttgttccatccacagttctctacagaaagaaccaatgaacccaataggaacaaattctctgtggaaaacaaagcatagctgtagtagatacgaatccaatcacagaggaaacaggaagagaaaaacatccaagactacagtgaaaactggaaatggtctgttttcgtgatattcgtatgattaagatgcaaattttttcttaggaaaatgtgattgttaactagcattctgttttacatgttgacatttctaacacacacaccactgatttgaacttcaaaatttattttctgattatatatgctaggtctgattctgaagatacaagaattcaatggtggaatttgtctcctgaaatt

SEQ ID NO: 1277 - DNA, 2307 bp, Homo sapiens
ccaaagacatcctttggtgatacttactgtgggattcagagtggggtgcagaggacgaccctgcaaaggcacggactataagagagatctgtgcagctgcgcctcagggggtgtcctgggcccctgggcatgacaggagggggaccacttgcagttctactggaaaatttaccacccttccagaatcctctgaagatatacaggtcgcaactagagtgagacccgagtactgccttgggtcagaatggctagagaaccgagaaaaaacgcagccctggacgcccagtctgcagaagaccagacggggctcctgaccgtgaaggtggagaaggaggaagcctccgccttgacggcggaggtgagagcaccctgcagccctgctcggggccccgaacgctcccgccagcgcttccgaggcttccgctacccggaggctgcgggcccccgcgaggcgttgagccggctccgagaactctgcggacaatggctgcagcctgagatgcacagcaaggagcagatcctggagctgctggtgctggagcagttcctgaccatcctgccggggaatctgcagagctgggtgcgggagcagcatccagagagcggggaggaggtggtggtgctattggagtatttggagaggcagctggatgagccggcgccgcaggttcccgttggtgaccaggggcaagaactgctctgttgcaagatggcactattgacacaaactcaagggtctcaaagtagccagtgccagccaatgaaggctctgttcaagcatgaatctctgggatcccagcccttacacgatagagttctccaggttcctgggcttgcccagggagggtgctgcagagaagatgcaatggtagcttccaggctcactccagggtcccagggtttgctgaaaatggaagatgtggccctgaccctcactcctgggtggacacagctggattcatctcaggtgaacctctacagagatgaaaagcaggagaaccatagcagcctggtctcccttggtggtgaaatacagactaagagcagggacttgcctccagtcaagaagcttccagaaaaggagcatgggaagatatgccacctgagggaagacattgcccagattcctacacatgcagaagctggtgaacaggagggcaggttacaaagaaagcagaaaaatgccatagggagtaggcgacattattgccatgaatgtggaaagagttttgctcaaagttcaggcctgactaaacacaggagaatccacactggtgagaaaccctatgaatgtgaagactgtggaaagaccttcattgggagctctgcccttgtcattcatcagagagtccacactggtgagaagccatatgagtgtgaagaatgtggtaaggtcttcagtcacagctcaaaccttatcaaacaccagagaacccacactggggagaagccctatgagtgtgatgactgtgggaagaccttcagccagagctgcagcctccttgaacatcacaaaattcatactggggagaagccataccagtgcaatatgtgtggcaaagcctttaggcggaattcacatctcctgagacatcagaggattcatggtgataaaaatgttcagaatcctgagcacggggagtcctgggaaagtcagggtaggacggaaagccagtgggaaaatactgaggctcccgtgtcttataaatgtaatgagtgtgagagaagtttcacacggaatagaagtcttattgaacatcagaaaatccacactggtgagaaaccctatcagtgtgacacatgtggaaaaggtttcactcgaacttcataccttgttcaacatcagagaagccatgtagggaaaaaaactctttcacagtgacccatggtattcatgccaacattggtgctcatttgtcactgaactgaagccaccctggagcccttaatggttacagaaattgtggaccagggctttatttaccactatacatcatcgggtattagaaaatgtagtctggctgagacgatgagttatcttctacattctagaaagtgattggaagaagtcatttgataagaggccatgggagagtggtctggaagttgtaggacctaaaatagtttgttctcacccagtgtatttaaatggccttctggacttgttaattgccctcagccagcactttaggacatctggttggatggctctgatgtggggggctgctgctctgaccattcattttgcctctaatgaatctttcacaaattggtcagatccatgagaaaaaaaaaaaaaaaaaaaaa

SEQ ID NO: 1278 - protein, 545 aa, Homo sapiens
MAREPRKNAALDAQSAEDQTGLLTVKVEKEEASALTAEVRAPCSPARGPERSRQRFRGFRYPEAAGPREALSRLRELCGQWLQPEMHSKEQILELLVLEQFLTILPGNLQSWVREQHPESGEEVVVLLEYLERQLDEPAPQVPVGDQGQELLCCKMALLTQTQGSQSSQCQPMKALFKHESLGSQPLHDRVLQVPGLAQGGCCREDAMVASRLTPGSQGLLKMEDVALTLTPGWTQLDSSQVNLYRDEKQENHSSLVSLGGEIQTKSRDLPPVKKLPEKEHGKICHLREDIAQIPTHAEAGEQEGRLQRKQKNAIGSRRHYCHECGKSFAQSSGLTKHRRIHTGEKPYECEDCGKTFIGSSALVIHQRVHTGEKPYECEECGKVFSHSSNLIKHQRTHTGEKPYECDDCGKTFSQSCSLLEHHKIHTGEKPYQCNMCGKAFRRNSHLLRHQRIHGDKNVQNPEHGESWESQGRTESQWENTEAPVSYKCNECERSFTRNRSLIEHQKIHTGEKPYQCDTCGKGFTRTSYLVQHQRSHVGKKTLSQ

SEQ ID NO: 1279 - DNA, 1639 bp, Homo sapiens
caccagccagcctctgggtctgtagcaaccgcccagcgttgaggcgcggctcatgcccccagtatcccggtccagctattccgaggacatcgtgggctctcggagaaggcgacgcagctcctcggggagcccaccatccccgcagagcagatgttcctcttgggatggctgttcccgctctcactcccgcggccgtgagggcctcaggcctccttggagtgagttggacgtgggcgctctttacccctttagtcgctctgggtcgcgagggcggctcccaagattccgcaactacgccttcgcgtcctcctggtcgacctcgtatagtggatatcgctaccatcgtcactgctatgcagaagaacggcagtcagcggaagactacgagaaggaagagagccatcggcagaggaggctgaaggagagagagaggattggggaattgggagcgcctgaagtgtgggggccgtctccaaagttccctcagctagattctgacgaacataccccagttgaggatgaagaagaggtaacgcatcagaaaagcagcagttcagattccaactcggaagaacataggaaaaagaagaccagtcgttcaagaaacaagaaaaaaagaaagaataagtcgtctaaaagaaagcataggaaatattctgatagtgacagtaactcagagtctgacacaaattctgactctgatgatgataaaaagagagttaaagccaagaagaaaaagaagaaaaagaaacacaaaacaaagaaaaagaagaataagaaaaccaaaaaagaatccagtgactcaagctgtaaagactcagaagaggacttgtcagaagctacctggatggagcagccaaatgtggcagatactatggatttaatagggccagaagcacctataatacatacctctcaagatgaaaaacctttgaagtatggccatgctttgcttcccggtgaaggtgcagctatggctgagtatgtaaaagctggaaagcgaatcccacgaagaggtgaaattgggttgacaagtgaagagatcggttcttttgaatgctcaggttatgtcatgagtggtagcaggcatcgcagaatggaggctgtacgactgcgtaaggagaaccagatctacagtgctgatgagaagagagctcttgcatcctttaaccaagaagagagacgaaagagagaaagtaagattttagccagtttccgagagatggtgcacaaaaagacaaaagagaaagatgacaagtaaggacttacttgttgcacagcaggaattttaacaacaaaaattttatgtgaccaaaagtgttaaaaggctttacagtgctactgtacttaccatattagtaagtccctcaggaaaaagcttcttttgagatatctttagcagcttattttttgttattttaactttaaaaagtaatatgtgcacatggttttaaaaatattcaaccattataggaggagagttagtaaaaagtgaatctttcactttagcccctgacacctttcccccaaaaatatatattttggtgtcttatatacagaatatacattctgtgcatatacaagagtatatgttgcagcataaagattaaaagctattaaagttttttttcgctcgtta

SEQ ID NO: 1280 - protein, 402 aa, Homo sapiens
MPPVSRSSYSEDIVGSRRRRRSSSGSPPSPQSRCSSWDGCSRSHSRGREGLRPPWSELDVGALYPFSRSGSRGRLPRFRNYAFASSWSTSYSGYRYHRHCYAEERQSAEDYEKEESHRQRRLKERERIGELGAPEVWGPSPKFPQLDSDEHTPVEDEEEVTHQKSSSSDSNSEEHRKKKTSRSRNKKKRKNKSSKRKHRKYSDSDSNSESDTNSDSDDDKKRVKAKKKKKKKKHKTKKKKNKKTKKESSDSSCKDSEEDLSEATWMEQPNVADTMDLIGPEAPIIHTSQDEKPLKYGHALLPGEGAAMAEYVKAGKRIPRRGEIGLTSEEIGSFECSGYVMSGSRHRRMEAVRLRKENQIYSADEKRALASFNQEERRKRESKILASFREMVHKKTKEKDDK

SEQ ID NO: 1281 - DNA, 2732 bp, Homo sapiens
agcggagaagaaagcgctccgaagagctagagctgacactcggcgatgagctaagacgctgtttcagagcgtttgggtcctctgaggccccttgaccaggagtgtctctgaagatacagtccaaagaaagttctccaaaacaaggagaacagtctgaagctggggatggcaacagcattggtgagtgcccattccctggctcccctgaatctgaagaaggaggggcttcgggtagtgagggaggatcactactctacttgggaacagggattcaagctgcaaggaaacagtaaaggccttggacaggagccattgtgcaaacaattcaggcagttgcgttatgaagagaccacaggacctcgagaagcactaagtcggctccgggagctctgtcaacagtgctacagcccgagacccataccaaggagcagatcctggagctgctggtgctggagcagtttctgatcatcctgcctaaggagctccaggcccgggtgcaggagcatcacccagagagcagggaggacgtggttgttgttctggaggatttgcagctggatcttggagaaacaggacaacaggtggacccagaccagccaaagaaacaaaaaatacttgtggaggagatggcccctctgaaaggagtacaggaacagcaggttcggcatgagtgtgaagttacaaagcctgagaaagagaagggtgaggagacaaggattgagaatgggaagcttattgtagtaacagactcttgtggaagagtagagtcatctgggaaaatatctgaacccatggaggctcataatgagggctctaacttggaaaggcatcaggccaagcccaaagagaagattgagtataaatgctcagaacgtgagcagagattcatccagcacttggacctgattgaacatgcgagtacacacacgggaaagaaactctgcgagtctgatgtgtgtcagagttccagtcttacaggacataagaaagtcctctctagagagaaaggtcatcagtgtcatgagtgtgggaaagcctttcagaggagttcacacctcgtcagacatcagaaaatccatcttggtgagaagccttatcagtgcaatgagtgtggcaaagtctttagccagaatgcaggccttttggaacatctcagaattcatactggagagaaaccttatctatgtatccattgtggaaaaaattttaggcgcagctctcaccttaatcgacatcagagaattcacagtcaggaggagccctgtgagtgcaaggagtgtggaaaaacctttagtcaggccttactcctcacccaccatcagagaatccatagtcactccaaaagccatcaatgtaacgagtgtggaaaagctttcagtttgacctcagaccttattcgacaccacagaattcatactggagaaaaacctttcaagtgtaacatatgccagaaagccttccgactaaactcacaccttgctcagcatgtaagaatccacaatgaagaaaaaccctatcagtgtagtgaatgtggagaagccttcaggcaaaggtcaggtctttttcaacatcagagatatcaccacaaagacaaactggcttgatgaggtgttctctccttgtagaacatcagagaaggcacattgactagcaaacagcactttaggaaaagtcaccgtagcccactgtggcatcagaaaattcttgggggctgagttggaggctccctgcctctattctctctcctttgctttccttgaagtcagctttggaccacaataatttcactgtagatgatatgctaggatcaaagttaaacagcattcttcactgcaggacatctcagagcatgtaacataactgcatgattatatactctaagcaatagagagcttcatgactgagtaagagttttgaagtcagcagtgaatcaagtgcccacagatttgcaggcttaagcagaacaagggaagattgatatttttggatatgctatagcagctttctcctatgaaataaaactgatgatgtttggaagtatactactctcaaaggtgtctttaaagtacaggttaatggtgaacattttcccccagtggcttcacctcattcctcccactggccttaccccttccttccccagtggaagcattttcaaaagcaaagataattttcgctggtgaacttcagaacttgccttcagggttagcttcatgtaattttaccatttcccatccccattccccaccacattatgtcaagattcaagttataaattaacgttttacttagactttgaaagagatttcatgagtaatttgaatgaaccttgctgaattaatctgaatagcaactgtctgacttgataactccagtgccagtatagtggctgctgcatagacactattcagtaaatgtctgatgaaagaaattggactttttccctttaatactgatgatgcaattttgaaatgttgcttgttctggaatacttcggaagttaaacaataaagtcagcttggagaggagatcatgatctttatactgtgaatagcagaatgtcacagatgaagaatattaaaattaggggcgtccactccaaaacatatcaccagagtgacaacttcagccctcagcctctgcaatccatatatatcctggtcttgggagtccatagaatactgtttccttctaataaaggtttcaaacaaaaaaaaaaaaaaaaaaaaaaa

SEQ ID NO: 1282 - protein, 325 aa, Homo sapiens [sequence omitted]

SEQ ID NO: 1283 - DNA, 3062 bp, Homo sapiens
agcggagaagaaagcgctccgaagagctagagctgacactcggcgatgagctaagacgctgtttcagagcgtttgggtcctctgaggccccttgaccaggagtgtctctgaagatacagtccaaagaaagttctccaaaacaaggagaacagtctgaagctggggatggcaacagcattggtgagtgcccattccctggctcccctgaatctgaagaaggaggggcttcgggtagtgagggaggatcactactctacttgggaacagggattcaagctgcaaggaaacagtaaaggccttggacaggagccattgtgcaaacaattcaggcagttgcgttatgaagagaccacaggacctcgagaagcactaagtcggctccgggagctctgtcaacagtgctacagcccgagacccataccaaggagcagatcctggagctgctggtgctggagcagtttctgatcatcctgcctaaggagctccaggcccgggtgcaggagcatcacccagagagcagggaggacgtggttgttgttctggaggatttgcagctggatcttggagaaacaggacaacaggtggtaagggtcagatgtgctctttttcaggaatgcaggaattgagatctctggccagacaggtggacatgggctcatcagcggaaggagaattactaagctttgattcagtttttttccagtctagctgttaatttccttaggtcttacctcaaccttacctggcccttgcttggagaaaactgaatgtgcaccagattccccatcttcttttctttgcccctctggggtttctctttcttctcttttttaacacctaggtgttttactgaacagcagtttcctaaacccacatatatctaattatgcctccatatacctaattgtccctaggacccagaccagccaaagaaacaaaaaatacttgtggaggagatggcccctctgaaaggagtacaggaacagcaggttcggcatgagtgtgaagttacaaagcctgagaaagagaagggtgaggagacaaggattgagaatgggaagcttattgtagtaacagactcttgtggaagagtagagtcatctgggaaaatatctgaacccatggaggctcataatgagggctctaacttggaaaggcatcaggccaagcccaaagagaagattgagtataaatgctcagaacgtgagcagagattcatccagcacttggacctgattgaacatgcgagtacacacacgggaaagaaactctgcgagtctgatgtgtgtcagagttccagtcttacaggacataagaaagtcctctctagagagaaaggtcatcagtgtcatgagtgtgggaaagcctttcagaggagttcacacctcgtcagacatcagaaaatccatcttggtgagaagccttatcagtgcaatgagtgtggcaaagtctttagccagaatgcaggccttttggaacatctcagaattcatactggagagaaaccttatctatgtatccattgtggaaaaaattttaggcgcagctctcaccttaatcgacatcagagaattcacagtcaggaggagccctgtgagtgcaaggagtgtggaaaaacctttagtcaggccttactcctcacccaccatcagagaatccatagtcactccaaaagccatcaatgtaacgagtgtggaaaagctttcagtttgacctcagaccttattcgacaccacagaattcatactggagaaaaacctttcaagtgtaacatatgccagaaagccttccgactaaactcacaccttgctcagcatgtaagaatccacaatgaagaaaaaccctatcagtgtagtgaatgtggagaagccttcaggcaaaggtcaggtctttttcaacatcagagatatcaccacaaagacaaactggcttgatgaggtgttctctccttgtagaacatcagagaaggcacattgactagcaaacagcactttaggaaaagtcaccgtagcccactgtggcatcagaaaattcttgggggctgagttggaggctccctgcctctattctctctcctttgctttccttgaagtcagctttggaccacaataatttcactgtagatgatatgctaggatcaaagttaaacagcattcttcactgcaggacatctcagagcatgtaacataactgcatgattatatactctaagcaatagagagcttcatgactgagtaagagttttgaagtcagcagtgaatcaagtgcccacagatttgcaggcttaagcagaacaagggaagattgatatttttggatatgctatagcagctttctcctatgaaataaaactgatgatgtttggaagtatactactctcaaaggtgtctttaaagtacaggttaatggtgaacattttcccccagtggcttcacctcattcctcccactggccttaccccttccttccccagtggaagcattttcaaaagcaaagataattttcgctggtgaacttcagaacttgccttcagggttagcttcatgtaattttaccatttcccatccccattccccaccacattatgtcaagattcaagttataaattaacgttttacttagactttgaaagagatttcatgagtaatttgaatgaaccttgctgaattaatctgaatagcaactgtctgacttgataactccagtgccagtatagtggctgctgcatagacactattcagtaaatgtctgatgaaagaaattggactttttccctttaatactgatgatgcaattttgaaatgttgcttgttctggaatacttcggaagttaaacaataaagtcagcttggagaggagatcatgatctttatactgtgaatagcagaatgtcacagatgaagaatattaaaattaggggcgtccactccaaaacatatcaccagagtgacaacttcagccctcagcctctgcaatccatatatatcctggtcttgggagtccatagaatactgtttccttctaataaaggtttcaaacaaaaaaaaaaaaaaaaaaaaaaa

SEQ ID NO: 1284 - protein, 325 aa, Homo sapiens [sequence omitted]

SEQ ID NO: 1285 - DNA, 2328 bp, Homo sapiens
agcggagaagaaagcgctccgaagagctagagctgacactcggcgatgagctaagacgctgtttcagagcgtttgggtcctctgaggccccttgaccaggagtgtctctgaagatacagtccaaagaaagttctccaaaacaaggagaacagtctgaagctggggatggcaacagcattggacccagaccagccaaagaaacaaaaaatacttgtggaggagatggcccctctgaaaggagtacaggaacagcaggttcggcatgagtgtgaagttacaaagcctgagaaagagaagggtgaggagacaaggattgagaatgggaagcttattgtagtaacagactcttgtggaagagtagagtcatctgggaaaatatctgaacccatggaggctcataatgagggctctaacttggaaaggcatcaggccaagcccaaagagaagattgagtataaatgctcagaacgtgagcagagattcatccagcacttggacctgattgaacatgcgagtacacacacgggaaagaaactctgcgagtctgatgtgtgtcagagttccagtcttacaggacataagaaagtcctctctagagagaaaggtcatcagtgtcatgagtgtgggaaagcctttcagaggagttcacacctcgtcagacatcagaaaatccatcttggtgagaagccttatcagtgcaatgagtgtggcaaagtctttagccagaatgcaggccttttggaacatctcagaattcatactggagagaaaccttatctatgtatccattgtggaaaaaattttaggcgcagctctcaccttaatcgacatcagagaattcacagtcaggaggagccctgtgagtgcaaggagtgtggaaaaacctttagtcaggccttactcctcacccaccatcagagaatccatagtcactccaaaagccatcaatgtaacgagtgtggaaaagctttcagtttgacctcagaccttattcgacaccacagaattcatactggagaaaaacctttcaagtgtaacatatgccagaaagccttccgactaaactcacaccttgctcagcatgtaagaatccacaatgaagaaaaaccctatcagtgtagtgaatgtggagaagccttcaggcaaaggtcaggtctttttcaacatcagagatatcaccacaaagacaaactggcttgatgaggtgttctctccttgtagaacatcagagaaggcacattgactagcaaacagcactttaggaaaagtcaccgtagcccactgtggcatcagaaaattcttgggggctgagttggaggctccctgcctctattctctctcctttgctttccttgaagtcagctttggaccacaataatttcactgtagatgatatgctaggatcaaagttaaacagcattcttcactgcaggacatctcagagcatgtaacataactgcatgattatatactctaagcaatagagagcttcatgactgagtaagagttttgaagtcagcagtgaatcaagtgcccacagatttgcaggcttaagcagaacaagggaagattgatatttttggatatgctatagcagctttctcctatgaaataaaactgatgatgtttggaagtatactactctcaaaggtgtctttaaagtacaggttaatggtgaacattttcccccagtggcttcacctcattcctcccactggccttaccccttccttccccagtggaagcattttcaaaagcaaagataattttcgctggtgaacttcagaacttgccttcagggttagcttcatgtaattttaccatttcccatccccattccccaccacattatgtcaagattcaagttataaattaacgttttacttagactttgaaagagatttcatgagtaatttgaatgaaccttgctgaattaatctgaatagcaactgtctgacttgataactccagtgccagtatagtggctgctgcatagacactattcagtaaatgtctgatgaaagaaattggactttttccctttaatactgatgatgcaattttgaaatgttgcttgttctggaatacttcggaagttaaacaataaagtcagcttggagaggagatcatgatctttatactgtgaatagcagaatgtcacagatgaagaatattaaaattaggggcgtccactccaaaacatatcaccagagtgacaacttcagccctcagcctctgcaatccatatatatcctggtcttgggagtccatagaatactgtttccttctaataaaggtttcaaacaaaaaaaaaaaaaaaaaaaaaaa

SEQ ID NO: 1286 - protein, 325 aa, Homo sapiens [sequence omitted]

SEQ ID NO: 1287 - DNA, 3082 bp, Homo sapiens
ctggaggcgccggcagcgcccgccagacccgccagcccagcggcccgggctctggggaaaccggcgctcccgacaggggagcaccgggcctctgagctccctcgggagcctttcacgaggtcagctacgtctttgttgtgcgcgttcctgaacttttggtccattaaccaacaattagacacgccggtattcagtgcctggcgcggtgctagatgctgggtgtaatctcagaaaaatacattcaggggcgcgcctgagggtgctggctgctggcatctcaggtgctttacgtgcattcgtgaagaagcccatcagtatttcttgaataccagaccccaagctaagtgaagctttagcctctaagctcaacatgtatgaagctttgccaggccctgctcctgaaaatgaagatggccttgtgaaagtgaaggaggaagatcccacctgggagcaggtgtgcaactcacaggagggcagctcccacactcaggagatttgccgcctgcgctttcggcacttctgctaccaggaggctcacggaccccaggaagctctggcccaactccgagaactttgtcatcaatggctgagaccggagatgcacaccaaggaacagataatggaactgctggtgctggagcagttcctgaccatcctgcccaaggagctccagccctgtgtgaagacatatcctctggagagtggagaggaggcagtgacagtgctggagaatctagagacaggaagtggagacacaggacaacaggcctctgtctatattcagggacaggacatgcacccaatggtggcagaatatcaaggagtctctttggagtgtcagagcctccagctcctgcctgggataaccaccctgaagtgtgaacctccacagcgtcctcaagggaacccccaagaagtgagtgggcctgttccccacggatcagctcatctccaggaaaaaaaccccagagacaaggctgtagtgcctgtgtttaacccagtcaggtcccagacattggtgaagactgaggaagaaacagcccaggccgttgctgcagagaagtggtcacatctgagtctgactcggaggaacctctgtgggaactcagctcaggagacagttatgagcctcagtccgatgactgaagaaattgtaactaaagatagattgtttaaagcaaagcaagaaacttctgaagaaatggaacaaagtggagaagcctcaggaaagcccaacagagagtgtgcaccccagattccttgtagtactcctattgctactgaaaggacagttgcacatttgaacactctgaaggaccgtcacccaggtgatttgtgggcccgcatgcacatctcatccctggaatatgctgcaggagacattacccgaaaagggagaaaaaaagacaaagctcgagtgagtgaactgctccaaggcctctcattctctggtgactcagatgtggaaaaagataatgagcctgagatccagcctgctcaaaagaagttaaaggtatcatgtttcccagaaaagagttggaccaaaagagacattaaacccaattttccaagctggtcagcactggattctggacttttgaatctcaagagcgaaaagttgaacccagtagagctttttgaattattttttgatgatgaaacattcaacttaattgtcaatgaaaccaataattatgcttctcagaaaaatgtcagcttggaagtcacagttcaggaaatgaggtgtgtgtttggtgtcttacttttgagtggatttatgaggcatcctagaagggaaatgtattgggaagtctctgacaccgatcagaacctggttagagatgcaatcagaagggacagatttgaattgattttctcaaacctgcactttgcagataatggccacctagatcaaaaagataagtttacaaagttgagacctctcataaaacaaatgaataaaaatttcctcttgtatgctcccctggaagaatactattgctttgataagtcaatgtgtgaatgctttgatagtgaccaattcctgaatggaaagcctattagaattggctataaaatttggtgtggtacaaccacacagggttatctggtttggtttgaaccctatcaagaagaatcaactatgaaggtagatgaggatcctgatcttgggttaggtggaaatctagtgatgaacttcgctgatgttcttttagagagaggtcagtatccctatcacctgtgttttgatagcttctttacaagtgtcaaattgttgtcagccttgaaaaagaagggggtgagggcaacaggaacaattcgtgagaacaggaccgaaaaatgtccccttatgaatgtagaacatatgaaaaaaatgaagagagggtattttgatttccgaatagaagaaaacaatgagataattttgtgtcgttggtatggggatggcattatcagtctgtgctccaatgctgtgggcatagaaccagtcaatgaggtaagctgttgtgatgctgataacgaagaaatccctcagataagtcaaccatccatagtaaaagtgtatgatgaatgcaaggaaggtgtagctaaaatggatcaaattatttcgaaatacagggtgaggataagaagcaagaaatggtactcaattttggtgagctacatgattgatgtagccatgaacaatgcatggcaactacacagagcctgtaacccaggtgcttctctagaccccttggattttcggagatttgttgcacatttctacttggaacacaatgctcatctgtcagattagggtacataaaatggacatagtgcagacattaataagacatagaaaaataataattatacatgctgttgtaccctcccaaagtaaatctgatatatgtaatgaagttattaaataatacttttaaaaatcagacatttatatagagtttcaaagactattgtaacaagtaatgttaaaaattgtctgtgagaatgttgaactgtagtacctttctctatgtcaagttttgtgtcagacatgggaaatcatgtatttgttcaattgaaaaaaaaaaaaaaaaaa

SEQ ID NO: 1288 - protein, 809 aa, Homo sapiens
MYEALPGPAPENEDGLVKVKEEDPTWEQVCNSQEGSSHTQEICRLRFRHFCYQEAHGPQEALAQLRELCHQWLRPEMHTKEQIMELLVLEQFLTILPKELQPCVKTYPLESGEEAVTVLENLETGSGDTGQQASVYIQGQDMHPMVAEYQGVSLECQSLQLLPGITTLKCEPPQRPQGNPQEVSGPVPHGSAHLQEKNPRDKAVVPVFNPVRSQTLVKTEEETAQAVAAEKWSHLSLTRRNLCGNSAQETVMSLSPMTEEIVTKDRLFKAKQETSEEMEQSGEASGKPNRECAPQIPCSTPIATERTVAHLNTLKDRHPGDLWARMHISSLEYAAGDITRKGRKKDKARVSELLQGLSFSGDSDVEKDNEPEIQPAQKKLKVSCFPEKSWTKRDIKPNFPSWSALDSGLLNLKSEKLNPVELFELFFDDETFNLIVNETNNYASQKNVSLEVTVQEMRCVFGVLLLSGFMRHPRREMYWEVSDTDQNLVRDAIRRDRFELIFSNLHFADNGHLDQKDKFTKLRPLIKQMNKNFLLYAPLEEYYCFDKSMCECFDSDQFLNGKPIRIGYKIWCGTTTQGYLVWFEPYQEESTMKVDEDPDLGLGGNLVMNFADVLLERGQYPYHLCFDSFFTSVKLLSALKKKGVRATGTIRENRTEKCPLMNVEHMKKMKRGYFDFRIEENNEIILCRWYGDGIISLCSNAVGIEPVNEVSCCDADNEEIPQISQPSIVKVYDECKEGVAKMDQIISKYRVRIRSKKWYSILVSYMIDVAMNNAWQLHRACNPGASLDPLDFRRFVAHFYLEHNAHLSD

SEQ ID NO: 1289 - DNA, 2628 bp, Homo sapiens
ggcggttgatcggtcattggggtgctgcagccccgccacctgttccgtagcttgccggtgccccgaaggtgtcttctcctaaggaagattaaatcagaaaattttaaatcacagttatccctttacttaaagccagagtaagccttccaaattaaccccaggaatggcttcaacagaggaacagtacgatcttaagattgtgaaagtggaggaagaccctatctgggaccaagaaacccaccttcgagggaacaacttttctggccaagaagcctcccgacaactttttaggcagttttgttaccaagagactcctggtccccgagaagctctgagccggctccgagaactctgtcatcagtggctaaggccagaaatccacaccaaagagcaaatcttggagctgctggtgctggagcaattcctgactatcctgcctgaggagctccaggcctgggtgcgggagcaccatccggagagtggggaggaggctgtggctgtagttgaagatctggaacaagagcttagtgagccagggaaccaggctccagaccatgaacatggacattctgaagtgctcttggaggatgtggaacatctgaaggtcaagcaggaaccaacagacatacagcttcagcctatggtgacacagctcagatatgaatctttttgcctccaccaatttcaagaacaagatggtgaaagtatacctgagaaccaggagttggcatcaaagcaagaaatcttaaaagaaatggaacatttgggggatagcaaactccaaagagatgtatctttggattctaagtacagagaaacttgtaaacgagacagcaaggcagaaaagcagcaggcacattccactggagagagacgccacaggtgcaatgaatgtgggaaaagcttcactaagagttcagtactcattgagcaccagagaatccacactggggagaagccatatgaatgtgaagaatgtgggaaggccttcagccggaggtcaagcctgaatgaacatcggcggagccacactggagagaaaccctatcaatgtaaggagtgtgggaaagccttcagtgccagcaatggcctcactcgacacagaagaatccacacaggggaaaaaccatatgaatgcaaagtgtgtgggaaggctttcctcctcagctcatgccttgttcagcatcagaggatacacactggagagaagcgctatcagtgtcgtgagtgtggcaaagccttcattcagaatgcagggcttttccagcatctccgagtccacactggtgagaaaccctatcagtgcagtcagtgcagtaaactctttagtaagcggacacttcttaagaaacatcagaaaatccacactggagagagaccataagggtgatgagtttgggaaagccttcagtcatcattgcaaccttattaggcattttagaatccatactgttccagcagaactggactaattctgtggaccctcagacccctaaatggggccgtcttggaaagtaagattttcaagtggcttattctgttcttataaaatttattttgtattgcattgaaccacttgtctacaaaccaggtgttggtgtctcctgtgtggatgactgtgattgtagggggttgctgggtggccttcttattccctagcctttggtccatttcttatgatttcctttaaaggcaccaaatcttatctggaaataaattgttatggaggggctgtttttgagcaatactgcatattgaacaattctaaaagaccagtatctatgtatacttttaaaaaaaagatttgctaagatcaaaggatattcagaggtgcatctttttctgtaagagtgacattttaaacaaatgtaaggttttggggaataagaatcgtccacattcccacaggaaatcattgctatggtctcccctaggaatgtgatagatagcttctataattatgcagcattatccatagtatgaaacctgtagttttaatggtttagaaatctatgtctcatttcatatctaactcatgtttttgatacgaatcaatatatatgttgatatcatgagttaatatgagtttgacatgaatcatcaacatagtatatacatatcaacataactatgttgatgattcatatcaaattctcaatgcaggtcattactgtaagttttccatttttgttacaaataataagtaagatgatactttaaaatctctgttcttcacaaggtacctctttaattcatagccttttatgtcagcattattcttcttttgggggttggtcagcaactttgagtgccattgcaagcagcatcatttaagtagttttataaagaaaagaagtctgatatcttgggcagcttgctgcttactggggagaccagcatgcttagacacttattgccagggttaaacatatgctctggcaccaagttcaaatctttcctccccatttgtgagctgtgggactttaggcaagttatctaaatgctgctatgctatagtctccccacctgtaaaacagaggatgataccaataccttcctcatagggtacataagattaaataaatacaaacttgtaccaaaaaaaaaaaaaaaaaaaaaaaaaaaaaa

SEQ ID NO: 1290 - protein, 209 aa, Homo sapiens
MEHLGDSKLQRDVSLDSKYRETCKRDSKAEKQQAHSTGERRHRCNECGKSFTKSSVLIEHQRIHTGEKPYECEECGKAFSRRSSLNEHRRSHTGEKPYQCKECGKAFSASNGLTRHRRIHTGEKPYECKVCGKAFLLSSCLVQHQRIHTGEKRYQCRECGKAFIQNAGLFQHLRVHTGEKPYQCSQCSKLFSKRTLLKKHQKIHTGERP

SEQ ID NO: 1291 - DNA, 3179 bp, Homo sapiens
cagagagagagagaaaaactgctgaccctgtaagagagaactggccatcttgcagacagacagagccccgagtgttctttcaactacctgccacccatccaacaactcccctcggacctcagtatgggctggaacctgacacttggcatgacagtgaccccaggcatccaaaccatgacagttccatcagctctccaaatgagagacagagtctcactatgtcgcccaggcttgtcttgaactcctggactcaagagatcctcccatctcggcctctcaaagtgttgggattacaggcgtgagctattacacctgacttaagtctccattttcatatctatactttgggattccagaagacagaggtttgagtgtaaaacacaaaataacaaaaccacaacaaaaacaactctgtattctcgtccccaccattaccatctctcctttgtgatgtcaaagagaccagaggaagtggacagactcggggaagaatagccagagtaagccttccaaattaaccccaggaatggcttcaacagaggaacagtacgatcttaagattgtgaaagtggaggaagaccctatctgggaccaagaaacccaccttcgagggaacaacttttctggccaagaagcctcccgacaactttttaggcagttttgttaccaagagactcctggtccccgagaagctctgagccggctccgagaactctgtcatcagtggctaaggccagaaatccacaccaaagagcaaatcttggagctgctggtgctggagcaattcctgactatcctgcctgaggagctccaggcctgggtgcgggagcaccatccggagagtggggaggaggctgtggctgtagttgaagatctggaacaagagcttagtgagccagggaaccaggctccagaccatgaacatggacattctgaagtgctcttggaggatgtggaacatctgaaggtcaagcaggaaccaacagacatacagcttcagcctatggtgacacagctcagatatgaatctttttgcctccaccaatttcaagaacaagatggtgaaagtatacctgagaaccaggagttggcatcaaagcaagaaatcttaaaagaaatggaacatttgggggatagcaaactccaaagagatgtatctttggattctaagtacagagaaacttgtaaacgagacagcaaggcagaaaagcagcaggcacattccactggagagagacgccacaggtgcaatgaatgtgggaaaagcttcactaagagttcagtactcattgagcaccagagaatccacactggggagaagccatatgaatgtgaagaatgtgggaaggccttcagccggaggtcaagcctgaatgaacatcggcggagccacactggagagaaaccctatcaatgtaaggagtgtgggaaagccttcagtgccagcaatggcctcactcgacacagaagaatccacacaggggaaaaaccatatgaatgcaaagtgtgtgggaaggctttcctcctcagctcatgccttgttcagcatcagaggatacacactggagagaagcgctatcagtgtcgtgagtgtggcaaagccttcattcagaatgcagggcttttccagcatctccgagtccacactggtgagaaaccctatcagtgcagtcagtgcagtaaactctttagtaagcggacacttcttaagaaacatcagaaaatccacactggagagagaccataagggtgatgagtttgggaaagccttcagtcatcattgcaaccttattaggcattttagaatccatactgttccagcagaactggactaattctgtggaccctcagacccctaaatggggccgtcttggaaagtaagattttcaagtggcttattctgttcttataaaatttattttgtattgcattgaaccacttgtctacaaaccaggtgttggtgtctcctgtgtggatgactgtgattgtagggggttgctgggtggccttcttattccctagcctttggtccatttcttatgatttcctttaaaggcaccaaatcttatctggaaataaattgttatggaggggctgtttttgagcaatactgcatattgaacaattctaaaagaccagtatctatgtatacttttaaaaaaaagatttgctaagatcaaaggatattcagaggtgcatctttttctgtaagagtgacattttaaacaaatgtaaggttttggggaataagaatcgtccacattcccacaggaaatcattgctatggtctcccctaggaatgtgatagatagcttctataattatgcagcattatccatagtatgaaacctgtagttttaatggtttagaaatctatgtctcatttcatatctaactcatgtttttgatacgaatcaatatatatgttgatatcatgagttaatatgagtttgacatgaatcatcaacatagtatatacatatcaacataactatgttgatgattcatatcaaattctcaatgcaggtcattactgtaagttttccatttttgttacaaataataagtaagatgatactttaaaatctctgttcttcacaaggtacctctttaattcatagccttttatgtcagcattattcttcttttgggggttggtcagcaactttgagtgccattgcaagcagcatcatttaagtagttttataaagaaaagaagtctgatatcttgggcagcttgctgcttactggggagaccagcatgcttagacacttattgccagggttaaacatatgctctggcaccaagttcaaatctttcctccccatttgtgagctgtgggactttaggcaagttatctaaatgctgctatgctatagtctccccacctgtaaaacagaggatgataccaataccttcctcatagggtacataagattaaataaatacaaacttgtacttaaaatgtagctctcaataaatatgcattatgatttacatacgaaataatagcatttaacaaatgtaggtagaattttaagtatcatgttaaaattaggatacgaaatgcctctgctgacattcttgttactcttttctccacagtcaaaacctgaatcagaatatttcaaaagagaggaaataaaagttcagcttaaaactgttctgccctaaaaaa

SEQ ID NO: 1292 - protein, 406 aa, Homo sapiens
MASTEEQYDLKIVKVEEDPIWDQETHLRGNNFSGQEASRQLFRQFCYQETPGPREALSRLRELCHQWLRPEIHTKEQILELLVLEQFLTILPEELQAWVREHHPESGEEAVAVVEDLEQELSEPGNQAPDHEHGHSEVLLEDVEHLKVKQEPTDIQLQPMVTQLRYESFCLHQFQEQDGESIPENQELASKQEILKEMEHLGDSKLQRDVSLDSKYRETCKRDSKAEKQQAHSTGERRHRCNECGKSFTKSSVLIEHQRIHTGEKPYECEECGKAFSRRSSLNEHRRSHTGEKPYQCKECGKAFSASNGLTRHRRIHTGEKPYECKVCGKAFLLSSCLVQHQRIHTGEKRYQCRECGKAFIQNAGLFQHLRVHTGEKPYQCSQCSKLFSKRTLLKKHQKIHTGERP

SEQ ID NO: 1293 - DNA, 2242 bp, Homo sapiens
cggcgtcggccttccactgtggggttaaatctcatcccgcggctctcctcctgtcggtcctgcagttcttttgtccccgggtagagggatcttctgcagaaatagcgctggaagctagagtgaggcctgagtactgccttggcctaggatggctagagaattaagtgaaagcacagccctggatgcccagtctacagaagaccagatggagcttctggtcataaaggtggaggaagaagaagccggttttcccagtagcccagatctgggttctgagggctcccgcgagcgcttccgaggcttccgctacccggaggctgcaggcccccgcgaggcgctgagtcggctccgagagctctgccgacagtggctgcagcctgagatgcacagcaaggagcagatcctggagctgctggtgctggagcagttcctgaccatcctgccggggaatctgcagagctgggtgcgggagcagcatccagagagcggggaggaggtggtggtgctattggagtatttggagaggcagctggatgagccggcgccgcaggtttcaggtgttgaccaggggcaagaactgctctgttgcaagatggcactattgacaccagccccagggtcacaaagtagccaatttcagctaatgaaggctctgctcaagcatgaatctgtgggatcccagcctttacaagatagagttctccaggtccccatgcttgcccatggaggatgctgcagagaagatgcagtggtagcttctaggcttactccagagtcccaggggttgttgaaagtggaagatgtggccctgaccctcacccctgaatggacacagcaggattcatctcaggggaatctctgtagagatgaaaagcaggagaaccatggcagcctggtctccctgggtgatgaaaaacagactaagagcagggacttgcctccagctgaggagcttccagaaaaggagcatgggaagatatcgtgccacctgagagaagacattgcccagattcctacatgtgcagaagctggtgaacaggagggcaggctacaaagaaagcagaaaaatgccacaggagggaggcggcacatctgccatgaatgtggaaagagttttgctcaaagctcaggcctgagtaaacacaggagaatccacactggtgagaaaccctacgaatgtgaagagtgtggcaaagccttcattgggagctctgcccttgtcattcatcagagagtccacactggtgagaagccatatgagtgtgaagaatgtggtaaggccttcagtcatagctcagaccttatcaagcatcagagaacccacactggggagaagccctatgagtgtgatgactgtgggaagaccttcagccagagctgcagcctccttgaacatcacagaatccacactggggagaagccgtatcagtgcagtatgtgtggcaaagcctttaggcgaagttcacatctcctgagacatcagaggatccatactggggataaaaatgttcaggaacctgagcagggagaggcctggaaaagtaggatggaaagccagttggaaaatgttgaaactcccatgtcttataaatgtaatgagtgtgaaagaagtttcactcagaatacaggcctcattgaacatcaaaaaatccacactggtgagaaaccctatcagtgtaatgcgtgtggaaaaggcttcacccgaatttcataccttgttcaacatcagagaagccatgtagggaaaaacatcctatcacagtgacccatgccatacatgccagttggtgctcatttgtcactgatctgaagccactccccctggagtctcaactatagaaattgtgggctgggctttatttaccactacacattatcaggtgttagaaaatgtagactgggttagacaaattatcttctaagttctagaaggggtttgtaatcaaaacatatttgataggaggctacgggagagttgtctagaagaggtaagacctgaaactgtttgttctctcccactagaattaaatggatgtttagactggctacttgccctaaaccagcacttggtgatgtctactgggtggatggttgtgatttgggggctgcttctctgaccattctttttgactgtaatgaatcctccacagttggtcagattcataaagtcttatatccccctctgtgccttttctgcaggtgctaataaatgtttattgaatgtaaaaaaaaaaaaaaaaaa

SEQ ID NO: 1294 - protein, 538 aa, Homo sapiens
MARELSESTALDAQSTEDQMELLVIKVEEEEAGFPSSPDLGSEGSRERFRGFRYPEAAGPREALSRLRELCRQWLQPEMHSKEQILELLVLEQFLTILPGNLQSWVREQHPESGEEVVVLLEYLERQLDEPAPQVSGVDQGQELLCCKMALLTPAPGSQSSQFQLMKALLKHESVGSQPLQDRVLQVPMLAHGGCCREDAVVASRLTPESQGLLKVEDVALTLTPEWTQQDSSQGNLCRDEKQENHGSLVSLGDEKQTKSRDLPPAEELPEKEHGKISCHLREDIAQIPTCAEAGEQEGRLQRKQKNATGGRRHICHECGKSFAQSSGLSKHRRIHTGEKPYECEECGKAFIGSSALVIHQRVHTGEKPYECEECGKAFSHSSDLIKHQRTHTGEKPYECDDCGKTFSQSCSLLEHHRIHTGEKPYQCSMCGKAFRRSSHLLRHQRIHTGDKNVQEPEQGEAWKSRMESQLENVETPMSYKCNECERSFTQNTGLIEHQKIHTGEKPYQCNACGKGFTRISYLVQHQRSHVGKNILSQ

SEQ ID NO: 1295 - DNA, 3931 bp, Homo sapiens
gggtcccaaaagggttcgaggcctcttgccttcgctccgtaggagggagttctcttctggccctgggggccgcaggactgtccaggaatacagtttccaggtgagatcttacttgaaacaccggtagttctagcacagctaaaatggcatctacttgggctatccaggcccacatggaccaggatgaacctttggaagtaaagatagaggaagagaaatataccaccagacaggattgggacctgcgtaaaaacaacacccatagcagagaggtcttccgtcagtacttcagacagttctgctaccaggagacatctggtccccgtgaggctttgagccgactccgagaactttgccatcagtggctgaggccagagacccacaccaaagaacagattctggagctgctggtgctggagcagttcctgaccatcctacctgaggagctccaggcctgggtgcaggagcagcatccagagagtggggaggaggtggtgactgtgctggaggatttagagagagaactggatgaaccaggagagcaggtctcagtccacactggggaacaggaaatgttcttgcaggagacggtacgtctacgaaaagaaggagaacccagtatgtccctccagtccatgaaagcccagccaaagtatgaatctccagaacttgaatcccaacaggagcaagttttagatgttgagactggaaatgagtatgggaatttaaagcaagaagtttctgaagaaatggaaccacatgggaagacatccagtaaatttgaaaatgatatgtccaagtctgctaggtgtggagaaactcgtgaacctgaagaaataacagaagagccctctgcttgctccagagaagataaacaacctacctgtgatgaaaatggagtaagcctgactgagaactctgaccatactgaacatcagagaatctgtccaggagaagaatcttacggatgtgatgactgtggaaaagcttttagtcagcactcacacctcatagaacatcagaggatccatactggagatagaccctacaaatgcgaagaatgtggaaaagctttccgtgggagaactgtgcttattcgacacaaaataatacacactggagagaaaccgtataagtgtaatgaatgtggcaaagcctttggccggtggtcagctcttaaccaacatcagagacttcacacaggagaaaaacactatcactgtaatgactgtggcaaagcctttagtcagaaagcaggcctctttcaccatatcaagatccacacaagagacaaaccttatcagtgcactcagtgtaataaaagttttagtcggcgttccatacttactcagcatcaaggagttcataccggcgccaagccgtatgagtgcaacgagtgtggaaaagcctttgtttataactcatcccttgtttcccatcaggaaatccaccacaaagaaaaatgctatcagtgtaaggaatgtgggaaatccttcagtcagagtggccttattcagcatcagagaattcacactggggaaaaaccctacaaatgtgacgtatgtgaaaaagcctttattcaaaggacaagtcttacagaacatcagcgaattcacactggagaaagaccctataaatgtgataagtgtgggaaggcgtttactcaaagatcagtcctcacggaacatcagagaatccacactggagagaggccctacaagtgtgatgagtgtgggaatgccttccgaggaatcaccagcctcattcagcatcagagaatccacactggggagaagccctaccaatgtgatgagtgtggaaaagccttcagacagaggaagaagaccagctacaaggaaatacttctgaaaaatcactctgaaccccaagctggagtgaatcttctcctgagctctctcattccagaatggcaatcttgtttcaggagagatctctaatagtgactgatggtaaaggaagaaggctgtgcctagaacaaagaatcaggctggcaaagaaatcacaggtctttcctcaaactttaaattgctactctctggagatagctacctggactttacagagctgtcagaagacttgggaaggtttgccagcattggaaaaagccacttggacttcacagagctgtcagaagacttaggaagctttgccagtagttcctgagaccagaaatacatattatgaagcaggtgctggaacaggccctggcccctacttgtgaagctgcagatatagatggtgttactgagaaggaaactaaggacttggctccaaaacaaaacaaaacaaaatctggagatgctgaattttgttggggggaatgtctgtagaactgcaacatcaatgcagtaagtgtagtaaaagctttagtttatggtgagtcattactcagcatcatggagtccacgatgaagagaatctcttttcaatctgtgcaatcaacaagtttttgaaaggcttttgtttatagtggaaccctcttttccccctagaagaaccaccacaaggaaaaatgctgtcaccataaggaatgtgggaaagttttcagccacatggccttatttgacttcaaagaatccacatgagagagagactgcataaatgtaataactgaggaggcctttgttcagcaaagaaaccttatacaaactcgtataaagaatgtaggaagaccttcacccagaagccaggactgactgtgcaccagagaatctgcacaataaacctgatgaatgtggagatgcttgcttcagcattggagaattcacagtaaagggaaaccctgccagtgtgatgagtacggaaaagtcttcagaggttggaacttgggaaaaatcagtgagtgaattcatattagagaggctcttataaatgagaggattgtggaaacttgtatagacagagatcagacctcaacaagggagcctccacagtattgaaaagttaatataattaatgtaagtgggcaagttgtatggggaatgggtagtctaaattgctcattttagccagtaaaaacattaaattagtttcttagatcaagaaaaggaaatgttagaagttatttttcccttccagaggggtctatatgtgtaagcaaccaggacttttgaaataagttgcatctctggatttgtgatctgtctcctggatgattatctctgttttgggagacaggtattttttcttcatgcctgctctagtctcatctcatatctttaattcattcagcaagtatacacaatagtattatcgtctactgtttgttgtaaatatatatatattattttctttttggtctgagtaggcttgtattggtaccctaggacataaaaatcacatatatcatgtttcagtaaatgcagtgaaaggaactatattattaaattgctgggaatttctgtaaatttgagactacctttatattctccaacacaagaccgtgtaggtgtcccttcagagagtatatttttctagcttggcttctttattttctttatttttttgagatggagtcttgctcctgtcgcccaggctggagtgcaatggcacgatctcggctcactgcaacctccgcctcccaggttcaagtgattctcctgtctcagtctcccgagtagctgggattacaggcacttgccaccattcccagctaatttttgtatttttagtagagacggggtttcaccatgttggccaggctggtctcgaactcctgaccttgtgatctgcccaccttggcctcccaaagttcagggattacaggcatgagccaccatgcccggctgttttttttaagatagaaaaatatacttcatgtatagcctattgacagataatgactgatattttttcttatagataacacataataaacattgtgaagactaaaaaaaaaaaaaaaaaaaaa

SEQ ID NO: 1296 - protein, 604 aa, Homo sapiens
MASTWAIQAHMDQDEPLEVKIEEEKYTTRQDWDLRKNNTHSREVFRQYFRQFCYQETSGPREALSRLRELCHQWLRPETHTKEQILELLVLEQFLTILPEELQAWVQEQHPESGEEVVTVLEDLERELDEPGEQVSVHTGEQEMFLQETVRLRKEGEPSMSLQSMKAQPKYESPELESQQEQVLDVETGNEYGNLKQEVSEEMEPHGKTSSKFENDMSKSARCGETREPEEITEEPSACSREDKQPTCDENGVSLTENSDHTEHQRICPGEESYGCDDCGKAFSQHSHLIEHQRIHTGDRPYKCEECGKAFRGRTVLIRHKIIHTGEKPYKCNECGKAFGRWSALNQHQRLHTGEKHYHCNDCGKAFSQKAGLFHHIKIHTRDKPYQCTQCNKSFSRRSILTQHQGVHTGAKPYECNECGKAFVYNSSLVSHQEIHHKEKCYQCKECGKSFSQSGLIQHQRIHTGEKPYKCDVCEKAFIQRTSLTEHQRIHTGERPYKCDKCGKAFTQRSVLTEHQRIHTGERPYKCDECGNAFRGITSLIQHQRIHTGEKPYQCDECGKAFRQRKKTSYKEILLKNHSEPQAGVNLLLSSLIPEWQSCFRRDL

SEQ ID NO: 1297 - DNA, 835 bp, Homo sapiens
atgggagggctctggcatccgggatggaggcgcgtcgctttctgtggctggcgctggatccaccctgggtctccagccacggctgcagagagggtagcgcggtttcttaggccagagtggagtgggacaggaggtgcccagagacgactgtggtggcttgagacatggaagcgctgcagcctttgagcccagtatccagcattgcagccgccgcggcggtctaagagctcaaaccctttcaggcgcgcgcaggaggaggagcggcgggggcggcggaacaagacgaccctcacttaacgtggccgctgtcgccgtgggcatgctgggggcgtcctacgctgccgttcccctttatcggctctattgccagactactggacttggaggatcagcagtttcaggtcatgcctcagaccagattgaaaacatggtgcctgttaaggatcgaatcattaaaattaactttgatgcagatgtgcatgcaagtcttcagtggaactttagacttcagcaaacagaaatatatgtggtgccaggagacactgcactggggttttacagagctaagaatcctgctgacaaaccactaattggaatttctacatacaatgttgttccatttgaagctggacagtatttcaataaaatacagtgcttctgttttgaagaacaaaggcttaatccccaagaggaagtagatatgccagtgtttttctacattgatcctgaatttgctaaagacccaagaatgattaatgttgatcttatcactctttcttacactttttttgaagcaaaggaagggcacaatttgccagttccaggatataactga

SEQ ID NO: 1298 - DNA, 1712 bp, Homo sapiens
aaaaggggctgaaatcctggggacctcagagtcgtctaaaactcctagccatgttccagcagttccaggcctcctgtcttgtcctgtttttcctggttggctttgctcagcagaccctaaagcctcaaaataggaaggtggattgcaacaaaggggtaacaggcaccatctatgagtatggagccctcaccctcaacggcgaggagtacatccaattcaagcagtttgcaggcaagcacgtcctgtttgtcaatgtggccgcctattgaggcttggcagctcagtatcctgaactgaatgcactacaggaggagctgaagaattttggtgtcattgtgttggcctttccctgcaaccagtttggaaaacaagaaccaggaacaaactcagaaatacttcttggtctcaagtatgtgtgtccaggtagtggctttgtccccagtttccagctctttgagaaaggggatgtgaatggagaaaaagaacagaaggtctttactttcctgaagaactcctgccctccgacctctgatcttttgggctcatcaagccaactcttctgggagcccatgaaggtccatgatatccgctggaactttgagaaatttctggtggggcccgatggagtccctgtcatgcattggttccaccaggctccagtcagcacagtcaagtcagacatcctggagtacctaaagcagttcaatacccactaggaagggctagcgactgacagaaataactaccctgtctcccacctgcaggaatgtctaacaaagcatccatcttcctccttctttgctccacactcgtgcctacccagcctcctgatgaccaaaccatcctgtactacccaagcacctgcttagcatgtgtgtgtagctgtgtgtgtgtgtgtgtgtgtgtgtatggatatgtagaattgtatttgttggtatatgcataggtgtatgtatggtgtgtgtgtgtgtgtgtgtgtgtgtgtttgaagattaaggaaaagaacacctatctctccaactctctgatcctgaaatatctattccaaaggaaaatcatattttagggtagatgaatcagactatcctgtgtccctaaaaaagcaatcccgagaagttgtgacatctatcccttccccttcctgaaagttttaaagaaagcaggagctggccgcaagactctaggcctccttcatagcctctctcctctaagataggcatgcattgttaaactcttttctccttaattctcctttattcccctgccacccagtagttctcatgtaggacctctgaaggcagagtgagagcagaaaccccacctcacatgaagggaagggcatctccatgatggtggatcccaaaacccctctgggtcgcaccctgccagagccttccttggtgcctgtcccttagtgcattcaggtcatggcacctgggcaggggtgtccctgtattctgaatgatgggctttctcctcaccctgagcctcctcaactttaagcttattttgatcactgtctcaaatttaaaaattctgcagcaacctggctctgtgtggtgttttcccagtcccatattatgtccagtcatacttcttctttctctgtcactttgtccctgctttcttgattcccttgtcttgttcttcagtattttgtttttctcaaaaatgctctagaactttccttggcacatataaaagcacggctg

SEQ ID NO: 1299 - protein, 220 aa, Homo sapiens
MFQQFQASCLVLFFLVGFAQQTLKPQNRKVDCNKGVTGTIYEYGALTLNGEEYIQFKQFAGKHVLFVNVAAYGLAAQYPELNALQEELKNFGVIVLAFPCNQFGKQEPGTNSEILLGLKYVCPGSGFVPSFQLFEKGDVNGEKEQKVFTFLKNSCPPTSDLLGSSSQLFWEPMKVHDIRWNFEKFLVGPDGVPVMHWFHQAPVSTVKSDILEYLKQFNTH

SEQ ID NO: 1300 - DNA, 668 bp, Homo sapiens
tcatgactacacagttaagggtcgtccatctgcttccccttctcctagcctgctttgtgcaaacaagtcccaagcaggagaagatgaagatggattgccacaaagacgagaaaggcaccatctatgactatgaggccatcgcacttaataagaatgaatatgtttccttcaagcagtatgtgggcaagcacatcctcttcgtcaacgtggccacctactgtggtctgacagcgcaatatcctgaactaaatgcactccaggaggagctgaagccctatggtctagttgtgttgggctttccctgcaaccaatttggaaagcaagaaccaggagataacaaagagattcttcctgggctcaagtatgtccgtccagggggaggatttgtacctagtttccagctttttgagaaaggggatgtgaatggtgaaaaagaacagaaagtcttcagtttcttgaagcactcctgtcctcatccctctgagattttgggcacattcaaatctatatcctgggaccctgtaaaggtccatgacatccgttggaactttgaaaagttcctggtggggcctgatggaatccctgtcatgcgctggtcccaccgggctacggtcagctcagtcaagacagacatcctggcgtacttgaagcaattcaaaaccaaatag

SEQ ID NO: 1301 - protein, 221 aa, Homo sapiens
MTTQLRVVHLLPLLLACFVQTSPKQEKMKMDCHKDEKGTIYDYEAIALNKNEYVSFKQYVGKHILFVNVATYCGLTAQYPELNALQEELKPYGLVVLGFPCNQFGKQEPGDNKEILPGLKYVRPGGGFVPSFQLFEKGDVNGEKEQKVFSFLKHSCPHPSEILGTFKSISWDPVKVHDIRWNFEKFLVGPDGIPVMRWSHRATVSSVKTDILAYLKQFKTK

SEQ ID NO: 1302 - DNA, 550 bp, Homo sapiens
tcatgactacacagttaagggtcgtccatctgcttccccttctcctagcctgctttgtgcaaacaagtcccaagcaggagaagatgaagatggattgccacaaagacgagaaaggcaccatctatgactatgaggccatcgcacttaataagaatgaatatgtttccttcaagcagtatgtgggcaagcacatcctcttcgtcaacgtggccacctactgtggtctgacagcgcaatatcctggtatgtccgtccagggggaggatttgtacctagtttccagctttttgagaaaggggatgtgaatggtgaaaaagaacagaaagtcttcagtttcttgaagcactcctgtcctcatccctctgagattttgggcacattcaaatctatatcctgggaccctgtaaaggtccatgacatccgttggaactttgaaaagttcctggtggggcctgatggaatccctgtcatgcgctggtcccaccgggctacggtcagctcagtcaagacagacatcctggcgtacttgaagcaattcaaaaccaaatag

SEQ ID NO: 1303 - protein, 100 aa, Homo sapiens
MTTQLRVVHLLPLLLACFVQTSPKQEKMKMDCHKDEKGTIYDYEAIALNKNEYVSFKQYVGKHILFVNVATYCGLTAQYPGMSVQGEDLYLVSSFLRKGM

SEQ ID NO: 1304 - DNA, 4895 bp, Homo sapiens
gagcgtggctcaccgggcccggccggaacctacgggcacagctgcgggtgtgtctgcggaacctccacctgagctgtagagtgtttccctcgacccactagtctgggttccacagggtctgagctcctcagaggtgggagctgcggccgagggaagggtgcatgtgcgcggcgacaatcgggcctcttccccaggcagcttgtgagcccctctccctctccgccctcgcccaggctgctccgatcttcgtttccttgcctaggctcatacacccaggctttatttagggccaaagtatccgtcataacctcggttttctgtctcgcaagtatcttgccgctcaatttgtgaccctgaagctttagtgagtcgctctgtgctcactatttctggtcttttcagaggatggcttcactttcaatggaattgcccgagtaactgccctgtgttgtcacgtaaacaagtccttttaaactgagtctgtagttgtcctgtgttgagtgttttcttatatcaaaaactttcctgaccaagaacaaaaaaggagctcaagtaaaatcacccatttgcctagaccccaactggagagaacctttgcctgagctgtctaagctcgggatggaagcagtctctagggtcttcccagccttggctggccaggctccagaagaacaaggggagattatcaaagtaaaggttaaagaagaagaccacacttgggatcaggaatcagccctacgtaggaatttgtcttataccagggaactctctcgtcagcgcttcaggcagttctgctatcaggagacacctgggcccagggaggctctgagtcaactgcgggaactttgccgtcagtggctgaacccagagatacataccaaggagcagatcctggaattgttggtgctggagcagttcctgaccatcctgcctgaggagctccagtcttgggtgcgggagcataatcctgagagtggagaagaggtggtgactttgctggaagatttggagagggagcttgatgaacctagacagcaggtctcacagggcacatatgggcaggaagtttctatggaagaaatgatccctctggattctgcaaaggagtctttaggcacccagcttcagtctatggaagatagaatggaatgtgaatctccagagccacacccacttcaagataatgggtcatttttgtggttttccatgatgtctcaaagcatgggtggtgataacctcagtagcttagatactaatgaagcagaaattgaaccagaaaacatgagagaaaagttcttcagaagcttagcaaggttactggaaaacaaaagtaataatactaagatattttctaaagcaaagtactgtcagttgataaaggaagtgaaagaagctaaagctaaggcgaaaaaggaatcagttgactaccgtcgcttggctagatttgatgttatccttgtacaaggaaatgagaagctaattgaggctgtaaatggggaaacagataaaatacggtattacttacacagtgaggacttatttgacattctgcataatacacatctcagcattggacatggtggacgtactcgcatggagaaagagttacaagcgaaatacaagaacatcacaaaagaagttataatgctgtatctgaccctctgtaaaccatgccaacagaaaaattcaaaactcaagaaggttctaacatcaaaatcaattaaggaagttagttcaagatgccaagtagatcttatagacatgcagttgaatcctgatggggagtacagatttattttgcattatcaagatctctgtacaaagttaacttttttgcggtcattaaagtctaaaaggcctacggaagttgcacatgctcttttagatatatttacaattattggagcacccagtgtcctacaatctgacaatgggagggaattttcaagccaggttgtcagtgaactcagtaatatttggccagaattgaaaattgtccatgggaagtctcagacctgccaaagccagagttctgcagaacaaactgaggatatccgaaagaggattttctcctggatgcaaactaacaactcatcacactggactgaatttttgtggttcattcagatgtcccaaaatcagccctatcacagaagcatgcaacagactccatgtgaaagtgcatttagctctgaagctaaactgggcttgtcccattctcagctaactgaagaacttgttgccagcttgcatacagaaaatgaattagatcaggctgacaaagagttagaaaatactttaagagcccagtatgaagaaaacattgagactggaacagacagtagtgatattgaagagaatctttctgtcactcctaaggtggctgaaaaaagccctcctgagagcagactaagatttttatcctgtgtagtttgtgaaaaagaatgcacaggtgttaatagttgtatatcatgtgatggaaatatccatgcaatttgtggagtgccctctcaacatgggactgagggctgtggtcggcaaataacttgtagcctttgctatgaaaccagcacaatgaagaggaaacatgatgagattcaaagaagtttgcctgttaaaccttccaaaatgctaaagccatcagggacaccattttcaccagacaaagtaggagactggatggcgaaacaagcttcactggacttttttgtcaagaaaagacatgccttttctgaacacagtagtagtaataaaagaaatgttaacaatagaagttatcctgaagaagggaaaaccaaaagagttcatgctagtttcactcggaaatatgatccttcatatattgagtttggttttgtagctgtaattgatggtgaagtactaaaaccacagtgtattatttgtggagatgtactggctaatgaagcaatgaaaccatcaaaacttaagcgacatttatattcaaaacataaagaaataagttcacaaccaaaagaattctttgaaagaaagagtagtgaattgaaaagccaaccaaagcaggtgttcaacgtttctcatataaacattagtgctttgcgggcttcatataaagtagcacttccggttgccaagtctaaaacaccatacacaattgctgagacactagtgaaagactgcatcaaagaagtttgcttggaaatgttgggtgaatctgcagcaaagaaggtagctcaggtaccactttccaatgacaccatagctcgacgtattcaggaactggctaatgatatggaagatcaactcatagaacaaataaaactagcaaagtatttttcattgcaacttgatgaatgcagagatattgctaacatgataattcttttagtctatgtgaggtttgaacatgatgatgatataaaggaagagttctttttttcagcctctttgcctacaaacacaactagctcagaactgtatgaagctgtaaagaattatattgttaacaaatgtggtttggaatttaaattttgtgtaggagtatgttctgatggtgcagcttcaatgacaggaaaacattctgaagtggtaacccagattaaggaacttgcgccagaatgtaaaacaacacattgcttcattcatcgagaaagtcttgccatgaaaaaaatatcagctgaactaaatagtgtacttaatgatatagtaaaaattgtgaattatataaaatctaattcattgaattcaagattattctctttattatgtgataatatggaagctgatcataagcaactgttactgcatgctgagatacggtggttatcacggggaaaagttctgtcaagaatgtttgaaatacgaaatgaactcttagtgtttctgcaaggcaagaaacccatgtggtcccaactttttaaagatgtgaattggacagccagacttgcttatttgtctgatatcttcagtatttttaatgatcttaatgcttctatgcaagggaagaatgcaacttatttttcaatggcagataaagttgaaggacaaaaacagaagttagaagcttggaaaaacagaatttctacagattgttatgacatgtttcataatttaacaacaattatcaatgaagtaggtaatgatcttgatattgcacatctgcgaaaagttatcagtgaacatcttacaaatttgttagaatgttttgaattttattttccatcaaaagaagatccacgcataggaaatttgtggatccaaaatccatttctttcatcaaaagataacttaaatttaactgtaactctacaggataagttgttgaagctggctaccgacgaaggattgaaaatcagttttgaaaatacagcatcacttccttcattttggataaaagctaaaaatgactatcctgagcttgctgagattgctttaaaattgctgcttcttttcccctcaacatacctctgtgagaccggattctctactttaagtgttattaaaacaaaacatagaaacagtttaaatatacattatcccctgagggtagcattgtcatcaatccaacctagattagacaaattaacaagcaagaagcaagctcacttatcacattaaaagctttaaatattgatatgtaaggtattggttcaaagtatgcatataagcattgagtgtgaggaatttgctatttcactttaaactttctgtctagttacagttatggaagtatgagaagttatgagtgaaacagcaattttctatataaattgcctatatgtatattttcaattaagaatgtgtacagtttttataattctatttttcctcatatttgtcgtatttattaaaatataattttaaatctgttgattctaatattaaaacatttgatcttaaaaaaaaaaaaaaaaaaa

SEQ ID NO: 1305 - protein, 1325 aa, Homo sapiens
MEAVSRVFPALAGQAPEEQGEIIKVKVKEEDHTWDQESALRRNLSYTRELSRQRFRQFCYQETPGPREALSQLRELCRQWLNPEIHTKEQILELLVLEQFLTILPEELQSWVREHNPESGEEVVTLLEDLERELDEPRQQVSQGTYGQEVSMEEMIPLDSAKESLGTQLQSMEDRMECESPEPHPLQDNGSFLWFSMMSQSMGGDNLSSLDTNEAEIEPENMREKFFRSLARLLENKSNNTKIFSKAKYCQLIKEVKEAKAKAKKESVDYRRLARFDVILVQGNEKLIEAVNGETDKIRYYLHSEDLFDILHNTHLSIGHGGRTRMEKELQAKYKNITKEVIMLYLTLCKPCQQKNSKLKKVLTSKSIKEVSSRCQVDLIDMQLNPDGEYRFILHYQDLCTKLTFLRSLKSKRPTEVAHALLDIFTIIGAPSVLQSDNGREFSSQVVSELSNIWPELKIVHGKSQTCQSQSSAEQTEDIRKRIFSWMQTNNSSHWTEFLWFIQMSQNQPYHRSMQQTPCESAFSSEAKLGLSHSQLTEELVASLHTENELDQADKELENTLRAQYEENIETGTDSSDIEENLSVTPKVAEKSPPESRLRFLSCVVCEKECTGVNSCISCDGNIHAICGVPSQHGTEGCGRQITCSLCYETSTMKRKHDEIQRSLPVKPSKMLKPSGTPFSPDKVGDWMAKQASLDFFVKKRHAFSEHSSSNKRNVNNRSYPEEGKTKRVHASFTRKYDPSYIEFGFVAVIDGEVLKPQCIICGDVLANEAMKPSKLKRHLYSKHKEISSQPKEFFERKSSELKSQPKQVFNVSHINISALRASYKVALPVAKSKTPYTIAETLVKDCIKEVCLEMLGESAAKKVAQVPLSNDTIARRIQELANDMEDQLIEQIKLAKYFSLQLDECRDIANMIILLVYVRFEHDDDIKEEFFFSASLPTNTTSSELYEAVKNYIVNKCGLEFKFCVGVCSDGAASMTGKHSEVVTQIKELAPECKTTHCFIHRESLAMKKISAELNSVLNDIVKIVNYIKSNSLNSRLFSLLCDNMEADHKQLLLHAEIRWLSRGKVLSRMFEIRNELLVFLQGKKPMWSQLFKDVNWTARLAYLSDIFSIFNDLNASMQGKNATYFSMADKVEGQKQKLEAWKNRISTDCYDMFHNLTTIINEVGNDLDIAHLRKVISEHLTNLLECFEFYFPSKEDPRIGNLWIQNPFLSSKDNLNLTVTLQDKLLKLATDEGLKISFENTASLPSFWIKAKNDYPELAEIALKLLLLFPSTYLCETGFSTLSVIKTKHRNSLNIHYPLRVALSSIQPRLDKLTSKKQAHLSH

SEQ ID NO: 1306 - DNA, 2446 bp, Homo sapiens
cccagtattatcgaagatcaagcaagaaagaaaaagacagaaaacaaatgcgaaaccacagcttccttggctctttttgcccatatgccgaagagccgagcattgccgccaagcattggcaccggccatgcggagactagcgaaagctttgcaattcctctacttctcagtgatgactcgggctttctccttacattcttgatgggcatgaccggtcctgtcagctgggtggccaatttctgttcttcagcagaactgtctcccttcttgggggccgagggctttctggggaagaggatgagtttggagcaatactcattcagacgctgcacattggcctgcagggaatcggtggacttgttctgcctcctcggatccacagagatgccagtggtccgggtcaccttcttgtgaatgcccgccaccctgagctccaggctgaagcctctgccggcgcgcaccttgatgtgataacgcacagcagggcacagcacaatgggccagatgggtcccgactctccgggcgcggggcgatgcagcgccctttggcttgccgggccttgattctgcggatcttctggttgaaccacgtggccacacgctgctgccagtccttgtggaagtggggcttcaacatcatgccattcctgctgggcgccatggctgcctacggccctcctacgaaggaaacactttatagatttctatagcagtgttacatagtaaggttttatggcgagttttgtagcatggatcatactaccttaggactgatggtaaagttttagtctaaggaaagctctgaaaatttgaaaatgtgtaaccacccaatgagttcagcttgcccactgcctagacagaaccatttatcaagacgggcatgcaaagccggctgtgtgggagacccgttttattattattcaaatcagtctccccaagtggattgcagtttttaaggataatttggtgggtaggggaccagtgagttgggaaagttgattagtcgggtcggagatgaaatcagagggagtcgaagctgtcctcttgtgttggcttaatttctggatgggggccacaagaccagatgagccagtttatcgttatgggtggtgctagctgatccatagagtacaggggctgcaaaatatctcaagaactgatcttcggttttacaatagtgatgttatcctgaggagcaattgggggaggtttagaatcttgcagcctccagctgcatgactcctaaaccataatttataatcttgtggctaatttgttagtcctgcgaaagcagtctagtccccaggcaggaagcgggtttgttttggaaagggctgctattgtctttgtttcaaagctaaactataaactaagttcctcccaaagttaggtcagcctacgaccaggaatgaacaaggacagcttggaggttagaagcaagatggaattggttaggttagatctctcactgtctcagttgtaattttgcgatggtgttttcaaatgttgatttaaagaagaccataaatttgtgttgctttctcagattttgagaataaggacaaaaagtgtatgttttaatgggagaatcttaagaatttcactactgaagtggatttctctgtccattaacagtgctaaatgttttgtatttcccagttggaaaaacaaaatctgcaagctttgaatgatacttgttattaggttttggtaacagctgttgtactattcccatttcaatgctcaatagccacacgtggcatgtcatacctaccaggtggacagcacagatatagaacattttcatcattgtaaaaagccctatttgacaacactaacttaaagtattaatcttttagaagagaaagcttcagtccaacccaaattacacaattttacttttgaaaatattgttgaaacaacgttcaattttttaaaattttggaaaactgaatgaaatccatttgtaaatgcgcaaatggtactggaggtggaaaactgaagccttgctatagttttagttttttggagggttatgatcaacacagagaagaaaagattcatctacccatagagcttcttgagaaaaattttctaacaataattttgaaaatttgtagtgaatttgttcttgccattatttatgggtgctttcatgtgcgaggcacatcaaagttctggggaatgacttaggcacaaccaaatggctatcttgggaagaccaaagtcctttgctatatatgagagttttgagatggcgactacctttctgtatggtagattcttgtttttgaatatgccctctgggttttcaaaacaaattgtttttacaatacctatagtagttatctagggcatattctttagcttcaaaaattctatctttagaatgggcttcaatattcataactgagttattttcctctaataaatcattaacattttc

SEQ ID NO: 1307 - DNA, 2984 bp, Homo sapiens
gttttacgctgccgccggcatccgctcggacgcggccacgttgtcttgcgcgctttgcccgcctggccctgggactctgaccctcggctaccctttcctgccccactagcgtggccgcgagcctcggtgagccggccgtattcccgctctcgcttagggggcacaggcgcaggcatcggcccggccactccaagccttcggtgcgcgggcgcgtctgggatacgggcccgggaggcgccgccctccgtccgcccggtgcctctcaggaacagcgaaccggagagagcgccggagagttgggctcagtgcggagctcggcgccggggcccatgcccgtgcgcccccgcaggccggcgccatggcctccgggagtgtggccgagtgcctgcagcaggagaccacctgccccgtgtgcctgcagtacttcgcagagcccatgatgctcgactgcggccataacatctgttgcgcgtgcctcgcccgctgctggggcacggcagagactaacgtgtcgtgcccgcagtgccgggagaccttcccgcagaggcacatgcggcccaaccggcacctggccaacgtgacccaactggtaaagcagctgcgcaccgagcggccgtcggggcccggcggcgagatgggcgtgtgcgagaagcaccgcgagcccctgaagctgtactgcgaggaggaccagatgcccatctgcgtggtgtgcgaccgctcccgcgagcaccgcggccacagcgtgctgccgctcgaggaggcggtggagggcttcaaggagcaaatccagaaccagctcgaccatttaaaaagagtgaaagatttaaagaagagacgtcgggcccagggggaacaggcacgagctgaactcttgagcctaacccagatggagagggagaagattgtttgggagtttgagcagctgtatcactccttaaaggagcatgagtatcgcctcctggcccgccttgaggagctagacttggccatctacaatagcatcaatggtgccatcacccagttctcttgcaacatctcccacctcagcagcctgatcgctcagctagaagagaagcagcagcagcccaccagggagctcctgcaggacattggggacacattgagcagggctgaaagaatcaggattcctgaaccttggatcacacctccagatttgcaagagaaaatccacatttttgcccaaaaatgtctattcttgacggagagtctaaagcagttcacagaaaaaatgcagtcagatatggagaaaatccaagaattaagagaggctcagttatactcagtggacgtgactctggacccagacacggcctaccccagcctgatcctctctgataatctgcggcaagtgcggtacagttacctccaacaggacctgcctgacaaccccgagaggttcaatctgtttccctgtgtcttgggctctccatgcttcatcgccgggagacattattgggaggtagaggtgggagataaagccaagtggaccataggtgtctgtgaagactcagtgtgcagaaaaggtggagtaacctcagccccccagaatggattctgggcagtgtctttgtggtatgggaaagaatattgggctcttacctccccaatgactgccctacccctgcggaccccgctccagcgggtggggattttcttggactatgatgctggtgaggtctccttctacaacgtgacagagaggtgtcacaccttcactttctctcatgctaccttttgtgggcctgtccggccctacttcagtctgagttactcgggagggaaaagtgcagctcctctgatcatctgccccatgagtgggatagatgggttttctggccatgttgggaatcatggtcattccatggagacctccccttgaggaggtgaattcaggccaaaagggctgttggctgtaatcctacgccaggcacaaggcatcttgttgccttgccacgtcctgtcacagctgggtatccttaccatgttccacgcccttgcagtgggagacaggatgtccatgttctctaccatccttttccttcccatgcagattgtgaaatgtaatgagatgtatcaagacatcctagaaataaaaaccagatgtccacctccagtgtttcatactttctggttttacacatcgctggagggataaagagtatggataatctttggatttggagagccgttcaagatacttccagcttcttggctcagcctggcttcctctggttcagccccacataatgattatggctatttgctgtcatttctgggctagggctcctttctaacaacctagactggaataaggccctgtcagcatggctccctttatcccagttttccgtctgggaacagtacctctgcccctgattcccaatgtgccatagttttattaactccattaaagaagcctgtatgtgttttggttagttacagttattttacaataatggtgggtaatggccccacctctgttatgagataatgttctaatcaatgtctctgcctttgtatcttttctgagggctttgtctgttctcttcattctaatgaaaggtgtattctagtgctgggtgcatatcatccaggataatattctgcccaactccatcctctgttactagatcccttaccagtcacatttgtggactggtggccagtcgtataccatccctggaaggattctgggacaatattccagggattcattgacttcttggctccttttctccatttcctttgggggaagggggaattgaccatgcttaagtgcatcctatcaaggggcagctccgtccccatggccattggatcatgagacactcgaagtcagaaggctggggcagatcacttcaagcaagcccccatgatggttctcagtcctgcttctctgtgggtacgtgcccctctgtttaaaaataaactgaatatggatgtttaaaaaaaaaaaaaaaaaa

SEQ ID NO: 1308 - protein, 513 aa, Homo sapiens
MASGSVAECLQQETTCPVCLQYFAEPMMLDCGHNICCACLARCWGTAETNVSCPQCRETFPQRHMRPNRHLANVTQLVKQLRTERPSGPGGEMGVCEKHREPLKLYCEEDQMPICVVCDRSREHRGHSVLPLEEAVEGFKEQIQNQLDHLKRVKDLKKRRRAQGEQARAELLSLTQMEREKIVWEFEQLYHSLKEHEYRLLARLEELDLAIYNSINGAITQFSCNISHLSSLIAQLEEKQQQPTRELLQDIGDTLSRAERIRIPEPWITPPDLQEKIHIFAQKCLFLTESLKQFTEKMQSDMEKIQELREAQLYSVDVTLDPDTAYPSLILSDNLRQVRYSYLQQDLPDNPERFNLFPCVLGSPCFIAGRHYWEVEVGDKAKWTIGVCEDSVCRKGGVTSAPQNGFWAVSLWYGKEYWALTSPMTALPLRTPLQRVGIFLDYDAGEVSFYNVTERCHTFTFSHATFCGPVRPYFSLSYSGGKSAAPLIICPMSGIDGFSGHVGNHGHSMETSP

SEQ ID NO: 1309 - DNA, 2704 bp, Homo sapiens
gttttacgctgccgccggcatccgctcggacgcggccacgttgtcttgcgcgctttgcccgcctggccctgggactctgaccctcggctaccctttcctgccccactagcgtggccgcgagcctcggtgagccggccgtattcccgctctcgcttagggggcacaggcgcaggcatcggcccggccactccaagccttcggtgcgcgggcgcgtctgggatacgggcccgggaggcgccgccctccgtccgcccggtgcctctcaggaacagcgaaccggagagagcgccggagagttgggctcagtgcggagctcggcgccggggcccatgcccgtgcgcccccgcaggccggcgccatggcctccgggagtgtggccgagtgcctgcagcaggagaccacctgccccgtgtgcctgcagtacttcgcagagcccatgatgctcgactgcggccataacatctgttgcgcgtgcctcgcccgctgctggggcacggcagagactaacgtgtcgtgcccgcagtgccgggagaccttcccgcagaggcacatgcggcccaaccggcacctggccaacgtgacccaactggtaaagcagctgcgcaccgagcggccgtcggggcccggcggcgagatgggcgtgtgcgagaagcaccgcgagcccctgaagctgtactgcgaggaggaccagatgcccatctgcgtggtgtgcgaccgctcccgcgagcaccgcggccacagcgtgctgccgctcgaggaggcggtggagggcttcaaggagcaaatccagaaccagctcgaccatttaaaaagagtgaaagatttaaagaagagacgtcgggcccagggggaacaggcacgagctgaactcttgagcctaacccagatggagagggagaagattgtttgggagtttgagcagctgtatcactccttaaaggagcatgagtatcgcctcctggcccgccttgaggagctagacttggccatctacaatagcatcaatggtgccatcacccagttctcttgcaacatctcccacctcagcagcctgatcgctcagctagaagagaagcagcagcagcccaccagggagctcctgcaggacattggggacacattgagcagggctgaaagaatcaggattcctgaaccttggatcacacctccagatttgcaagagaaaatccacatttttgcccaaaaatgtctattcttgacggagagtctaaagcagttcacagaaaaaatgcagtcagatatggagaaaatccaagaattaagagaggctcagttatactcagtggacgtgactctggacccagacacggcctaccccagcctgatcctctctgataatctgcggcaagtgcggtacagttacctccaacaggacctgcctgacaaccccgagaggtctccttctacaacgtgacagagaggtgtcacaccttcactttctctcatgctaccttttgtgggcctgtccggccctacttcagtctgagttactcgggagggaaaagtgcagctcctctgatcatctgccccatgagtgggatagatgggttttctggccatgttgggaatcatggtcattccatggagacctccccttgaggaggtgaattcaggccaaaagggctgttggctgtaatcctacgccaggcacaaggcatcttgttgccttgccacgtcctgtcacagctgggtatccttaccatgttccacgcccttgcagtgggagacaggatgtccatgttctctaccatccttttccttcccatgcagattgtgaaatgtaatgagatgtatcaagacatcctagaaataaaaaccagatgtccacctccagtgtttcatactttctggttttacacatcgctggagggataaagagtatggataatctttggatttggagagccgttcaagatacttccagcttcttggctcagcctggcttcctctggttcagccccacataatgattatggctatttgctgtcatttctgggctagggctcctttctaacaacctagactggaataaggccctgtcagcatggctccctttatcccagttttccgtctgggaacagtacctctgcccctgattcccaatgtgccatagttttattaactccattaaagaagcctgtatgtgttttggttagttacagttattttacaataatggtgggtaatggccccacctctgttatgagataatgttctaatcaatgtctctgcctttgtatcttttctgagggctttgtctgttctcttcattctaatgaaaggtgtattctagtgctgggtgcatatcatccaggataatattctgcccaactccatcctctgttactagatcccttaccagtcacatttgtggactggtggccagtcgtataccatccctggaaggattctgggacaatattccagggattcattgacttcttggctccttttctccatttcctttgggggaagggggaattgaccatgcttaagtgcatcctatcaaggggcagctccgtccccatggccattggatcatgagacactcgaagtcagaaggctggggcagatcacttcaagcaagcccccatgatggttctcagtcctgcttctctgtgggtacgtgcccctctgtttaaaaataaactgaatatggatgtttaaaaaaaaaaaaaaaaaa

SEQ ID NO: 1310 - protein, 358 aa, Homo sapiens
MASGSVAECLQQETTCPVCLQYFAEPMMLDCGHNICCACLARCWGTAETNVSCPQCRETFPQRHMRPNRHLANVTQLVKQLRTERPSGPGGEMGVCEKHREPLKLYCEEDQMPICVVCDRSREHRGHSVLPLEEAVEGFKEQIQNQLDHLKRVKDLKKRRRAQGEQARAELLSLTQMEREKIVWEFEQLYHSLKEHEYRLLARLEELDLAIYNSINGAITQFSCNISHLSSLIAQLEEKQQQPTRELLQDIGDTLSRAERIRIPEPWITPPDLQEKIHIFAQKCLFLTESLKQFTEKMQSDMEKIQELREAQLYSVDVTLDPDTAYPSLILSDNLRQVRYSYLQQDLPDNPERSPSTT

SEQ ID NO: 1311 - DNA, 2698 bp, Homo sapiens
agcatccattcatatattcattcagtcagctaatttttaatccagcacatactattgcaagcgctgttttaggcgttgagaatacaactgtgaacaagacgacaaaaattcctgccctcatggagcctaagagcctagattttagcgaaggtagaaccaccgtaaacaatgtatatattaataagtaacttatgcaccatactggaaaattataaagtgctatagaggaaaagaagaattcatgtaaagcaagggaaacaagatgtgagatcacagcggtttagtgttgctaatgaaccccaaatccagggcagtgtttgacacattaagccaaacagtagcggcactgtgggtcaagaagggccctttggctggcaccaccaaaacatgtgttctccaaaggaggctggcatcaactggagccacttcacagcttgtttgagaactggatctgaccagtaggaagaaaccaggacagcagtggaagactgttaaagaaacctgagtaaaaagatgcaggaggttgtgctgttggatgagagttcaggaccaccaagccagctgctttggacccgccaggatacccagctccctcaggaaagcgctctattacctgctccatatcctgccttcactaaagatggaagccaaggaaacctgccgcaagcagatatcacactaatgagccaggcccaagagtcagtgacatttgaggatgtagctgtgaacttcactaacagggagtggcagtgtctgacctacgctcaaaggcatctctataaggatgtgatgttggaaaattatgggaacatggtatcacttggatttccatttcctaaacctcctttaatctctcatctggagcgagaagtagacccctgtgtgcaggatccacaggacagggagtccctaagctgctcctacccagtgtcagctgacaagatgtggcctgagaatgaaaaggcaagttcacaacaagagatttttgaaaatggagaagcctactggatgaaatttaacagtctcctaaaagttgattcccgggatcctaaggttagagaagtttgtgttcaggatgtcaaattagagaatcaatgggaaacatctataagggagaaactgagagaagagaaagaaggctctgaggaagtgacctgcaaaaaaggaaagaaccagaaagtgcttagtaaaaacttgaatccaaactcaaaacatagtcaatgtaataaagttcttatagcacagaaactccatgaatgtgccaggtgtggcaaaaacttcagttggcactcagatctaattctccatgagcaaattcattctggtgagaaaccccatgtgtgtaatgagtgtgggaaagcattcaagaccagaaatcagctttctatgcaccggataatccacacaggggagaaaccttttaattgcacccagtgtgggaaggctttcaacagtagatcagctctttgccgacataaaaaaacccacagtggggagaagcctcacgagtgcagggactgtgggaaggccttcaagaccaggaaccgtctctgtatgcatcagcttatccacaccggggagaagccttacaaatgtaactgctgtgggaaggccttccagtttaagcattcccttaccatccatggcagaatccacactggggagaagccatatgaatgtgaggagtgcgggaaggccttcagtgggagttcagacctcaccaaacacataagaatccacactggggaacgaccttatgagtgcagcaagtgtggaagggccttcagtcggagctcagacctaagcaaacacaaacgaatccatactcgggagaaacactatgggtgtccccagtgtggaaaagacttcagcatcaaggcagaactcaccaaacacagaaggatccacactgaagagaaacgttacaggtgtgaggagtgtgggaaagcctttcgtcataactgtaagcgcagggctcatgaacgagagcatacaggggagaagccctatcaatgcagggattgtgggaaaaccttccaagataagcactgccttaccatccatcagagaatccacactggagagaaaccttacaaatgtttagagtgtgggaaagctttcagtgggaagtcaaacttgaccaatcatcgaagaattcacactggagagaagcctcacaaatgtgaggtatgtggaatggccttccatcatagttcagtcctgaggcagcacaaaagaatccacactggtgagaagccatacacctgcagtgagtgtggcacgtccttccgtcagggctcagctctgattggacataagcgagttcatactggggagaaaccttatgaatgtgaggaatgtggaaaagcttttagagtgagctcaaatcttactggacataagaaaagaaaacatcaagtatggagtacccatgaacttgatgggagtaggaaatccctctctccagtgactgtttctcagacctcagtagtcagtattttgaccagtgcctgagtataacgattctggtgttactttctgtttttcctacctcttaggctggtccttctgtctcttatattagttattcctgatttcctgacccttaattgtgagattccccaaagacattgtcctttaccttcttattcactattttttcagtgagcacatttacttccaagagtttatcaatcac

SEQ ID NO: 1312 - protein, 666 aa, Homo sapiens
MQEVVLLDESSGPPSQLLWTRQDTQLPQESALLPAPYPAFTKDGSQGNLPQADITLMSQAQESVTFEDVAVNFTNREWQCLTYAQRHLYKDVMLENYGNMVSLGFPFPKPPLISHLEREVDPCVQDPQDRESLSCSYPVSADKMWPENEKASSQQEIFENGEAYWMKFNSLLKVDSRDPKVREVCVQDVKLENQWETSIREKLREEKEGSEEVTCKKGKNQKVLSKNLNPNSKHSQCNKVLIAQKLHECARCGKNFSWHSDLILHEQIHSGEKPHVCNECGKAFKTRNQLSMHRIIHTGEKPFNCTQCGKAFNSRSALCRHKKTHSGEKPHECRDCGKAFKTRNRLCMHQLIHTGEKPYKCNCCGKAFQFKHSLTIHGRIHTGEKPYECEECGKAFSGSSDLTKHIRIHTGERPYECSKCGRAFSRSSDLSKHKRIHTREKHYGCPQCGKDFSIKAELTKHRRIHTEEKRYRCEECGKAFRHNCKRRAHEREHTGEKPYQCRDCGKTFQDKHCLTIHQRIHTGEKPYKCLECGKAFSGKSNLTNHRRIHTGEKPHKCEVCGMAFHHSSVLRQHKRIHTGEKPYTCSECGTSFRQGSALIGHKRVHTGEKPYECEECGKAFRVSSNLTGHKKRKHQVWSTHELDGSRKSLSPVTVSQTSVVSILTSA

SEQ ID NO: 1313 - DNA, 983 bp, Homo sapiens
gatttagacattgaaggactatggaccaaagcaattatagttctttacatggttttattctgcttggcttctctaaccatccaaaaatggagatgatcctgtcaggagttgtcgccatcttctacttaattacattggtgggtaacacagccatcattcttgcatctctcctggattcccagcttcatacaccaatgtactttttcctcagaaatttatctttcctagatctatgtttcacaaccagcatcatccctcagatgctggtcaacttgtggggacctgataagaccatcagctatgtgggttgtatcatccaactctatgtttacatgtggttgggctcagttgagtgccttctcctggctgttatgtcctatgatcgttttacagctatatgtaagcccttgcattattttgtagtcatgaacccacatctatgtctaaagatgattatcatgatctggagtattagtttggccaattctgtagtattatgtacactcactctgaatttgcccacatgtggaaacaacattctggatcatttcttgtgtgagttgccagctctggtcaagatagcttgtgtagacaccacaacagttgaaatgtctgttttcgctttaggcattataattgtcctcacacctctcatccttattcttatatcctatggctacattgccaaagctgtgctgagaacgaagtcaaaagcaagccagcgaaaagcaatgaatacctgtggatctcatcttactgtagtgtctatgttctatggaactattatctacatgtacctgcaaccaggtaacagggcttccaaagaccagggcaagttcctcaccctcttttacaccgtcatcactccaagtctcaacccgctcatttacaccttaagaaataaggacatgaaggatgccctgaagaaactgatgagatttcaccacaaatctacaaaaataaagaggaattgcaagtcatag

SEQ ID NO: 1314 - protein, 320 aa, Homo sapiens
MDQSNYSSLHGFILLGFSNHPKMEMILSGVVAIFYLITLVGNTAIILASLLDSQLHTPMYFFLRNLSFLDLCFTTSIIPQMLVNLWGPDKTISYVGCIIQLYVYMWLGSVECLLLAVMSYDRFTAICKPLHYFVVMNPHLCLKMIIMIWSISLANSVVLCTLTLNLPTCGNNILDHFLCELPALVKIACVDTTTVEMSVFALGIIIVLTPLILILISYGYIAKAVLRTKSKASQRKAMNTCGSHLTVVSMFYGTIIYMYLQPGNRASKDQGKFLTLFYTVITPSLNPLIYTLRNKDMKDALKKLMRFHHKSTKIKRNCKS

SEQ ID NO: 1315 - DNA, 942 bp, Homo sapiens
atgaattgggaaaatgagagctccccaaaagagtttatactacttggcttctcagatagggcttggctacaaatgcccctttttgtggtcctgttaatatcatacacaatcaccatatttggcaatgtgtccatcatgatggtgtgcattctggatcccaaacttcatactcccatgtatttctttctcactaatctctccatcttagatctctgctataccacaactacagtccctcatatgttggtaaatattggttgcaacaaaaagaccatcagctatgctggctgtgtggcccacctcatcatcttcctggccctaggtgctacagagtgtctccttctggctgttatgtcctttgacagatatgtggctgtttgcagacccctccactatgtagtcatcatgaattattggttctgcctaaggatggcagccttctcatggctcattggtttcggcaactcagtgctgcagtcttccttgactcttaacatgccacgctgtggtcaccaggaagtggaccactttttctgtgaggtgcctgcacttctcaagttgtcatgtgctgacacaaagcctattgaggctgagctcttcttctttagtgtactaattcttctaattccagtgacattgatcctcatctcctatggcttcatagctcaagcagtattaaaaatcaggtcagcagaaggacggcaaaaagcatttgggacatgtgggtcccacatgattgtggtgtccctcttttatggaacagccatttatatgtatcttcaaccaccttcatccacctctaaggactggggaaagatggtttccctcttctatggaatcatcacatccatgttgaactccctcatctacagccttagaaataaagatatgaaggaggccttcaagaggctgatgccaagaatctttttctgtaagaaataa

SEQ ID NO: 1316 - protein, 313 aa, Homo sapiens
MNWENESSPKEFILLGFSDRAWLQMPLFVVLLISYTITIFGNVSIMMVCILDPKLHTPMYFFLTNLSILDLCYTTTTVPHMLVNIGCNKKTISYAGCVAHLIIFLALGATECLLLAVMSFDRYVAVCRPLHYVVIMNYWFCLRMAAFSWLIGFGNSVLQSSLTLNMPRCGHQEVDHFFCEVPALLKLSCADTKPIEAELFFFSVLILLIPVTLILISYGFIAQAVLKIRSAEGRQKAFGTCGSHMIVVSLFYGTAIYMYLQPPSSTSKDWGKMVSLFYGIITSMLNSLIYSLRNKDMKEAFKRLMPRIFFCKK

SEQ ID NO: 1317 - DNA, 936 bp, Homo sapiens
atgaatgatgatggaaaagtcaatgctagctctgaggggtactttattttagttggattttctaattggcctcatctggaagtagttatctttgtggttgtcttgatcttctacttgatgacactgataggaaacctgttcatcatcatcctgtcatacctggactcccatctgcacacaccaatgtacttcttcctttcaaacctctcatttctggatctctgctacaccaccagctctatccctcagttgctggtcaatctctggggcccggaaaagaccatctcttatgctggttgcatgattcaactttactttgttctcgcactgggaaccgcagagtgtgtcctactggtggtgatgtcctatgaccgttatgcagctgtgtgtagacctttgcattacactgtcctcatgcaccctcgtttctgccacctgctggctgtggcttcttgggtaagtggttttaccaactcagcacttcattcctccttcaccttctgggtacctctgtgtggacaccgccaagtagatcactttttctgtgaagttccagcacttctgcgattatcgtgtgttgatacccatgtcaatgagctgaccctcatgatcacaagctccatatttgttctcatacctctcatcctcattctcacttcttatggtgccatcgtccaagctgtactgaggatgcagtcaaccactgggcttcagaaagtgtttggaacatgtggagctcatcttatggctgtatctctctttttcattccggccatgtgcatatatctccagccaccatcaggaaattctcaagatcaaggcaagttcattgccctcttttatactgttgtcacacctagtcttaaccctctaatctacaccctcagaaacaaagttgtaagaggggcagtgaagagactaatggggtgggaatga

SEQ ID NO: 1318 - protein, 311 aa, Homo sapiens
MNDDGKVNASSEGYFILVGFSNWPHLEVVIFVVVLIFYLMTLIGNLFIIILSYLDSHLHTPMYFFLSNLSFLDLCYTTSSIPQLLVNLWGPEKTISYAGCMIQLYFVLALGTAECVLLVVMSYDRYAAVCRPLHYTVLMHPRFCHLLAVASWVSGFTNSALHSSFTFWVPLCGHRQVDHFFCEVPALLRLSCVDTHVNELTLMITSSIFVLIPLILILTSYGAIVQAVLRMQSTTGLQKVFGTCGAHLMAVSLFFIPAMCIYLQPPSGNSQDQGKFIALFYTVVTPSLNPLIYTLRNKVVRGAVKRLMGWE

SEQ ID NO: 1319 - DNA, 939 bp, Homo sapiens
atgatgattaaaaaaaatgcaagttcggaagacttctttattctacttggattttctaattggcctcagctggaagtagttctctttgtggttatcttgatcttctacctgatgacactgacaggaaacctgttcatcatcatcctgtcatacgtggactcccatctccacacaccaatgtacttcttcctttcaaacctctcatttctggatctctgccacaccaccagctctatccctcagttgctggtgaatctccggggcccggaaaagaccatctcgtatgctggttgcatggttcaactttactttgttcttgcactgggaatcgcagagtgtgtcctactggtggtgatgtcgtatgatcgttatgtagctgtgtgtagacctttgcattacactgtcctcatgcaccctcgtttctgccacttgttggctgcggcttcttgggtaattggttttactatctcagcacttcattcctcctttactttctgggtacccctttgtggacatcgcctagtggatcacttcttctgtgaagttccagcacttctgcgtttatcatgtgttgacacccatgcaaatgagctgaccctcatggtcatgagctccatttttgttctcatacctctcattctgattctcactgcctatggtgccattgcccgggctgtactgagcatgcaatcaaccactgggcttcagaaagtgtttaggacatgtggagcccatcttatggttgtatctctctttttcattccagtcatgtgcatgtatctccagccaccatcagaaaattctcctgatcagggcaagttcattgccctcttttatactgttgtcacaccgagtcttaatcctctaatctacactctcagaaacaagcatgtaaaaggggcagcgaagagactattggggtgggagtgggggaagtga

SEQ ID NO: 1320 - protein, 312 aa, Homo sapiens
MMIKKNASSEDFFILLGFSNWPQLEVVLFVVILIFYLMTLTGNLFIIILSYVDSHLHTPMYFFLSNLSFLDLCHTTSSIPQLLVNLRGPEKTISYAGCMVQLYFVLALGIAECVLLVVMSYDRYVAVCRPLHYTVLMHPRFCHLLAAASWVIGFTISALHSSFTFWVPLCGHRLVDHFFCEVPALLRLSCVDTHANELTLMVMSSIFVLIPLILILTAYGAIARAVLSMQSTTGLQKVFRTCGAHLMVVSLFFIPVMCMYLQPPSENSPDQGKFIALFYTVVTPSLNPLIYTLRNKHVKGAAKRLLGWEWGK

SEQ ID NO: 1321 - DNA, 966 bp, Homo sapiens
atggtcaatttgacttcaatgagtggattccttcttatggggttttctgatgagcgtaagcttcagattttacatgcattggtatttctggtgacatacctgctggccttgacaggcaacctcctcattatcaccatcattaccgtggaccgtcgtctccattcccccatgtattactttttaaagcacctctctcttctggacctctgcttcatctctgtcacagtcccccagtccattgcaaattcacttatgggcaacggttacatttctcttgttcagtgcattcttcaggttttcttcttcatagctctggcctcatcagaagtggccattctcacagtgatgtcttatgacaggtacgcagcaatctgtcaaccacttcattatgagactattatggatccccgtgcctgtaggcatgcagtgatagctgtgtggattgctgggggcctctctgggctcatgcatgctgccattaacttctccatacctctctgtgggaagagagtcattcaccaattcttctgtgatgttcctcagatgctgaaactagcctgttcttatgaattcattaatgagattgcactggctgcattcacaacgtctgcagcatttatctgtttgatctccattgtgctctcctacattcgcatcttctctacagtgctgagaatcccatcagctgagggccggaccaaggtcttctccacctgcctaccacacctatttgtagccaccttctttctttcagctgcaggctttgagtttctcagactgccttctgattcctcatcgactgtggaccttgtattctccgtattctatactgtgatacctccaacactcaatccagtcatttatagcttacggaatgattccatgaaggcagcactgaggaagatgctgtcaaaggaagagcttcctcagagaaaaatgtgcttaaaagccatgtttaaactctga

SEQ ID NO: 1322 - protein, 321 aa, Homo sapiens
MVNLTSMSGFLLMGFSDERKLQILHALVFLVTYLLALTGNLLIITIITVDRRLHSPMYYFLKHLSLLDLCFISVTVPQSIANSLMGNGYISLVQCILQVFFFIALASSEVAILTVMSYDRYAAICQPLHYETIMDPRACRHAVIAVWIAGGLSGLMHAAINFSIPLCGKRVIHQFFCDVPQMLKLACSYEFINEIALAAFTTSAAFICLISIVLSYIRIFSTVLRIPSAEGRTKVFSTCLPHLFVATFFLSAAGFEFLRLPSDSSSTVDLVFSVFYTVIPPTLNPVIYSLRNDSMKAALRKMLSKEELPQRKMCLKAMFKL

SEQ ID NO: 1323 - DNA, 1048 bp, Homo sapiens
gtcatgctattgcagcatatgattcatttttataatctggtcttctctttgcccaattcctgaaaggaaaccaggcgacatcatggaaagaaagaatcaaacagctataactgaattcatcatcttgggattctccaacctaaatgaattgcagtttttactattcaccatcttctttctgacttatttctgtactttgggaggaaatatattaattatcttgacgactgtgactgatccacacctgcatacacctatgtattattttctagggaacttggcctttattgacatctgctacaccaccagcaatgtcccccagatgatggtgcacctcctctcaaagaaaaaaagcatttcttatgtggggtgtgtggttcaactttttgcatttgttttctttgtaggatcagagtgtctcctactggcagcaatggcatatgatcgttacattgcaatctgcaatcctttaaggtattcagttattctgagcaaggttctatgcaatcaattagcagcctcatgctgggctgctggtttccttaactcagtggtgcatacagtgttgacattctgcctgcccttctgtggcaacaatcagattaattacttcttctgtgacatcccccctttgctgatcttgtcttgtggaaacacttctgtcaatgagttggcactgctatccactggggtcttcattggttggactcctttcctttgtatcgtactttcctacatttgcataatctccaccatcttgaggatccagtcctcagagggaagacgaaaagccttttctacatgtgcctcccacctggccattgtctttctcttttatggcagcgccatctttacatatgtacggcccatctcaacttactcattaaagaaagataggttggtttcagtgttgtacagtgttgttacccccatgctaaaccctataatttacacattgaggaataaggacatcaaagaagctgtcaaaactatagggagcaagtggcagccaccaatttcctctttggatagtaaactcacttattga

SEQ ID NO: 1324 - protein, 321 aa, Homo sapiens
MERKNQTAITEFIILGFSNLNELQFLLFTIFFLTYFCTLGGNILIILTTVTDPHLHTPMYYFLGNLAFIDICYTTSNVPQMMVHLLSKKKSISYVGCVVQLFAFVFFVGSECLLLAAMAYDRYIAICNPLRYSVILSKVLCNQLAASCWAAGFLNSVVHTVLTFCLPFCGNNQINYFFCDIPPLLILSCGNTSVNELALLSTGVFIGWTPFLCIVLSYICIISTILRIQSSEGRRKAFSTCASHLAIVFLFYGSAIFTYVRPISTYSLKKDRLVSVLYSVVTPMLNPIIYTLRNKDIKEAVKTIGSKWQPPISSLDSKLTY

SEQ ID NO: 1325 - DNA, 1869 bp, Homo sapiens
agcaatggagaatgtcactacaatgaatgagtttcttctacttggcctgactggtgttcaggagctgcagcctttcttctttgggattttcttaatcatttacctgataaacttgattggaaatggatctatattggtgatggttgttttggaaccacaactccactcccctatgtatttttttctgggaaacctttcttgtctggatatttcttattcttcagtgacactgcccaagctgctcgtaaacctcgtgtgcagtcgcagggctatatcttttctaggctgtatcacccagctacacttcttccactttttgggaagcacagaggccattttactggctatcatggcctttgaccgttttgttgccatctgcaatcctcttcgctacactgtcatcatgaacccccaggtgtgtattctgttggcagctgcggcctggctcatcagcttcttttacgctctgatgcattctgtcatgactgcacacctgagtttttgtggctctcagaaactcaatcacttcttctacgatgtcaagccgctcttagaattggcctgtagtgacacattactcaatcaatggcttctttccattgtcacaggcagcatatccatgggagctttctttctgactcttctctcctgcttctatgtaattggcttccttctgtttaagaacaggtcctgcagaatactccacaaggctctgtccacttgtgcctcccattttatggtggtatgtcttttctatggacctgtgggcttcacatatattcgtcctgcttcagccacctccatgattcaggaccggataatggccatcatgtatagcgccgtcacccctgtactgaatccactaatctacacccttaggaacaaagaagtgatgatggctctgaagaaaatctttggtaggaagttgtttaaagactggcagcaacaccactaggactaatgagggatatctgatttctattaagactgatttccatcacttcactgtaagaaatgatttgtttacctggtttatatttttctttcaaaaattttgagcacatattatattaggcagtgtagtaggttcaagaaacacaggagcaagcaaaacaaattccataatgtcatcaaacataaagtttaatgtgatggaggccccaaataaccaaacgcgtaagtacatatgtcaggataattcggtggcaaggagaactaaggaggtaggaagtatggggagggttagagtaggaatctgctgtgtaaaaaagaatgtggcatttctcctaggacaaaaacctttggaattttccaagtaatagaagtatcttactgaaattccatatgagataatctttatttttgcctattttttttccttttgtgtttccttcagcaggaatgtactgatgataatttttctcacaacagtttttatctagaatatcatttttgttaatcttaattcttgaagagaatttttaatgggtatttaattttagggagagatttttctagccattgaaaatatcttgtttttccccagcttattgaagtataattaacaaataaaaattgcatatatttaggcttcacaacatgatgctttagtatatgtatacattgtgaagagactaccacaatcaagctaaacctacattactgtccctgcattagtttactgttgaatactagaagttcttcattctatctaactgcattttcatacccattaagccaatgtgacaagctctttgtttcagttggagtgtttgcacaatttaaatttgataaatttttgatagaattaaatttaaatttatcctccaactaaatttttgatagaattaaatttaaatttgtcctcca

SEQ ID NO: 1326 - protein, 316 aa, Homo sapiens
MENVTTMNEFLLLGLTGVQELQPFFFGIFLIIYLINLIGNGSILVMVVLEPQLHSPMYFFLGNLSCLDISYSSVTLPKLLVNLVCSRRAISFLGCITQLHFFHFLGSTEAILLAIMAFDRFVAICNPLRYTVIMNPQVCILLAAAAWLISFFYALMHSVMTAHLSFCGSQKLNHFFYDVKPLLELACSDTLLNQWLLSIVTGSISMGAFFLTLLSCFYVIGFLLFKNRSCRILHKALSTCASHFMVVCLFYGPVGFTYIRPASATSMIQDRIMAIMYSAVTPVLNPLIYTLRNKEVMMALKKIFGRKLFKDWQQHH

SEQ ID NO: 1327 - DNA, 924 bp, Homo sapiens
atgctgaatacaacctcagtcaccgaatttctcctcttgggagtgacagacattcaagaactgcagccttttctcttcgtggttttcctcaccatctacttcatcagtgtgactgggaatggagccgttctgatgattgtcatctccgatcctagactccattcccttatgtatttcttcctgggaaacctgtcctacctggatatctgttactctacggtgacactgccaaaaatgctgcagaactttctctctacacacaaagcaatttctttcttgggatgcataagccagcttcatttcttccactccctgggcagcacggagtccatgttgttcgccgtgatggcatttgacctctctgtggctatctgcaagccacttcgctacactgtcatcatgaaccctcagctctgtacccagatggccatcacaatctgggtcattggttttttccatgccctgctgcactccgtaatgacttctcgcttgaacttctgtggttccaaccgtatccatcattttctctgtgatattaagccattgctaaagctggcctgtgggaacactgagcttaatcagtggctactcagtactgtcacggggacaattgccatgggccccttctttctgacacttctctcctatttctacattatcacttatctcttcttcaagacccgttcttgtagcatgctctgtaaagcactgtccacttgtgcctcccacttcatggtagttattcttttctatgcacctgttcttttcacctatatccatcctgcgttagagagcttcatggaccaggaccggattgttgccatcatgtacactgtggtcactcctgtactaaacccactgatctatactttgaggaacaaggaagtgaagggggccttgggtagagtgatcagaaggctttga

SEQ ID NO: 1328 - protein, 307 aa, Homo sapiens
MLNTTSVTEFLLLGVTDIQELQPFLFVVFLTIYFISVTGNGAVLMIVISDPRLHSLMYFFLGNLSYLDICYSTVTLPKMLQNFLSTHKAISFLGCISQLHFFHSLGSTESMLFAVMAFDLSVAICKPLRYTVIMNPQLCTQMAITIWVIGFFHALLHSVMTSRLNFCGSNRIHHFLCDIKPLLKLACGNTELNQWLLSTVTGTIAMGPFFLTLLSYFYIITYLFFKTRSCSMLCKALSTCASHFMVVILFYAPVLFTYIHPALESFMDQDRIVAIMYTVVTPVLNPLIYTLRNKEVKGALGRVIRRL

SEQ ID NO: 1329 - DNA, 2229 bp, Homo sapiens
ctctaataacgttaggcttggtatagaagatgcagagacatgctaaaatttctcccccaattattgccaagcagaaacttggacgatcgacatggaaattgtctccacaggaaacgaaactattactgaatttgtcctccttggcttctatgacatccctgaactgcatttcttgttttttattgtattcactgctgtctatgtcttcatcatcatagggaatatgctgattattgtagcagtggttagctcccagaggctccacaaacccatgtatattttcttggcgaatctgtccttcctggatattctctacacctccgcagtgatgccaaaaatgctggagggcttcctgcaagaagcaactatctctgtggctggttgcttgctccagttctttatcttcggctctctagccacagctgaatgcttactgctggctgtcatggcatatgaccgctacctggcaatttgctacccactccactacccactcctgatggggcccagacggtacatggggctggtggtcacaacctggctctctggatttgtggtagatggactggttgtggccctggtggcccagctgaggttctgtggccccaaccacattgaccagttttactgtgactttatgcttttcgtgggcctggcttgctcggatcccagagtggctcaggtgacaactctcattctgtctgtgttctgcctcactattccttttggactgattctgacatcttatgccagaattgtggtggcagtgctgagagttcctgctggggcaagcaggagaagggctttctccacatgctcctcccacctagctgtagtgaccacattctatggaacgctcatgatcttttatgttgcaccctctgctgtccattcccagctcctctccaaggtcttctccctgctctacactgtggtcacccctctcttcaatcctgtgatctataccatgaggaacaaggaggtgcatcaggcacttcggaagattctctgtatcaaacaaactgaaacacttgattgaaggagagtaatgaagatgttattttggacttcggacacctccattggggactcttccaggatgggttggagaggagtaactttgtcttattcgaccattctctttgaactcttctgcagttatactaaaaatgaaaatgatagggcaacaattttttaacttttattttaagttcaagggtacatgtgcaggtttgttacataggtaaacttgtgtcatgggggtttactgtacagattatttcatcacccaggtattaagcctagtactcattaatcatttttcctgatcttctccctcctcccaacctccaccctcaagtaggattcagtgtgttgttcccctctatgtatccatatgttttcataatttagctcccacttatgagtgaagacatacggtatttgattttctgttcctgtgttagtttgcgaaggatagtagcctccaattccatccatgtcaaataatcaaaattatttaaactttgattagttctttattaaatatgtcataaatatttaaaaataatacagcaataccaaaataaacctagaaatattgttttttatattattgttgtatgacatttaaaaatttctttctatgtgtatttatatttatacatacaagttggatcatggagtttgtaatctggttttccactgaacactgtgtcacgaacaactttttctattaacaagcatctatttctttattcttctgggcttcatcgtatggctaaacatgatttgttattctattttgggaatttttagttgtattctattcttttactgtacattgtttacatctggattttcctgtaataaacttttagcacctaaattgcaagatctaaggatatgtgtttttaaaaatctaaagctgaattccttttcttttaaacttcttttcttgtagaacatttcaaacatacataaaagagaagagcacagtgaacccccatgtactccatgtagccaccatccagcttcaacatcaacattttgctaatcttattttaattagctacagctccttgtttgttagttttcatggaaaattttagggcaaattccagatgttgtataactattatgttgtgtaagttatgtatgtacatattccacatatgtatttagtataatctgtgactaataaagacattttaaaaaaccatgcccaca

SEQ ID NO: 1330 - protein, 315 aa, Homo sapiens
MEIVSTGNETITEFVLLGFYDIPELHFLFFIVFTAVYVFIIIGNMLIIVAVVSSQRLHKPMYIFLANLSFLDILYTSAVMPKMLEGFLQEATISVAGCLLQFFIFGSLATAECLLLAVMAYDRYLAICYPLHYPLLMGPRRYMGLVVTTWLSGFVVDGLVVALVAQLRFCGPNHIDQFYCDFMLFVGLACSDPRVAQVTTLILSVFCLTIPFGLILTSYARIVVAVLRVPAGASRRRAFSTCSSHLAVVTTFYGTLMIFYVAPSAVHSQLLSKVFSLLYTVVTPLFNPVIYTMRNKEVHQALRKILCIKQTETLD

SEQ ID NO: 1331 - DNA, 939 bp, Homo sapiens
atgagtgcaaacacctccatggtgactgagtttcttcttctcggcttctcccacctggccgacctccagggcttgctcttctctgtctttctcactatctacctgctgaccgtggcaggcaatttcctcattgtggtgctggtctccactgatgctgccctccagtcccctatgtacttcttcctgcgcaccctctcggccttggagattggctatacgtctgtcacggtccccctgctacttcaccacctccttactggccggcgccacatctctcgctctggatgtgctctccagatgttcttcttcctcttctttggcgccacggagtgctgcctcctggcagccatggcctatgaccgctatgcagccatctgtgaacccctccgctacccactgctgctgagccaccgggtgtgtctacagctagctgggtcggcgtgggcctgtggggtgctggtggggctgggccacacccctttcatcttctctttgcccttctgcggccccaataccatcccgcagttcttctgtgagatccagcctgtcctgcagctggtatgtggagacacctcgcttaatgaactgcagattatcctggcaacagccctcctcatcctctgcccctttggcctcatcctgggctcctacgggcgtatcctcgttaccatcttccggatcccatctgttgcgggccgccgcaaggccttctccacctgctcctcccacctgatcgtggtctccctcttctatggcaccgcactctttatctatattcgccctaaggccagctacgatccggccactgaccctctggtgtccctcttctatgctgtggtcacccccatcctcaaccccatcatctacagcctgcggaacacagaggtcaaagctgccctaaagagaaccatccagaaaacggtgcctatggagatttga

SEQ ID NO: 1332 - protein, 312 aa, Homo sapiens
MSANTSMVTEFLLLGFSHLADLQGLLFSVFLTIYLLTVAGNFLIVVLVSTDAALQSPMYFFLRTLSALEIGYTSVTVPLLLHHLLTGRRHISRSGCALQMFFFLFFGATECCLLAAMAYDRYAAICEPLRYPLLLSHRVCLQLAGSAWACGVLVGLGHTPFIFSLPFCGPNTIPQFFCEIQPVLQLVCGDTSLNELQIILATALLILCPFGLILGSYGRILVTIFRIPSVAGRRKAFSTCSSHLIVVSLFYGTALFIYIRPKASYDPATDPLVSLFYAVVTPILNPIIYSLRNTEVKAALKRTIQKTVPMEI

SEQ ID NO: 1333 - DNA, 3009 bp, Homo sapiens
gtttgcttttagttctcattgtgagatcacaagtggaggctccaaccagtccagaagttcctttctatggggaagctgtggcagcaaggccgtgaagagagtctgacttaattgcaaagacgaggtttcaccatgttgaccaggctgatctcaaacatctgacctcaggaagtcagaggcaccaatgtgaggttccacctgctttccagcacattcttggtttcctcacttctgctagacaacgtttgatcagaaggaacagggaacgagaaggagctgctggatgacgataagcctgggaaagggaggctgggtgagcagagacagaaaagaaacacctacctgctgtgacctcacaaacacccaggctgagttttgataagacaggttgaatcacactggggtgacagcctcatccctccaggtacaaacaagaacaggccatggttaaccaaagctcccccatgggcttcctccttctgggcttctctgaacacccagcactggaaaggactctctttgtggttgtcttcacttcctacctcttgaccctggtgggcaacacactcatcatcctgctgtctgtactgtaccccaggctccactctccaatgtactttttcctctctgacctctccttcttggacctctgctttaccacaagttgtgtcccccagatgctggtcaacctctggggcccaaagaagaccatcagcttcctgggatgctctgtccagctcttcatcttcctgtccctggggaccactgagtgcatcctcctgacagtgatggcctttgaccgatacgtggctgtctgccagcccctccactatgccaccatcatccacccccgcctgtgctggcagctggcatctgtggcctgggttatgagtctggttcaatcgatagtccagacaccatccaccctccacttgcccttctgtccccaccagcagatagatgactttttatgtgaggtcccatctctgattcgactctcctgtggagatacctcctacaatgaaatccagttggctgtgtccagtgtcatcttcgtggttgtgcctctcagcctcatccttgcctcttatggagccactgcccaggcagtgctgaggattaactctgccacagcatggagaaaggcctttgggacctgctcctcccatctcactgtggtcaccctcttctacagctcagtcattgctgtctacctccagcccaaaaatccgtatgcccaagggaggggcaagttctttggtctcttctatgcagtgggcactccttcacttaaccctctcgtatacaccctgaggaacaaggagataaagcgagcactcaggaggttactagggaaggaaagagactccagggaaagctggagagctgcttaatatactttcgaaagtaagaagagtttcttcaagatttatgaacatgttaagttttccagactactacccttcccacatacacctgagccactgtggtgggtcacagtgtggctatgttatctatgagagggagaatgagaaagagagggacagagagataaaagaaattgggtgagaggagataggtagctccataaggcacacaaattcaaatattatcattcctatcactgtccattcttaatatttctatcctccattctgttctttttactgtcatcacttctatagatttcctaactccaccatgcctatttctggttatataattgctctccaattgtcatgtcagtgtaggggaactactccatcatagcattctggacaccttgcatgtatctacgtaggtcatgtaagcaaaggcttgaagaacagctaatctgagatttagaagaatgctttttgatcctcctggaatatgagaggatgggaggccctttagagcctgcctcaatgccatctctcactctccttcttatatccctgggagtatgtcatgtgacaagtctttactgtctcccaggttttggatggagcatggggttttctgccccacaccctttaggatatagctgaagaatataatgaggaatagctggattctagaactgactcctcaccagtggtatattccacaacagtgtcacagtcgtctggcccctttggtttccgtgtcatcctttttggtgtgtaggacaaggagccagggaattggcacgtttggcttttacttcttttttatatgtaaataataagccatctaagtgtaaaagtggctcatatcttctccagccaaatcagctaggccatggccttgccttgcttctcatgagtgtgcttgacagtcatcaccgtcactctatcttcatttctggttcttaccgtgttagcttagttcattcaagctactatcacaagctacacataaattgggtggtttataaataacaaacatttctttcttacagttctggaggctggaaactccaagattaaggcagatttcatgcctattgagggcctgctttctgattatagaaggtgacttcttgctgtgcccacacatggtgaaagggactaccaactctctggagtctcttttatgagggcactaattccaattatgaagcctcttccctcatgacctaatcactgcccaaaggccccatgttctaatgccatcatcttggtggtttaggatttcaacatatgaattttggaaggacataagcattcaaccccctgcacatgtcttctttcctacttcctcaaggttctttctgtccagttgctccttcttctattgacccttttttgccttctctttctccttcactgcctcaagttacagccagaggaaaggaggaactaaaacttagcaaatctataatcacatgcaaatacacagaatggattgttacaaccaaaatgcaggctctattgttttcaatttagcagcctttcaaatgtatatggttctggccacattaaagttgcaaataacactttttttgagactgaaataaaggtgaaatattggaaaaaaaaaaaaaaa

SEQ ID NO: 1334 - protein, 316 aa, Homo sapiens
MVNQSSPMGFLLLGFSEHPALERTLFVVVFTSYLLTLVGNTLIILLSVLYPRLHSPMYFFLSDLSFLDLCFTTSCVPQMLVNLWGPKKTISFLGCSVQLFIFLSLGTTECILLTVMAFDRYVAVCQPLHYATIIHPRLCWQLASVAWVMSLVQSIVQTPSTLHLPFCPHQQIDDFLCEVPSLIRLSCGDTSYNEIQLAVSSVIFVVVPLSLILASYGATAQAVLRINSATAWRKAFGTCSSHLTVVTLFYSSVIAVYLQPKNPYAQGRGKFFGLFYAVGTPSLNPLVYTLRNKEIKRALRRLLGKERDSRESWRAA

SEQ ID NO: 1335 - DNA, 1137 bp, Homo sapiens
atggtctgggggaaaatttgctggttcagccagagggctggatggacagtgtttgctgagtcacagatatctctctcatgtagcctttgtctccacagtggtgaccaggaggcacagaacccaaacctggtatctcagctctgtggcgtctttcttcaaaatgagacgaatgaaaccatacatatgcagatgagcatggcagtgggacagcaggccctgcccttgaatatcattgcccccaaggctgtgctggtctccctctgtggggtcttattgaatggcactgtcttctggctgctttgctgtggggccacgaatccctacatggtatacatcctccacctggtcgctgctgacgtgatctatctttgctgctcggcagtggggttcttacaggtgactctgctaacttatcatggagtcgtgttttttatccctgatttcctggccatattgtctcccttctcctttgaggtgtgtctctgtctcctggtggccatcagcacagagcggtgtgtgtgtgtcctcttccccatctggtacagatgccaccgcccaaaatacacatctaatgttgtctgcaccctcatctggggcctgcctttttgcatcaacatagtaaaatcacttttcctaacttactggaaacatgtaaaggcatgtgtcatatttctaaagctttctgggctcttccatgctatcctttcacttgtgatgtgtgtgtcgagtctgactctactcattagattcctgtgctgctcccagcagcaaaaggccaccagggtctatgcggtggtgcagatctcggcccccatgttcctactctgggccctacccctgagcgtggcacccctcataacagatttcaaaatgtttgtcaccacctcctatttaatttccttgttcctcattataaacagcagcgccaaccctatcatttatttctttgtggggagcctcagaaagaaaaggctgaaggaatctctcagagtgattctccaacgggcgttagcagataagccagaggtggggaggaacaaaaaggcagctggcatcgacccaatggagcaaccacactctactcagcatgtggagaaccttcttcccagggagcacagggtcgatgtggaaacataa

SEQ ID NO: 1336 - protein, 378 aa, Homo sapiens
MVWGKICWFSQRAGWTVFAESQISLSCSLCLHSGDQEAQNPNLVSQLCGVFLQNETNETIHMQMSMAVGQQALPLNIIAPKAVLVSLCGVLLNGTVFWLLCCGATNPYMVYILHLVAADVIYLCCSAVGFLQVTLLTYHGVVFFIPDFLAILSPFSFEVCLCLLVAISTERCVCVLFPIWYRCHRPKYTSNVVCTLIWGLPFCINIVKSLFLTYWKHVKACVIFLKLSGLFHAILSLVMCVSSLTLLIRFLCCSQQQKATRVYAVVQISAPMFLLWALPLSVAPLITDFKMFVTTSYLISLFLIINSSANPIIYFFVGSLRKKRLKESLRVILQRALADKPEVGRNKKAAGIDPMEQPHSTQHVENLLPREHRVDVET

SEQ ID NO: 1337 - DNA, 971 bp, Homo sapiens
gattgcttgaggagagaagtatgtgatcagaaagcattctttgtctattaactcctgcccagcaaaagtgaaagaaaattcatgggagcatgcaagaacaaagagcacagcaaagctggacaaacacagcaatccaggcaggggatttccaactcaactctggtatgtaagctgcatgcaaagtcctttttctgtctctggtttctggccccttgtctgcagagatggctcccaatgcttcctgcctctgtgtgcatgtccgttccgaggaatgggatttaatgacctttgatgccaacccatatgacagcgtgaaaaaaatcaaagaacatgtccggtctaagaccaaggttcctgtgcaggaccaggttcttttgctgggctccaagatcttaaagccacggagaagcctctcatcttacggcattgacaaagagaagaccatccaccttaccctgaaagtggtgaagcccagtgatgaggagctgcccttgtttcttgtggagtcaggtgatgaggcaaagaggcacctcctccaggtgcgaaggtccagctcagtggcacaagtgaaagcaatgatcgagactaagacgggtataatccctgagacccagattgtgacttgcaatggaaagagactggaagatgggaagatgatggcagattacggcatcagaaagggcaacttactcttcctggcatcttattgtattggagggtgaccaccctgggcatggggtgttggcaggggtcaaaaagcttatttcttttaatctcttactcaacgaacacatcttctgatgatttcccaaaattaatgagaatgagatgagtagagtaagatttgggtgggatgggtaggatgaagtatattgcccaactctatgtttctttgattctaacacaattaattaagtgacatgatttttactaatgtattactgagactagtaaataaatttttaagccaa

SEQ ID NO: 1338 - protein, 165 aa, Homo sapiens
MAPNASCLCVHVRSEEWDLMTFDANPYDSVKKIKEHVRSKTKVPVQDQVLLLGSKILKPRRSLSSYGIDKEKTIHLTLKVVKPSDEELPLFLVESGDEAKRHLLQVRRSSSVAQVKAMIETKTGIIPETQIVTCNGKRLEDGKMMADYGIRKGNLLFLASYCIGG

SEQ ID NO: 1339 - DNA, 1063 bp, Homo sapiens
tgacagcctcatccctccaggtacaaacaagaacaggccatggttaaccaaagctccacaccgggcttcctccttctgggcttctctgaacacccagggctggaaaggactctcttcgtggttgtcctcacttcctacctcctaaccctagtgggcaacacactcatcatcctgctgtctgcgctggaccccaagctccactctccaatgtactttttcctctccaacctctccttcttggacctctgtttcaccacgagttgtgttccccaaatgctggtcaacctctggggcccaaagaagaccatcagcttcctggactgctctgtccagatcttcatcttcctgtccctggggacaactgagtgcatcctcttgacagtgatggcttttgatcgctacgtggctgtctgccagcccctccactatgccaccatcatccacccccgcctgtgctggcagctggcatctgtggcctgggtcattgggctagtggagtcagtggtccagacaccatccaccctgcacctgcccttctgccccgatcggcaggtggatgattttgtctgtgaggtcccagctctaattcgactctcctgtgaagacacctcctacaatgagatccaggtggctgttgccagtgtcttcatcttggttgtgcctctcagcctcatccttgtctcttacggagccattacctgggcagtgctgaggattaactctgcaaaagggcggaggaaagcttttgggacctgctcctcccatctcactgtggtcaccctcttctacagctcagtcattgctgtctacctccagcccaaaaatccctatgcccaagagaggggcaagttctttggtctcttctatgcagtgggcactccttcacttaaccctctcatatacaccctgaggaacaaggaggtaaccagggcattcaggagattgctggggaaggaaatggggctcacacaaagctgagggagagctgcttaatgtgctttaaaagagaggagattctatgtgcttttatcagaaagtttgagttccctgcccctctgccttc

SEQ ID NO: 1340 - protein, 312 aa, Homo sapiens
MVNQSSTPGFLLLGFSEHPGLERTLFVVVLTSYLLTLVGNTLIILLSALDPKLHSPMYFFLSNLSFLDLCFTTSCVPQMLVNLWGPKKTISFLDCSVQIFIFLSLGTTECILLTVMAFDRYVAVCQPLHYATIIHPRLCWQLASVAWVIGLVESVVQTPSTLHLPFCPDRQVDDFVCEVPALIRLSCEDTSYNEIQVAVASVFILVVPLSLILVSYGAITWAVLRINSAKGRRKAFGTCSSHLTVVTLFYSSVIAVYLQPKNPYAQERGKFFGLFYAVGTPSLNPLIYTLRNKEVTRAFRRLLGKEMGLTQS

SEQ ID NO: 1341 - DNA, 4445 bp, Homo sapiens
cgctccccgctcccgtggctgccgccgccccggggaagaagagacaggggtggggtttgggggaagcgagagaggaggggagagaccctggccaggctggagcctggattcgaggggaggagggacgggaggaggagaaaggtggaggagaagggaggggggagcggggaggagcggccgggcctggggccttgaggcccggggagagccggggagccgggcccgcgcgccgagatgttgctgctgctgttactggcgccactcttcctccgccccccgggcgcgggcggggcgcagacccccaacgccacctcagaaggttgccagatcatacacccgccctgggaagggggcatcaggtaccggggcctgactcgggaccaggtgaaggctatcaacttcctgccagtggactatgagattgagtatgtgtgccggggggagcgcgaggtggtggggcccaaggtccgcaagtgcctggccaacggctcctggacagatatggacacacccagccgctgtgtccgaatctgctccaagtcttatttgaccctggaaaatgggaaggttttcctgacgggtggggacctcccagctctggacggagcccgggtggatttccggtgtgaccccgacttccatctggtgggcagctcccggagcatctgtagtcagggccagtggagcacccccaagccccactgccaggtgaatcgaacgccacactcagaacggcgcgcagtgtacatcggggcactgtttcccatgagcgggggctggccagggggccaggcctgccagcccgcggtggagatggcgctggaggacgtgaatagccgcagggacatcctgccggactatgagctcaagctcatccaccacgacagcaagtgtgatccaggccaagccaccaagtacctatatgagctgctctacaacgaccctatcaagatcatccttatgcctggctgcagctctgtctccacgctggtggctgaggctgctaggatgtggaacctcattgtgctttcctatggctccagctcaccagccctgtcaaaccggcagcgtttccccactttcttccgaacgcacccatcagccacactccacaaccctacccgcgtgaaactctttgaaaagtggggctggaagaagattgctaccatccagcagaccactgaggtcttcacttcgactctggacgacctggaggaacgagtgaaggaggctggaattgagattactttccgccagagtttcttctcagatccagctgtgcccgtcaaaaacctgaagcgccaggatgcccgaatcatcgtgggacttttctatgagactgaagcccggaaagttttttgtgaggtgtacaaggagcgtctctttgggaagaagtacgtctggttcctcattgggtggtatgctgacaattggttcaagatctacgacccttctatcaactgcacagtggatgagatgactgaggcggtggagggccacatcacaactgagattgtcatgctgaatcctgccaatacccgcagcatttccaacatgacatcccaggaatttgtggagaaactaaccaagcgactgaaaagacaccctgaggagacaggaggcttccaggaggcaccgctggcctatgatgccatctgggccttggcactggccctgaacaagacatctggaggaggcggccgttctggtgtgcgcctggaggacttcaactacaacaaccagaccattaccgaccaaatctaccgggcaatgaactcttcgtcctttgagggtgtctctggccatgtggtgtttgatgccagcggctctcggatggcatggacgcttatcgagcagcttcagggtggcagctacaagaagattggctactatgacagcaccaaggatgatctttcctggtccaaaacagataaatggattggagggtcccccccagctgaccagaccctggtcatcaagacattccgcttcctgtcacagaaactctttatctccgtctcagttctctccagcctgggcattgtcctagctgttgtctgtctgtcctttaacatctacaactcacatgtccgttatatccagaactcacagcccaacctgaacaacctgactgctgtgggctgctcactggctttagctgctgtcttccccctggggctcgatggttaccacattgggaggaaccagtttcctttcgtctgccaggcccgcctctggctcctgggcctgggctttagtctgggctacggttccatgttcaccaagatttggtgggtccacacggtcttcacaaagaaggaagaaaagaaggagtggaggaagactctggaaccctggaagctgtatgccacagtgggcctgctggtgggcatggatgtcctcactctcgccatctggcagatcgtggaccctctgcaccggaccattgagacatttgccaaggaggaacctaaggaagatattgacgtctctattctgccccagctggagcattgcagctccaggaagatgaatacatggcttggcattttctatggttacaaggggctgctgctgctgctgggaatcttccttgcttatgagaccaagagtgtgtccactgagaagatcaatgatcaccgggctgtgggcatggctatctacaatgtggcagtcctgtgcctcatcactgctcctgtcaccatgattctgtccagccagcaggatgcagcctttgcctttgcctctcttgccatagttttctcctcctatatcactcttgttgtgctctttgtgcccaagatgcgcaggctgatcacccgaggggaatggcagtcggaggcgcaggacaccatgaagacagggtcatcgaccaacaacaacgaggaggagaagtcccggctgttggagaaggagaaccgtgaactggaaaagatcattgctgagaaagaggagcgtgtctctgaactgcgccatcaactccagtctcggcagcagctccgctcccggcgccacccaccgacacccccagaaccctctgggggcctgcccaggggaccccctgagccccccgaccggcttagctgtgatgggagtcgagtgcatttgctttataagtgagggtagggtgagggaggacaggccagtagggggagggaaagggagaggggaagggcaggggactcaggaagcagggggtccccatccccagctgggaagaacatgctatccaatctcatctcttgtaaatacatgtccccctgtgagttctgggctgatttgggtctctcatacctctgggaaacagacctttttctctcttactgcttcatgtaattttgtatcacctcttcacaatttagttcgtacctggcttgaagctgctcactgctcacacgctgcctcctcagcagcctcactgcatctttctcttcccatgcaacaccctcttctagttaccacggcaacccctgcagctcctctgcctttgtgctctgttcctgtccagcaggggtctcccaacaagtgctctttccaccccaaaggggcctctccttttctccactgtcataatctctttccatcttacttgcccttctatactttctcacatgtggctccccctgaattttgcttcctttgggagctcattcttttcgccaaggctcacatgctccttgcctctgctctgtgcactcacgctcagcacacatgcatcctcccctctcctgcgtgtgcccactgaacatgctcatgtgtacacacgcttttcccgtatgctttcttcatgttcagtcacatgtgctctcgggtgccctgcattcacagctacgtgtgcccctctcatggtcatgggtctgcccttgagcgtgtttgggtaggcatgtgcaatttgtctagcatgctgagtcatgtctttcctatttgcacacgtccatgtttatccatgtactttccctgtgtaccctccatgtaccttgtgtactttcttcccttaaatcatggtattcttctgacagagccatatgtaccctaccctgcacattgttatgcacttttccccaattcatgtttggtggggccatccacaccctctccttgtcacagaatctccatttctgctcagattccccccatctccattgcattcatgtactaccctcagtctacactcacaatcatcttctcccaagactgctcccttttgttttgtgtttttttgaggggaattaaggaaaaataagtgggggcaggtttggagagctgcttccagtggatagttgatgagaatcctgaccaaaggaaggcacccttgactgttgggatagacagatggacctatggggtgggaggtggtgtccctttcacactgtggtgtctcttggggaaggatctccccgaatctcaataaaccagtgaacagtgtgactcggcaaaaaaaaaaa

SEQ ID NO: 1342 - protein, 961 aa, Homo sapiens
MLLLLLLAPLFLRPPGAGGAQTPNATSEGCQIIHPPWEGGIRYRGLTRDQVKAINFLPVDYEIEYVCRGEREVVGPKVRKCLANGSWTDMDTPSRCVRICSKSYLTLENGKVFLTGGDLPALDGARVDFRCDPDFHLVGSSRSICSQGQWSTPKPHCQVNRTPHSERRAVYIGALFPMSGGWPGGQACQPAVEMALEDVNSRRDILPDYELKLIHHDSKCDPGQATKYLYELLYNDPIKIILMPGCSSVSTLVAEAARMWNLIVLSYGSSSPALSNRQRFPTFFRTHPSATLHNPTRVKLFEKWGWKKIATIQQTTEVFTSTLDDLEERVKEAGIEITFRQSFFSDPAVPVKNLKRQDARIIVGLFYETEARKVFCEVYKERLFGKKYVWFLIGWYADNWFKIYDPSINCTVDEMTEAVEGHITTEIVMLNPANTRSISNMTSQEFVEKLTKRLKRHPEETGGFQEAPLAYDAIWALALALNKTSGGGGRSGVRLEDFNYNNQTITDQIYRAMNSSSFEGVSGHVVFDASGSRMAWTLIEQLQGGSYKKIGYYDSTKDDLSWSKTDKWIGGSPPADQTLVIKTFRFLSQKLFISVSVLSSLGIVLAVVCLSFNIYNSHVRYIQNSQPNLNNLTAVGCSLALAAVFPLGLDGYHIGRNQFPFVCQARLWLLGLGFSLGYGSMFTKIWWVHTVFTKKEEKKEWRKTLEPWKLYATVGLLVGMDVLTLAIWQIVDPLHRTIETFAKEEPKEDIDVSILPQLEHCSSRKMNTWLGIFYGYKGLLLLLGIFLAYETKSVSTEKINDHRAVGMAIYNVAVLCLITAPVTMILSSQQDAAFAFASLAIVFSSYITLVVLFVPKMRRLITRGEWQSEAQDTMKTGSSTNNNEEEKSRLLEKENRELEKIIAEKEERVSELRHQLQSRQQLRSRRHPPTPPEPSGGLPRGPPEPPDRLSCDGSRVHLLYK

SEQ ID NO: 1343 - DNA, 4039 bp, Homo sapiens
agagccgcgggggccgtaggaagccaaccttccctgcttctccggggccctcgccccctcctccccacaaaatcagggatggaggcgcctccccggcaccctcttagcagccctccccaggaaaagtgtcccccctgagctcctaacgctccccaacagctacccctgccccccacgccatggggcccggggccccttttgcccgggtggggtggccactgccgcttctggttgtgatggcggcaggggtggctccggtgtgggcctcccactccccccatctcccgcggcctcactcgcgggtccccccgcacccctcctcagaacggcgcgcagtgtacatcggggcactgtttcccatgagcgggggctggccagggggccaggcctgccagcccgcggtggagatggcgctggaggacgtgaatagccgcagggacatcctgccggactatgagctcaagctcatccaccacgacagcaagtgtgatccaggccaagccaccaagtacctatatgagctgctctacaacgaccctatcaagatcatccttatgcctggctgcagctctgtctccacgctggtggctgaggctgctaggatgtggaacctcattgtgctttcctatggctccagctcaccagccctgtcaaaccggcagcgtttccccactttcttccgaacgcacccatcagccacactccacaaccctacccgcgtgaaactctttgaaaagtggggctggaagaagattgctaccatccagcagaccactgaggtcttcacttcgactctggacgacctggaggaacgagtgaaggaggctggaattgagattactttccgccagagtttcttctcagatccagctgtgcccgtcaaaaacctgaagcgccaggatgcccgaatcatcgtgggacttttctatgagactgaagcccggaaagttttttgtgaggtgtacaaggagcgtctctttgggaagaagtacgtctggttcctcattgggtggtatgctgacaattggttcaagatctacgacccttctatcaactgcacagtggatgagatgactgaggcggtggagggccacatcacaactgagattgtcatgctgaatcctgccaatacccgcagcatttccaacatgacatcccaggaatttgtggagaaactaaccaagcgactgaaaagacaccctgaggagacaggaggcttccaggaggcaccgctggcctatgatgccatctgggccttggcactggccctgaacaagacatctggaggaggcggccgttctggtgtgcgcctggaggacttcaactacaacaaccagaccattaccgaccaaatctaccgggcaatgaactcttcgtcctttgagggtgtctctggccatgtggtgtttgatgccagcggctctcggatggcatggacgcttatcgagcagcttcagggtggcagctacaagaagattggctactatgacagcaccaaggatgatctttcctggtccaaaacagataaatggattggagggtcccccccagctgaccagaccctggtcatcaagacattccgcttcctgtcacagaaactctttatctccgtctcagttctctccagcctgggcattgtcctagctgttgtctgtctgtcctttaacatctacaactcacatgtccgttatatccagaactcacagcccaacctgaacaacctgactgctgtgggctgctcactggctttagctgctgtcttccccctggggctcgatggttaccacattgggaggaaccagtttcctttcgtctgccaggcccgcctctggctcctgggcctgggctttagtctgggctacggttccatgttcaccaagatttggtgggtccacacggtcttcacaaagaaggaagaaaagaaggagtggaggaagactctggaaccctggaagctgtatgccacagtgggcctgctggtgggcatggatgtcctcactctcgccatctggcagatcgtggaccctctgcaccggaccattgagacatttgccaaggaggaacctaaggaagatattgacgtctctattctgccccagctggagcattgcagctccaggaagatgaatacatggcttggcattttctatggttacaaggggctgctgctgctgctgggaatcttccttgcttatgagaccaagagtgtgtccactgagaagatcaatgatcaccgggctgtgggcatggctatctacaatgtggcagtcctgtgcctcatcactgctcctgtcaccatgattctgtccagccagcaggatgcagcctttgcctttgcctctcttgccatagttttctcctcctatatcactcttgttgtgctctttgtgcccaagatgcgcaggctgatcacccgaggggaatggcagtcggaggcgcaggacaccatgaagacagggtcatcgaccaacaacaacgaggaggagaagtcccggctgttggagaaggagaaccgtgaactggaaaagatcattgctgagaaagaggagcgtgtctctgaactgcgccatcaactccagtctcggcagcagctccgctcccggcgccacccaccgacacccccagaaccctctgggggcctgcccaggggaccccctgagccccccgaccggcttagctgtgatgggagtcgagtgcatttgctttataagtgagggtagggtgagggaggacaggccagtagggggagggaaagggagaggggaagggcaggggactcaggaagcagggggtccccatccccagctgggaagaacatgctatccaatctcatctcttgtaaatacatgtccccctgtgagttctgggctgatttgggtctctcatacctctgggaaacagacctttttctctcttactgcttcatgtaattttgtatcacctcttcacaatttagttcgtacctggcttgaagctgctcactgctcacacgctgcctcctcagcagcctcactgcatctttctcttcccatgcaacaccctcttctagttaccacggcaacccctgcagctcctctgcctttgtgctctgttcctgtccagcaggggtctcccaacaagtgctctttccaccccaaaggggcctctccttttctccactgtcataatctctttccatcttacttgcccttctatactttctcacatgtggctccccctgaattttgcttcctttgggagctcattcttttcgccaaggctcacatgctccttgcctctgctctgtgcactcacgctcagcacacatgcatcctcccctctcctgcgtgtgcccactgaacatgctcatgtgtacacacgcttttcccgtatgctttcttcatgttcagtcacatgtgctctcgggtgccctgcattcacagctacgtgtgcccctctcatggtcatgggtctgcccttgagcgtgtttgggtaggcatgtgcaatttgtctagcatgctgagtcatgtctttcctatttgcacacgtccatgtttatccatgtactttccctgtgtaccctccatgtaccttgtgtactttcttcccttaaatcatggtattcttctgacagagccatatgtaccctaccctgcacattgttatgcacttttccccaattcatgtttggtggggccatccacaccctctccttgtcacagaatctccatttctgctcagattccccccatctccattgcattcatgtactaccctcagtctacactcacaatcatcttctcccaagactgctcccttttgttttgtgtttttttgaggggaattaaggaaaaataagtgggggcaggtttggagagctgcttccagtggatagttgatgagaatcctgaccaaaggaaggcacccttgactgttgggatagacagatggacctatggggtgggaggtggtgtccctttcacactgtggtgtctcttggggaaggatctccccgaatctcaataaaccagtgaacagtgtgactcggcaaaaaaaaaaa

SEQ ID NO: 1344 - protein, 844 aa, Homo sapiens
MGPGAPFARVGWPLPLLVVMAAGVAPVWASHSPHLPRPHSRVPPHPSSERRAVYIGALFPMSGGWPGGQACQPAVEMALEDVNSRRDILPDYELKLIHHDSKCDPGQATKYLYELLYNDPIKIILMPGCSSVSTLVAEAARMWNLIVLSYGSSSPALSNRQRFPTFFRTHPSATLHNPTRVKLFEKWGWKKIATIQQTTEVFTSTLDDLEERVKEAGIEITFRQSFFSDPAVPVKNLKRQDARIIVGLFYETEARKVFCEVYKERLFGKKYVWFLIGWYADNWFKIYDPSINCTVDEMTEAVEGHITTEIVMLNPANTRSISNMTSQEFVEKLTKRLKRHPEETGGFQEAPLAYDAIWALALALNKTSGGGGRSGVRLEDFNYNNQTITDQIYRAMNSSSFEGVSGHVVFDASGSRMAWTLIEQLQGGSYKKIGYYDSTKDDLSWSKTDKWIGGSPPADQTLVIKTFRFLSQKLFISVSVLSSLGIVLAVVCLSFNIYNSHVRYIQNSQPNLNNLTAVGCSLALAAVFPLGLDGYHIGRNQFPFVCQARLWLLGLGFSLGYGSMFTKIWWVHTVFTKKEEKKEWRKTLEPWKLYATVGLLVGMDVLTLAIWQIVDPLHRTIETFAKEEPKEDIDVSILPQLEHCSSRKMNTWLGIFYGYKGLLLLLGIFLAYETKSVSTEKINDHRAVGMAIYNVAVLCLITAPVTMILSSQQDAAFAFASLAIVFSSYITLVVLFVPKMRRLITRGEWQSEAQDTMKTGSSTNNNEEEKSRLLEKENRELEKIIAEKEERVSELRHQLQSRQQLRSRRHPPTPPEPSGGLPRGPPEPPDRLSCDGSRVHLLYK

SEQ ID NO: 1345 - DNA, 4260 bp, Homo sapiens
cgctccccgctcccgtggctgccgccgccccggggaagaagagacaggggtggggtttgggggaagcgagagaggaggggagagaccctggccaggctggagcctggattcgaggggaggagggacgggaggaggagaaaggtggaggagaagggaggggggagcggggaggagcggccgggcctggggccttgaggcccggggagagccggggagccgggcccgcgcgccgagatgttgctgctgctgctactggcgccactcttcctccgccccccgggcgcgggcggggcgcatacccccaacgccacctcagaaggttgccagatcatacacccgccctgggaagggggcatcaggtaccggggcctgactcgggaccaggtgaaggctatcaacttcctgccagtggactatgagattgagtatgtgtgccggggggagcgcgaggtggtggggcccaaggtccgcaagtgcctggccaacggctcctggacagatatggacacacccagccgctgtgtgaatcgaacgccacactcagaacggcgcgcagtgtacatcggggcactgtttcccatgagcgggggctggccagggggccaggcctgccagcccgcggtggagatggcgctggaggacgtgaatagccgcagggacatcctgccggactatgagctcaagctcatccaccacgacagcaagtgtgatccaggccaagccaccaagtacctatatgagctgctctacaacgaccctatcaagatcatccttatgcctggctgcagctctgtctccacgctggtggctgaggctgctaggatgtggaacctcattgtgctttcctatggctccagctcaccagccctgtcaaaccggcagcgtttccccactttcttccgaacgcacccatcagccacactccacaaccctacccgcgtgaaactctttgaaaagtggggctggaagaagattgctaccatccagcagaccactgaggtcttcacttcgactctggacgacctggaggaacgagtgaaggaggctggaattgagattactttccgccagagtttcttctcagatccagctgtgcccgtcaaaaacctgaagcgccaggatgcccgaatcatcgtgggacttttctatgagactgaagcccggaaagttttttgtgaggtgtacaaggagcgtctctttgggaagaagtacgtctggttcctcattgggtggtatgctgacaattggttcaagatctacgacccttctatcaactgcacagtggatgagatgactgaggcggtggagggccacatcacaactgagattgtcatgctgaatcctgccaatacccgcagcatttccaacatgacatcccaggaatttgtggagaaactaaccaagcgactgaaaagacaccctgaggagacaggaggcttccaggaggcaccgctggcctatgatgccatctgggccttggcactggccctgaacaagacatctggaggaggcggccgttctggtgtgcgcctggaggacttcaactacaacaaccagaccattaccgaccaaatctaccgggcaatgaactcttcgtcctttgagggtgtctctggccatgtggtgtttgatgccagcggctctcggatggcatggacgcttatcgagcagcttcagggtggcagctacaagaagattggctactatgacagcaccaaggatgatctttcctggtccaaaacagataaatggattggagggtcccccccagctgaccagaccctggtcatcaagacattccgcttcctgtcacagaaactctttatctccgtctcagttctctccagcctgggcattgtcctagctgttgtctgtctgtcctttaacatctacaactcacatgtccgttatatccagaactcacagcccaacctgaacaacctgactgctgtgggctgctcactggctttagctgctgtcttccccctggggctcgatggttaccacattgggaggaaccagtttcctttcgtctgccaggcccgcctctggctcctgggcctgggctttagtctgggctacggttccatgttcaccaagatttggtgggtccacacggtcttcacaaagaaggaagaaaagaaggagtggaggaagactctggaaccctggaagctgtatgccacagtgggcctgctggtgggcatggatgtcctcactctcgccatctggcagatcgtggaccctctgcaccggaccattgagacatttgccaaggaggaacctaaggaagatattgacgtctctattctgccccagctggagcattgcagctccaggaagatgaatacatggcttggcattttctatggttacaaggggctgctgctgctgctgggaatcttccttgcttatgagaccaagagtgtgtccactgagaagatcaatgatcaccgggctgtgggcatggctatctacaatgtggcagtcctgtgcctcatcactgctcctgtcaccatgattctgtccagccagcaggatgcagcctttgcctttgcctctcttgccatagttttctcctcctatatcactcttgttgtgctctttgtgcccaagatgcgcaggctgatcacccgaggggaatggcagtcggaggcgcaggacaccatgaagacagggtcatcgaccaacaacaacgaggaggagaagtcccggctgttggagaaggagaaccgtgaactggaaaagatcattgctgagaaagaggagcgtgtctctgaactgcgccatcaactccagtctcggcagcagctccgctcccggcgccacccaccgacacccccagaaccctctgggggcctgcccaggggaccccctgagccccccgaccggcttagctgtgatgggagtcgagtgcatttgctttataagtgagggtagggtgagggaggacaggccagtagggggagggaaagggagaggggaagggcaggggactcaggaagcagggggtccccatccccagctgggaagaacatgctatccaatctcatctcttgtaaatacatgtccccctgtgagttctgggctgatttgggtctctcatacctctgggaaacagacctttttctctcttactgcttcatgtaattttgtatcacctcttcacaatttagttcgtacctggcttgaagctgctcactgctcacacgctgcctcctcagcagcctcactgcatctttctcttcccatgcaacaccctcttctagttaccacggcaacccctgcagctcctctgcctttgtgctctgttcctgtccagcaggggtctcccaacaagtgctctttccaccccaaaggggcctctccttttctccactgtcataatctctttccatcttacttgcccttctatactttctcacatgtggctccccctgaattttgcttcctttgggagctcattcttttcgccaaggctcacatgctccttgcctctgctctgtgcactcacgctcagcacacatgcatcctcccctctcctgcgtgtgcccactgaacatgctcatgtgtacacacgcttttcccgtatgctttcttcatgttcagtcacatgtgctctcgggtgccctgcattcacagctacgtgtgcccctctcatggtcatgggtctgcccttgagcgtgtttgggtaggcatgtgcaatttgtctagcatgctgagtcatgtctttcctatttgcacacgtccatgtttatccatgtactttccctgtgtaccctccatgtaccttgtgtactttcttcccttaaatcatggtattcttctgacagagccatatgtaccctaccctgcacattgttatgcacttttccccaattcatgtttggtggggccatccacaccctctccttgtcacagaatctccatttctgctcagattccccccatctccattgcattcatgtactaccctcagtctacactcacaatcatcttctcccaagactgctcccttttgttttgtgtttttttgaggggaattaaggaaaaataagtgggggcaggtttggagagctgcttccagtggatagttgatgagaatcctgaccaaaggaaggcacccttgactgttgggatagacagatggacctatggggtgggaggtggtgtccctttcacactgtggtgtctcttggggaaggatctccccgaatctcaataaaccagtgaacagtgtgactcggcaaaaaaaaaaaa

SEQ ID NO: 1346 - protein, 899 aa, Homo sapiens
MLLLLLLAPLFLRPPGAGGAHTPNATSEGCQIIHPPWEGGIRYRGLTRDQVKAINFLPVDYEIEYVCRGEREVVGPKVRKCLANGSWTDMDTPSRCVNRTPHSERRAVYIGALFPMSGGWPGGQACQPAVEMALEDVNSRRDILPDYELKLIHHDSKCDPGQATKYLYELLYNDPIKIILMPGCSSVSTLVAEAARMWNLIVLSYGSSSPALSNRQRFPTFFRTHPSATLHNPTRVKLFEKWGWKKIATIQQTTEVFTSTLDDLEERVKEAGIEITFRQSFFSDPAVPVKNLKRQDARIIVGLFYETEARKVFCEVYKERLFGKKYVWFLIGWYADNWFKIYDPSINCTVDEMTEAVEGHITTEIVMLNPANTRSISNMTSQEFVEKLTKRLKRHPEETGGFQEAPLAYDAIWALALALNKTSGGGGRSGVRLEDFNYNNQTITDQIYRAMNSSSFEGVSGHVVFDASGSRMAWTLIEQLQGGSYKKIGYYDSTKDDLSWSKTDKWIGGSPPADQTLVIKTFRFLSQKLFISVSVLSSLGIVLAVVCLSFNIYNSHVRYIQNSQPNLNNLTAVGCSLALAAVFPLGLDGYHIGRNQFPFVCQARLWLLGLGFSLGYGSMFTKIWWVHTVFTKKEEKKEWRKTLEPWKLYATVGLLVGMDVLTLAIWQIVDPLHRTIETFAKEEPKEDIDVSILPQLEHCSSRKMNTWLGIFYGYKGLLLLLGIFLAYETKSVSTEKINDHRAVGMAIYNVAVLCLITAPVTMILSSQQDAAFAFASLAIVFSSYITLVVLFVPKMRRLITRGEWQSEAQDTMKTGSSTNNNEEEKSRLLEKENRELEKIIAEKEERVSELRHQLQSRQQLRSRRHPPTPPEPSGGLPRGPPEPPDRLSCDGSRVHLLYK

SEQ ID NO: 1347 - DNA, 4294 bp, Homo sapiens
cgctccccgctcccgtggctgccgccgccccggggaagaagagacaggggtggggtttgggggaagcgagagaggaggggagagaccctggccaggctggagcctggattcgaggggaggagggacgggaggaggagaaaggtggaggagaagggaggggggagcggggaggagcggccgggcctggggccttgaggcccggggagagccggggagccgggcccgcgcgccgagatgttgctgctgctgctactggcgccactcttcctccgccccccgggcgcgggcggggcgcagacccccaacgccacctcagaaggttgccagatcatacacccgccctgggaagggggcatcaggtaccggggcctgactcgggaccaggtgaaggctatcaacttcctgccagtggactatgagattgagtatgtgtgccggggggagcgcgaggtggtggggcccaaggtccgcaagtgcctggccaacggctcctggacagatatggacacacccagccgctgtgtccgaatctgctccaagtcttatttgaccctggaaaatgggaaggttttcctgacgggtggggacctcccagctctggacggagcccgggtggatttccggtgtgaccccgacttccatctggtgggcagctcccggagcatctgtagtcagggccagtggagcacccccaagccccactgccaggtgaatcgaacgccacactcagaacggcgcgcagtgtacatcggggcactgtttcccatgagcgggggctggccagggggccaggcctgccagcccgcggtggagatggcgctggaggacgtgaatagccgcagggacatcctgccggactatgagctcaagctcatccaccacgacagcaagtgtgatccaggccaagccaccaagtacctatatgagctgctctacaacgaccctatcaagatcatccttatgcctggctgcagctctgtctccacgctggtggctgaggctgctaggatgtggaacctcattgtgctttcctatggctccagctcaccagccctgtcaaaccggcagcgtttccccactttcttccgaacgcacccatcagccacactccacaaccctacccgcgtgaaactctttgaaaagtggggctggaagaagattgctaccatccagcagaccactgaggtcttcacttcgactctggacgacctggaggaacgagtgaaggaggctggaattgagattactttccgccagagtttcttctcagatccagctgtgcccgtcaaaaacctgaagcgccaggatgcccgaatcatcgtgggacttttctatgagactgaagcccggaaagttttttgtgaggtgtacaaggagcgtctctttgggaagaagtacgtctggttcctcattgggtggtatgctgacaattggttcaagatctacgacccttctatcaactgcacagtggatgagatgactgaggcggtggagggccacatcacaactgagatcgtcatgctgaatcctgccaatacccgcagcatttccaacatgacatcccaggaatttgtggagaaactaaccaagcgactgaaaagacaccctgaggagacaggaggcttccaggaggcaccgctggcctatgatgccatctgggccttggcactggccctgaacaagacatctggaggaggcagccgttccggcgtgcgcctggaggacttcaactacaacaaccagaccattaccgaccaaatctaccgggcaatgaactcctcgtcctttgagggtgtctctggccatgtggtgtttgatgccagcggctctcggatggcatggacgcttatcgagcagcttcagggtggcagctacaagaagattggctactatgacagcaccaaggatgatctttcctggtccaaaacagataaatggattgttatatccagaactcacagcccaacctgacaacctgactgctgtgggctgctcactggctttagctgctgtcttccccctggggctcgatggttaccacattgggaggaaccagtttcctttcgtctgccaggcccgcctctggctcctgggcctgggctttagtctgggctacggttccatgttcaccaagatttggtgggtccacacggtcttcacaaagaaggaagaaaagaaggagtggaggaagactctggaaccctggaagctgtatgccacagtgggcctgctggtgggcatggatgtcctcactctcgccatctggcagatcgtggaccctctgcaccggaccattgagacatttgccaaggaggaacctaaggaagatattgacgtctctattctgccccagctggagcattgcagctccaggaagatgaatacatggcttggcattttctatggttacaaggggctgctgctgctgctgggaatcttccttgcttatgagaccaagagtgtgtccactgagaagatcaatgatcaccgggctgtgggcatggctatctacaatgtggcagtcctgtgcctcatcactgctcctgtcaccatgattctgtccagccagcaggatgcagcctttgcctttgcctctcttgccatagttttctcctcctatatcactcttgttgtgctctttgtgcccaagatgcgcaggctgatcacccgaggggaatggcagtcggaggcgcaggacaccatgaagacagggtcatcgaccaacaacaacgaggaggagaagtcccggctgttggagaaggagaaccgtgaactggaaaagatcattgctgagaaagaggagcgtgtctctgaactgcgccatcaactccagtctcggcagcagctccgctcccggcgccacccaccgacacccccagaaccctctgggggcctgcccaggggaccccctgagccccccgaccggcttagctgtgatgggagtcgagtgcatttgctttataagtgagggtagggtgagggaggacaggccagtagggggagggaaagggagaggggaagggcaggggactcaggaagcagggggtccccatccccagctgggaagaacatgctatccaatctcatctcttgtaaatacatgtccccctgtgagttctgggctgatttgggtctctcatacctctgggaaacagacctttttctctcttactgcttcatgtaattttgtatcacctcttcacaatttagttcgtacctggcttgaagctgctcactgctcacacgctgcctcctcagcagcctcactgcatctttctcttcccatgcaacaccctcttctagttaccacggcaacccctgcagctcctctgcctttgtgctctgttcctgtccagcaggggtctcccaacaagtgctctttccaccccaaaggggcctctccttttctccactgtcataatctctttccatcttacttgcccttctatactttctcacatgtggctccccctgaattttgcttcctttgggagctcattcttttcgccaaggctcacatgctccttgcctctgctctgtgcactcacgctcagcacacatgcatcctcccctctcctgcgtgtgcccactgaacatgctcatgtgtacacacgcttttcccgtatgctttcttcatgttcagtcacatgtgctctcgggtgccctgcattcacagctacgtgtgcccctctcatggtcatgggtctgcccttgagcgtgtttgggtaggcatgtgcaatttgtctagcatgctgagtcatgtctttcctatttgcacacgtccatgtttatccatgtactttccctgtgtaccctccatgtaccttgtgtactttcttcccttaaatcatggtattcttctgacagagccatatgtaccctaccctgcacattgttatgcacttttccccaattcatgtttggtggggccatccacaccctctccttgtcacagaatctccatttctgctcagattccccccatctccattgcattcatgtactaccctcagtctacactcacaatcatcttctcccaagactgctcccttttgttttgtgtttttttgaggggaattaaggaaaaataagtgggggcaggtttggagagctgcttccagtggatagttgatgagaatcctgaccaaaggaaggcacccttgactgttgggatagacagatggacctatggggtgggaggtggtgtccctttcacactgtggtgtctcttggggaaggatctccccgaatctcaataaaccagtgaacagtgtgactcggcaaaaaaaaaaaa

SEQ ID NO: 1348 - protein, 578 aa, Homo sapiens
MLLLLLLAPLFLRPPGAGGAQTPNATSEGCQIIHPPWEGGIRYRGLTRDQVKAINFLPVDYEIEYVCRGEREVVGPKVRKCLANGSWTDMDTPSRCVRICSKSYLTLENGKVFLTGGDLPALDGARVDFRCDPDFHLVGSSRSICSQGQWSTPKPHCQVNRTPHSERRAVYIGALFPMSGGWPGGQACQPAVEMALEDVNSRRDILPDYELKLIHHDSKCDPGQATKYLYELLYNDPIKIILMPGCSSVSTLVAEAARMWNLIVLSYGSSSPALSNRQRFPTFFRTHPSATLHNPTRVKLFEKWGWKKIATIQQTTEVFTSTLDDLEERVKEAGIEITFRQSFFSDPAVPVKNLKRQDARIIVGLFYETEARKVFCEVYKERLFGKKYVWFLIGWYADNWFKIYDPSINCTVDEMTEAVEGHITTEIVMLNPANTRSISNMTSQEFVEKLTKRLKRHPEETGGFQEAPLAYDAIWALALALNKTSGGGSRSGVRLEDFNYNNQTITDQIYRAMNSSSFEGVSGHVVFDASGSRMAWTLIEQLQGGSYKKIGYYDSTKDDLSWSKTDKWIVISRTHSPT

SEQ ID NO: 1349 - DNA, 2050 bp, Homo sapiens
gtggggctgtttctgcgggcacagctgcagcaattaccggagtggaggcagggcccaggcagcactgccctccaagatcttcccttgggcttttcagcagtaaggggacatgcaccccaagggcctccacttggcctgaccttgctgcgggggctctctgtccccaggaacagtagagatggcaagcttatcaagaccctctctgcccagctgcctctgctccttcctcctcctcctcctcctccaagtgtcttccagctatgcagggcagttcagagtgataggaccaagacaccctatccgggctctggtcggggatgaagtggaattgccatgtcgcatatctcctgggaagaacgctacaggcatggaggtggggtggtaccgcccccccttctctagggtggttcatctctacagaaatggcaaggaccaagatggagaccaggcacctgaatatcggggccggacagagctgctgaaagatgctattggtgagggaaaggtgactctcaggatccggaatgtaaggttctcagatgaaggaggtttcacctgcttcttccgagatcattcttaccaagaggaggcagcaatggaattgaaagtagaagatcctttctactgggtgagccctggagtgctggttctcctcgcggtgctgcctgtgctcctcctgcagatcactgttggcctcatcttcctctgcctgcagtacagactgagaggaaaacttcgagcagagatagagaatctccaccggacttttgagtcctttggtgttctaggaccccaggttaaggaaccaaaaaagacagggcaattccttgaagagctacgaaatcccttctgagtgatgtcacatcttggcaggggtggaggagagcctggttgcccagggatttgtccttggggacatctcatccatcaagttgcacactcactggcatctttgctatggggacattccaatttgcactttcaggaacactctgaattccaagtagaattgatttcccttcttctgtcatctaccttttctcttcattttcccatttttattacccttctttccatttctctctccagtcttccacctggaagccctctctggctaaggacaggcaggtgcccctctctccatcagaggacacctgtactggagagcaacacaggatggtctctgccatgaactggaggccaggaatctcctcactgaaaattacagtatggtaactttgcaaatggtggttgtttcttccaagactccagccctgattgcgcaaaactgaaaggcatgtgaagggaaggaagaggaagagtgcaaaacattgaagagagagctgagtgagctgaagagtgaggatatgagtagccccaacccaaacctggagatggggagaaacctacagaatactagccagagctcctccttgtcttggcagcctactagggacctggggaagcaaaaacgaaagctgggcaacatgcctgctttagaatgttttccttctacttacacatcttccacaggtctcagaatctttccttcctctcatccttttctcctatcttcatatctatcagagtatccactgtttattcaacaactactacttgatggtcagacacaaacaaacaagctaggtgctaattaataaagatacgagttttggccgggtgcggtggctcacgcctgtaatcccagcactttgggaggccgaggcgggcgaatcacgaggtcaggagttcaagaccagcctggccaacatggtgaaaccccatctctactaaaaatacaaacaattaactgagcatagtggtgggcacctataataccagctactccggaggctgaggcaggagaatcgcttgaacccaggaggcagaggttgcagtgagctgagatcgtgccactgcactctagccggagtgacagagtaagactctgtctcaaaaataaataaataaataaataaataaataaataaataaataaataaaaaataataatacaagttttcataagcacacttctaaaaaaaaaaaa

SEQ ID NO: 1350 - protein, 224 aa, Homo sapiens
MASLSRPSLPSCLCSFLLLLLLQVSSSYAGQFRVIGPRHPIRALVGDEVELPCRISPGKNATGMEVGWYRPPFSRVVHLYRNGKDQDGDQAPEYRGRTELLKDAIGEGKVTLRIRNVRFSDEGGFTCFFRDHSYQEEAAMELKVEDPFYWVSPGVLVLLAVLPVLLLQITVGLIFLCLQYRLRGKLRAEIENLHRTFESFGVLGPQVKEPKKTGQFLEELRNPF

SEQ ID NO: 1351 - DNA, 1731 bp, Homo sapiens
gtggggctgtttctgcgggcacagctgcagcaattaccggagtggaggcagggcccaggcagcactgccctccaagatcttcccttgggcttttcagcagtaaggggacatgcaccccaagggcctccacttggcctgaccttgctgcgggggctctctgtccccaggaacagtagagatggcaagcttatcaagaccctctctgcccagctgcctctgctccttcctcctcctcctcctcctccaagtgtcttccagctatgcagggcagttcagagtgataggaccaagacaccctatccgggctctggtcggggatgaagtggaattgccatgtcgcatatctcctgggaagaacgctacaggcatggaggtggggtggtaccgcccccccttctctagggtggttcatctctacagaaatggcaaggaccaagatggagaccaggcacctgaatatcggggccggacagagctgctgaaagatgctattggtgagggaaaggtgactctcaggatccggaatgtaaggttctcagatgaaggaggtttcacctgcttcttccgagatcattcttaccaagaggaggcagcaatggaattgaaagtagaagatcctttctactgggtgagccctggagtgctggttctcctcgcggtgctgcctgtgctcctcctgcagatcactgttggcctcatcttcctctgcctgcagtacagactgagaggaaaacttcgagcagagatagagaatctccaccggacttttgtcttccacctggaagccctctctggctaaggacaggcaggtgcccctctctccatcagaggacacctgtactggagagcaacacaggatggtctctgccatgaactggaggccaggaatctcctcactgaaaattacagtatggtaactttgcaaatggtggttgtttcttccaagactccagccctgattgcgcaaaactgaaaggcatgtgaagggaaggaagaggaagagtgcaaaacattgaagagagagctgagtgagctgaagagtgaggatatgagtagccccaacccaaacctggagatggggagaaacctacagaatactagccagagctcctccttgtcttggcagcctactagggacctggggaagcaaaaacgaaagctgggcaacatgcctgctttagaatgttttccttctacttacacatcttccacaggtctcagaatctttccttcctctcatccttttctcctatcttcatatctatcagagtatccactgtttattcaacaactactacttgatggtcagacacaaacaaacaagctaggtgctaattaataaagatacgagttttggccgggtgcggtggctcacgcctgtaatcccagcactttgggaggccgaggcgggcgaatcacgaggtcaggagttcaagaccagcctggccaacatggtgaaaccccatctctactaaaaatacaaacaattaactgagcatagtggtgggcacctataataccagctactccggaggctgaggcaggagaatcgcttgaacccaggaggcagaggttgcagtgagctgagatcgtgccactgcactctagccggagtgacagagtaagactctgtctcaaaaataaataaataaataaataaataaataaataaataaataaataaaaaataataatacaagttttcataagcacacttctaaaaaaaaaaaa

SEQ ID NO: 1352 - protein, 206 aa, Homo sapiens
MASLSRPSLPSCLCSFLLLLLLQVSSSYAGQFRVIGPRHPIRALVGDEVELPCRISPGKNATGMEVGWYRPPFSRVVHLYRNGKDQDGDQAPEYRGRTELLKDAIGEGKVTLRIRNVRFSDEGGFTCFFRDHSYQEEAAMELKVEDPFYWVSPGVLVLLAVLPVLLLQITVGLIFLCLQYRLRGKLRAEIENLHRTFVFHLEALSG

SEQ ID NO: 1353 - DNA, 1869 bp, Homo sapiens
gtggggctgtttctgcgggcacagctgcagcaattaccggagtggaggcagggcccaggcagcactgccctccaagatcttcccttgggcttttcagcagtaaggggacatgcaccccaagggcctccacttggcctgaccttgctgcgggggctctctgtccccaggaacagtagagatggcaagcttatcaagaccctctctgcccagctgcctctgctccttcctcctcctcctcctcctccaagtgtcttccagctatgcagggcagttcagagtgataggaccaagacaccctatccgggctctggtcggggatgaagtggaattgccatgtcgcatatctcctgggaagaacgctacaggcatggaggtggggtggtaccgcccccccttctctagggtggttcatctctacagaaatggcaaggaccaagatggagaccaggcacctgaatatcggggccggacagagctgctgaaagatgctattggtgagggaaaggtgactctcaggatccggaatgtaaggttctcagatgaaggaggtttcacctgcttcttccgagatcattcttaccaagaggaggcagcaatggaattgaaagtagaagatcctttctactgggtgagccctggagtgctggttctcctcgcggtgctgcctgtgctcctcctgcagatcactgttggcctcatcttcctctgcctgcagtacagactgagaggaaaacttcgagcagagatagagaatctccaccggacttttgatccccactttctgagggtgccctgctggaagataaccctgtttgtaattgtgccggttcttggacccttggttgccttgatcatctgctacaactggctacatcgaagactagcagggcaattccttgaagagctactcttccacctggaagccctctctggctaaggacaggcaggtgcccctctctccatcagaggacacctgtactggagagcaacacaggatggtctctgccatgaactggaggccaggaatctcctcactgaaaattacagtatggtaactttgcaaatggtggttgtttcttccaagactccagccctgattgcgcaaaactgaaaggcatgtgaagggaaggaagaggaagagtgcaaaacattgaagagagagctgagtgagctgaagagtgaggatatgagtagccccaacccaaacctggagatggggagaaacctacagaatactagccagagctcctccttgtcttggcagcctactagggacctggggaagcaaaaacgaaagctgggcaacatgcctgctttagaatgttttccttctacttacacatcttccacaggtctcagaatctttccttcctctcatccttttctcctatcttcatatctatcagagtatccactgtttattcaacaactactacttgatggtcagacacaaacaaacaagctaggtgctaattaataaagatacgagttttggccgggtgcggtggctcacgcctgtaatcccagcactttgggaggccgaggcgggcgaatcacgaggtcaggagttcaagaccagcctggccaacatggtgaaaccccatctctactaaaaatacaaacaattaactgagcatagtggtgggcacctataataccagctactccggaggctgaggcaggagaatcgcttgaacccaggaggcagaggttgcagtgagctgagatcgtgccactgcactctagccggagtgacagagtaagactctgtctcaaaaataaataaataaataaataaataaataaataaataaataaataaaaaataataatacaagttttcataagcacacttctaaaaaaaaaaaa

SEQ ID NO: 1354 - protein, 252 aa, Homo sapiens
MASLSRPSLPSCLCSFLLLLLLQVSSSYAGQFRVIGPRHPIRALVGDEVELPCRISPGKNATGMEVGWYRPPFSRVVHLYRNGKDQDGDQAPEYRGRTELLKDAIGEGKVTLRIRNVRFSDEGGFTCFFRDHSYQEEAAMELKVEDPFYWVSPGVLVLLAVLPVLLLQITVGLIFLCLQYRLRGKLRAEIENLHRTFDPHFLRVPCWKITLFVIVPVLGPLVALIICYNWLHRRLAGQFLEELLFHLEALSG

SEQ ID NO: 1355 - DNA, 2119 bp, Homo sapiens
gtggggctgtttctgcgggcacagctgcagcaattaccggagtggaggcagggcccaggcagcactgccctccaagatcttcccttgggcttttcagcagtaaggggacatgcaccccaagggcctccacttggcctgaccttgctgcgggggctctctgtccccaggaacagtagagatggcaagcttatcaagaccctctctgcccagctgcctctgctccttcctcctcctcctcctcctccaagtgtcttccagctatgcagggcagttcagagtgataggaccaagacaccctatccgggctctggtcggggatgaagtggaattgccatgtcgcatatctcctgggaagaacgctacaggcatggaggtggggtggtaccgcccccccttctctagggtggttcatctctacagaaatggcaaggaccaagatggagaccaggcacctgaatatcggggccggacagagctgctgaaagatgctattggtgagggaaaggtgactctcaggatccggaatgtaaggttctcagatgaaggaggtttcacctgcttcttccgagatcattcttaccaagaggaggcagcaatggaattgaaagtagaagatcctttctactgggtgagccctggagtgctggttctcctcgcggtgctgcctgtgctcctcctgcagatcactgttggcctcatcttcctctgcctgcagtacagactgagaggaaaacttcgagcagagatagagaatctccaccggacttttgatccccactttctgagggtgccctgctggaagataaccctgtttgtaattgtgccggttcttggacccttggttgccttgatcatctgctacaactggctacatcgaagactagcagggcaattccttgaagagctacgaaatcccttctgagtgatgtcacatcttggcaggggtggaggagagcctggttgcccagggatttgtccttggggacatctcatccatcaagttgcacactcactggcatctttgctatggggacattccaatttgcactttcaggaacactctgaattccaagtagaattgatttcccttcttctgtcatctaccttttctcttcattttcccatttttattacccttctttccatttctctctccagtcttccacctggaagccctctctggctaaggacaggcaggtgcccctctctccatcagaggacacctgtactggagagcaacacaggatggtctctgccatgaactggaggccaggaatctcctcactgaaaattacagtatggtaactttgcaaatggtggttgtttcttccaagactccagccctgattgcgcaaaactgaaaggcatgtgaagggaaggaagaggaagagtgcaaaacattgaagagagagctgagtgagctgaagagtgaggatatgagtagccccaacccaaacctggagatggggagaaacctacagaatactagccagagctcctccttgtcttggcagcctactagggacctggggaagcaaaaacgaaagctgggcaacatgcctgctttagaatgttttccttctacttacacatcttccacaggtctcagaatctttccttcctctcatccttttctcctatcttcatatctatcagagtatccactgtttattcaacaactactacttgatggtcagacacaaacaaacaagctaggtgctaattaataaagatacgagttttggccgggtgcggtggctcacgcctgtaatcccagcactttgggaggccgaggcgggcgaatcacgaggtcaggagttcaagaccagcctggccaacatggtgaaaccccatctctactaaaaatacaaacaattaactgagcatagtggtgggcacctataataccagctactccggaggctgaggcaggagaatcgcttgaacccaggaggcagaggttgcagtgagctgagatcgtgccactgcactctagccggagtgacagagtaagactctgtctcaaaaataaataaataaataaataaataaataaataaataaataaataaaaaataataatacaagttttcataagcacacttctaaaaaaaaaaaa

SEQ ID NO: 1356 - protein, 247 aa, Homo sapiens
MASLSRPSLPSCLCSFLLLLLLQVSSSYAGQFRVIGPRHPIRALVGDEVELPCRISPGKNATGMEVGWYRPPFSRVVHLYRNGKDQDGDQAPEYRGRTELLKDAIGEGKVTLRIRNVRFSDEGGFTCFFRDHSYQEEAAMELKVEDPFYWVSPGVLVLLAVLPVLLLQITVGLIFLCLQYRLRGKLRAEIENLHRTFDPHFLRVPCWKITLFVIVPVLGPLVALIICYNWLHRRLAGQFLEELRNPF

SEQ ID NO: 1357 - DNA, 1752 bp, Homo sapiens
gtggggctgtttctgcgggcacagctgcagcaattaccggagtggaggcagggcccaggcagcactgccctccaagatcttcccttgggcttttcagcagtaaggggacatgcaccccaagggcctccacttggcctgaccttgctgcgggggctctctgtccccaggaacagtagagatggcaagcttatcaagaccctctctgcccagctgcctctgctccttcctcctcctcctcctcctccaagtgtcttccagctatgcagggcagttcagagtgataggaccaagacaccctatccgggctctggtcggggatgaagtggaattgccatgtcgcatatctcctgggaagaacgctacaggcatggaggtggggtggtaccgcccccccttctctagggtggttcatctctacagaaatggcaaggaccaagatggagaccaggcacctgaatatcggggccggacagagctgctgaaagatgctattggtgagggaaaggtgactctcaggatccggaatgtaaggttctcagatgaaggaggtttcacctgcttcttccgagatcattcttaccaagaggaggcagcaatggaattgaaagtagaagatcctttctactgggtgagccctggagtgctggttctcctcgcggtgctgcctgtgctcctcctgcagatcactgttggcctcatcttcctctgcctgcagtacagactgagaggaaaacttcgagcagagatagagaatctccaccggacttttgggcaattccttgaagagctactcttccacctggaagccctctctggctaaggacaggcaggtgcccctctctccatcagaggacacctgtactggagagcaacacaggatggtctctgccatgaactggaggccaggaatctcctcactgaaaattacagtatggtaactttgcaaatggtggttgtttcttccaagactccagccctgattgcgcaaaactgaaaggcatgtgaagggaaggaagaggaagagtgcaaaacattgaagagagagctgagtgagctgaagagtgaggatatgagtagccccaacccaaacctggagatggggagaaacctacagaatactagccagagctcctccttgtcttggcagcctactagggacctggggaagcaaaaacgaaagctgggcaacatgcctgctttagaatgttttccttctacttacacatcttccacaggtctcagaatctttccttcctctcatccttttctcctatcttcatatctatcagagtatccactgtttattcaacaactactacttgatggtcagacacaaacaaacaagctaggtgctaattaataaagatacgagttttggccgggtgcggtggctcacgcctgtaatcccagcactttgggaggccgaggcgggcgaatcacgaggtcaggagttcaagaccagcctggccaacatggtgaaaccccatctctactaaaaatacaaacaattaactgagcatagtggtgggcacctataataccagctactccggaggctgaggcaggagaatcgcttgaacccaggaggcagaggttgcagtgagctgagatcgtgccactgcactctagccggagtgacagagtaagactctgtctcaaaaataaataaataaataaataaataaataaataaataaataaataaaaaataataatacaagttttcataagcacacttctaaaaaaaaaaaa

SEQ ID NO: 1358 - protein, 213 aa, Homo sapiens
MASLSRPSLPSCLCSFLLLLLLQVSSSYAGQFRVIGPRHPIRALVGDEVELPCRISPGKNATGMEVGWYRPPFSRVVHLYRNGKDQDGDQAPEYRGRTELLKDAIGEGKVTLRIRNVRFSDEGGFTCFFRDHSYQEEAAMELKVEDPFYWVSPGVLVLLAVLPVLLLQITVGLIFLCLQYRLRGKLRAEIENLHRTFGQFLEELLFHLEALSG

SEQ ID NO: 1359 - DNA, 1800 bp, Homo sapiens
gtggggctgtttctgcgggcacagctgcagcaattaccggagtggaggcagggcccaggcagcactgccctccaagatcttcccttgggcttttcagcagtaaggggacatgcaccccaagggcctccacttggcctgaccttgctgcgggggctctctgtccccaggaacagtagagatggcaagcttatcaagaccctctctgcccagctgcctctgctccttcctcctcctcctcctcctccaagtgtcttccagctatgcagggcagttcagagtgataggaccaagacaccctatccgggctctggtcggggatgaagtggaattgccatgtcgcatatctcctgggaagaacgctacaggcatggaggtggggtggtaccgcccccccttctctagggtggttcatctctacagaaatggcaaggaccaagatggagaccaggcacctgaatatcggggccggacagagctgctgaaagatgctattggtgagggaaaggtgactctcaggatccggaatgtaaggttctcagatgaaggaggtttcacctgcttcttccgagatcattcttaccaagaggaggcagcaatggaattgaaagtagaagatcctttctactgggtgagccctggagtgctggttctcctcgcggtgctgcctgtgctcctcctgcagatcactgttggcctcatcttcctctgcctgcagtacagactgagaggaaaacttcgagcagagatagagaatctccaccggacttttgagtcctttggtgttctaggaccccaggttaaggaaccaaaaaagacagggcaattccttgaagagctactcttccacctggaagccctctctggctaaggacaggcaggtgcccctctctccatcagaggacacctgtactggagagcaacacaggatggtctctgccatgaactggaggccaggaatctcctcactgaaaattacagtatggtaactttgcaaatggtggttgtttcttccaagactccagccctgattgcgcaaaactgaaaggcatgtgaagggaaggaagaggaagagtgcaaaacattgaagagagagctgagtgagctgaagagtgaggatatgagtagccccaacccaaacctggagatggggagaaacctacagaatactagccagagctcctccttgtcttggcagcctactagggacctggggaagcaaaaacgaaagctgggcaacatgcctgctttagaatgttttccttctacttacacatcttccacaggtctcagaatctttccttcctctcatccttttctcctatcttcatatctatcagagtatccactgtttattcaacaactactacttgatggtcagacacaaacaaacaagctaggtgctaattaataaagatacgagttttggccgggtgcggtggctcacgcctgtaatcccagcactttgggaggccgaggcgggcgaatcacgaggtcaggagttcaagaccagcctggccaacatggtgaaaccccatctctactaaaaatacaaacaattaactgagcatagtggtgggcacctataataccagctactccggaggctgaggcaggagaatcgcttgaacccaggaggcagaggttgcagtgagctgagatcgtgccactgcactctagccggagtgacagagtaagactctgtctcaaaaataaataaataaataaataaataaataaataaataaataaataaaaaataataatacaagttttcataagcacacttctaaaaaaaaaaaa

SEQ ID NO: 1360 - protein, 229 aa, Homo sapiens
MASLSRPSLPSCLCSFLLLLLLQVSSSYAGQFRVIGPRHPIRALVGDEVELPCRISPGKNATGMEVGWYRPPFSRVVHLYRNGKDQDGDQAPEYRGRTELLKDAIGEGKVTLRIRNVRFSDEGGFTCFFRDHSYQEEAAMELKVEDPFYWVSPGVLVLLAVLPVLLLQITVGLIFLCLQYRLRGKLRAEIENLHRTFESFGVLGPQVKEPKKTGQFLEELLFHLEALSG

SEQ ID NO: 1361 - DNA, 2002 bp, Homo sapiens
gtggggctgtttctgcgggcacagctgcagcaattaccggagtggaggcagggcccaggcagcactgccctccaagatcttcccttgggcttttcagcagtaaggggacatgcaccccaagggcctccacttggcctgaccttgctgcgggggctctctgtccccaggaacagtagagatggcaagcttatcaagaccctctctgcccagctgcctctgctccttcctcctcctcctcctcctccaagtgtcttccagctatgcagggcagttcagagtgataggaccaagacaccctatccgggctctggtcggggatgaagtggaattgccatgtcgcatatctcctgggaagaacgctacaggcatggaggtggggtggtaccgcccccccttctctagggtggttcatctctacagaaatggcaaggaccaagatggagaccaggcacctgaatatcggggccggacagagctgctgaaagatgctattggtgagggaaaggtgactctcaggatccggaatgtaaggttctcagatgaaggaggtttcacctgcttcttccgagatcattcttaccaagaggaggcagcaatggaattgaaagtagaagatcctttctactgggtgagccctggagtgctggttctcctcgcggtgctgcctgtgctcctcctgcagatcactgttggcctcatcttcctctgcctgcagtacagactgagaggaaaacttcgagcagagatagagaatctccaccggacttttgggcaattccttgaagagctacgaaatcccttctgagtgatgtcacatcttggcaggggtggaggagagcctggttgcccagggatttgtccttggggacatctcatccatcaagttgcacactcactggcatctttgctatggggacattccaatttgcactttcaggaacactctgaattccaagtagaattgatttcccttcttctgtcatctaccttttctcttcattttcccatttttattacccttctttccatttctctctccagtcttccacctggaagccctctctggctaaggacaggcaggtgcccctctctccatcagaggacacctgtactggagagcaacacaggatggtctctgccatgaactggaggccaggaatctcctcactgaaaattacagtatggtaactttgcaaatggtggttgtttcttccaagactccagccctgattgcgcaaaactgaaaggcatgtgaagggaaggaagaggaagagtgcaaaacattgaagagagagctgagtgagctgaagagtgaggatatgagtagccccaacccaaacctggagatggggagaaacctacagaatactagccagagctcctccttgtcttggcagcctactagggacctggggaagcaaaaacgaaagctgggcaacatgcctgctttagaatgttttccttctacttacacatcttccacaggtctcagaatctttccttcctctcatccttttctcctatcttcatatctatcagagtatccactgtttattcaacaactactacttgatggtcagacacaaacaaacaagctaggtgctaattaataaagatacgagttttggccgggtgcggtggctcacgcctgtaatcccagcactttgggaggccgaggcgggcgaatcacgaggtcaggagttcaagaccagcctggccaacatggtgaaaccccatctctactaaaaatacaaacaattaactgagcatagtggtgggcacctataataccagctactccggaggctgaggcaggagaatcgcttgaacccaggaggcagaggttgcagtgagctgagatcgtgccactgcactctagccggagtgacagagtaagactctgtctcaaaaataaataaataaataaataaataaataaataaataaataaataaaaaataataatacaagttttcataagcacacttctaaaaaaaaaaaa

SEQ ID NO: 1362 - protein, 208 aa, Homo sapiens
MASLSRPSLPSCLCSFLLLLLLQVSSSYAGQFRVIGPRHPIRALVGDEVELPCRISPGKNATGMEVGWYRPPFSRVVHLYRNGKDQDGDQAPEYRGRTELLKDAIGEGKVTLRIRNVRFSDEGGFTCFFRDHSYQEEAAMELKVEDPFYWVSPGVLVLLAVLPVLLLQITVGLIFLCLQYRLRGKLRAEIENLHRTFGQFLEELRNPF

SEQ ID NO: 1363 - DNA, 2007 bp, Homo sapiens
gtggggctgtttctgcgggcacagctgcagcaattaccggagtggaggcagggcccaggcagcactgccctccaagatcttcccttgggcttttcagcagtaaggggacatgcaccccaagggcctccacttggcctgaccttgctgcgggggctctctgtccccaggaacagtagagatggcaagcttatcaagaccctctctgcccagctgcctctgctccttcctcctcctcctcctcctccaagtgtcttccagctatgcagggcagttcagagtgataggaccaagacaccctatccgggctctggtcggggatgaagtggaattgccatgtcgcatatctcctgggaagaacgctacaggcatggaggtggggtggtaccgcccccccttctctagggtggttcatctctacagaaatggcaaggaccaagatggagaccaggcacctgaatatcggggccggacagagctgctgaaagatgctattggtgagggaaaggtgactctcaggatccggaatgtaaggttctcagatgaaggaggtttcacctgcttcttccgagatcattcttaccaagaggaggcagcaatggaattgaaagtagaagtgtctcactctgtgacccaggattggttgcagtggcacgatcatggctcattgcagcctccacctcccaggctcaagtgatcctcctgactcagcctcttgaatagctgagaccacaggcttgtgtcaccatgcccagatcctttctactgggtgagccctggagtgctggttctcctcgcggtgctgcctgtgctcctcctgcagatcactgttggcctcatcttcctctgcctgcagtacagactgagaggaaaacttcgagcagagatagagaatctccaccggacttttgatccccactttctgagggtgccctgctggaagataaccctgtttgtaattgtgccggttcttggacccttggttgccttgatcatctgctacaactggctacatcgaagactagcagggcaattccttgaagagctactcttccacctggaagccctctctggctaaggacaggcaggtgcccctctctccatcagaggacacctgtactggagagcaacacaggatggtctctgccatgaactggaggccaggaatctcctcactgaaaattacagtatggtaactttgcaaatggtggttgtttcttccaagactccagccctgattgcgcaaaactgaaaggcatgtgaagggaaggaagaggaagagtgcaaaacattgaagagagagctgagtgagctgaagagtgaggatatgagtagccccaacccaaacctggagatggggagaaacctacagaatactagccagagctcctccttgtcttggcagcctactagggacctggggaagcaaaaacgaaagctgggcaacatgcctgctttagaatgttttccttctacttacacatcttccacaggtctcagaatctttccttcctctcatccttttctcctatcttcatatctatcagagtatccactgtttattcaacaactactacttgatggtcagacacaaacaaacaagctaggtgctaattaataaagatacgagttttggccgggtgcggtggctcacgcctgtaatcccagcactttgggaggccgaggcgggcgaatcacgaggtcaggagttcaagaccagcctggccaacatggtgaaaccccatctctactaaaaatacaaacaattaactgagcatagtggtgggcacctataataccagctactccggaggctgaggcaggagaatcgcttgaacccaggaggcagaggttgcagtgagctgagatcgtgccactgcactctagccggagtgacagagtaagactctgtctcaaaaataaataaataaataaataaataaataaataaataaataaataaaaaataataatacaagttttcataagcacacttctaaaaaaaaaaaa

SEQ ID NO: 1364 - protein, 171 aa, Homo sapiens
MASLSRPSLPSCLCSFLLLLLLQVSSSYAGQFRVIGPRHPIRALVGDEVELPCRISPGKNATGMEVGWYRPPFSRVVHLYRNGKDQDGDQAPEYRGRTELLKDAIGEGKVTLRIRNVRFSDEGGFTCFFRDHSYQEEAAMELKVEVSHSVTQDWLQWHDHGSLQPPPPRLK

SEQ ID NO: 1365 - DNA, 2257 bp, Homo sapiens
gtggggctgtttctgcgggcacagctgcagcaattaccggagtggaggcagggcccaggcagcactgccctccaagatcttcccttgggcttttcagcagtaaggggacatgcaccccaagggcctccacttggcctgaccttgctgcgggggctctctgtccccaggaacagtagagatggcaagcttatcaagaccctctctgcccagctgcctctgctccttcctcctcctcctcctcctccaagtgtcttccagctatgcagggcagttcagagtgataggaccaagacaccctatccgggctctggtcggggatgaagtggaattgccatgtcgcatatctcctgggaagaacgctacaggcatggaggtggggtggtaccgcccccccttctctagggtggttcatctctacagaaatggcaaggaccaagatggagaccaggcacctgaatatcggggccggacagagctgctgaaagatgctattggtgagggaaaggtgactctcaggatccggaatgtaaggttctcagatgaaggaggtttcacctgcttcttccgagatcattcttaccaagaggaggcagcaatggaattgaaagtagaagtgtctcactctgtgacccaggattggttgcagtggcacgatcatggctcattgcagcctccacctcccaggctcaagtgatcctcctgactcagcctcttgaatagctgagaccacaggcttgtgtcaccatgcccagatcctttctactgggtgagccctggagtgctggttctcctcgcggtgctgcctgtgctcctcctgcagatcactgttggcctcatcttcctctgcctgcagtacagactgagaggaaaacttcgagcagagatagagaatctccaccggacttttgatccccactttctgagggtgccctgctggaagataaccctgtttgtaattgtgccggttcttggacccttggttgccttgatcatctgctacaactggctacatcgaagactagcagggcaattccttgaagagctacgaaatcccttctgagtgatgtcacatcttggcaggggtggaggagagcctggttgcccagggatttgtccttggggacatctcatccatcaagttgcacactcactggcatctttgctatggggacattccaatttgcactttcaggaacactctgaattccaagtagaattgatttcccttcttctgtcatctaccttttctcttcattttcccatttttattacccttctttccatttctctctccagtcttccacctggaagccctctctggctaaggacaggcaggtgcccctctctccatcagaggacacctgtactggagagcaacacaggatggtctctgccatgaactggaggccaggaatctcctcactgaaaattacagtatggtaactttgcaaatggtggttgtttcttccaagactccagccctgattgcgcaaaactgaaaggcatgtgaagggaaggaagaggaagagtgcaaaacattgaagagagagctgagtgagctgaagagtgaggatatgagtagccccaacccaaacctggagatggggagaaacctacagaatactagccagagctcctccttgtcttggcagcctactagggacctggggaagcaaaaacgaaagctgggcaacatgcctgctttagaatgttttccttctacttacacatcttccacaggtctcagaatctttccttcctctcatccttttctcctatcttcatatctatcagagtatccactgtttattcaacaactactacttgatggtcagacacaaacaaacaagctaggtgctaattaataaagatacgagttttggccgggtgcggtggctcacgcctgtaatcccagcactttgggaggccgaggcgggcgaatcacgaggtcaggagttcaagaccagcctggccaacatggtgaaaccccatctctactaaaaatacaaacaattaactgagcatagtggtgggcacctataataccagctactccggaggctgaggcaggagaatcgcttgaacccaggaggcagaggttgcagtgagctgagatcgtgccactgcactctagccggagtgacagagtaagactctgtctcaaaaataaataaataaataaataaataaataaataaataaataaataaaaaataataatacaagttttcataagcacacttctaaaaaaaaaaaa

SEQ ID NO: 1366 - protein, 171 aa, Homo sapiens; identical to SEQ ID NO: 1364

SEQ ID NO: 1367 - DNA, 1969 bp, Homo sapiens
ggagaccctgtgcccctaaatcgcggtccactgcgcgcgtcaggtttctagaagcagggtagaacagacggcagacacctagcccaggctggtgttgttactaaacaatggcagctggtgagccaagggtgaccagggccctgaactcggtggcccagctttgagggaagcaaaattgttctcaattgtggaagaggagaatttggacagcagaacaaaaaaggaagacagcctcttggagcagatacatttgtcacaggaagccacatcaaaccctggggcctttgctgggcctctccatctgcccagttactgggaggtagatagccccaggaaggaatccagtcaggcctgggcaccaggccaggagtggataaagctagaaagagacaccacagaagagaagatgtttgaacagctgaagccaatcgaacctagagattgctggagggaggcacgggtgaagaagaagccagtcacctttgaggatgtggcagtgaatttcacccaggaagagtgggactgtctagatgccagccagagggtcctttaccaggatgttatgtcggaaacctttaagaatctaacatctgtggccagaatctttctgcataagccagagctaatcaccaagcttgagcaagaagaggaacagtggagagagtttgtccatctcccaaacacagaaggcctttcagaaggcaagaagaaagagcttcgagaacaacatcccagtctgagagatgaggggactagtgatgacaaggtcttccttgcatgcagaggggccggccagtgccccctatctgccccagctgggactatggacaggacccgggtgcttcaagcatcccaggctgggccaccctttttttgctacacctgtggcaaatgtttcagcaggcgctcctacctctatagccaccagtttgttcacaatcccaagctgactaacagctgcagtcagtgtgggaagttgtttcggagccccaagtccctcagctatcacagacgcatgcatcttggggagaggcccttctgttgcacgctctgtgacaagacctactgtgatgcttctggactaagtcgtcaccgccgcgtccatctgggttaccggccccattcatgctctgtgtgtgggaagagcttccgggaccagtctgagctcaaacgccaccagaagatacaccaaaaccaggagccagtggatggaaaccaggagtgtactttgaggattccaggcacccaggctgaattccagacacccatcgccagaagccagaggtccatccaggggcttttggatgtgaaccatgcaccagtggccaggtcccaggaacccatatttagaactgagggtcctatggcccagaaccaggcatctgtacttaagaaccaagcacctgtgaccaggacccaggcacccatcactggaaccctctgtcaggatgccagatccaactctcatccagtgaagccctcaagactcaatgtcttctgttgcccccattgttctttgacttttagcaagaaatcctatctctccagacaccagaaggcccacctcacagagccgcccaactactgcttccattgcagcaagtctttcagctcattttccaggctggtcagacaccagcagacccactggaagcagaagagctacctttgccctatctgtgacctctcctttggggagaaagagggccttatggatcactggaggggctataaaggcaaggacctgtgccagagcagccaccataaatgccgggtgatcctgggccagtggcttggcttctctcatgatgtccccactatggctggggaggaatggaagcatggaggtgatcaatctccccccaggatccatacccccaggagaagaggcctaagagagaaggcctgcaaaggagacaaaacaaaggaggcagtgagcatcttgaaacataaataaatggcctttctg

SEQ ID NO: 1368 - protein, 516 aa, Homo sapiens
MFEQLKPIEPRDCWREARVKKKPVTFEDVAVNFTQEEWDCLDASQRVLYQDVMSETFKNLTSVARIFLHKPELITKLEQEEEQWREFVHLPNTEGLSEGKKKELREQHPSLRDEGTSDDKVFLACRGAGQCPLSAPAGTMDRTRVLQASQAGPPFFCYTCGKCFSRRSYLYSHQFVHNPKLTNSCSQCGKLFRSPKSLSYHRRMHLGERPFCCTLCDKTYCDASGLSRHRRVHLGYRPHSCSVCGKSFRDQSELKRHQKIHQNQEPVDGNQECTLRIPGTQAEFQTPIARSQRSIQGLLDVNHAPVARSQEPIFRTEGPMAQNQASVLKNQAPVTRTQAPITGTLCQDARSNSHPVKPSRLNVFCCPHCSLTFSKKSYLSRHQKAHLTEPPNYCFHCSKSFSSFSRLVRHQQTHWKQKSYLCPICDLSFGEKEGLMDHWRGYKGKDLCQSSHHKCRVILGQWLGFSHDVPTMAGEEWKHGGDQSPPRIHTPRRRGLREKACKGDKTKEAVSILKHK

SEQ ID NO: 1369 - DNA, 1969 bp, Homo sapiens
ggagaccctgtgcccctaaatcgcggtccactgcgcgcgtcaggtttctagaagcagggtagaacagagggcagacacctagcccaggctggtgttgttactaaacaatggcagctggtgagccaagggtgaccagggccctgaactctgtggcccagctttgagggaagcaaaattgttctcaattgtggaagaggagaatttggacagcagaacaaaaaaggaagacagcctcttggagcagatacatttgtcacaggaagccacatcaaaccctggggcctttgctgggcctctccatctgcccagttactgggaggtagatagccccaggaaggaatccagtcaggcctgggcaccaggccaggagtggataaagctagaaagagacaccacagaagagaagatgtttgaacagctgaagccaatcgaacctagagattgctggagggaggcacgggtgaagaagaagccagtcacctttgaggatgtggcagtgaatttcacccaggaagagtgggactgtctagatgccagccagagggtcctttaccaggatgttatgtcggaaacctttaagaatctaacatctgtggccagaatctttctgcataagccagagctaatcaccaagcttgagcaagaagaggaacagtggagagagtttgtccatctcccaaacacagaaggcctttcagaaggcaagaagaaagagcttcgagaacaacatcccagtctgagagatgaggggactagtgatgacaaggtcttccttgcatgcagaggggccggccagtgccccctatctgccccagctgggactatggacaggacccgggtgcttcaagcatcccaggctgggccaccctttttttgctacacctgtggcaaatgtttcagcaggcgctcctacctctatagccaccagtttgttcacaatcccaagctgactaacagctgcagtcagtgtgggaagttgtttcggagccccaagtccctcagctatcacagacgcatgcatcttggggagaggcccttctgttgcacgctctgtgacaagacctactgtgatgcttctggactaagtcgtcaccgccgcgtccatctgggttaccggccccattcatgctctgtgtgtgggaagagcttccgggaccagtctgagctcaaacgccaccagaagatacaccaaaaccaggagccagtggatggaaaccaggagtgtactttgaggattccaggcacccaggctgaattccagacacccatcgccagaagccagaggtccatccaggggcttttggatgtgaaccatgcaccagtggccaggtcccaggaacccatatttagaactgagggtcctatggcccagaaccaggcatctgtacttaagaaccaagcacctgtgaccaggacccaggcacccatcactggaaccctctgtcaggatgccagatccaactctcatccagtgaagccctcaagactcaatgtcttctgttgcccccattgttctttgacttttagcaagaaatcctatctctccagacaccagaaggcccacctcacagagccgcccaactactgcttccattgcagcaagtctttcagctcattttccaggctggtcagacaccagcagacccactggaagcagaagagctacctttgccctatctgtgacctctcctttggggagaaagagggccttatggatcactggaggggctataaaggcaaggacctgtgccagagcagccaccataaatgccgggtgatcctgggccagtggcttggcttctctcatgatgtccccactatggctggggaggaatggaagcatggaggtgatcaatctccccccaggatccatacccccaggagaagaggcctaagagagaaggcctgcaaaggagacaaaacaaaggaggcagtgagcatcttgaaacataaataaatggcctttctg

SEQ ID NO: 1370 - protein, 516 aa, Homo sapiens; identical to SEQ ID NO: 1368

SEQ ID NO: 1371 - DNA, 1188 bp, Homo sapiens
atggcgccccgaagcctcctcctgctgctctcaggggccctggccctgaccgatacttgggcgggctcccactccttgaggtatttcagcaccgctgtgtcgcggcccggccgcggggagccccgctacatcgccgtggagtacgtagacgacacgcaattcctgcggttcgacagcgacgccgcgattccgaggatggagccgcgggagccgtgggtggagcaagaggggccgcagtattgggagtggaccacagggtacgccaaggccaacgcacagactgaccgagtggccctgaggaacctgctccgccgctacaaccagagcgaggctgggtctcacaccctccagggaatgaatggctgcgacatggggcccgacggacgcctcctccgcgggtatcaccagcacgcgtacgacggcaaggattacatctccctgaacgaggacctgcgctcctggaccgcggcggacaccgtggctcagatcacccagcgcttctatgaggcagaggaatatgcagaggagttcaggacctacctggagggcgagtgcctggagttgctccgcagatacttggagaatgggaaggagacgctacagcgcgcagatcctccaaaggcacacgttgcccaccaccccatctctgaccatgaggccaccctgaggtgctgggccctgggcttctaccctgcggagatcacgctgacctggcagcgggatggggaggaacagacccaggacacagagcttgtggagaccaggcctgcaggggatggaaccttccagaagtgggccgctgtggtggtgccttctggagaggaacagagatacacatgccatgtgcagcacgaggggctgccccagcccctcatcctgagatgggagcagtctccccagcccaccatccccatcgtgggcatcgttgctggccttgttgtccttggagctgtggtcactggagctgtggtcgctgctgtgatgtggaggaagaagagctcagatagaaacagagggagctactctcaggctgcagtcactgacagtgcccagggctctggggtgtctctcacagctaataaagtgtgagacagcttccttgtgtgggactgagaagcaagatatcaatgtagcagaattgcacttgtgcctcacgaacatacataaattttaaaaataaagaataaa

SEQ ID NO: 1372 - protein, 362 aa, Homo sapiens
MAPRSLLLLLSGALALTDTWAGSHSLRYFSTAVSRPGRGEPRYIAVEYVDDTQFLRFDSDAAIPRMEPREPWVEQEGPQYWEWTTGYAKANAQTDRVALRNLLRRYNQSEAGSHTLQGMNGCDMGPDGRLLRGYHQHAYDGKDYISLNEDLRSWTAADTVAQITQRFYEAEEYAEEFRTYLEGECLELLRRYLENGKETLQRADPPKAHVAHHPISDHEATLRCWALGFYPAEITLTWQRDGEEQTQDTELVETRPAGDGTFQKWAAVVVPSGEEQRYTCHVQHEGLPQPLILRWEQSPQPTIPIVGIVAGLVVLGAVVTGAVVAAVMWRKKSSDRNRGSYSQAAVTDSAQGSGVSLTANKV

SEQ ID NO: 1373 - DNA, 342 bp, Homo sapiens
atgaaccacactgcccaaaccttcttcattcctgccaacagtggctgccctcccccgccccccaaccccagctatgagatgctcaaggaggagcatgaggtggctgtgctgggggcgccccacaaccctgctcccccaatgtccaccatgatccatatctgcagcgagacctccgtgtctgactatgttgtctggtccctgtccaacatcctcttcatgaacccccactgcctgggattcatagcattcacctactccctgaagtctagggacaggaagatggttggagacctgactggggcccaggcctatgcctccactgccaagtacctgaacatctga

SEQ ID NO: 1374 - DNA, 2033 bp, Homo sapiens
caaggagcacaggtcctcgttcaggacgatgtaatccttgccatcgtaagcaagctggtgatacccgcggagtaggcgcccgtccgaccccacgtcgcagacagacatcctctagatgggtgtgagaccctggccccgcccccgcggccagccccgcccaccgagccccgccctcgccaggaccaacctgcggggattttggctgaaaatgaaaccgggtaacggctcctgggcctctcccgggtcaagggtctccaggtcccgctgcctcggcgtggatctcggacccagagactcggggagacccgggcggtccgtgggggatgtggaggggtagtgacctgcgcccccggccggtgtcactcacaggcctcactctggttgtagtagccgctcagggtccgcaggttcactcggtaaaactgtgctttggccttggcggtccctgtctcctcttcccaatattccggcccctcctgctccatccacggcgcccgcggctccatcctgggactcgtggcgtcgctgtcgagccgcacgcactgcgtgtcgtccacgtcgcccacggagaggaagcggggatccgcgcggccgggccgggacatggtggtgtggaaatacctcaaggagtaagcctgggagcaaggagggggctgagaccctcccgaccctcctcccggcaccgcaaccgggttcctgcgcccccgccgggcaggcccctagctactccccacagacgccgtttccctcccgaccccgcactcacctgcccaggtctgggtcaggaccagggcccccgagagcagcagaagcagggttcggggcgccatgacaccatcctcggcgactgggaagaatcggagtcccggtgggtgcgtgggaactttagaaccgggaccgcggctacattgattggcttctctagaaacccgacactcaatgggagtgagaactggggcagcccggtgagtacccaggaagaaggacccgacacaggttgggagagggagaagagaaaccctgcaaagatggggaatgcccagcgctgggcctccccaatccatacaccgcctttggggcctgagatcctgagagccacgcctgaggccctgggacttcgccctgaccccgctacttctgtgccaagcgctctgtctcaatgtttccctgagtcttggcccaggagctgtctgagaaaccagggagaaaccctcggaatgggccccgtccctctctcttcactttgcatcacggaatccccgtcccagaactggactccctgcctcctactccttacctgtccccgtggactcttctagaagaaaaatcaccccagggagcttgttgccagagagtgagcttgccctgggaatggaggtgtagagacagggttttttgttgttgttgtttgtttgttttttaaatctggaaaagttgtgcctgagtgcatgagatagaatagagaccagtttgctttttgtttattaactacagtgggtagcagaatcttggtaactcctaatgatcaggaatctaatcggccaaaaatgtgactttggtcccttgacatataaatgtgtctaaaagcattacaacaggaatcacaaagctcctaagtttcactttcccagacaatgtatctgtgactcccgcttgtagtattttaaatttaccttcattccatagccctgagtttctgtgtgagtccaggacatctcctaatacaaggtagccactgtgttactatatgttgtaaccaggagccagtacggactttattcatctcacagtggcaagcactcaatgcagtcacaatgcccctcaccagtgctcatgcactgcctgtttttaggaagtatccacttctaagtgttgtgtatattttatatgaacacttagtattttttaaacctgattaacataaaaaaattagtttttaggcagacccacataaggtattaaaggccaactgcaaagatcaccctgcaaggctctgtagattgatgtattaaaatatataaaacaatgtgttt

SEQ ID NO: 1375 - DNA, 1840 bp, Homo sapiens
cccattaggtgacaggtttttagagaagccaatcacgtcgccgcggtcctggttctaaagtcctcgctcacccacccggactcattctccccagacgccaaggatggtggtcatggcgccccgaaccctcttcctgctgctctcgggggccctgaccctgaccgagacctgggcgggctcccactccatgaggtatttcagcgccgccgtgtcccggcccggccgcggggagccccgcttcatcgccatgggctacgtggacgacacgcagttcgtgcggttcgacagcgactcggcgtgtccgaggatggagccgcgggcgccgtgggtggagcaggaggggccggagtattgggaagaggagacacggaacaccaaggcccacgcacagactgacagaatgaacctgcagaccctgcgcggctactacaaccagagcgaggccagttctcacaccctccagtggatgattggctgcgacctggggtccgacggacgcctcctccgcgggtatgaacagtatgcctacgatggcaaggattacctcgccctgaacgaggacctgcgctcctggaccgcagcggacactgcggctcagatctccaagcgcaagtgtgaggcggccaatgtggctgaacaaaggagagcctacctggagggcacgtgcgtggagtggctccacagatacctggagaacgggaaggagatgctgcagcgcgcggacccccccaagacacacgtgacccaccaccctgtctttgactatgaggccaccctgaggtgctgggccctgggcttctaccctgcggagatcatactgacctggcagcgggatggggaggaccagacccaggacgtggagctcgtggagaccaggcctgcaggggatggaaccttccagaagtgggcagctgtggtggtgccttctggagaggagcagagatacacgtgccatgtgcagcatgaggggctgccggagcccctcatgctgagatggaagcagtcttccctgcccaccatccccatcatgggtatcgttgctggcctggttgtccttgcagctgtagtcactggagctgcggtcgctgctgtgctgtggagaaagaagagctcagattgaaaaggagggagctactctcaggctgcaagtaagtatgaaggaggctgatccctgagatccttgggatcttgtgtttgggagccatgggggagctcacccaccccacaattcctcctctggccacatctcctgtggtctctgaccaggtgctgtttttgttctactctaggcagtgacagtgcccagggctctaatgtgtctctcacggcttgtaaatgtgacaccccggggggcctgatgtgtgtgggttgttgaggggaacaggggacatagctgtgctatgaggtttctttgacttcaatgtattgagcatgtgatgggctgtttaaagtgtcacccctcactgtgactgatatgaatttgttcatgaatatttttctgtagtgtgaaacagctgccctgtgtgggactgagtggcaagtccctttgtgacttcaagaaccctgacttctctttgtgcagagaccagcccacccctgtgcccaccatgaccctcttcctcatgctgaactgcattccttccccaatcacctttcctgttccagaaaaggggctgggatgtctccgtctctgtctcaaatttgtggtccactgagctataacttacttctgtattaaaattagaatctgagtataaatttactttttcaaattatttccaagagagattgatgggttaattaaaggagaagattcctgaaatttgagagacaaaataaa

SEQ ID NO: 1376 - protein, 338 aa, Homo sapiens
MVVMAPRTLFLLLSGALTLTETWAGSHSMRYFSAAVSRPGRGEPRFIAMGYVDDTQFVRFDSDSACPRMEPRAPWVEQEGPEYWEEETRNTKAHAQTDRMNLQTLRGYYNQSEASSHTLQWMIGCDLGSDGRLLRGYEQYAYDGKDYLALNEDLRSWTAADTAAQISKRKCEAANVAEQRRAYLEGTCVEWLHRYLENGKEMLQRADPPKTHVTHHPVFDYEATLRCWALGFYPAEIILTWQRDGEDQTQDVELVETRPAGDGTFQKWAAVVVPSGEEQRYTCHVQHEGLPEPLMLRWKQSSLPTIPIMGIVAGLVVLAAVVTGAAVAAVLWRKKSSD

SEQ ID NO: 1377 - DNA, 1096 bp, Homo sapiens
atggtgctcatggcgccccgaaccctcctcctgctgctctcaggggccctggccctgacccagacctgggcgcgctcccactccatgaggtatttctacaccaccatgtcccggcccggccgcggggagccccgcttcatctccgtcggctacgtggacgatacgcagttcgtgcggttcgacagcgacgccgcgagccagaggatggagccgcgggcgccgtggatggagcgggaggggccggagtattgggaccggaacacacagatctgcaaggcccaggcacagactgaacgagagaacctgcggatcgcgctccgctactacaaccagagcgagggcggttctcacaccatgcaggtgatgtatggctgcgacgtggggcccgacgggcgcttcctccgcgggtatgaacagcacgcctacgacagcaaggattacatcgctctgaacgaggacctgcgctcctggaccgcggcggacatggcagctcagatcaccaagcgcaagtgggaggcggcccgtcaggcggagcagctgagagcctacctggagggcgagttcgtggagtggctccgcagatacctggagaacgggaaggagacgctgcagcgcgcggacccccccaagacacatatgacccaccaccccatctctgaccatgaggccaccctgaggtgctgggccctgggcttctaccctgcggagatcacactgacctggcagcgggatggggaggaccagacccacacacggagctcatggagaccaggcctgcaggggatggaaccttccagaagtgggcggctgtggtggtgccttctggagaggagcagagatacacctgccatgtgcagcatgagggtctgccagagcccctcaccctgagatgggagccatcttcccagcccaccatccccatcgtgggcatcgttgctggcctggttctacttgtagctgtggtcactggagctgtggtcgctgctgtaatgtggaggaagaagagctcagatagaaaaggagggagctactctcaggctgcaagcggcaacagtgcccagggctctgatgtgtctctcacggcgtgaaagtgtga

SEQ ID NO: 1378 - DNA, 3642 bp, Homo sapiens
ggcacgagctttggctggctagggaggggatgcaatgatataaacatttatcccctgatacctcatgttaaaatctgatgcccactgtgggacgtggggcctaatggccaccatttgggtcatggtgaccaatcttttatgaatagagagatactgccctctcttgggaatgaatgaattgttgctttattattttccaagagagctagttgttaaaaagaccctggcaacttcctactctctctgttcctctgttaccatgtgttctctgcatataccagctcacctttgtcttctgccatgagtggaagcagcctgaggccctcactaaatgcgcaaacatttccagacatcagaatcttgagccacatgaaccttgtttatataaattagtcagtctcagacatttctttatagcaacacaaaatggaaaaagataacactcgcatcacaggtatgtgtctctggcagctagccaccgttcttaagatatccaggatccactcagccaagagtcttctcatcagtactctaaagacacttatcactcaagagagtctaaggtttttaggagaaaccagggacaaagtctaaatgtttttgtgataactcagattgcccacttttctttgaccacatatcttttacaggaaaaaggattgtaacagtaaagaggtattggcatattatcagagtctcatccattcattcaaaattaggccagtttatcatcctcttgtatgaatatgtctcccagaatgaaatcactcagctttgctgacaacactcaatcttaccaggttccaaaaacaagaatggtctcagggacatacagcttcactcttttaggcatccagtataattgacctaagtgacaatatcttctcttgctcacaccacctttgaggagttaagctaatattgaatttttctcattatataaccctttgatttattcacttgccctcagccactattcctccctctgtccctttatatcagttgtttccaggtttgggagtgacattaggtttgtctgctgggctggcctagactgcaggcagcaatagtattctagcatgtcttccctcagtctagtcttgatcatagagggtaggttatataggtaaggaactagtgggggctatcaagaccaccaggctatataactctacttactgttaatcctaacttttccagatgaaatgaatacttgagaattcttacataaaggtataaaaatatagttatggtttttggcttagggataattcctgtttctggcacttttatttacatccctattcctggtactatggcataacatatgaaaaaataaatttgaggtgaagtgtagtctttattccagcatcctctcctcttcagaagaattgtatgtatcgtcataacagcatcgtcctgatccatcaggtaaaagagaggatgctacctagtggagttattcttgcagccccactcatgttgacagcgagcacattcatgaagatataaaagccagtccttcatgtttatattgcccaacaattagattggcagtttttagacaaacaatgtttcaattgaccatttcaattttctatcaaattttcccctgaggaggacatgtccctctgcattgttggccatttgaggctgtaaagtgtgttttcttgtgtaaagaagtgtgactcggcagtccaaattggtgcaatctcttcttttctggttcttgtatagcccttgaagcattgacatctacccctggttgagcatagcccaatccagagtcagtgattttcctgtcaagatccattggcagctcctttggggttgctggcatcattctggcttgccaggtattatgatcaaagccttcccactagagaatctgtcacatctccatctgctgcctctgtctgttttcttgaccaacagtgaaaaaagagattatgagaaataagataaattaccaaaattgtgaacaaaagagagattatcactaatgacccttaggaagttaaaaaacattataagtgaatactctgaaaaacctgaagccaataagttagaccacttggataaaaaggaccaattcgtgcagagatagaaattgccaaaactgacccaaattaactggaaaacctgaagagaactgtgaactaagtcagaaattgaaaaaccttctcaaaaagaaatgccaaagcccagatatcttcactggtgaattctatcaaatattttgaaagctctttcagacaagaagagaggagggaagactttccagcccatttacagaactggcattaccctcatatcaaagtcacagcaagactcacaggaaaagagtgccatacaccagtgtcaccaataaacataaatgaaaacatccttaacaaacattggcagataatacaaagccacataaaaaaggattacactccatgaccaatgggattcatcccaggaacatatggttggattaacatttgaaaatcagttcatggaatgcactgtattaatggaaaaaaagacataattatctcaaaagatgcaggagaaacagttgacaaaaatgttaacatcactcatgttcataagtttcaacaaaataggaatggaggagaccttcttcactctgataaagggcgtctataaaaaacccacagctaaaatcaaacttaatgaagaaagactgaagactgaatgcttttctcctaagatggggatcaatgcaaggatgtccaatcccaccacttttatttaatattatactggagattgtatccagtgcaataaggcagaaaattaaaaattaaaggcatccagataaaaaggaaaacatacaattctattcacagataacatgaccctgtctgtagaattcacaagcagataaaaactggctagcactaataaatgaatccagaagggcccataggatatcaaatcaatataaaaattaattattaacatatttctctatagaagcaatgaaaatctcaactttcctatcacagtagttaccagaagagcgaaataggaataaatttaggaagacagcagtgtttgttcactgaaaataaaaaaacattcctcagagaaattaaaggtctaaataaatggagagatgcgagttggaaagctcgataatactgttaagatggcagttctcccccagtagatctataggttcaacacaatccctatcaaaatcccagcaggattttatagaaaattgacaaaataggccgggcgcggtggctcatgccggtaatcccagcactttgggaggctgaggcgggcggatcatgagatcaggagatccagaccatcctggctaacacggtgaaaccccgtctctactaaaaatacaaaaaattagccgggcgtggtggcaggctcctcgggaggctgaggcagaaaaatggcatgaacccggtaggcagaagttgcagtgagcggagatcgtgccactgcactccagcctgggtgacagagcgagactccgtctcaaaaaaaaaaaaaaaaaaaaagaaaagaaaaaaagaaaagaaaattgacaaaataatcctaaaaatgtatatgaaaatgcagaggatgcagaagggccaacacaaatttggaaaaaaaaaaaaaaaaaaa

SEQ ID NO: 1379 - DNA, 1060 bp, Homo sapiens
cacaaagctactaagtttgactttcgcagacaatgtatctgtgactcccgcttgttttttacatttaccttcattccacagccctgagttactgggtgagtccaagacatctcctcaatataaagtagcacactgcgttactatatgttgcaaccgggagccagtacagactttattcacctcacagttgcaagtgttcaatgcagtcacaatgcccctcagcagtgctcatgtgctgcctgtttttaggaagtattcacgtctaagtggtgtgtatatcttataggaacacttagtatttttaaaacctgattaattaaaaaaaattagtttctaggcagtcccaaatatagtattaaaggccaactgcaaagaaggaacactaagtgttttttaaaccttattaacataaaaaacattagtttttaggcagtcctacattaggtattaaaggccaactgcaaagaacactgagcgaggctctgtagatggatgtaataaaaatctataaaacaatgtgtttaaacctaagaattctactgctttccaattccttccctctgctccttttcctaacctcctgcttctccagcccttccctctgtccctttcatccctcaggccctcctctccccttagtccccaccaccctgtcacttctaaattgtggctctagcattgtcccattacctgctacgtgactgttctctccacagtggtcctgctcctgtgagtcagagtgtgtcatttcctcacctaaaacactccagtggctccacctcggtcttgtgaagcttctagaatgtcaggcacgtgagcatatgagggcatacctggttcatcttaggcactaaatttttgttgactgaatgaatgaaatatgaatgtattaaattgcatcacagaaagttataaaatgtaaaacactgaaaaattaagaaatattttattttatgtaactagtgtgcatatcaattcattccgagtctgttgagcctgtgtatgaattttataagattgcataacaaattatcacaaacattgactttaaacaacaccc

SEQ ID NO: 1380 - DNA, 1538 bp, Homo sapiens
atggccgtcatggcgccccgaaccctcctcctgctactctcgggggccctggccctgacccagacctgggcgggctcccactccatgaggtatttcttcacatccgtgtcccggcccggccgcggggagccccgcttcatcgccgtgggctacgtggacgacacgcagttcgtgcggttcgacagcgacgccgcgagccagaggatggagccgcgggcgccgtggatagagcaggaggggccggagtattgggaccaggagacacggaatgtgaaggcccagtcacagactgaccgagtggacctggggaccctgcgcggctactacaaccagagcgaggccggttctcacaccatccagataatgtatggctgcgacgtggggtcggacgggcgcttcctccgcgggtaccggcaggacgcctacgacggcaaggattacatcgccctgaacgaggacctgcgctcttggaccgcggcggacatggcggctcagatcaccaagcgcaagtgggaggcggcccatgaggcggagcagttgagagcctacctggatggcacgtgcgtggagtggctccgcagatacctggagaacgggaaggagacgctgcagcgcacggacccccccaagacacatatgacccaccaccccatctctgaccatgaggccaccctgaggtgctgggccctgggcttctaccctgcggagatcacactgacctggcagcgggatggggaggaccagacccaggacacggagctcgtggagaccaggcctgcaggggatggaaccttccagaagtgggcggctgtggtggtgccttctggagaggagcagagatacacctgccatgtgcagcatgagggtctgcccaagcccctcaccctgagatgggagctgtcttcccagcccaccatccccatcgtgggcatcattgctggcctggttctccttggagctgtgatcactggagctgtggtcgctgccgtgatgtggaggaggaagagctcagatagaaaaggagggagttacactcaggctgcaagcagtgacagtgcccagggctctgatgtgtccctcacagcttgtaaagtgtgagacagctgccttgtgtgggactgagaggcaagagttgttcctgcccttccctttgtgacttgaagaaccctgactttgtttctgcaaaggcacctgcatgtgtctgtgttcgtgtaggcataatgtgaggaggtggggagaccaccccacccccatgtccaccatgaccctcttcccacgctgacctgtgctccctccccaatcatctttcctgttccagagaggtggggctgaggtgtctccatctctgtctcaacttcatggtgcactgagctgtaacttcttccttccctattaaaattagaaccttagtataaatttactttctcaaattcttgccatgagaggttgatgagttaattaaaggagaagattcctaaaatttgagagacaaaataaatggaacacatgagaaccttccaaaaaaaaaaaaaaaaaaa

SEQ ID NO: 1381 - protein, 365 aa, Homo sapiens
MAVMAPRTLLLLLSGALALTQTWAGSHSMRYFFTSVSRPGRGEPRFIAVGYVDDTQFVRFDSDAASQRMEPRAPWIEQEGPEYWDQETRNVKAQSQTDRVDLGTLRGYYNQSEAGSHTIQIMYGCDVGSDGRFLRGYRQDAYDGKDYIALNEDLRSWTAADMAAQITKRKWEAAHEAEQLRAYLDGTCVEWLRRYLENGKETLQRTDPPKTHMTHHPISDHEATLRCWALGFYPAEITLTWQRDGEDQTQDTELVETRPAGDGTFQKWAAVVVPSGEEQRYTCHVQHEGLPKPLTLRWELSSQPTIPIVGIIAGLVLLGAVITGAVVAAVMWRRKSSDRKGGSYTQAASSDSAQGSDVSLTACKV

SEQ ID NO: 1382 - DNA, 670 bp, Homo sapiens
agaggaaagaaccctgggaacgggaggcgaagggataatgagctggggatgggagcagtcgcaggaagaatcctctgcctggagccggcaggctccaacccctcagcttgagagtcaggagccccatagtccccacagcaataggaagcaccagctcctggtcccgaaaaaaggagggccccaactccagggactgcggcccgccctggagctgagaacacgcggactccagggagaggacagggcttcagggacccgagagccgctctgagcaccgggggatgtgactgcctcagcggcagagctggaagggccctcgaatgccattcacaggaacagcccaggaacccagggacttcagaagggctggtttgtccgaaaagtgagaggaggcggaggagagagcctgcgaggtcaagctgcagagaacatgagcttctacctccagatgtgccagggtgcatctcaataaacttggattttggccaggcgcggtggctcaggcctgtaatcccagctctggaagctgaaggatagcttgagcccaggagttcgaggctgcagtgagctatgatctcaccactacactccagcctgggtgacagcaagagatcttgtctcagaaataaataaataaaatttaaaaataaaaaaaaaaaaaaaaaaaaaa

SEQ ID NO: 1383 - protein, 77 aa, Homo sapiens
MSWGWEQSQEESSAWSRQAPTPQLESQEPHSPHSNRKHQLLVPKKGGPQLQGLRPALELRTRGLQGEDRASGTREPL

SEQ ID NO: 1384 - DNA, 751 bp, Homo sapiens
gggcgcagagctggcgctctagcccacggagttggttaactcctctcaccggcccctggaaagggttccaagtcctttagtacccgacgctgtctgggaattccgggcgtttcggctccttggtcgcagaggcaggaggcacccgaccgcatgtctgtcatggacctcgccaatacttgctccagctttcagtcggacctggatttctgttcagattgcggctcggtcctgcctctgcccggggctcaggatacggtcacctgtattcgctgtggcttcaacatcaacgttcgggactttgaggggaaggttgtgaagacttcggttgtgttccaccaactggggacagccatgcctatgtcggtggaggaagggcctgagtgccagggacctgtggttgacaggcgctgccctcgatgtggtcatgaaggaatggcataccacaccagacagatgcgttcagccgatgaagggcaaactgtcttctacacctgtaccaactgcaagttccaggagaaggaagactcttgacctttttcctgggcaactctacagtccctccctcctttcggaaggtgaaggatactgggtttttagatgccttgtccatcctgtctggttgcaatgttttgctcccagaagagaatcagatcatcatgtggggattaccattgttcctggagtactcctacccttagttgaatttccttattaaagttatatttttctataagaccctgacaaaaaaaaa

SEQ ID NO: 1385 - protein, 126 aa, Homo sapiens
MSVMDLANTCSSFQSDLDFCSDCGSVLPLPGAQDTVTCIRCGFNINVRDFEGKVVKTSVVFHQLGTAMPMSVEEGPECQGPVVDRRCPRCGHEGMAYHTRQMRSADEGQTVFYTCTNCKFQEKEDS

SEQ ID NO: 1386 - DNA, 867 bp, Homo sapiens
gggcgcagagctggcgctctagcccacggagttggttaactcctctcaccggcccctggaaagggttccaagtcctttagtacccgacgctgtctgggaattccgggcgtttcggctccttggtcgcagaggcaggaggcgtgcgtggcaggagggttcgggttatatactcctaggtcctgggacagaatagttacgacctctgggacaggaactcttctctcttttgttaataaacttccaactccctcctcagacccgaccgcatgtctgtcatggacctcgccaatacttgctccagctttcagtcggacctggatttctgttcagattgcggctcggtcctgcctctgcccggggctcaggatacggtcacctgtattcgctgtggcttcaacatcaacgttcgggactttgaggggaaggttgtgaagacttcggttgtgttccaccaactggggacagccatgcctatgtcggtggaggaagggcctgagtgccagggacctgtggttgacaggcgctgccctcgatgtggtcatgaaggaatggcataccacaccagacagatgcgttcagccgatgaagggcaaactgtcttctacacctgtaccaactgcaagttccaggagaaggaagactcttgacctttttcctgggcaactctacagtccctccctcctttcggaaggtgaaggatactgggtttttagatgccttgtccatcctgtctggttgcaatgttttgctcccagaagagaatcagatcatcatgtggggattaccattgttcctggagtactcctacccttagttgaatttccttattaaagttatatttttctataagaccctgacaaaaaaaaa

SEQ ID NO: 1387 - protein, 126 aa, Homo sapiens; identical to SEQ ID NO: 1385

SEQ ID NO: 1388 - DNA, 1664 bp, Homo sapiens
gcatttggtgccgtggaagggaaaaagggggactgcagtatgcgtcacacccggaagcggcgagccggaagtggggttagccaggttatccccaggggtggagaagcggaggcccaggaggagggggaataaagaaggtggaggatcctggctaccactctgaatccgataccgcttctcttagacctcagcgacagaaaaagggaagggtgtctcatcccccttcctcctctcctccctgtcctgagccttagccatggccgaggcaggggctgggctgagcgagaccgtcactgagacaacggttaccgtgacaaccgagcccgagaaccggagccttaccatcaaacttcggaaacggaagccagagaaaaaggtagaatggacaagtgacactgtggacaatgaacacatgggccgccgctcatccaaatgctgctgtatttatgagaaacctcgggcctttggcgagagctccacggaaagtgatgaggaggaagaagagggctgtggtcatacacactgtgtacgtggccaccgcaaaggacggcgtcgtgcaaccctaggaccgacccccaccacccctccccagcctcctgacccttcccagccccctccagggccaatgcagcactaaatccctctctcctccagcattcctgtgtctgtctggccctaaatgtatccatgtggctacttctccagccccctccttccctctcttctgcctgatagagggaagaggaagaggaggacgaacagagatcctgaaattctgacttgctgctattccagaacccagcctcctgggtttccccagtcctcatttttcctcccaatacccacccttctctctcgagggatctaggcaccttggtcccagtgtcttccttttgttctcactgccaaactgcctgtcctgggatctagttatcttggccctgcactctcaacatgagtagcgaacacttaaattgggttttcaacagtcccagctttcactgccagggtcccagtcagattccaggaatttgcgccctaactttgcttgctaatcctggtttagagctatcccactaaaatatttaatcctaattcttagtccttgcctgtgagatatgaggtcttacaggagacctcagagctcccagcccttctcctcctgctaacccttctcacaccctcaagaggagttagaaaagaggtccttgtcattctcacctcttatggaaaatggaataagaaataatcatatcctttcttcccacccttctcctgttatttaggatttctgacaaagctggcttgagattggtcacttagagccgactgtctcctctgccttttgtttttcagcttcagagacagatccaatatagtcccagggacctgggtctctgggagaggaaggaagagggagggagcaaagagattggggtatgtcccctgtagtacactcttacctcttacttcctagactttgatttctccggcagcccagatgttcagttctcttggcccctctctaccccttactgggatccggttttcattttccggtccttttgccatacacagttacagagatcagtcaaatccataccaccactgagatctcatttattgccacagatgcacaaaataaataacccaaaatcacaaaa

SEQ ID NO: 1389 - protein, 126 aa, Homo sapiens
MAEAGAGLSETVTETTVTVTTEPENRSLTIKLRKRKPEKKVEWTSDTVDNEHMGRRSSKCCCIYEKPRAFGESSTESDEEEEEGCGHTHCVRGHRKGRRRATLGPTPTTPPQPPDPSQPPPGPMQH

SEQ ID NO: 1390 - DNA, 2187 bp, Homo sapiens
ggcgttacgcaaggcctggtgtttacctcccgtgggagcctcctccctccctataaagcctgatgtggtggagagatttgacgagactgagactctggttgaagagagaggcaatcccaggagaggggcggaaagcggcaaaagttaatgcgggagtcggagagaagggcatctacacagcaagcagcaggggcggcccgccatctgcgcgctcgaaggcggtcacggtggtcgcggaaggggcggcgtccagatcctggctttccatggatgcgcccgagctgggcccggggctggtggagcgtctggagcagctggcgacgtgtcctctgtgcgggggctccttcgaggacccggtgcttctggcgtgcgagcacagcttctgccgcgcgtgtctggcccgccgctgggggactccgccggcgaccggcaccgaggcttcccccaccgcctgtccctgctgcggcctgccgtgtccccgccgcagcctgaggtctaatgtgcggctggcggtggaggtgcgaatcagccgcgagctgcgagagaagctggctgagcctggggcccgtgcggggagacgccgaggggggcgcatccccaccatgggctgcctggacctgcccggagaggatatgaggaagacatggagacgatttgaagtcccaacatccaagtcatctaattcagaggatgatctccctgaagattatccagtggtcaaaaaaatgcttcatagactgacagccgacctgaccctggaccctgggaccgcacaccgccgcctgctcatctccgccgaccgccgcagcgtacaactggccccaccagggacgcccgcgccccctgacggccccaagcgcttcaatcagctcccagctgtgctgggtgcgcagggcttcggggccggccgccactgctgggaggtggagactgcggacgccgcctcctgcagagactcttctggggaggatgcggacgacgaggagagccactatgcagtgggcgcggccggggaatcagtgcaacgcaagggctgcgtaaggctgtgccctgcgggggccgtgtgggccgtggagggccgcggcggccgcctgtgggccctcacggcacccgaacccaccctgctgggcggtgttgagcccccgccgcggcgcattcgcgtggacctggactgggagcggggccgcgtggccttctacgacggccgctcactcgacctgctttacgccttccaggcgcctggccccctgggggagcgcatcttcccgctgttctgcacctgcgaccctcgtgctccgctccgcattgtaccagcggaaagctgagtctcgtctccaactagaagtttggcccggccactggccctgcagctgctttttgggggtggaattccccactcatttctgggaacacattcacacgcccattgcaggagtattaatagcaacccacattttcgccccaaaataatgagacctcacctggtctccacgtttccacgtccctgctcaaaaccaaatccattcctgccttctggctctcagaatcttctctcccctacagctactacagtacttcctgacttctcccattcaaaccattctaggcctgcaatggggaacaggccctccccatcagtattggtaaagtgaccatgattcctacatagaggctctgctggtcaaatacttgactcccactcttgccactcctagctccagaagggctcagggccttccccacagatctaaggactgggctaccctgcctgtccactgaggtttctcctaaaacaagaggcttgactctggtctgggccctgtggccctctgggaagctttgtacctcttttgcaggatccgggggtggggagggacaagctagttccccaacctcctatgactgctttctatgctcacagccttttttccataagaaccttcttgaaacttctccccgcacatactcacggaaaggaaccaatggtgctatttcccctctctcctcctcaacctgggaatacttcagacatctccaaactcatccttgtgtatagtctcacacccttccccataagtataaatgggcccatatttaacacattttgtgattttgggttatttattttgtgcatctgtggcaataaatgagatctcagtggtggtatggaaaaaaaaaaaaaaaaaa

SEQ ID NO: 1391 - protein, 420 aa, Homo sapiens
MWWRDLTRLRLWLKREAIPGEGRKAAKVNAGVGEKGIYTASSRGGPPSARSKAVTVVAEGAASRSWLSMDAPELGPGLVERLEQLATCPLCGGSFEDPVLLACEHSFCRACLARRWGTPPATGTEASPTACPCCGLPCPRRSLRSNVRLAVEVRISRELREKLAEPGARAGRRRGGRIPTMGCLDLPGEDMRKTWRRFEVPTSKSSNSEDDLPEDYPVVKKMLHRLTADLTLDPGTAHRRLLISADRRSVQLAPPGTPAPPDGPKRFNQLPAVLGAQGFGAGRHCWEVETADAASCRDSSGEDADDEESHYAVGAAGESVQRKGCVRLCPAGAVWAVEGRGGRLWALTAPEPTLLGGVEPPPRRIRVDLDWERGRVAFYDGRSLDLLYAFQAPGPLGERIFPLFCTCDPRAPLRIVPAES

SEQ ID NO: 1392 - DNA, 1989 bp, Homo sapiens
ggcgttacgcaaggcctggtgtttacctcccgtgggagcctcctccctccctataaagcctgatgtggtggagagatttgacgagactgagactctggttgaagagagaggcaatcccaggagaggggcggaaagcggcaaaagttaatgcgggagtcggagagaagggcatctacacagcaagcagcaggggcggcccgccatctgcgcgctcgaaggcggtcacggtggtcgcggaaggggcggcgtccagatcctggctttccatggatgcgcccgagctgggcccggggctggtggagcgtctggagcagctggcgacgtgtcctctgtgcgggggctccttcgaggacccggtgcttctggcgtgcgagcacagcttctgccgcgcgtgtctggcccgccgctgggggactccgccggcgaccggcaccgaggcttcccccaccgcctgtccctgctgcggcctgccgtgtccccgccgcagcctgaggtctaatgtgcggctggcggtggaggtgcgaatcagccgcgagctgcgagagaagctggctgagcctggggcccgtgcggggagacgccgaggggggcgcatccccaccatgggctgcctggacctgcccggagaggatatgaggaagacatggagacgatttgaagtcccaacatccaagtcatctaattcagaggatgatctccctgaagattatccagtggtcaaaaaaatgcttcatagactgacagccgacctgaccctggaccctgggaccgcacaccgccgcctgctcatctccgccgaccgccgcagcgtacaactggccccaccagggacgcccgcgccccctgacggccccaagcgcttcaatcagctcccagctgtgctgggtgcgcagggcttcggggccggccgccactgctgggaggtggagactgcggacgccgcctcctgcagagactcttctggggaggatgcggacgacgaggagagccactatgcagtgggcgcggccggggaatcagtgcaacgcaagggctgcgcgcctggccccctgggggagcgcatcttcccgctgttctgcacctgcgaccctcgtgctccgctccgcattgtaccagcggaaagctgagtctcgtctccaactagaagtttggcccggccactggccctgcagctgctttttgggggtggaattccccactcatttctgggaacacattcacacgcccattgcaggagtattaatagcaacccacattttcgccccaaaataatgagacctcacctggtctccacgtttccacgtccctgctcaaaaccaaatccattcctgccttctggctctcagaatcttctctcccctacagctactacagtacttcctgacttctcccattcaaaccattctaggcctgcaatggggaacaggccctccccatcagtattggtaaagtgaccatgattcctacatagaggctctgctggtcaaatacttgactcccactcttgccactcctagctccagaagggctcagggccttccccacagatctaaggactgggctaccctgcctgtccactgaggtttctcctaaaacaagaggcttgactctggtctgggccctgtggccctctgggaagctttgtacctcttttgcaggatctgggggtggggagggacaagctagttccccaacctcctatgactgctttctatgctcacagccttttttccataagaaccttcttgaaacttctccccgcacatactcacggaaaggaaccaatggtgctatttcccctctctcctcctcaacctgggaatacttcagacatctccaaactcatccttgtgtatagtctcacacccttccccataagtataaatgggcccatatttaacacattttgtgattttgggttatttattttgtgcatctgtggcaataaatgagatctcagtggtggtatggaaaaaaaaaaaaaaaaaa

SEQ ID NO: 1393 - protein, 354 aa, Homo sapiens
MWWRDLTRLRLWLKREAIPGEGRKAAKVNAGVGEKGIYTASSRGGPPSARSKAVTVVAEGAASRSWLSMDAPELGPGLVERLEQLATCPLCGGSFEDPVLLACEHSFCRACLARRWGTPPATGTEASPTACPCCGLPCPRRSLRSNVRLAVEVRISRELREKLAEPGARAGRRRGGRIPTMGCLDLPGEDMRKTWRRFEVPTSKSSNSEDDLPEDYPVVKKMLHRLTADLTLDPGTAHRRLLISADRRSVQLAPPGTPAPPDGPKRFNQLPAVLGAQGFGAGRHCWEVETADAASCRDSSGEDADDEESHYAVGAAGESVQRKGCAPGPLGERIFPLFCTCDPRAPLRIVPAES

SEQ ID NO: 1394 - DNA, 1353 bp, Homo sapiens
ggcgttacgcaaggcctggtgtttacctcccgtgggagcctcctccctccctataaagcctgatgtggtggagagatttgacgagactgagactctggttgaagagagaggcaatcccaggagaggggcggaaagcggcaaaagttaatgcgggagtcggagagaagggcatctacacagcaagcagcaggggcggcccgccatctgcgcgctcgaaggcggtcacggtggtcgcggaaggggcggcgtccagatcctggctttccatggatgcgcccgagctgggcccggggctggtggagcgtctggagcagctggcgacgtgtcctctgtgcgggggctccttcgaggacccggtgcttctggcgtgcgagcacagcttctgccgcgcgtgtctggcccgccgctgggggactccgccggcgaccggcaccgaggcttcccccaccgcctgtccctgctgcggcctgccgtgtccccgccgcagcctgaggtctaatgtgcggctggcggtggaggtgcgaatcagccgcgagctgctttttgggggtggaattccccactcatttctgggaacacattcacacgcccattgcaggagtattaatagcaacccacattttcgccccaaaataatgagacctcacctggtctccacgtttccacgtccctgctcaaaaccaaatccattcctgccttctggctctcagaatcttctctcccctacagctactacagtacttcctgacttctcccattcaaaccattctaggcctgcaatggggaacaggccctccccatcagtattggtaaagtgaccatgattcctacatagaggctctgctggtcaaatacttgactcccactcttgccactcctagctccagaagggctcagggccttccccacagatctaaggactgggctaccctgcctgtccactgaggtttctcctaaaacaagaggcttgactctggtctgggccctgtggccctctgggaagctttgtacctcttttgcaggatctgggggtggggagggacaagctagttccccaacctcctatgactgctttctatgctcacagccttttttccataagaaccttcttgaaacttctccccgcacatactcacggaaaggaaccaatggtgctatttcccctctctcctcctcaacctgggaatacttcagacatctccaaactcatccttgtgtatagtctcacacccttccccataagtataaatgggcccatatttaacacattttgtgattttgggttatttattttgtgcatctgtggcaataaatgagatctcagtggtggtatggaaaaaaaaaaaaaaaaaa

SEQ ID NO: 1395 - protein, 251 aa, Homo sapiens
MWWRDLTRLRLWLKREAIPGEGRKAAKVNAGVGEKGIYTASSRGGPPSARSKAVTVVAEGAASRSWLSMDAPELGPGLVERLEQLATCPLCGGSFEDPVLLACEHSFCRACLARRWGTPPATGTEASPTACPCCGLPCPRRSLRSNVRLAVEVRISRELLFGGGIPHSFLGTHSHAHCRSINSNPHFRPKIMRPHLVSTFPRPCSKPNPFLPSGSQNLLSPTATTVLPDFSHSNHSRPAMGNRPSPSVLVK

SEQ ID NO: 1396 - DNA, 2049 bp, Homo sapiens
atccatttgttctcaagaggtagcaagaaacagtatccacagtggactccggggctcctacagacttggcacagcttcctacagtcttgaaacagccctgttgttctgtcatggccagtgggcagtttgtgaacaaactgcaagaggaagtgatctgccccatctgcctggacattctgcagaaacctgtcaccatcgactgtgggcacaatttctgcctcaaatgcatcactcagattggggaaacatcatgtggatttttcaaatgtcccctctgcaaaacttccgtaaggaagaacgcaatcaggttcaactcgctgttgcggaatctggtggagaaaatccaagctctacaagcctctgaggtgcagtccaaaaggaaagaggctacatgcccgaggcaccaggagatgttccactatttctgcgaggatgatgggaagttcctctgttttgtgtgtcgtgaatccaaggaccacaaatcccataatgtcagcttgatcgaagaagctgcccagaattatcaggggcagattcaagagcagatccaagtcttgcagcaaaaggagaaggagacagtacaagtgaaggcacaaggtgtacacagggtcgatgtcttcacggaccaggtagaacatgagaagcaaaggatcctcacagaatttgaactcctgcatcaagtcctagaggaggagaagaatttcctgctatcacggatttactggctgggtcatgagggaacggaagcggggaaacactatgttgcctccactgagccacagttgaacgatctcaagaagctcgttgattccctgaagaccaagcagaacatgccacccaggcagctgctggaggatatcaaagtcgtcttgtgcagaagtgaagagtttcagtttctcaacccaacccctgttcctctggaactggagaaaaaactcagtgaagcaaaatcaagacatgactccatcacagggagcctaaaaaaattcaaagaccaactccaggctgataggaaaaaagatgaaaacagattcttcaaaagcatgaataaaaatgacatgaagagctggggcttgttacagaaaaataatcataaaatgaacaaaacctcagagcccgggtcatcttctgcaggcggcagaactacatcggggccaccaaatcaccactcttcagccccatcccactccctgtttcgggcctcgtctgctgggaaagtcacttttccagtatgtctcctggcctcttatgatgagatttctggtcaaggagcgagctctcaggatacgaagacatttgacgttgcgctgtccgaggagctccatgcggcactgagtgagtggctgacagcgatccgggcttggttttgtgaggttccttcaagctaagccagctcagagaacacggggagcggtggtgctacacggacttcggagcatagagtggcgctgagtgagtggctgagaccgaccacggttcttgacttagtggaattgggtcgaaggagtggagaatgggagggctcgggctactgagagtggagatgggggcgggggtggtggtgaagagagttggagaaggaatggacgaattcttgagcaaaaggaggggaagagacaatctccagccacccgccccacgcttgacttcttatcactttggctgtggtgccgcctagtggaaaaaggaagtccctgcagcagtccccgcactctttaagcagctgtttaccgaaggcaccagttcagccaggagtgaaatccggagaggagcaacgccagcctgggtcacagtccatcaaaccccatgagcccgaccactctcgctcttccttacattcccacgtcccccttctctcccaacccctcatatcagcaagggaaattaattaatgagatttgataaatcagtagatagaatgaggtccccattctgaaatatttagcagactggaaccaccacgcaagcctctgtagggggtggatggagacacttctaactttaataaactgcgactgaacgtggaaaaaaaaaaaaaaaaaaaaaaaa

SEQ ID NO: 1397 - protein, 425 aa, Homo sapiens
MASGQFVNKLQEEVICPICLDILQKPVTIDCGHNFCLKCITQIGETSCGFFKCPLCKTSVRKNAIRFNSLLRNLVEKIQALQASEVQSKRKEATCPRHQEMFHYFCEDDGKFLCFVCRESKDHKSHNVSLIEEAAQNYQGQIQEQIQVLQQKEKETVQVKAQGVHRVDVFTDQVEHEKQRILTEFELLHQVLEEEKNFLLSRIYWLGHEGTEAGKHYVASTEPQLNDLKKLVDSLKTKQNMPPRQLLEDIKVVLCRSEEFQFLNPTPVPLELEKKLSEAKSRHDSITGSLKKFKDQLQADRKKDENRFFKSMNKNDMKSWGLLQKNNHKMNKTSEPGSSSAGGRTTSGPPNHHSSAPSHSLFRASSAGKVTFPVCLLASYDEISGQGASSQDTKTFDVALSEELHAALSEWLTAIRAWFCEVPSS

SEQ ID NO: 1398 - DNA, 1982 bp, Homo sapiens
atccatttgttctcaagaggtagcaagaaacagtatccacagtggactccggggctcctacagacttggcacagcttcctacagtcttgaaacagccctgttgttctgtcatggccagtgggcagtttgtgaacaaactgcaagaggaagtgatctgccccatctgcctggacattctgcagaaacctgtcaccatcgactgtgggcacaatttctgcctcaaatgcatcactcagattggggaaacatcatgtggatttttcaaatgtcccctctgcaaaacttccgtaaggaagaacgcaatcaggttcaactcgctgttgcggaatctggtggagaaaatccaagctctacaagcctctgaggtgcagtccaaaaggaaagaggctacatgcccgaggcaccaggagatgttccactatttctgcgaggatgatgggaagttcctctgttttgtgtgtcgtgaatccaaggaccacaaatcccataatgtcagcttgatcgaagaagctgcccagaattatcaggggcagattcaagagcagatccaagtcttgcagcaaaaggagaaggagacagtacaagtgaaggcacaaggtgtacacagggtcgatgtcttcacggaccaggtagaacatgagaagcaaaggatcctcacagaatttgaactcctgcatcaagtcctagaggaggagaagaatttcctgctatcacggatttactggctgggtcatgagggaacggaagcggggaaacactatgttgcctccactgagccacagttgaacgatctcaagaagctcgttgattccctgaagaccaagcagaacatgccacccaggcagctgctggagaactggagaaaaaactcagtgaagcaaaatcaagacatgactccatcacagggagcctaaaaaaattcaaagaccaactccaggctgataggaaaaaagatgaaaacagattcttcaaaagcatgaataaaaatgacatgaagagctggggcttgttacagaaaaataatcataaaatgaacaaaacctcagagcccgggtcatcttctgcaggcggcagaactacatcggggccaccaaatcaccactcttcagccccatcccactccctgtttcgggcctcgtctgctgggaaagtcacttttccagtatgtctcctggcctcttatgatgagatttctggtcaaggagcgagctctcaggatacgaagacatttgacgttgcgctgtccgaggagctccatgcggcactgagtgagtggctgacagcgatccgggcttggttttgtgaggttccttcaagctaagccagctcagagaacacggggagcggtggtgctacacggacttcggagcatagagtggcgctgagtgagtggctgagaccgaccacggttcttgacttagtggaattgggtcgaaggagtggagaatgggagggctcgggctactgagagtggagatgggggcgggggtggtggtgaagagagttggagaaggaatggacgaattcttgagcaaaaggaggggaagagacaatctccagccacccgccccacgcttgacttcttatcactttggctgtggtgccgcctagtggaaaaaggaagtccctgcagcagtccccgcactctttaagcagctgtttaccgaaggcaccagttcagccaggagtgaaatccggagaggagcaacgccagcctgggtcacagtccatcaaaccccatgagcccgaccactctcgctcttccttacattcccacgtcccccttctctcccaacccctcatatcagcaagggaaattaattaatgagatttgataaatcagtagatagaatgaggtccccattctgaaatatttagcagactggaaccaccacgcaagcctctgtagggggtggatggagacacttctaactttaataaactgcgactgaacgtggaaaaaaaaaaaaaaaaaaaaaaaa

SEQ ID NO: 1399 - protein, 267 aa, Homo sapiens
MASGQFVNKLQEEVICPICLDILQKPVTIDCGHNFCLKCITQIGETSCGFFKCPLCKTSVRKNAIRFNSLLRNLVEKIQALQASEVQSKRKEATCPRHQEMFHYFCEDDGKFLCFVCRESKDHKSHNVSLIEEAAQNYQGQIQEQIQVLQQKEKETVQVKAQGVHRVDVFTDQVEHEKQRILTEFELLHQVLEEEKNFLLSRIYWLGHEGTEAGKHYVASTEPQLNDLKKLVDSLKTKQNMPPRQLLENWRKNSVKQNQDMTPSQGA

SEQ ID NO: 1400 - DNA, 997 bp, Homo sapiens
gtgtatgaaaaataatttcaagtttaacaaacacaaggaaaccgcagggtccatgtcaaagctgatgagctatttctgaaactcgtgcagaattgtggtttgtgtggtctatgtcacggcacccttgagggagagtgggcaattgcctgaacttggaggctgtgtcctgtccccaggctgctccagggctgcctccttccgactgggccttcttatctgggactgttgagggcaacaggccttccgaagaccagtgaagaaggaggccctgcaaacaggaggctgacagggtaggaacgaggccatgatccctttgcagaaggacaaccaggaggagggtgtctgccccatctgccaggagagcctgaaggaggccgtgagcaccaactgcggacatctcttctgtcgagtgtgcctgacacagcatgtggagaaggcctcagcctctggggtcttctgctgccccctctgccggaagccctgttctgaggaggtgctagggacaggctatatctgccccaaccaccagaagagggtgtgcaggttctgtgaggagagcagacttcttctatgtgtggaatgcctggtgtcccctgaacacatgtctcatcatgaactgaccattgaaaatgccctcagccactacaaggaacgactcaatcgccggagcaggaagctcagaaaggacattgcagaacttcagcggctcaaggctcagcaggagaagaaactgcaggctctgcagcagtggctgggccagctggagcacatgccagcagaagcggccagaatccttgacatctccagggcagtaacacagctcagaagcctggtcattgatctggaaaggacggccaaggaattagacaccaacacactgaagaatgctggtgacttactgaacaggagtgctccacagaaattagaggttatttatccccagttggagaaaggagtcagtgaattgcttcttcagccccctcagaagctctgaccc

SEQ ID NO: 1401 - protein, 229 aa, Homo sapiens
MIPLQKDNQEEGVCPICQESLKEAVSTNCGHLFCRVCLTQHVEKASASGVFCCPLCRKPCSEEVLGTGYICPNHQKRVCRFCEESRLLLCVECLVSPEHMSHHELTIENALSHYKERLNRRSRKLRKDIAELQRLKAQQEKKLQALQQWLGQLEHMPAEAARILDISRAVTQLRSLVIDLERTAKELDTNTLKNAGDLLNRSAPQKLEVIYPQLEKGVSELLLQPPQKL

SEQ ID NO: 1402 - DNA, 2004 bp, Homo sapiens
gagtgtgtgacccagcccttcccccgtggccaagcagagagagtggccttgaggaagccatagcagcaggaccagcatggcctctgctgcctctgtgaccagcctggcagatgaagtcaactgccccatctgtcagggtaccctgagggagccggtcactatcgactgcggccacaacttctgccgggcctgccttacccgctactgtgagataccaggcccagacctggaggagtcccctacttgcccactctgcaaagaacccttccgtcctgggagcttccggcccaactggcagctggctaacgtggtggagaacattgagcgcctccagctggtgtccacactgggtttgggagaggaggatgtctgccaagagcacggagggaagatctacttcttctgtgaggatgatgagatgcagttgtgcgtggtgtgccgggaggctggggagcacgctacccacaccatgcgcttcctggaggatgcagcggctccctatagggaacaaatccataagtgtcttaaatgtctaagaaaagagagagaggagattcaagaaatccagtcaagagaaaataaaaggatgcaagtcctcctgactcaggtgtccaccaagagacaacaggtgatttctgagttcgcacacctgaggaagtttctagaggaacagcagagcatcctcttagcacaattggagagccaggatggggacatcttgaggcaacgggatgaatttgatttgctggttgctggggagatctgccggtttagtgctcttattgaagaactggaggagaagaatgagaggccagcaagggagctcctgacggacatcagaagcactctaataagatgtgaaaccagaaagtgccggaaaccggtggctgtgtcgccagagctgggccagaggattcgggactttccccagcaggccctcccgctgcagagggagatgaagatgtttctggaaaaactatgctttgagttggactatgagccagctcacatttctctagaccctcagacttcccaccccaagctcctcttgtccgaggaccaccagcgagctcagttctcctcaaaatggcagaactcaccagacaacccccagcgttttgaccgggccacctgtgttctggcccacactggcatcacaggggggagacacacgtgggtggtgagtatagacctggcccatggggcgagctgcaccgtgggcgtggtgagcgaggatgtgcagcggaagggggagcttcggctgcggccagaggagggggtgtgggctgtgaggctggcttggggcttcgtctcggctctgggctccttccccacacggctgaccctgaaggagcagccccggcaggtgagggtgtctcttgactatgaggtgggctgggtgaccttcaccaacgctgtcacccgagagcccatctacaccttcactgcctccttcactaggaaggtcattcccttctttgggctctggggccgagggtccagtttctccctgagctcctgagaaggagcagttacctactctcctctaagtacaggactcattcaacccagtaccatgtggcttgatccctggctgaatcacctggatgactcgggatagaaatgactgctttagaagatgggatggggtcgggtggtaagggatagaagagaggactctcaatctactgatcaagtcctttccccaatgcccagtggatggccagggtacctggggactcaggctgctgccagttctgctcaccaccatccgtgcttggcacagaagtagctgcatagaaagagcactggatttgaagtcagaagacctggttcttgaaccagcctgtcaaccagttgtatgactttaaacaaggcatctcacctcttttcatcttgttttcttccaataatgttagagttcatgtaatcacattctctagaaccatttagtttgtgttaactatgaaccaagcagtgtggtgggccactggtggacttgga

SEQ ID NO: 1403 - protein, 481 aa, Homo sapiens
MASAASVTSLADEVNCPICQGTLREPVTIDCGHNFCRACLTRYCEIPGPDLEESPTCPLCKEPFRPGSFRPNWQLANVVENIERLQLVSTLGLGEEDVCQEHGGKIYFFCEDDEMQLCVVCREAGEHATHTMRFLEDAAAPYREQIHKCLKCLRKEREEIQEIQSRENKRMQVLLTQVSTKRQQVISEFAHLRKFLEEQQSILLAQLESQDGDILRQRDEFDLLVAGEICRFSALIEELEEKNERPARELLTDIRSTLIRCETRKCRKPVAVSPELGQRIRDFPQQALPLQREMKMFLEKLCFELDYEPAHISLDPQTSHPKLLLSEDHQRAQFSSKWQNSPDNPQRFDRATCVLAHTGITGGRHTWVVSIDLAHGASCTVGVVSEDVQRKGELRLRPEEGVWAVRLAWGFVSALGSFPTRLTLKEQPRQVRVSLDYEVGWVTFTNAVTREPIYTFTASFTRKVIPFFGLWGRGSSFSLSS

SEQ ID NO: 1404 - DNA, 3033 bp, Homo sapiens
gagtgtgtgacccagcccttcccccgtggccaagcagagagagtggccttgaggaagccatagcagcaggaccagcatggcctctgctgcctctgtgaccagcctggcagatgaagtcaactgccccatctgtcagggtaccctgagggagccggtcactatcgactgcggccacaacttctgccgggcctgccttacccgctactgtgagataccaggcccagacctggaggagtcccctacttgcccactctgcaaagaacccttccgtcctgggagcttccggcccaactggcagctggctaacgtggtggagaacattgagcgcctccagctggtgtccacactgggtttgggagaggaggatgtctgccaagagcacggagggaagatctacttcttctgtgaggatgatgagatgcagttgtgcgtggtgtgccgggaggctggggagcacgctacccacaccatgcgcttcctggaggatgcagcggctccctatagggaacaaatccataagtgtcttaaatgtctaagaaaagagagagaggagattcaagaaatccagtcaagaaaaaataaaaggatgcaagtcctcctgactcaggtgtccaccaagagacaacaggtgatttctgagttcgcacacctgaggaagtttctagaggaacagcagagcatcctcttagcacaattggagagccaggatggggacatcttgaggcaacgggatgaatttgatttgctggttgctggggagatctgccggtttagtgctcttattgaagaactggaggagaagaatgagaggccagcaagggagctcctgacggacatcagaagcactctaataagatgtgaaaccagaaagtgccggaaaccggtggctgtgtcgccagagctgggccagaggattcgggactttccccagcaggccctcccgctgcagagggagatgaagatgtttctggaaaaactatgctttgagttggactatgagccagctcacatttctctagaccctcagacttcccaccccaagctcctcttgtccgaggaccaccagcgagctcagttctcctacaaatggcagaactcaccagacaacccccagcgttttgaccgggccacctgtgttctggcccacactggcatcacaggggggagacacacgtgggtgtggatggccagggtacctggggactcaggcggctgccagttctgctcaccaccatccgtgcttggcacagaagtagctgcatagaaagagcactggatttgaagtcagaagacctgggttcttgaaccagcctgtcaaccagttgtatgactttaaacaaggcatctcacctcttttcatcttgttttcttccaataatgttagagttcatgtaatcacattctctagaaccatttagtttgtgttaactatgaaccaagcagtgtggtggccactggtgacttgaaaatatagagaaaaaaaaaacctgctctatatctgaaagagctcttgggaagacagagaaacataaagaggaaattacagcacagtgtggtgggtgttacgggaagtccaaccccagcattatgggagttcaggggaaggggcatagcccagcctggaaggagagggtgagtgggggatggctttctgaaaagggtggtctaaaggatgcctatggtcaatagggaaaagaggggaagaagcatcttaagaagaggaaacagcagagaactggctggatgacctgtgactctggagcactgggttgtctccattgtcattatgggcagatgtgtgccatccccagccgacgccactcactgcctccttcctcctggtgttgccacttctgggtgagattaaggtgcagggcctgggggcaggaggacataaggtatagccataaatcataacccagggaccacactcaaccctagggaaattgtcttcctgatcagttgattaccatctgaggtcaagaaatgagatagtgggagcaaatgggtcacaaatagctcagctgtgggctcagaaactgctaggtaaaagaattccagaaggaggccagggcataagttggatgacctatgaactttagtctaaagaattgagactaccgtaattgagactactgtagtgacatctgagaaatgggatggaagagtgaccatgttttattttcttgttcttgtcactattgtattttattttgcataatcatgcccttcactgacagtctccttaacatcatctgtttactctgctcagtgtaaactacaatgctctgtcatctccctactgggtctcctgggaggaggggagccatccagggtgcaaactcaaaggcagagggcacagcgtgcttaggcccaagcttagaattcaattgagaagttctgttgttcatccttacctcagcaggtagaaaagaggtggagatcagaagccagggattagagattgaattgctttccctgggagtgtgcagtatctcattaaaatgttgtatattcaaaaaaatacagacacacacaagtgcctatataatgataaaacatatccaaagcacccaaacctgtgattccagaaaagtagatcctatttttgtttatttttattggctttagctgtgtcttttgaaaggactattatcctctaaaatgtatgtgtatgaagatcctggcttgcagctcgggagctttacacaccttgtgtcactttatcttggtaacgagccaagatcatgcaaccagttcatccatgtctgacccaagagctcttaactgctatgctgcactgcctcattcagagatagatgcctgcatgggtcctggcgattattttaatgctggctacacccccacaggtgacttggattcagaaatacaatttatatttcttctttttaaattgttttattttatttttcttttaatagttatatgtcagtgagaacaatttatatgtcttacactgagaaataaaactgctcataagtgaaaaaaaaaaaaaaaaaaaaaaaaaaaaaa

SEQ ID NO: 1405 - protein, 395 aa, Homo sapiens
MASAASVTSLADEVNCPICQGTLREPVTIDCGHNFCRACLTRYCEIPGPDLEESPTCPLCKEPFRPGSFRPNWQLANVVENIERLQLVSTLGLGEEDVCQEHGGKIYFFCEDDEMQLCVVCREAGEHATHTMRFLEDAAAPYREQIHKCLKCLRKEREEIQEIQSRKNKRMQVLLTQVSTKRQQVISEFAHLRKFLEEQQSILLAQLESQDGDILRQRDEFDLLVAGEICRFSALIEELEEKNERPARELLTDIRSTLIRCETRKCRKPVAVSPELGQRIRDFPQQALPLQREMKMFLEKLCFELDYEPAHISLDPQTSHPKLLLSEDHQRAQFSYKWQNSPDNPQRFDRATCVLAHTGITGGRHTWVWMARVPGDSGGCQFCSPPSVLGTEVAA

SEQ ID NO: 1406 - DNA, 2255 bp, Homo sapiens
gatgtgggcacgcctcagagccagaagtttatggctcccacctgctcaatctgacaggaagcttctgctccccagttctccccagccactgtggtctacagattccaggaaacccatccccctgtgacctcagggtgtgctctgttctccaccctagggaccagaaggagccaggagtaaagaactggcttacttggccgccactgggaaattctgggtaattcgagacgccctggaatttggacccactccgctgataggtggtgggcagggttctagggaacacaagaggcggagccaggtggcttccctgtgctggcattcttggctctctctctctctctttctctctctctgtctctctctctctctctgtctctcagccttgaagccgtttccctctgcgattcatgtaagtgtgactcgatttcagggaaagggaactcgcgtgggctgaggagaccggagtggacgggctggggaaggcaccgtgatgcccgcaaccccgtccctgaaggtggtccatgagctgcctgcctgtaccctctgtgcggggccgctggaggatgcggtgaccgttccctgtggacacaccttctgccggctctgcctccccgcgctctcccagatgggggcccaatcctcgggcaagatcctgctctgcccgctctgccaagaggaggagcaggcagagactcccatggcccctgtgcccctgggcccgctgggagaaacttactgcgaggagcacggcgagaagatctacttcttctgcgagaacgatgccgagttcctctgtgtgttctgcagggagggtcccacgcaccaggcgcacaccgtggggttcctggacgaggccattcagccctaccgggatcgtctcaggagtcgactggaagctctgagcacggagagagatgagattgaggatgtaaagtgtcaagaagaccagaagcttcaagtgctgctgactcagatcgaaagcaagaagcatcaggtggaaacagcttttgagaggctgcagcaggagctggagcagcagcgatgtctcctgctggccaggctgagggagctggagcagcagatttggaaggagagggatgaatatatcacaaaggtctctgaggaagtcacccggcttggagcccaggtcaaggagctggaggagaagtgtcagcagccagcaagtgagcttctacaagatgtcagagtcaaccagagcaggtgtgagatgaagacttttgtgagtcctgaggccatttctcctgaccttgtcaagaagatccgtgatttccacaggaaaatactcaccctcccagagatgatgaggatgttctcagaaaacttggcgcatcatctggaaatagattcaggggtcatcactctggaccctcagaccgccagccggagcctggttctctcggaagacaggaagtcagtgaggtacacccggcagaagaagagcctgccagacagccccctgcgcttcgacggcctcccggcggttctgggcttcccgggcttctcctccgggcgccaccgctggcaggttgacctgcagctgggcgacggcggcggctgcacggtgggggtggccggggagggggtgaggaggaagggagagatgggactcagcgccgaggacggcgtctgggccgtgatcatctcgcaccagcagtgctgggccagcacctccccgggcaccgacctgccgctgagcgagatcccgcgcggcgtgagagtcgccctggactacgaggcggggcaggtgaccctccacaacgcccagacccaggagcccatcttcaccttcactgcctctttctccggcaaagtcttccctttctttgccgtctggaaaaaaggttcctgccttacgctgaaaggctgaagtggggcgcgcgaagggcggcgaagcggagacggcggctctccgggatccagctccgcccctggccagtgtgcggcccgggggctccctgtgcccgcgtgaggcgagagaacaggggacttgagtctcgaacagcggttgtttttactttatttatcttaggccctcagctccctgacgtcctgagcctccctgtgacgctctggccttctctgcacctcagagtgcagaaccacagacggcttcggctgtgcctagggcaacagccaacctaggagccagcgggctttcggggaaaaaaaagaaaaagacatctaaaataaaatgtttaaactgtttcaaaataaaaaaaaaaaaaaaaaaa

SEQ ID NO: 1407 - protein, 465 aa, Homo sapiens
MPATPSLKVVHELPACTLCAGPLEDAVTVPCGHTFCRLCLPALSQMGAQSSGKILLCPLCQEEEQAETPMAPVPLGPLGETYCEEHGEKIYFFCENDAEFLCVFCREGPTHQAHTVGFLDEAIQPYRDRLRSRLEALSTERDEIEDVKCQEDQKLQVLLTQIESKKHQVETAFERLQQELEQQRCLLLARLRELEQQIWKERDEYITKVSEEVTRLGAQVKELEEKCQQPASELLQDVRVNQSRCEMKTFVSPEAISPDLVKKIRDFHRKILTLPEMMRMFSENLAHHLEIDSGVITLDPQTASRSLVLSEDRKSVRYTRQKKSLPDSPLRFDGLPAVLGFPGFSSGRHRWQVDLQLGDGGGCTVGVAGEGVRRKGEMGLSAEDGVWAVIISHQQCWASTSPGTDLPLSEIPRGVRVALDYEAGQVTLHNAQTQEPIFTFTASFSGKVFPFFAVWKKGSCLTLKG

SEQ ID NO: 1408 - DNA, 454 bp, Homo sapiens
atgcccgcaaccccgtccctgaaggtggtccatgagctgcctgcctgtaccctctgtgcggggccgctggaggatgcggtgaccgttccctgtggacacaccttctgccggctctgcctccccgcgctctcccagatgggggcccaatcctcgggcaagatcctgctctgcccgctctgccaagaggaggagcaggcagagactcccatggcccctgtgcccctgggcccgctgggagaaacttactgcgaggagcacggcgagaagatctacttcttctgcgagaacgatgccgagttcctctgtacctcagagtgcagaaccacagacggcttcggctgtgcctagggcaacagccaacctaggagccagcgggctttcggggaaaaaaaagaaaaagacatctaaaataaaatgtttaaactgtttcaaaataaaaaaaaaaaaaaaaaaa

SEQ ID NO: 1409 - protein, 115 aa, Homo sapiens
MPATPSLKVVHELPACTLCAGPLEDAVTVPCGHTFCRLCLPALSQMGAQSSGKILLCPLCQEEEQAETPMAPVPLGPLGETYCEEHGEKIYFFCENDAEFLCTSECRTTDGFGCA

SEQ ID NO: 1410 - DNA, 3499 bp, Homo sapiens
cgggacccggaacagaccgccgtgagagaggaggggtgccggccgggattcgcggcccggagctcgggaccggagtcaggaatggagagaagggtaatggttttacctcttattgtggaaacctgttgagatcacagagaatatactgacggcataaaagggcagaaccatagcagggtgcggttgcttcattccagcctcgcagtcacctctgtgccctgctggttgtcttcccagcgctgctgtagttgccttccatggatctataggagagcaagtcctccaggagctggtggtgtctgtcgattgactgagtgctggagctggcagccctgtgcaggctgccacctttgcccctttactgtgcttgctcctgactctatgtcgcgtctccaaggagaagaagtcctcaccagtgaacggagacctctctgaactaaggataccatggccacgtcagccccactacggagcctggaagaggaggtgacctgctccatctgtcttgattacctgcgggaccctgtgaccattgactgtggccacgtcttctgccgcagctgcaccacagacgtccgccccatctcagggagccgccccgtctgcccactctgcaagaagccttttaagaaggagaacatccgacccgtgtggcaactggccagcctggtggagaacattgagcggctgaaggtggacaagggcaggcagccgggagaggtgacccgggagcagcaggatgcaaagttgtgcgagcgacaccgagagaagctgcactactactgtgaggacgacgggaagctgctgtgcgtgatgtgccgggagtcccgggagcacaggccccacacggccgtcctcatggagaaggccgcccagccccacagggaaaaaatcctgaaccacctgagtaccctaaggagggacagagacaaaattcagggcttccaggcaaagggagaagctgatatcctggccgcgctgaagaagctccaggaccagaggcagtacattgtggctgagtttgagcagggtcatcagttcctgagggagcgggaggaacacctgctggaacagctggcgaagctggagcaggagctcacggagggcagggagaagttcaagagccggggcgtcggggagcttgcccggctggccctggtcatctccgaactggagggcaaggcgcagcagccagctgcagagctcatgcaggacacgagagacttcctaaacaggtatccacggaagaagttctgggttgggaaacccattgctcgagtggttaaaaaaaagaccggagaattctcagataaactcctctctctgcaacgaggcctgagggaattccaggggaagctgctgagagacttggaatataagacagtgagcgtcaccctggacccacagtcggccagtgggtacctgcagctgtcagaggactggaagtgcgtgacctacaccagcctgtacaagagtgcctacctgcacccccagcagtttgactgtgagcctggggtgctaggcagcaagggcttcacctggggcaaggtctactgggaagtggaagtggagagggagggctggtctgaggatgaagaagagggggatgaggaggaagagggagaagaggaggaggaggaagaggaggccggctatggggatggatatgacgactgggaaacggacgaagatgaggaatcgttgggcgatgaagaggaagaagaggaggaggaagaggaggaagttctggaaagctgcatggtgggggtggctagagactctgtgaagaggaagggagacctctccctgcggccagaggatggcgtgtgggcgctgcgcctctcctcctccggcatctgggccaacaccagccccgaggctgagcttttcccagcactgcggccccggagagtgggcatcgccctggattatgaagggggcaccgtgactttcaccaacgcagagtcacaggaactcatctacaccttcactgccaccttcacccggcgcctggtccccttcctgtggctcaagtggccaggaacacgcctcctgctaagaccctgagccctgacatctgcccccagccccaaccctcagatgcttcacttctttggaattccaggactctcaatggggggacgggatgcctggcctaagcacctggagcaggggaccccatatccactggtagccacctccccattgctgtggccccctgaaatctcactcagtgctgttgctccatctactgccctaatggggctcttttcccacctcctgctggtttcccgagggaacttctgaccctggagtccatgagggctcctttcctttttgaccacgaccttggccccagctctgcactctctggaataagggcccgatgcagcattttcttgcccagtgtggcaagacctcagaaaaaccagtcaattacgcctaagatcattttgctgtccttaaaccccccaggttccttcttgcacaaatccactctgctgcccaccttccctggcattttaaacagacctaccccaccccaactcagagttaagcatacatggcaatgctgaaaataaacaaaatccactgaggcttcccaggccatttaaagcctggagtaccagcgcatatcatctcatggggtccagagtggagtccaggcttctctgaaaccagggctgagcatatttccatagccaaggaggtgggactccctggagctatctgtggtcttagggaaggatccagacatacacggctttggggtacaagctgtgatcactgatcaataaattatctctagattggtccttgtgaggggagttttaagaatccagaacatcttgctcttgatcagcacatccaaaaacaccaagacaaacatccagtggagcagaacctctcctgcctcgggagttctgaccgggttccccagcagggtgttaagcctctgtctctggccctaccagcatccaggttccactttcctaggagagagtggagatgggaagacagggaaaggaaggcagcaggaggccacaagcccaccaggtcttcatgtcaagagagggagtaacatgtcttctcattgcccacggacccaacctctgtccaggtgcccctcatcatcacagtttaacacaagctcccctgctccagccaaattgatctcccagtcttgtccttacccattccaagtgctctgccagcccctgttcatccaagttttaagtcctccaccctgttctaagagactgttccaacggctctgggcctcagtggtcacttgaccaccattgtctcagagctgcccactttgtgtgtgtcacatgctgcctgagtcacatgtacatcttatttctgcctctagttttgtaagctcctggagggcggataacatcttatactactcttgtattctcatggcacctagtgcagtgctgggcacagagtaggtgctcaataaagacttgttgaatgaaaaaaaaaaaaa

SEQ ID NO: 1411 - protein, 539 aa, Homo sapiens
MATSAPLRSLEEEVTCSICLDYLRDPVTIDCGHVFCRSCTTDVRPISGSRPVCPLCKKPFKKENIRPVWQLASLVENIERLKVDKGRQPGEVTREQQDAKLCERHREKLHYYCEDDGKLLCVMCRESREHRPHTAVLMEKAAQPHREKILNHLSTLRRDRDKIQGFQAKGEADILAALKKLQDQRQYIVAEFEQGHQFLREREEHLLEQLAKLEQELTEGREKFKSRGVGELARLALVISELEGKAQQPAAELMQDTRDFLNRYPRKKFWVGKPIARVVKKKTGEFSDKLLSLQRGLREFQGKLLRDLEYKTVSVTLDPQSASGYLQLSEDWKCVTYTSLYKSAYLHPQQFDCEPGVLGSKGFTWGKVYWEVEVEREGWSEDEEEGDEEEEGEEEEEEEEAGYGDGYDDWETDEDEESLGDEEEEEEEEEEEVLESCMVGVARDSVKRKGDLSLRPEDGVWALRLSSSGIWANTSPEAELFPALRPRRVGIALDYEGGTVTFTNAESQELIYTFTATFTRRLVPFLWLKWPGTRLLLRP

SEQ ID NO: 1412 - DNA, 4587 bp, Homo sapiens
gcactcagattctccccaaacgccaaggatgggggtcatggctccccgaaccctcctcctgctgctcttgggggccctggccctgaccgagacctgggccgcgactccgtgagtccgaggatggagcggcgggcgccgtgggtggagcaggaggggctggagtattgggaccaggagacacggaacgccaagggccacgcgcagatttaccgagtgaacctgcggaccctgctccgctattacaaccagagcgaggccggtatgaacagttcgcctacgatggcaaggattacatcgccctgaacgaggacctgcactcctggaccgccgcgaacacagcggctcagatctcccagcacaagtgggaagcggacaaatactcagagcaggtcagggcctacctgagggcaagtgcatggagtggctccgcagacacctggagaacgggaaggagacgctgcagcacgcggatcccccaaaggcacatgtgacccagcaccccatctctgaccatgaggccaccctgaggtgctgggccctgggcctctaccctgcggagatcacactgacctggcagcaggatggggaggaccagacccaggacacggagcttgtggagaccaggcctgcaggggacggaaccttccagaagtgggtggctgtagtggtgccttccggagaggagcagagatacatgtgccatgtgcagcatgaggggctgccagagcccctcaccctgagatgggagccgtcttctcagcccaccatccccatcgtgggcatcgttgctggcctgtttctccttggagctgtggtcactggagctgtggttgctgctgcgatgtggaggaagaaaagctcaggcagcaattgtgctcagtactctgatgcatctcatgatacttgtaaagaggactatgcctgttcctgttctggtgtctgcgttctgatctctttctcccctgggtgtccctcatctctgacagcagcaggagtcatttttcctgtcattaaccccacaaggtggaaggcagcccctgcacacagaagtctgtggtattaagagatgaattttcaagcccgtgcagcttttaccctatttccagggctctttcttgggttgtattttctatcttttccccaacctttttaaaggaactagattctgaaattagcagagaagagggatgccacaagttctcatcttaggtaactttctagtggaactcctcttctgctcagctctcctacccactctcccttccctgagttgtagtaatcctagcactggctctaatgcaaactcatggatctataaagcaaagtctaacttagatttatatttgtttggaaattgggattcatagtcaaagattgttctttcctaagagggaaatataattgcatgctgcagtgtgcagagggttggtgtgaaggagggatgcagggaggaagggagggaggacacacaagcagcactgctgggaaaagcacaggcggcctggatgtcagtgtgaggggaccttatgctgtcgttgctgcaaaaccgcatttggcctgaggctatgttaataaagatactgcctttagaataggaggtgctctacagtgatgattcattcagccgacatttgctgtctgccagacatatgacagaatgtttttgcatctggggaaagtcattgaagtaaaatcagaaaaatctctagccttgtggagcatgtgttccagtgggaagaggcagacggtacatacactctaatatatgcagagtaaatgaggaaagtgttagaaggtgataagtgctgtggaacaggtgatcagagtatgggttgtgggacagagaaggtagctattgtgccggggttgtcagcgtgggccttgttgggaaggtgacctttgatgaaatatttgaaggacataaaggaatttgtcatgagggtatctggaagaagttttttctagggagtaggaaccttcagtgtcagtgtaccagggcaggatcatgtctgtgtgttctgggaagaacacgggatcgggtatggctagagcagagagtcactgagataaggtcaggggtttggtcagatcatgtgggcatagggctcaagtatgtgggaaggattttgattttgaatgagatagttttaagcagaataaagacatgccacaacttctcttttaaaaggatcactgtagctgctctgctgagaacagaatccaaaggccggcgatgagcaaggcaggtgggagaactgtaggaaatgagtgcagtatttcaggctggagatgtcggttacttcaactggggtgtgagcagtggaaatagtgggacgtgattggattcctactatttccaatcactttataccgcattttctaatggactaaatctggggtatgagaaagaagagtaaaggataccaaaaatgtcagactgtgactaaaaagagttgccatcagctgagaatgagaagactagcaggagcatatgagaggaggggacgtcgcaggcagtcactatgggagacgtgggatctgagatgccgctgagaaataccagtgaggtagtcgggttggcagttggacagatgaatctggagacatttaggagaaatagacttgggaggtgatgtcatataacagttatttaaagccttgagtctgaatgacgtctccaagggagtgattggctgtagaagagaacaggaacaaggactgaacactaggcctctgttgctaaaggatctgatcagacaacacacctagatcagactgcacagtcctgaccccacatctagaaggtacatagaccagggagttctagactttcctgtggacaggaatcacctggacatcaccttaagtctaagctgatctggaatcgagaatgagatttcctacttatataatgttgctgttggcgctgatgctgctggtcttcagatcccacttttggtagcaagaacacagaccaggattcctaggctatgcatcagcctcgcctgtgaggcttgttaataagcaattcctgcactccatgcgcaacattctgacacaggggcatctgtggagaggcctgagtattctacaacaagcccacagcaaacctggtgctcagccagatttgatatcactgagatcagtagttggagaatgcccaggatggggaggggtctcagacccacatttaagtgttgctttattctgggttttttatttatttatttatttatttttaaggaggatgtgtttctttaattataagacaggatgctgagagataaatgtcattttctctatcatggggtatagccagatggaagattgagaagtggctcacagctcagcagaatgaaaaaatatctgaatgctgctttctgaaactactctccagaatgatttcacactcactccttggagcaaacaatgacttgcaaatttttctaatttaaacataaaggagtgtacatattggtattagtattcattttattttggggaagggcactgtattagtccatagtccgttttcacactgccgataaagacatacccaacattgggaagaaaaagaggtttaattggacttacagttccatttggctggggaggcctcagaatcatggtgggaggcgaaaggcacttcttacatggtggtggcaagagaaaatgaggaagaagcaaatgccaaaacccctgataaacacattggatctcaggagacttattcattatcatgagaatagcatgggaaagactggcccccatgattcaattacctccccctgggtccctcccacaacatgtgggaattctgggagatacaattcaagttgagatttgggtggggacacagccaaaccacattggacacagaaccaggtttgaagctacacagccaggaacataatccacagccaccctaattcagatctctcataggaaccactgtccctgctcctgagcacagatgctactgcatatacctctgataccctgatggccgacactgggccctgtggcaaagactgctatcactgctgctcctgagaactgctccactactgctcctcagccatctttaccaaaatgcagtatttactgtcccagcctctctgtgtcatctcatcctgattagaagcccacatgtggttatctaaattgtgcagccaaagcctcttgcagtgtttaactgcaataatgttggggaaagtgaatttttctcctttgtagaaggaggtagtccctgccttctaataagactcttcaacataggaagagaattcagttgctggaggtagaggggtgagggatggaaaaagaatgacaaatttcaattcctagaatcatgttctgagactagaactttatctagtacattgcaggcacctgggtttggttgagtgtataataaatgacatagttcaacttattcccttgacagtttgttttggggtccagcttttgtctaccccagttttcacacacagatacgtggagaagcattgtgtgatggtaaaatgtttacttgaaagcctttttccctatctttgtctcttgctaggattaaaaacccgtatctgt

SEQ ID NO: 1413 - protein, 215 aa, Homo sapiens
MEWLRRHLENGKETLQHADPPKAHVTQHPISDHEATLRCWALGLYPAEITLTWQQDGEDQTQDTELVETRPAGDGTFQKWVAVVVPSGEEQRYMCHVQHEGLPEPLTLRWEPSSQPTIPIVGIVAGLFLLGAVVTGAVVAAAMWRKKSSGSNCAQYSDASHDTCKEDYACSCSGVCVLISFSPGCPSSLTAAGVIFPVINPTRWKAAPAHRSLWY

SEQ ID NO: 1414 - DNA, 3635 bp, Homo sapiens
agcgtcatagcggcgggcatcccatctgcacgtcacacctctttctcacctggacacgcatcccttcctaccctgccagccacgacgtttcctctttcccctctccaatgcccagccccagatctggcggaagaagatggagaacgggggtgggacagagttgtggacaacctctcaggagagggtcgcaaggtgggaccctgaacagtggtagaaacaaaatgagattgtccctgaagtttgcccttcagctgagacacaaggagtagaggaagaggaaggactaacgcagaggcactcaaggtctcactatgactgtagttgagagtcctctcccttcttccctaaccctttccccatttctctcaccacttctttgccagtctagatccgtcctggtgccttactgtgcatacagttctactcgtctcagattcctttcttgtctgttagaaacgtatgtcaaacgaggatacagtgtctggaactattggttctaagatataagtggaatgagcctggatcaggagaagtatgctgagctagagttgaaggaagcttctctttctaacaagagaaagcagagttaaattatggcagagacaagtctgttagaggctggggcctctgcagcctctacagctgcggctttggagaacttacaggtggaggcgagctgctctgtgtgcctggagtatctgaaggaacctgtcatcattgagtgtgggcacaacttctgcaaagcttgcatcacccgctggtgggaggacctagagagggacttcccttgtcctgtctgtcgaaagacatcccgctaccgcagtctccgacctaatcggcaactaggcagtatggtggaaattgccaagcagctccaggccgtcaagcggaagatccgggatgagagcctctgcccccaacaccatgaggccctcagccttttctgttatgaggaccaggaggctgtatgcttgatatgtgcaatttcccacacccaccgggctcacaccgttgtgccactggacgatgctacacaggagtacaaggaaaaactgcagaagtgtctggagcccctggaacagaagctgcaggagatcactcgctgcaagtcctctgaggagaagaagcctggtgagctcaagagactagtggaaagtcgccgacagcagatcttgagggagtttgaagagcttcataggcggctggatgaagagcagcaggtgttgctttcacgactggaagaagaggaacaggacattctgcagcgactccgagaaaatgctgctcaccttggggacaagcgccgggacctggcccacttggctgccgaggtggagggcaagtgcttacagtcaggcttcgagatgcttaaggatgtcaaaagtaccctggaaaagaatattcctagaaagttcggaggctcactctcaacgatctgtccacgggatcataaggctctccttggattagtaaaagaaatcaacagatgtgaaaaggtgaagaccatggaggtgacttcagtatccatagagctggaaaagaacttcagcaattttccccgacagtactttgccctaaggaaaatccttaaacagctaattgcggatgtgaccctggaccctgagacagctcatcctaacctagtcctgtcagaggatcgtaagagcgtcaagttcgtggagacaagactccgggatctccctgacacaccaaggcgtttcaccttctacccttgcgtcctggctactgagggtttcacctcaggtcgacactactgggaggtggaggtgggcgacaagacccactgggcagtgggtgtatgccgggactccgtgagccgaaagggcgagttgactccactccctgagactggctactggcgggtgcggctatggaatggggacaaatatgcagccaccaccacaccttttacccctttgcacatcaaggtgaaacccaagcgggtaggcatattcctagactatgaggccggcacactgtctttctacaatgtcacagaccgctctcatatctacaccttcactgatacttttactgagaaactttggcccctcttctacccaggcatccgggctggacggaagaatgctgcaccacttaccatcaggcccccaacagattgggagtgacaggttgggatgtgggaatgactggggtgaggcagggtcaagtgctacgggcctccttcccgtgtcctgctggaacgtcttcgtgtccacctgggtccagtcctgaatcatcttggagaaacaccttggtttctaggatggttttgtgtggagggggaggtaggactgggctggatgagagagcacagctgtgacttcctcctaactgtcagggtggggagctggttcccagaggattgtctaccctgaagtccatcaggttttctgttgcacaaggacgggtcaggaaggaaggagaggcttttccagaaacaaaaaatctgtgagggtctgacttgctcaaaccagaggaggaaacagaaacccctgcacatctttttagggggttctttgacccaggatagtcttgcttcttgaggtagatcacaggggtctgtgtacctctgaattcatgagagatgaatgacagatgctctcatgggtctagatattgaggagtttttctgagggcagagattggacatcaacaaggctagaagggtcagggaagtgggctaaaggaacagattcctagagattaatgaagaggagggaggtttctttggtcttctattccaagggtaaggttgcgattatgggtaagattggccagaggtaggaatgtggggagaaggagaggctgaaaagaaagcagaggagaacccaggtccctgcctcagccttcagcagagttggcttattgcctgcctctataccaataagtcagtcaccttgctcctctccagaggcaaagtggaagagatcctgcaagacacatctatcctttcacagtgttcccaagggaacttggaaaggagagtcaggtattagaggaaagagaagggtatttgtatacaaagccctggccttaaagaatgttacttagtagctactcccaaattgtcagccttcttacctggccaaggtgtccaagccagaaaggaaaaaaggttatggagtctttctcaccctaaggacagggtggaagagggtggtatatagggaagggccagataggcaacttcatttggcttgtgtgcatctggcctggaactggtgttaagccaggcttttgcttgtttgttgccatccctcaccctttgccatttcccttttcagagaatgtaaatgattttcatgttaggccaaaataaacaacttatagggtacatatgttgtcataaaaggtaaaagtgatgcatgccaaaccaaactaaaccaatttggattatctgctattcgggtaatcttcacagaaatgactgagagaagaatctgcagtttactgagggcatttcagttcctcctaccacctcaacaggactttgtccagactctcctcctcttacctttgtgccttgactgtggttctttgtggcaagatactttggttggttaaaataatatggaacaaaggatccactgaagtgaaaaaaaaaaaaaaaa

SEQ ID NO: 1415 - protein, 518 aa, Homo sapiens
MAETSLLEAGASAASTAAALENLQVEASCSVCLEYLKEPVIIECGHNFCKACITRWWEDLERDFPCPVCRKTSRYRSLRPNRQLGSMVEIAKQLQAVKRKIRDESLCPQHHEALSLFCYEDQEAVCLICAISHTHRAHTVVPLDDATQEYKEKLQKCLEPLEQKLQEITRCKSSEEKKPGELKRLVESRRQQILREFEELHRRLDEEQQVLLSRLEEEEQDILQRLRENAAHLGDKRRDLAHLAAEVEGKCLQSGFEMLKDVKSTLEKNIPRKFGGSLSTICPRDHKALLGLVKEINRCEKVKTMEVTSVSIELEKNFSNFPRQYFALRKILKQLIADVTLDPETAHPNLVLSEDRKSVKFVETRLRDLPDTPRRFTFYPCVLATEGFTSGRHYWEVEVGDKTHWAVGVCRDSVSRKGELTPLPETGYWRVRLWNGDKYAATTTPFTPLHIKVKPKRVGIFLDYEAGTLSFYNVTDRSHIYTFTDTFTEKLWPLFYPGIRAGRKNAAPLTIRPPTDWE

SEQ ID NO: 1416 - DNA, 3545 bp, Homo sapiens
agcgtcatagcggcgggcatcccatctgcacgtcacacctctttctcacctggacacgcatcccttcctaccctgccagccacgacgtttcctctttcccctctccaatgcccagccccagatctggcggaagaagatggagaacgggggtgggacagagttgtggacaacctctcaggagagggtcgcaaggtgggaccctgaacagtggtagaaacaaaatgagattgtccctgaagtttgcccttcagctgagacacaaggagtagaggaagaggaaggactaacgcagaggcactcaaggtctcactatgactgtagttgagagtcctctcccttcttccctaaccctttccccatttctctcaccacttctttgccagtctagatccgtcctggtgccttactgtgcatacagttctactcgtctcagattcctttcttgtctgttagaaacgtatgtcaaacgaggatacagtgtctggaactattggttctaagatataagtggaatgagcctggatcaggagaagtatgctgagctagagttgaaggaagcttctctttctaacaagagaaagcagagttaaattatggcagagacaagtctgttagaggctggggcctctgcagcctctacagctgcggctttggagaacttacaggtggaggcgagctgctctgtgtgcctggagtatctgaaggaacctgtcatcattgagtgtgggcacaacttctgcaaagcttgcatcacccgctggtgggaggacctagagagggacttcccttgtcctgtctgtcgaaagacatcccgctaccgcagtctccgacctaatcggcaactaggcagtatggtggaaattgccaagcagctccaggccgtcaagcggaagatccgggatgagagcctctgcccccaacaccatgaggccctcagccttttctgttatgaggaccaggaggctgtatgcttgatatgtgcaatttcccacacccaccgggctcacaccgttgtgccactggacgatgctacacaggagtacaaggaaaaactgcagaagtgtctggagcccctggaacagaagctgcaggagatcactcgctgcaagtcctctgaggagaagaagcctggtgagctcaagagactagtggaaagtcgccgacagcagatcttgagggagtttgaagagcttcataggcggctggatgaagagcagcaggtgttgctttcacgactggaagaagaggaacaggacattctgcagcgactccgagaaaatgctgctcaccttggggacaagcgccgggacctggcccacttggctgccgaggtggagggcaagtgcttacagtcaggcttcgagatgcttaaggatgtcaaaagtaccctggaaaaatgtgaaaaggtgaagaccatggaggtgacttcagtatccatagagctggaaaagaacttcagcaattttccccgacagtactttgccctaaggaaaatccttaaacagctaattgcggatgtgaccctggaccctgagacagctcatcctaacctagtcctgtcagaggatcgtaagagcgtcaagttcgtggagacaagactccgggatctccctgacacaccaaggcgtttcaccttctacccttgcgtcctggctactgagggtttcacctcaggtcgacactactgggaggtggaggtgggcgacaagacccactgggcagtgggtgtatgccgggactccgtgagccgaaagggcgagttgactccactccctgagactggctactggcgggtgcggctatggaatggggacaaatatgcagccaccaccacaccttttacccctttgcacatcaaggtgaaacccaagcgggtaggcatattcctagactatgaggccggcacactgtctttctacaatgtcacagaccgctctcatatctacaccttcactgatacttttactgagaaactttggcccctcttctacccaggcatccgggctggacggaagaatgctgcaccacttaccatcaggcccccaacagattgggagtgacaggttgggatgtgggaatgactggggtgaggcagggtcaagtgctacgggcctccttcccgtgtcctgctggaacgtcttcgtgtccacctgggtccagtcctgaatcatcttggagaaacaccttggtttctaggatggttttgtgtggagggggaggtaggactgggctggatgagagagcacagctgtgacttcctcctaactgtcagggtggggagctggttcccagaggattgtctaccctgaagtccatcaggttttctgttgcacaaggacgggtcaggaaggaaggagaggcttttccagaaacaaaaaatctgtgagggtctgacttgctcaaaccagaggaggaaacagaaacccctgcacatctttttagggggttctttgacccaggatagtcttgcttcttgaggtagatcacaggggtctgtgtacctctgaattcatgagagatgaatgacagatgctctcatgggtctagatattgaggagtttttctgagggcagagattggacatcaacaaggctagaagggtcagggaagtgggctaaaggaacagattcctagagattaatgaagaggagggaggtttctttggtcttctattccaagggtaaggttgcgattatgggtaagattggccagaggtaggaatgtggggagaaggagaggctgaaaagaaagcagaggagaacccaggtccctgcctcagccttcagcagagttggcttattgcctgcctctataccaataagtcagtcaccttgctcctctccagaggcaaagtggaagagatcctgcaagacacatctatcctttcacagtgttcccaagggaacttggaaaggagagtcaggtattagaggaaagagaagggtatttgtatacaaagccctggccttaaagaatgttacttagtagctactcccaaattgtcagccttcttacctggccaaggtgtccaagccagaaaggaaaaaaggttatggagtctttctcaccctaaggacagggtggaagagggtggtatatagggaagggccagataggcaacttcatttggcttgtgtgcatctggcctggaactggtgttaagccaggcttttgcttgtttgttgccatccctcaccctttgccatttcccttttcagagaatgtaaatgattttcatgttaggccaaaataaacaacttatagggtacatatgttgtcataaaaggtaaaagtgatgcatgccaaaccaaactaaaccaatttggattatctgctattcgggtaatcttcacagaaatgactgagagaagaatctgcagtttactgagggcatttcagttcctcctaccacctcaacaggactttgtccagactctcctcctcttacctttgtgccttgactgtggttctttgtggcaagatactttggttggttaaaataatatggaacaaaggatccactgaagtgaaaaaaaaaaaaaaaa

SEQ ID NO: 1417 - protein, 488 aa, Homo sapiens
MAETSLLEAGASAASTAAALENLQVEASCSVCLEYLKEPVIIECGHNFCKACITRWWEDLERDFPCPVCRKTSRYRSLRPNRQLGSMVEIAKQLQAVKRKIRDESLCPQHHEALSLFCYEDQEAVCLICAISHTHRAHTVVPLDDATQEYKEKLQKCLEPLEQKLQEITRCKSSEEKKPGELKRLVESRRQQILREFEELHRRLDEEQQVLLSRLEEEEQDILQRLRENAAHLGDKRRDLAHLAAEVEGKCLQSGFEMLKDVKSTLEKCEKVKTMEVTSVSIELEKNFSNFPRQYFALRKILKQLIADVTLDPETAHPNLVLSEDRKSVKFVETRLRDLPDTPRRFTFYPCVLATEGFTSGRHYWEVEVGDKTHWAVGVCRDSVSRKGELTPLPETGYWRVRLWNGDKYAATTTPFTPLHIKVKPKRVGIFLDYEAGTLSFYNVTDRSHIYTFTDTFTEKLWPLFYPGIRAGRKNAAPLTIRPPTDWE

SEQ ID NO: 1418 - DNA, 541 bp, Homo sapiens
agcgcggcggtgatggcggggccggtgaaggaccgcgaggccttccagaggctcaacttcctgtaccaggccgcccattgtgtccttgcccaggaccccgagaaccaggcgctggcgaggttttactgctacactgagaggaccattgcgaagcggctcgtcttgcggcgggatccctcggtgaagaggactctctgccgaggctgctcttccctcctcgtcccgggcctcacctgcacccagcgccagagacgctgcaggggacagcgctggaccgtacagacctgcctaacatgccagcgcagccaacgcttcctcaatgatcccgggcatttactctggggagacaggcctgaggcccagctcgggagccaagcagattccaaaccactacaacccttgccaaacacagcccactccatttcagaccgccttcctgaggagaaaatgcagactcagggttccagtaaccagtgatggattcaccccatctcccaaataaagtttacttgttttacattcaaaaaaaaaaaaaaaaaaa

SEQ ID NO: 1419 - protein, 154 aa, Homo sapiens
MAGPVKDREAFQRLNFLYQAAHCVLAQDPENQALARFYCYTERTIAKRLVLRRDPSVKRTLCRGCSSLLVPGLTCTQRQRRCRGQRWTVQTCLTCQRSQRFLNDPGHLLWGDRPEAQLGSQADSKPLQPLPNTAHSISDRLPEEKMQTQGSSNQ

SEQ ID NO: 1420 - DNA, 1701 bp, Homo sapiens
cggactcaagaagttctcaggactcagaggctgggatcatggtagatggaaccctccttttactcctctcggaggccctggcccttacccagacctgggcgggctcccactccttgaagtatttccacacttccgtgtcccggcccggccgcggggagccccgcttcatctctgtgggctacgtggacgacacccagttcgtgcgcttcgacaacgacgccgcgagtccgaggatggtgccgcgggcgccgtggatggagcaggaggggtcagagtattgggaccgggagacacggagcgccagggacaccgcacagattttccgagtgaacctgcggacgctgcgcggctactacaatcagagcgaggccgggtctcacaccctgcagtggatgcatggctgcgagctggggcccgacgggcgcttcctccgcgggtatgaacagttcgcctacgacggcaaggattatctcaccctgaatgaggacctgcgctcctggaccgcggtggacacggcggctcagatctccgagcaaaagtcaaatgatgcctctgaggcggagcaccagagagcctacctggaagacacatgcgtggagtggctccacaaatacctggagaaggggaaggagacgctgcttcacctggagcccccaaagacacacgtgactcaccaccccatctctgaccatgaggccaccctgaggtgctgggccctgggcttctaccctgcggagatcacactgacctggcagcaggatggggagggccatacccaggacacggagctcgtggagaccaggcctgcaggggatggaaccttccagaagtgggcagctgtggtggtgccttctggagaggagcagagatacacgtgccatgtgcagcatgaggggctacccgagcccgtcaccctgagatggaagccggcttcccagcccaccatccccatcgtgggcatcattgctggcctggttctccttggatctgtggtctctggagctgtggttgctgctgtgatatggaggaagaagagctcaggtggaaaaggagggagctactctaaggctgagtggagcgacagtgcccaggggtctgagtctcacagcttgtaaagcctgagacagctgccttgtgtgcgactgagatgcacagctgccttgtgtgcgactgagatgcaggatttcctcacgcctcccctatgtgtcttaggggactctggcttctctttttgcaagggcctctgaatctgtctgtgtccctgttagcacaatgtgaggaggtagagaaacagtccacctctgtgtctaccatgacccccttcctcacactgacctgtgttccttccctgttctcttttctattaaaaataagaacctgggcagagtgcggcagctcatgcctgtaatcccagcacttagggaggccgaggagggcagatcacgaggtcaggagatcgaaaccatcctggctaacacggtgaaaccccgtctctactaaaaaatacaaaaaattagctgggcgcagaggcacgggcctgtagtcccagctactcaggaggcggaggcaggagaatggcgtcaacccgggaggcggaggttgcagtgagccaggattgtgcgactgcactccagcctgggtgacagggtgaaacgccatctcaaaaaataaaaattgaaaaataaaaaaaaaaaaaaaaaa

SEQ ID NO: 1421 - protein, 358 aa, Homo sapiens
MVDGTLLLLLSEALALTQTWAGSHSLKYFHTSVSRPGRGEPRFISVGYVDDTQFVRFDNDAASPRMVPRAPWMEQEGSEYWDRETRSARDTAQIFRVNLRTLRGYYNQSEAGSHTLQWMHGCELGPDGRFLRGYEQFAYDGKDYLTLNEDLRSWTAVDTAAQISEQKSNDASEAEHQRAYLEDTCVEWLHKYLEKGKETLLHLEPPKTHVTHHPISDHEATLRCWALGFYPAEITLTWQQDGEGHTQDTELVETRPAGDGTFQKWAAVVVPSGEEQRYTCHVQHEGLPEPVTLRWKPASQPTIPIVGIIAGLVLLGSVVSGAVVAAVIWRKKSSGGKGGSYSKAEWSDSAQGSESHSL

SEQ ID NO: 1422 - DNA, 3023 bp, Homo sapiens
attccacttccggaaggttgcggagaacatctgcggcggccgcattccggagccaactgcctccctccgtctctgccaggcatggcggcaacctcacaccttccctttgctgcgtttctataaatgctttgaaaaaattactcttttcttccctcgctggaaaacaccacaaccagctcctcagagtgtgtcacagagtcaacaggctctcgggccagagggcctgagaagaggactgtcgcaccgtaagatcgccacatccggtcctcggttactatggtaacagctgcaggcacaacttcgtgccctttgacctccccccaaaagtccttgtcccgcttgggtttcccttctcgcccgcttttgcacttatgatctgtaaacctgctccttatcatcgttcccacaaggaatttgggtcccaacaggtcggcacccaggactctcagaccgccgccctcccctaaagacctctgaccgtgcccccggtgtagtccagcaacctggacgcagtctcggctttccactaaggtcaagcccggggctttgtagtatagcctcagcgtgtccacgccccctctcccctaggtagtaggccccgccctccgctccgccgccccctccaggtgagtggtaggttctcccgggagcgcaaggtagtgatgacacgcgccccccctcctccgaacgcgagttggtagcgtccgtgacggagttagcctggtcctcccacgcgcgcctccttcctcgccgccggggcgccctctcggtgccactggctctcacgtgccagtagcccaccccgcatcatcctctcgcctcgctcctggagggaagtgactatatctcccccgtccgccttccatcgccgccgcggcggtaattctgtcgggcccgcccgctgacgtcacctgctagccccgcctcctctagggtcccgggcccctgcggcgggggctgccccggggggcagtcagttgaggcggcgggagctcggcggagggcgggccaggtgactggtccgggccatgccgaggaagaagccattcagcgtgaagcagaagaagaagcagttgcaggacaaacgggagcggaagagagggcttcaagatgggctgcgctccagttccaacagccgcagcgggagccgggagcggcgagaggaacagaccgacacctcggacggggagtctgtgacccatcatatccgcaggcttaaccagcagccttctcaggggctgggtccacgaggctacgacccaaatcgataccgactgcattttgagagagacagcagggaggaggtagagaggagaaagagagcagcccgggagcaagttctacagccggtcagtgctgagttgttggagctggacatccgggaggtgtatcagcctggctcagttctggactttcctcgacgtcctccttggagctatgagatgtccaaggagcaactaatgagccaagaggaacggagcttccaagactatcttgggaagattcatggggcttactcctctgagaaactcagctactttgagcacaatctggagacatggaggcagctgtggcgggtgttagagatgtctgacatcgtcctgcttatcactgatatccgacatccagttgtgaatttcccgccagcactttatgagtatgtgactggagaacttggactggccctggtgctggttttgaacaaggtggatctggccccgccagctcttgtggttgcctggaagcattatttccatcaacactatccccagctccacgtcgtccttttcacctcttttcctcgggacccccgcaccccacaggatcctagtagtgtcttgaagaagagtcggaggcgggggagaggatggactcgggccctggggccagagcagttgctgagagcctgtgaagccatcactgtggggaaagtggacttgagcagctggcgggagaagattgctcgggatgtggctggggccacctggggtaatggctctggggaggaggaggaagaggaggatggcccagcagtcctggtggagcagcagactgattcagcaatggagccaactggcccaacccaagagcgctacaaggatggggtggtgaccatcggctgtgtgggtttccctaatgtgggaaagtcctcgctgatcaatgggctggtggggcggaaagtcgtgagtgtctccagaaccccgggccatacccgatactttcagacctactttcttaccccctctgtgaagctctgtgactgcccaggcctcatcttcccatctcttctgcctaggcagttgcaggttctggcagggatctaccctatcgcccagatccaggagccctacactgctgtgggctacctggcctcccgaattcccgtgcaggccctgctccacctgcgccacccagaggctgaggacccctcagcggaacacccctggtgtgcctgggacatctgtgaagcctgggcagagaaacgtggttacaagacagccaaggcggctcggaatgatgtgtacagagcagccaacagtctcttgcggctggcagtggacggccgcctcagcctgtgttttcatcccccaggctacagtgaacagaaaggcacctgggagtcccatccagagaccacggagctggtggttttgcagggcagggtggggccagcaggtgacgaggaggaggaggaagaggaagagctgagcagctcctgtgaggaggagggagaggaggaccgggatgcggatgaggagggagaaggggatgaggagaccccaacctcggctccagggtccagcctggctggccgaaacccttatgccctgctgggtgaggatgagtgctgagttcctcgcccagcgccatcttccctcccagtatctttgcttttggactgacctgggggtatctcccctctgccaccccaattgtgaataaagattgtttgctttgtagccccttccccagatgaactgaggtgagagcggctgttccaggctaaaaaaaaaaaaaaaaaa

SEQ ID NO: 1423 - protein, 607 aa, Homo sapiens
MPRKKPFSVKQKKKQLQDKRERKRGLQDGLRSSSNSRSGSRERREEQTDTSDGESVTHHIRRLNQQPSQGLGPRGYDPNRYRLHFERDSREEVERRKRAAREQVLQPVSAELLELDIREVYQPGSVLDFPRRPPWSYEMSKEQLMSQEERSFQDYLGKIHGAYSSEKLSYFEHNLETWRQLWRVLEMSDIVLLITDIRHPVVNFPPALYEYVTGELGLALVLVLNKVDLAPPALVVAWKHYFHQHYPQLHVVLFTSFPRDPRTPQDPSSVLKKSRRRGRGWTRALGPEQLLRACEAITVGKVDLSSWREKIARDVAGATWGNGSGEEEEEEDGPAVLVEQQTDSAMEPTGPTQERYKDGVVTIGCVGFPNVGKSSLINGLVGRKVVSVSRTPGHTRYFQTYFLTPSVKLCDCPGLIFPSLLPRQLQVLAGIYPIAQIQEPYTAVGYLASRIPVQALLHLRHPEAEDPSAEHPWCAWDICEAWAEKRGYKTAKAARNDVYRAANSLLRLAVDGRLSLCFHPPGYSEQKGTWESHPETTELVVLQGRVGPAGDEEEEEEEELSSSCEEEGEEDRDADEEGEGDEETPTSAPGSSLAGRNPYALLGEDEC

SEQ ID NO: 1424 - DNA, 2261 bp, Homo sapiens
aacccaagcgggacaaggacttttggggggaggtcaaagggcacgaagttgtgcctacagctgttaccatagtaaccgaggaccggatgtggcgatcttggcggtgcgacagtcctcttctcaggccctctggcccgagagcctgttgactctgtgacacactctgaggagctggttgtggtgttttccagcgagggaagaaaagagtaattttttcaaagcatttatagaaacgcagcaaagggaaggtgtgaggttgccgccatgcctggcagaacggagggaggcagttggctccggaatgcggccgccgcagatgttctccgcaaccttccggaagtggaatggcgggagcctcagcattgctgcccaccgaccccccggaagcggaaacagaatccccgcgtgccccttcctcactaccctccaaatcccgctgcagccattgccgcagacacgatgccgaaacgaaagaagcagaatcatcaccagccaccgacacagcagcagcccccgctgcccgagcgggaagagactggagatgaggaggatgggagtcccatcggaccacccagccttctgggccctccccccatggccaatggaaaacctggcgaccctaagtcagctcttcacagaggtcctccaggatcaaggggaccactgattccaccactgctgagtctcccacctcctccttggggtagaggcccaattcggagagggcttggccccaggtctagcccatatggtcgtggttggtggggagtcaatgcagaacctccttttccggggccaggccatgggggtcccaccaggggaagctttcacaaggaacagagaaaccctcgaaggctcaaaagctggtctcttatcaagaatacctgcccgcccaaggatgacccccaggttatggaagacaaatccgaccgccctgtctgccgacattttgccaaaaagggccactgtcgatatgaggacctctgtgccttctaccatccaggcgtcaatggacctcctctgtgagactgtgccttcccatccaggctggaaggagctctctgtgacctagcggccatttatttctctgtagccctatgatggctactgtgaggctcttctaacaccctcagtcagtgacacacccatcccatccaccacttcccccgtgtggggtccagagtggtgttgcatcactggtgcgcggcatacgcgctttcttctgatccagcctgtagagactcgcctttgggacccatctttgcttcctttcagttgcctcctggatcttctttcccgtcatcaaatgactgctgaacaggaaacctctttggtgctgtttcttgtgcatctgtccacctgttccccagtattgccctcaattcctgagagccctggagcggtttcctaccattcccttcttttagctgcttgttttaagtcctttttatgtgacattccctacccccaatgttgtcagctgcttgtgaaactcagccaggttgtctaacctggggtcaagtttgggtgactggtgcagagttacttcctaaaaggccactctccctgcctttggatttcatagtttctctgtcagtagcatgatccccaccgctatggtctatctatgatcaccgtgctttgtgaaactgtgcatccccttgtagcctttctcagtgtccgtggcatttttgtgacttcccagcactagaataagttttcctgccaaaatgagtgaggcgcttggtgccctctggactttcccacttcccaacatgggagaattgtgaactttccatcagactgcctccctggccctccccattcttctcctgttggttattctgagtctgacacagacccatgacatgtcttataaagcctccaatggctttatcctacctagatcccttccagcccattttaattagactatgtcattgtgaggccaccagtccattcatttgaattctgtgaatctccaccttgcctatctttgggtagaagctggacagtactgttgccctcttccaatcctcttcccctacatccctggcactggttgttttctgtgaaaacagcagtgaacaggttcagttttgaactggccctgaggaaatgggtcaggagttgtattggcaagagggaggggtgagagctgttggagaactgagaatgaggttttttttttttttttctttttaactttttttatattagtaataaatgcagtggaaaccagcattttatttaaaaaaaaa

SEQ ID NO: 1425 - protein, 253 aa, Homo sapiens
MPGRTEGGSWLRNAAAADVLRNLPEVEWREPQHCCPPTPRKRKQNPRVPLPHYPPNPAAAIAADTMPKRKKQNHHQPPTQQQPPLPEREETGDEEDGSPIGPPSLLGPPPMANGKPGDPKSALHRGPPGSRGPLIPPLLSLPPPPWGRGPIRRGLGPRSSPYGRGWWGVNAEPPFPGPGHGGPTRGSFHKEQRNPRRLKSWSLIKNTCPPKDDPQVMEDKSDRPVCRHFAKKGHCRYEDLCAFYHPGVNGPPL

SEQ ID NO: 1426 - DNA, 3474 bp, Homo sapiens
gcgccagcttggagagccagccccatcggggttccccgccgccggaagcggaaatagcaccgggcgccgccacagtagctgtaactgccaccgcgatgccgaaggcgcccaagcagcagccgccggagcccgagtggatcggggacggagagagcacgagcccatcagacaaagtggtgaagaaagggaagaaggacaagaagatcaaaaaaacgttctttgaagagctggcagtagaagataaacaggctggggaagaagagaaagtgctcaaggagaaggagcagcagcagcagcaacagcaacagcagcaaaaaaaaaagcgagatacccgaaaaggcaggcggaagaaggatgtggatgatgatggagaagagaaagagctcatggagcgtcttaagaagctctcagtgccaaccagtgatgaggaggatgaagtacccgccccaaaaccccgcggagggaagaaaaccaagggtggtaatgtttttgcagccctgattcaggatcagagtgaggaagaggaggaggaagaaaaacatcctcctaagcctgccaagccggagaagaatcggatcaataaggccgtatctgaggaacagcagcctgcactcaagggcaaaaagggaaaggaagagaagtcaaaagggaaggctaagcctcaaaataaattcgctgctctggacaatgaagaggaggataaagaagaagaaattataaaggaaaaggagcctcccaaacaagggaaggagaaggccaagaaggcagagcagggttcagaggaagaaggagaaggggaagaagaggaggaggaaggaggagagtctaaggcagatgatccctatgctcatcttagcaaaaaggagaagaaaaagctgaaaaaacagatggagtatgagcgccaagtggcttcattaaaagcagccaatgcagctgaaaatgacttctccgtgtcccaggcggagatgtcctcccgccaagccatgttagaaaatgcatctgacatcaagctggagaagttcagcatctccgctcatggcaaggagctgttcgtcaatgcagacctgtacattgtagccggccgccgctacgggctggtaggacccaatggcaagggcaagaccacactcctcaagcacattgccaaccgagccctgagcatccctcccaacattgatgtgttgctgtgtgagcaggaggtggtagcagatgagacaccagcagtccaggctgttcttcgagctgacaccaagcgattgaagctgctggaagaggagcggcggcttcagggacagctggaacaaggggatgacacagctgctgagaggctagagaaggtgtatgaggaattgcgggccactggggcggcagctgcagaggccaaagcacggcggatcctggctggcctgggctttgaccctgaaatgcagaatcgacccacacagaagttctcagggggctggcgcatgcgtgtctccctggccagggcactgttcatggagcccacactgctgatgctggatgagcccaccaaccacctggacctcaacgctgtcatctggcttaataactacctccagggctggcggaagaccttgctgatcgtctcccatgaccagggcttcttggatgatgtctgcactgatatcatccacctcgatgcccagcggctccactactataggggcaattacatgaccttcaaaaagatgtaccagcagaagcagaaagaactgctgaaacagtatgagaagcaagagaaaaagctgaaggagctgaaggcaggcgggaagtccaccaagcaggcggaaaaacaaacgaaggaagccctgactcggaagcagcagaaatgccgacggaaaaaccaagatgaggaatcccaggaggcccctgagctcctgaagcgccctaaggagtacactgtgcgcttcacttttccagaccccccaccactcagccctccagtgctgggtctgcatggtgtgacattcggctaccagggacagaaaccactctttaagaacttggattttggcatcgacatggattcaaggatttgcattgtgggccctaatggtgtggggaagagtacgctactcctgctgctgactggcaagctgacaccgacccatggggaaatgagaaagaaccaccggctgaaaattggcttcttcaaccagcagtatgcagagcagctgcgcatggaggagacgcccactgagtacctgcagcggggcttcaacctgccctaccaggatgcccgcaagtgcctgggccgcttcggcctggagagtcacgcccacaccatccagatctgcaaactctctggtggtcagaaggcgcgagttgtgtttgctgagctggcctgtcgggaacctgatgtcctcatcttggacgagccaaccaataacctggacatagagtctattgatgctctaggggaggccatcaatgaatacaagggtgctgtgatcgttgtcagccatgatgcccgactcatcacagaaaccaattgccagctgtgggtggtggaggagcagagtgttagccaaatcgatggtgactttgaagactacaagcgggaggtgttggaggccctgggtgaagtcatggtcagccggccccgagagtgagctttccttcccagaagtctcccgagagacatatttgtgtggcctagaagtcctctgtggtctcccctcctctgaagactgcctctggcctgcagctgacctggcaaccattcaggcacatgaaggtggagtgtgaccttgatgtgaccgggatcccactctgattgcatccatttctctgaaagacttgtttgttctgcttctcttcatataactgagctggccttatccttggcatccccctaaacaaacaagaggtgaccaccttattgtgaggttccatccagccaagtttatgtggcctattgtctcaggactctcatcactcagaagcctgcctctgatttaccctacagcttcaggcccagctgccccccagtctttgggtggtgctgttcttttctggtggatttaatgctgactcactggtacaaacagctgttgaagctcagagctggaggtgagcttctgaggcctttgccattatccagcccaagatttggtgcctgcagcctcttgtctggttgaggacttggggcaggaaaggaatgctgctgaacttgaatttccctttacaaggggaagaaataaaggaaaggagttgctgccgacctgtcactgtttggagattgatgggagttggaactgttctcagtcttgatttgctttattcagttttctagcagcttttaatagtcccctcttccccactaaatggatcttgtttgcagtcttgctgacagtgtttgctgtttaaggatcataggattcctttcccccaacccttcacgcaaggaaaaagcaaagtgattcataccttctatcttggaaaaaaaaaaaa

SEQ ID NO: 1427 - protein, 845 aa, Homo sapiens
MPKAPKQQPPEPEWIGDGESTSPSDKVVKKGKKDKKIKKTFFEELAVEDKQAGEEEKVLKEKEQQQQQQQQQQKKKRDTRKGRRKKDVDDDGEEKELMERLKKLSVPTSDEEDEVPAPKPRGGKKTKGGNVFAALIQDQSEEEEEEEKHPPKPAKPEKNRINKAVSEEQQPALKGKKGKEEKSKGKAKPQNKFAALDNEEEDKEEEIIKEKEPPKQGKEKAKKAEQGSEEEGEGEEEEEEGGESKADDPYAHLSKKEKKKLKKQMEYERQVASLKAANAAENDFSVSQAEMSSRQAMLENASDIKLEKFSISAHGKELFVNADLYIVAGRRYGLVGPNGKGKTTLLKHIANRALSIPPNIDVLLCEQEVVADETPAVQAVLRADTKRLKLLEEERRLQGQLEQGDDTAAERLEKVYEELRATGAAAAEAKARRILAGLGFDPEMQNRPTQKFSGGWRMRVSLARALFMEPTLLMLDEPTNHLDLNAVIWLNNYLQGWRKTLLIVSHDQGFLDDVCTDIIHLDAQRLHYYRGNYMTFKKMYQQKQKELLKQYEKQEKKLKELKAGGKSTKQAEKQTKEALTRKQQKCRRKNQDEESQEAPELLKRPKEYTVRFTFPDPPPLSPPVLGLHGVTFGYQGQKPLFKNLDFGIDMDSRICIVGPNGVGKSTLLLLLTGKLTPTHGEMRKNHRLKIGFFNQQYAEQLRMEETPTEYLQRGFNLPYQDARKCLGRFGLESHAHTIQICKLSGGQKARVVFAELACREPDVLILDEPTNNLDIESIDALGEAINEYKGAVIVVSHDARLITETNCQLWVVEEQSVSQIDGDFEDYKREVLEALGEVMVSRPRE

SEQ ID NO: 1428 - DNA, 3360 bp, Homo sapiens
gcgccagcttggagagccagccccatcggggttccccgccgccggaagcggaaatagcaccgggcgccgccacagtagctgtaactgccaccgcgatgccgaaggcgcccaagcagcagccgccggagcccgagtggatcggggacggagagagcacgagcccatcagacaaagtggtgaagaaagggaagaaggacaagaagatcaaaaaaacgttctttgaagagctggcagtagaagataaacaggctggggaagaagagaaagtgctcaaggagaaggagcagcagcagcagcaacagcaacagcagcaaaaaaaaaagcgagatacccgaaaaggcaggcggaagaaggatgtggatgatgatggagaagagaaagagctcatggagcgtcttaagaagctctcagtgccaaccagtgatgaggaggatgaagtacccgccccaaaaccccgcggagggaagaaaaccaagggtggtaatgtttttgcagccctgattcaggatcagagtgaggaagaggaggaggaagaaaaacatcctcctaagcctgccaagccggagaagaatcggatcaataaggccgtatctgaggaacagcagcctgcactcaagggcaaaaagggaaaggaagagaagtcaaaagggaaggctaagcctcaaaataaattcgctgctctggacaatgaagaggaggataaagaagaagaaattataaaggaaaaggagcctcccaaacaagggaaggagaaggccaagaaggcagagcagatggagtatgagcgccaagtggcttcattaaaagcagccaatgcagctgaaaatgacttctccgtgtcccaggcggagatgtcctcccgccaagccatgttagaaaatgcatctgacatcaagctggagaagttcagcatctccgctcatggcaaggagctgttcgtcaatgcagacctgtacattgtagccggccgccgctacgggctggtaggacccaatggcaagggcaagaccacactcctcaagcacattgccaaccgagccctgagcatccctcccaacattgatgtgttgctgtgtgagcaggaggtggtagcagatgagacaccagcagtccaggctgttcttcgagctgacaccaagcgattgaagctgctggaagaggagcggcggcttcagggacagctggaacaaggggatgacacagctgctgagaggctagagaaggtgtatgaggaattgcgggccactggggcggcagctgcagaggccaaagcacggcggatcctggctggcctgggctttgaccctgaaatgcagaatcgacccacacagaagttctcagggggctggcgcatgcgtgtctccctggccagggcactgttcatggagcccacactgctgatgctggatgagcccaccaaccacctggacctcaacgctgtcatctggcttaataactacctccagggctggcggaagaccttgctgatcgtctcccatgaccagggcttcttggatgatgtctgcactgatatcatccacctcgatgcccagcggctccactactataggggcaattacatgaccttcaaaaagatgtaccagcagaagcagaaagaactgctgaaacagtatgagaagcaagagaaaaagctgaaggagctgaaggcaggcgggaagtccaccaagcaggcggaaaaacaaacgaaggaagccctgactcggaagcagcagaaatgccgacggaaaaaccaagatgaggaatcccaggaggcccctgagctcctgaagcgccctaaggagtacactgtgcgcttcacttttccagaccccccaccactcagccctccagtgctgggtctgcatggtgtgacattcggctaccagggacagaaaccactctttaagaacttggattttggcatcgacatggattcaaggatttgcattgtgggccctaatggtgtggggaagagtacgctactcctgctgctgactggcaagctgacaccgacccatggggaaatgagaaagaaccaccggctgaaaattggcttcttcaaccagcagtatgcagagcagctgcgcatggaggagacgcccactgagtacctgcagcggggcttcaacctgccctaccaggatgcccgcaagtgcctgggccgcttcggcctggagagtcacgcccacaccatccagatctgcaaactctctggtggtcagaaggcgcgagttgtgtttgctgagctggcctgtcgggaacctgatgtcctcatcttggacgagccaaccaataacctggacatagagtctattgatgctctaggggaggccatcaatgaatacaagggtgctgtgatcgttgtcagccatgatgcccgactcatcacagaaaccaattgccagctgtgggtggtggaggagcagagtgttagccaaatcgatggtgactttgaagactacaagcgggaggtgttggaggccctgggtgaagtcatggtcagccggccccgagagtgagctttccttcccagaagtctcccgagagacatatttgtgtggcctagaagtcctctgtggtctcccctcctctgaagactgcctctggcctgcagctgacctggcaaccattcaggcacatgaaggtggagtgtgaccttgatgtgaccgggatcccactctgattgcatccatttctctgaaagacttgtttgttctgcttctcttcatataactgagctggccttatccttggcatccccctaaacaaacaagaggtgaccaccttattgtgaggttccatccagccaagtttatgtggcctattgtctcaggactctcatcactcagaagcctgcctctgatttaccctacagcttcaggcccagctgccccccagtctttgggtggtgctgttcttttctggtggatttaatgctgactcactggtacaaacagctgttgaagctcagagctggaggtgagcttctgaggcctttgccattatccagcccaagatttggtgcctgcagcctcttgtctggttgaggacttggggcaggaaaggaatgctgctgaacttgaatttccctttacaaggggaagaaataaaggaaaggagttgctgccgacctgtcactgtttggagattgatgggagttggaactgttctcagtcttgatttgctttattcagttttctagcagcttttaatagtcccctcttccccactaaatggatcttgtttgcagtcttgctgacagtgtttgctgtttaaggatcataggattcctttcccccaacccttcacgcaaggaaaaagcaaagtgattcataccttctatcttggaaaaaaaaaaaa

SEQ ID NO: 1429 - protein, 807 aa, Homo sapiens
MPKAPKQQPPEPEWIGDGESTSPSDKVVKKGKKDKKIKKTFFEELAVEDKQAGEEEKVLKEKEQQQQQQQQQQKKKRDTRKGRRKKDVDDDGEEKELMERLKKLSVPTSDEEDEVPAPKPRGGKKTKGGNVFAALIQDQSEEEEEEEKHPPKPAKPEKNRINKAVSEEQQPALKGKKGKEEKSKGKAKPQNKFAALDNEEEDKEEEIIKEKEPPKQGKEKAKKAEQMEYERQVASLKAANAAENDFSVSQAEMSSRQAMLENASDIKLEKFSISAHGKELFVNADLYIVAGRRYGLVGPNGKGKTTLLKHIANRALSIPPNIDVLLCEQEVVADETPAVQAVLRADTKRLKLLEEERRLQGQLEQGDDTAAERLEKVYEELRATGAAAAEAKARRILAGLGFDPEMQNRPTQKFSGGWRMRVSLARALFMEPTLLMLDEPTNHLDLNAVIWLNNYLQGWRKTLLIVSHDQGFLDDVCTDIIHLDAQRLHYYRGNYMTFKKMYQQKQKELLKQYEKQEKKLKELKAGGKSTKQAEKQTKEALTRKQQKCRRKNQDEESQEAPELLKRPKEYTVRFTFPDPPPLSPPVLGLHGVTFGYQGQKPLFKNLDFGIDMDSRICIVGPNGVGKSTLLLLLTGKLTPTHGEMRKNHRLKIGFFNQQYAEQLRMEETPTEYLQRGFNLPYQDARKCLGRFGLESHAHTIQICKLSGGQKARVVFAELACREPDVLILDEPTNNLDIESIDALGEAINEYKGAVIVVSHDARLITETNCQLWVVEEQSVSQIDGDFEDYKREVLEALGEVMVSRPRE

SEQ ID NO: 1430 - DNA, 4540 bp, Homo sapiens
attctggggttcgtttagaggtttgaattttctcggagaaagacaggccggccacgaggaaaacagaaacaagccgcagcaacatctaagcccttgaaaggatcctgagagaggggggaaagggaaaacagcagccaccagcccaaccacttgtgtcttctgccccttcccacctatcttgcccaccccaccagcccacgctgcttgggacttgaaatctgtggccgaaggaccgtcactacataacttcaaaaataatcaaccaccctcccttcccaaaccacccaaattcactcatccagcgtttacttttttgaatccactcagaacttttttctgcgacccccctccctaaatggagttgggtgggggggaaatgaatactgagttggcctttattttttaaaagactttttgatccaatgaggccccctaaataattgagttttgggtcctggttggttgttttattttttttcctccaaaattttaccccctcccccctgagcccgaggtgctgacgtcgcaaaaaaattggataaaaccaccatcatgggttcgggtcccatagaccccaaagaacttctcaagggcctggacagcttccttaaccgagatggggaagtcaaaagtgtggatgggatttccaagatcttcagtttgatgaaggaagcacgaaagatggtgagtcgatgcacttacttgaacattctcctgcagacccgttcaccagaaatattggtcaaatttattgacgttggcggctacaaacttcttaacaattggctgacgtattcaaagacaaccaacaacattcccctcctccagcaaattctactgaccctgcagcatctaccgctcactgtagaccatctcaagcagaacaacacagctaaactggtgaagcagctgagcaagtcaagtgaggatgaagagctccggaaattggcctcagtccttgtcagcgactggatggctgtcatccgctctcagagcagtacccagcctgctgagaaagataagaagaaacgtaaagatgaaggaaaaagtcgaactacccttcctgagcgacctttgacagaggtgaaggctgagacccgggctgaggaggccccagagaagaagagggagaagcccaagtctcttcgcaccacagcacccagtcatgccaagttccgttccactggactagagctggagacaccatccttggtgcctgtgaagaagaatgccagcacagtggtggtttctgacaagtacaaccttaaacccatccccctcaaacgtcagagcaacgtagctgctccaggagatgccactccccctgcagagaagaaatacaagccactcaacacaacacctaatgccaccaaagagatcaaagtgaagatcatcccgccacagcctatggagggcctgggctttctggatgctcttaattcagcccctgttccaggcatcaaaattaagaagaaaaaaaaagtactgtcacctacggctgccaagccaagcccctttgaagggaaaacgagcacagaaccaagcacagccaaaccttcttccccagaaccagcaccaccttctgaggcaatggacgcagaccgtccaggcaccccggttccccctgttgaagtcccggagctcatggatacagcctctttggagccaggagctctggatgccaagccagtggagagtcctggagatcctaaccaactgacccggaaaggcaggaagaggaaaagtgtgacatggcctgaggaaggcaaactgagagaatatttctattttgaattggatgaaactgaacgagtaaatgtgaataagatcaaggactttggtgaggcggctaagcgagagatactgtcagaccgacatgcatttgagacagcgcggcgtctgagccatgataacatggaggagaaggtgccctgggtgtgcccccggcccctggttctgccctcacctcttgtcacccctggaagcaatagtcaggagcgatatatccaggctgagcgggagaagggaatccttcaggagctcttcctgaacaaggagagtcctcatgagcctgatcctgagccctacgagcccataccccctaaactcatccccctagatgaggagtgttccatggatgagactccgtatgttgagactctggaacctggggggtcaggtggctcacctgatggggcaggaggctccaagttgcctccagttctggccaatcttatgggaagcatgggtgctggaaagggcccccaaggccctggaggaggaggcattaatgtccaagagatcctcacctccatcatgggtagcccaaacagtcatccttcagaggaactactgaaacaaccagactattcggacaagatcaagcagatgctggtgccacatggactcctaggccctggcccaatagccaatggtttcccaccagggggtcctgggggccccaagggcatgcagcactttccccctggacctgggggacctatgccaggtccccatggaggccctggtgggccagtgggtccacgtcttctgggtcctccaccccctccccggggaggtgatcccttctgggatggcccgggcgaccctatgcggggtggcccaatgcgggggggtccaggaccaggtcctggaccataccatagaggccgaggtggccgaggaggaaacgaacctcctcctcctcctcctccattccgaggcgccagaggaggtcgctctggaggaggacccccaaatggacgagggggccctggtgggggcatggttggaggtggtgggcatcgtcctcacgaaggccctggtgggggcatgggcaacagcagtggacatcgtccccacgaaggccctggcggtggcatgggaagtgggcatcgcccccatgaaggccctggtggtagcatgggtgggggtggaggacatcgtccccacgaaggccctggcggtggcatcagtggtggcagtggccatcgtccccatgaaggccctggcggaggaatgggtgccggtggtggacatcgcccccacgaaggccctggcggaagcatgggtggaagtggtggacatcgtccccatgaaggccctggacacggggggccccatggccaccggcctcatgatgtccctggtcaccgaggccatgaccatcgagggccgccacctcatgagcaccgtggccatgatggtcctggccacgggggagggggccaccgagggcacgatggaggccacagccatggaggagacatgtcaaaccgccctgtctgccgacatttcatgatgaagggcaactgccgctatgagaacaactgtgccttctaccacccgggtgtcaatgggccccccctgccctagggaccatttgcctgccctgttcacacaacccctgtggactgcagcctcgctctttccaccctgttatggcttctgtgaggcccattttcccttttccccagctgatgaggagccggccccctcagttcccacttgcttgggttcctgggggttttctgatcactggtgcgcattgatgtacatattttcctccagtctggggaggagagagactggaaacgttcctggactgctgaagaggagacccagttggcttcactttttgagaagattcgccctgtaccccaaacccctttccagtattacccttaatgcttgagaacctaaagctggttatcctggcgaacacccctacccttctattgcgggtccccacatgcacacagaactctgacacaggatcagctgcacttaagaaatcatcccagctaagttcattattcctcatggggtggggagatgctgaaaggggtattgtatatcccactgcactgagagggctcaatcagctggatttgagttctggaacacacatcatccccacccctcccccagcgtgggctcaccattcttagtcctttctcaagtgggaccttcaactttctgtgaacacccagtctgcgtcctgggtctgctaggttcgatgatggcgaactcgtatctgcatccggtgcaagttttagctggcagaggtgagaccggtggtgctggtctgcctttgccaactatagccagtctggagacttgataaaatacttcagtgagaccagcttctcatcaacttgggcccggcgtgctgggcctgaaagtcacactacatgcactgcctttgggagtcagctcactccctgctcccacctggaaccttgccagcgtgaaggaggcttccaggtacttcaccctgtcaaccacctctgaatccccaccaggcgccttcctgggtggattcaacaagatgattttgccctttcccagttctctccttcactttggcatcagttgttttctatgaaaacagtggattggttgggttttgtgcagggtcttgggttagagccaaaatggatttgaggatgagtatttttttttttggttttgtatattttgtacattaataataaacagtggaaagagaagcagcttaaaaaaaaaaaaaaaaaaaaaa

SEQ ID NO: 1431 - protein, 940 aa, Homo sapiens
MGSGPIDPKELLKGLDSFLNRDGEVKSVDGISKIFSLMKEARKMVSRCTYLNILLQTRSPEILVKFIDVGGYKLLNNWLTYSKTTNNIPLLQQILLTLQHLPLTVDHLKQNNTAKLVKQLSKSSEDEELRKLASVLVSDWMAVIRSQSSTQPAEKDKKKRKDEGKSRTTLPERPLTEVKAETRAEEAPEKKREKPKSLRTTAPSHAKFRSTGLELETPSLVPVKKNASTVVVSDKYNLKPIPLKRQSNVAAPGDATPPAEKKYKPLNTTPNATKEIKVKIIPPQPMEGLGFLDALNSAPVPGIKIKKKKKVLSPTAAKPSPFEGKTSTEPSTAKPSSPEPAPPSEAMDADRPGTPVPPVEVPELMDTASLEPGALDAKPVESPGDPNQLTRKGRKRKSVTWPEEGKLREYFYFELDETERVNVNKIKDFGEAAKREILSDRHAFETARRLSHDNMEEKVPWVCPRPLVLPSPLVTPGSNSQERYIQAEREKGILQELFLNKESPHEPDPEPYEPIPPKLIPLDEECSMDETPYVETLEPGGSGGSPDGAGGSKLPPVLANLMGSMGAGKGPQGPGGGGINVQEILTSIMGSPNSHPSEELLKQPDYSDKIKQMLVPHGLLGPGPIANGFPPGGPGGPKGMQHFPPGPGGPMPGPHGGPGGPVGPRLLGPPPPPRGGDPFWDGPGDPMRGGPMRGGPGPGPGPYHRGRGGRGGNEPPPPPPPFRGARGGRSGGGPPNGRGGPGGGMVGGGGHRPHEGPGGGMGNSSGHRPHEGPGGGMGSGHRPHEGPGGSMGGGGGHRPHEGPGGGISGGSGHRPHEGPGGGMGAGGGHRPHEGPGGSMGGSGGHRPHEGPGHGGPHGHRPHDVPGHRGHDHRGPPPHEHRGHDGPGHGGGGHRGHDGGHSHGGDMSNRPVCRHFMMKGNCRYENNCAFYHPGVNGPPLP

SEQ ID NO: 1432 - DNA, 1439 bp, Homo sapiens
gcctttccgtcaattcctgtcctgggcgtacgtcaagatggcggcgtctgtattaaacaccgtgctgaggcggcttcctatgctatctctcttccgaggttctcacagagttcaggttcccctccagactctttgcaccaaagctccctctgaggaagattctttgtcctcagttcccatttctccttataaggatgagccctggaaatatctggaatcagaagaataccaggagcgatatggttctcgccccgtctgggctgactaccgccgcaaccacaagggtggtgtacccccacagcggactcggaagacatgtattcgtcggaataaagttgttgggaatccctgccccatctgtcgagatcacaagttgcatgttgactttaggaacgtgaagctcttggagcaatttgtctgcgcccacacgggtatcatcttctatgctccatacacaggagtctgtgtgaagcagcacaagcggttgacccaggccatccagaaagccagggatcatggtctcctcatttaccacatcccccaggttgaaccacgggaccttgacttcagtacctctcatggggctgtgagtgctactccgccagcccccaccctggtctcaggtgacccctggtacccatggtacaactggaaacagccaccggagagagaactgtctcgccttcgccggctttaccagggtcatctccaagaagagagtggccccccacctgagtcaatgcccaagatgccccctagaacaccagcggaagcctcctccactgggcagacaggccctcagagtgctctgtaggagctgtagactgggaagagaggccaggcgtggtggctcactcctgtaatcccagcactttgggaagccaaggtgggctgatcacttgatcccaggagtttgagaccagcctgggcaccatggtgaaacctcgtctttaccaaaaaatacaaaaattagctgggtgtggtggtgcacacctgtagtctcaactattggggaggctaaggtaggatcacttgatcccaggaggcggaggttgcagtgagttgcagtcacacccctgcactccagcctgggtgacagctagaccctgtctcaaaaaaaaaaaaaaagactgggaagagagctagagggactaggagataatgtgtatgtaggtttatgtgatgggatatcaccctgaagagttgtgtcttttgtggccagtgacaaatccaggaaatgaatgttgctgatagggataaatcttgaggctgagggcgggtggtacagatgtgtatgggaaaccccaacccctatatattgtaaatagatgggctgggctaaacattgttgccgtttcatacttctaccaactcagcttttacacaataaagctctactgtctctgggtaaaaaaaaaaaaaaaaaaaaaaaaaaaaaa

SEQ ID NO: 1433 - protein, 258 aa, Homo sapiens
MAASVLNTVLRRLPMLSLFRGSHRVQVPLQTLCTKAPSEEDSLSSVPISPYKDEPWKYLESEEYQERYGSRPVWADYRRNHKGGVPPQRTRKTCIRRNKVVGNPCPICRDHKLHVDFRNVKLLEQFVCAHTGIIFYAPYTGVCVKQHKRLTQAIQKARDHGLLIYHIPQVEPRDLDFSTSHGAVSATPPAPTLVSGDPWYPWYNWKQPPERELSRLRRLYQGHLQEESGPPPESMPKMPPRTPAEASSTGQTGPQSAL

SEQ ID NO: 1434 - DNA, 1740 bp, Homo sapiens
atggagttcccgttcgatgtggacgcgctgttcccggagcggatcacggtgctggaccagcacctgaggcccccagcccgccgacccggaaccacaacgccggcccggtgacagctcaaacccaccctctggcccttttctcccggttcctcttcaaacctggtccaggcaccacgcccccttctcactgactagtgatcgccccttttgatgtccaggcctgcctttttggtgacctctgaccctgggcctagtgggattgatcagcgcttggatctgtgacctttcaccccgggcccaaaatgtcccaatcaaaggatgtggttgacctggcctttctgcttcctcacaataaccttaagggaggagggagtgtgccaccttgaaagtgttgatctacagcagcaaattatgaccattatagatgaactgggcaaggcttctgccaaggcccagaatctttccgctcctatcactagtgcatcaaggatgcagagtaaccgccatgttgtttatattctcaaagacagttcagcccgaccggctggaaaaggagccattattggtttcatcaaagttggatacaagaagctctttgtactggatgatcgtgaggctcataatgaggtagaaccactttgcatcctggacttttacatccatgagtctgtgcaacgccatggccatgggcgagaactcttccagtatatgttgcagaaggagcgagtggaaccgcaccaactggcaattgaccgaccctcacagaagctgctgaaattcctgaataagcactacaatctggagaccacagtcccacaggtgaacaactttgtgatctttgaaggcttctttgcccatcaacatcggccccctgctccctctctgagggcaactcgacactctcgtgctgctgcagtcgatcccacgcccgctgctccagcaaggaagctgccacccaagagagcagagggagacatcaagccatactcctctagtgaccgagaatttctgaaggtagctgtggagcctccttggcccctaaacagggcccctcgccgcgccacacctccagcccacccacccccccgctccagcagcctgggaaactcaccagaacgaggtcccctccgcccctttgtgccagagcaggagctgctgcgttccttgcgcctctgccccccacaccctaccgcccgccttctgttggctgctgaccctgggggcagcccagctcaacgtcgtcgcaccagggggactcccccaggtctggtagcccaaagctgctgctacagccgccatgggggggtgaattcctcatcccccaatacaggcaaccaagactccaagcagggagaacaggaaacaaagaataggtctgccagtgaggagcaggccttgtcacaggatgggtctggggagaagcccatgcacacagctcctccacaggccccggccccgccagcccagtcctggacagtgggtggggacatactcaacgccaggttcattcgaaacctgcaggaacgtcgcagcaccaggccttggtgaccgcagccccgtcaaacatcttcaaagtattatttctccctcactacaggaaagagccaaagcccaaccctcataatagatggatacattcattcattcattcattcagcaggcttatcagattcaagtcatttgtatcttttaaccagaccaataaaagtatttatttttatcacaaaaaaaaaaaaaaaa

SEQ ID NO: 1435 - protein, 409 aa, Homo sapiens
MWLTWPFCFLTITLREEGVCHLESVDLQQQIMTIIDELGKASAKAQNLSAPITSASRMQSNRHVVYILKDSSARPAGKGAIIGFIKVGYKKLFVLDDREAHNEVEPLCILDFYIHESVQRHGHGRELFQYMLQKERVEPHQLAIDRPSQKLLKFLNKHYNLETTVPQVNNFVIFEGFFAHQHRPPAPSLRATRHSRAAAVDPTPAAPARKLPPKRAEGDIKPYSSSDREFLKVAVEPPWPLNRAPRRATPPAHPPPRSSSLGNSPERGPLRPFVPEQELLRSLRLCPPHPTARLLLAADPGGSPAQRRRTRGTPPGLVAQSCCYSRHGGVNSSSPNTGNQDSKQGEQETKNRSASEEQALSQDGSGEKPMHTAPPQAPAPPAQSWTVGGDILNARFIRNLQERRSTRPW

SEQ ID NO: 1436 - DNA, 2636 bp, Homo sapiens
acagtgggccatggagttcccgttcgatgtggacgcgctgttcccggagcggatcacggtgctggaccagcacctgaggcccccagcccgccgacccggaaccacaacgccggcccgtgttgatctacagcagcaaattatgaccattatagatgaactgggcaaggcttctgccaaggcccagaatctttccgctcctatcactagtgcatcaaggatgcagagtaaccgccatgttgtttatattctcaaggacagttcagcccgaccggctggaaaaggagccattattggtttcatcaaagttggatacaagaagctctttgtactggatgatcgtgaggctcataatgaggtagaaccactttgcatcctggacttttacatccatgagtctgtgcaacgccatggccatgggcgagaactcttccagtatatgttgcagaaggagcgagtggaaccgcaccaactggcaattgaccgaccctctcagaagctgctgaaattcctgaataagcactacaatctggagaccacagtcccacaggtgaacaactttgtgatctttgaaggcttctttgcccatcaacatcggccccctgctccctctctgagggcaactcgacactctcgtgctgctgcagtcgatcccacgcccgctgctccagcaaggaagctgccacccaagagagcagagggagacatcaagccatactcctctagtgaccgagaatttctgaaggtagctgtggagcctccttggcccctaaacagggcccctcgccgcgccacacctccagcccacccacccccccgctccagcagcctgggaaactcaccagaacgaggtcccctccgcccctttgtgccagagcaggagctgctgcgttccttgcgcctctgccccccacaccctaccgcccgccttctgttggctgctgaccctgggggcagcccagctcaacgtcgtcgcaccaggtaataggagttgaagggctaaggagcctcacagctataaaagaggatgttagaaatggcaaagggcaatttgaatccatcagagagatggatcaataagatgggtggcttggggggggtcctgaaacctttcaagaaaaatatttgtgcaagtgatctgggaaaaaaatgcagtgaaggagcagaataggaccttatatggagcctagggaccctggctttaatgtgagagttatgtggaatggtaggaagaacaccgagatccatcgagttgggggaacagagccttctaagattgggaaaatcttcgcttaatacttgctggggaaggggcagtgtctgacagagagtgggaagccactggcttgtgtgccaagagtccatcgcagcaggcagggagtgggcatttcctttatttctctccctttctcttcacctctgacttctctgtttttctctcccccgccccccgccatttcccatctcccttcctcccatccataacatccttccacagctcccttccccgctctgaggagagtcgatactaacagctaccctatccctgccctgggagacctggggtgggcagggaacccctccctgaggacctcagaccctctcttccattgcatcctgtaggacccagtggaacctgacagagcccataggattccctcttctactttcttagacagcagggatgtcagggtctcaaactgcctaacactttgtagcttttcttaacacaaaagcaccccttctctcctaacttgggctctgaatactttcccaacaggaagtctgatctgttgccagacttcttggttagatggctcatacatttatctagagaagcacactcttgcttgctgtcaaactttagaacaccatggaaggtctaagggcatcctgtgccagggaaactttttaaggaattttatctatgggataaaccccatattccctctagtgtctactggtggctctaatactgctttgtgctgcctgccacacttgccctttgagcctgcgaatggccgctagtgagcaagctctgcttcagagcagtctagttaggtagaacagggacttaccagcttcccaaagggatctactcaccattgccaaactcttcatttccacattttgtgtaggtgtcagggaaccccaaactggtgttgctttggggtctctaaaggagattggctgacaccaccatttcccccagatcctgattctctgggggaggttgtttcttgagagtagatccagagtgtcaaggatctgttagatcctggaatcccttcttgcatccatccctccctggtagctaggtcccgatatactcctgtcttgtgagattgtcgagatgagatgggggaccactcttcctctgtccttcctctctcctttcctccatagcaaggacgaccttccctgctccatgcccagagtatagctagatcccttcccctccctaccctctgaatgtgtgctagatcaggtgccccactgtgtttcctgaaatccttgggagccggatctccccatctcccctactcactcttcccttttcttctctcagtgttgtctgaataaagtgtgaaatcttttgtgttttctaaattgacattttcaatgaaaaaaagaatcac

SEQ ID NO: 1437 - protein, 323 aa, Homo sapiens
MEFPFDVDALFPERITVLDQHLRPPARRPGTTTPARVDLQQQIMTIIDELGKASAKAQNLSAPITSASRMQSNRHVVYILKDSSARPAGKGAIIGFIKVGYKKLFVLDDREAHNEVEPLCILDFYIHESVQRHGHGRELFQYMLQKERVEPHQLAIDRPSQKLLKFLNKHYNLETTVPQVNNFVIFEGFFAHQHRPPAPSLRATRHSRAAAVDPTPAAPARKLPPKRAEGDIKPYSSSDREFLKVAVEPPWPLNRAPRRATPPAHPPPRSSSLGNSPERGPLRPFVPEQELLRSLRLCPPHPTARLLLAADPGGSPAQRRRTR

SEQ ID NO: 1438 - DNA, 1496 bp, Homo sapiens
gtgccctgcagcgcgtggacaggctaggggtcgcgggagcgggagggaggcgctgccgggcctgtcgcgcaaggacgtcggtcctcccaggtttgagggcggtcaggcggggtcaaggccaggcagcggggcgcgtctgcgttgcgcccgactctccgcggttacctgtgcctagaggtgatttgaagggcaggggccgagagattcgtagccctgctgcggcgccgtcccggagttccccggcccagaccagacccgcggggcgccctcagcagcccgcccgtcttgcactcggagagcggtcctggcaggaaggccggccagtgtgcacccggttcgggcccctgcgcccgggctggcaagatggccacgcccccagcagagacggcgcctctaggacaccatcggggaccgaggaccagctttatccagggactctaccattcccacccctttggccccactccacgacaaccacttccccatcttctcctctattctggtctcccctgcccccacgccttcccacccagcgtcttccccaggttcccccactacctctccctcagatccaggccctcagctcagcatgggtggttctccctccaggaaagggggaggagggaccaggacctgagttgcatagcggctgcctggatgggcttagaagcctttttgagggacctccctgcccctatcctggggcttggatacctttccaagtccctggaactgcccacccttcccctgccaccccgtcaggagatcctagtatggaggaacatctgtctgtcatgtatgagagactgagacaagagcttcccaagctcttccttcagtcccacgactacagtctgtattccttggatgtggaattcatcaatgagatcctcaacatacgtaccaagggccggacatggtacattctttcactgaccctctgccgtttcctggcctggaattattttgcacaccttcgtttggaggttttacagctgacccgccaccctgagaactggaccctgcaagcccggtggcggcttgtggggctgcccgtccacttgctctttttgcggttctacaagcgtgacaaagacgagcattaccggacctatgatgcctactccactttctacctgaattccagtggcctcatttgtcgccatcgtctagataaactgatgccttcacactcacctccaacgcctgtgaagaagctgctagtgggagccctggtggccctggggctgtcagagccagaacctgacttaaacctgtgttccaagccctgatccttgaccttggagtggaggcagcactgaagactgctacgcccaagagaaggaggtggaggcagccaagaatctcaggagccagcttcctctcctcgtttctctccttccttcctttccatctcatgctgtgtaaagctgctgtgtaatttaacttgtaaataataaagtttaactgactatatgaaaaaaaaaaaaaaaaaa

SEQ ID NO: 1439 - protein, 172 aa, Homo sapiens
MEEHLSVMYERLRQELPKLFLQSHDYSLYSLDVEFINEILNIRTKGRTWYILSLTLCRFLAWNYFAHLRLEVLQLTRHPENWTLQARWRLVGLPVHLLFLRFYKRDKDEHYRTYDAYSTFYLNSSGLICRHRLDKLMPSHSPPTPVKKLLVGALVALGLSEPEPDLNLCSKP

SEQ ID NO: 1440 - DNA, 3377 bp, Homo sapiens
gtcggaagatcctagaggtcccaaggtagctgacctgcgaagctgaggctccagccgagggctccaggcctctgaccggcccagcagtgagcgcggctgcccgacgcttcagggccgggagcagggagcgtgagtcgccatggcgacgccggcgggtctggagcgctgggttcaggacgagctgcactcggtgttggggctgagcgagcggcacgtcgcccagtttctgatcggtaccgcacagcgctgcacctctgccgaggagttcgtgcagcgcctacgagacactgataccttggatctcagtgggccggcccgggacttcgccctgagactctggaacaaggtaccacgaaaggcagtggtagaaaagccagctcgggcagcagagcgagaggcccgggccctgctggagaagaaccgatcttataggttactggaagacagtgaagagagcagtgaggagactgtgagtagggctggaagcagcctccagaagaaacgtaaaaagcggaaacacctcaggaagaagcgtgaggaagaagaggaggaagaggcttctgagaaagggaagaagaaaacaggggggagtaaacagcagacagagaagccagagtcggaagatgagtgggaacggacagagcgtgaacgccttcaggacctggaggagcgtgatgcctttgctgagcgggttcgacagcgggacaaggatcggactcgaaatgtcctggaacggtcagacaagaaggcttatgaagaggctcagaagcgcctcaagatggccgaggaagaccggaaggccatgatccctgagctgcggaagaaatctcgccgagagtacctggctaagcgggagcgagagaagcttgaggacctggaggcggagctggctgatgaggagttcctttttggggacgtggagctgagccggcacgagcggcaggagctcaaatataagcggcgagtgcgggatctcgcccgggagtaccgggcagctggggagcaggagaagctggaggccaccaatcgctaccacatgcccaaggaaacccgaggacagccagcccgagctgtggatctagtggaggaggaatcaggagcccctggggaggagcagcggcgctgggaggaggcgcggcttggggcagcgtccctgaagtttggggcccgagatgctgcctctcaggagcccaagtatcaactggtgctggaggaggaggagaccattgagtttgtccgggccactcagctccagggtgatgaggagccgtcagctccacccacttcaactcaggcccagcagaaagagtccatccaggccgtccgccgcagcctcccggtgttcccatttcgagaggagctcctggctgctattgcaaatcaccaagtcctcatcattgaaggcgagacaggctcagggaagaccacccagatcccgcagtatctctttgaggagggttatacaaacaagggtatgaagattgcctgcacccaaccccggagagtggctgccatgagtgtggccgcccgagtggcccgggagatgggtgtgaagcttgggaatgaggttggctacagcatccgctttgaggactgcacatcagagcgaactgtcctccgctacatgacagatgggatgcttctccgggagttcctctctgagcctgacctggcgagttacagcgtggtgatggtggatgaggcacacgaaaggaccctacacacagacattctctttggattgatcaaggatgttgctcgcttccgacctgagctcaaggtcctggtggcttcagccacaatggacactgcccgtttttccaccttctttgatgacgcccctgtgtttcgaatccccggacgcaggtttcctgtggacatcttctacaccaaggctccagaggctgactacttggaagcttgtgtagtatctgtgttgcagatccatgtgacccagccccctggggatatcctggtgttcctgacaggacaggaggagattgaggctgcctgtgagatgctccaggatccctgccgccgcctgggctccaaaatccgggagctcctggtgctgcccatttatgccaatctgccctctgacatgcaggcccgtatcttccagcccacaccacctggggcacgaaaggtggttgtggcaacgaacattgctgagacatcacccaccattgagggcatcatttatgtgctggatccagggttctgtaagcagaagagctacaacccccgcacaggcatggaatcgctcactgtcacaccctgcagcaaggcctcagccaatcagcgagctggcagggcaggtcgggtggctgcagggaagtgcttccgcctgtataccgcctgggcctatcagcacgagcttgaggaaaccacagtgcctgagatccagaggaccagcttgggcaatgtcgtgttgctgctcaagagcttagggatccatgacctaatgcactttgatttcctggaccctccaccatatgagacactgctgctgactttggagcagctgtatgctctgggagccctcaaccaccttggggagctcaccacgtctggtcgaaagatggcagagctgccggtggaccccatgctgtccaaaatgatcttagcctctgagaagtacagctgttcagaggagatcctgacagtggctgccatgctctctgtcaacaactccatcttctaccgaccaaaggacaaggtcgtccatgctgacaatgcccgtgtcaacttctttctccctggcggtgaccacctggttctgctaaatgtttacacacagtgggctgagagtggttactcttcccagtggtgctgtgagaactttgtacagttcagatcgatgcgccgagcccgggatgtgcgggaacagctggaagggctcttggaacgtgtggaagttggtctcagttcctgccagggggactatatccgtgtacgcaaggccatcactgctggttacttttaccacacggcacggttgactcggagtggctaccgcacagtgaaacagcagcagacagtcttcattcatcccaactcctccctctttgagcaacagccacgctggctgctctaccacgaacttgtcttgaccaccaaagagttcatgagacaggtactggagattgagagcagttggcttctggaggtggctccccattattataaggccaaggagctagaagatccccatgctaagaaaatgcccaaaaaaataggcaaaacacgagaagagctagggtaagagaaggacgcaaacagaacctgacaccagctccttttccttctatacattatttaatacctattaaataatattatttttggaataaagcttgtgggaacatttgggatct

SEQ ID NO: 1441 - protein, 1041 aa, Homo sapiens
MATPAGLERWVQDELHSVLGLSERHVAQFLIGTAQRCTSAEEFVQRLRDTDTLDLSGPARDFALRLWNKVPRKAVVEKPARAAEREARALLEKNRSYRLLEDSEESSEETVSRAGSSLQKKRKKRKHLRKKREEEEEEEASEKGKKKTGGSKQQTEKPESEDEWERTERERLQDLEERDAFAERVRQRDKDRTRNVLERSDKKAYEEAQKRLKMAEEDRKAMIPELRKKSRREYLAKREREKLEDLEAELADEEFLFGDVELSRHERQELKYKRRVRDLAREYRAAGEQEKLEATNRYHMPKETRGQPARAVDLVEEESGAPGEEQRRWEEARLGAASLKFGARDAASQEPKYQLVLEEEETIEFVRATQLQGDEEPSAPPTSTQAQQKESIQAVRRSLPVFPFREELLAAIANHQVLIIEGETGSGKTTQIPQYLFEEGYTNKGMKIACTQPRRVAAMSVAARVAREMGVKLGNEVGYSIRFEDCTSERTVLRYMTDGMLLREFLSEPDLASYSVVMVDEAHERTLHTDILFGLIKDVARFRPELKVLVASATMDTARFSTFFDDAPVFRIPGRRFPVDIFYTKAPEADYLEACVVSVLQIHVTQPPGDILVFLTGQEEIEAACEMLQDPCRRLGSKIRELLVLPIYANLPSDMQARIFQPTPPGARKVVVATNIAETSPTIEGIIYVLDPGFCKQKSYNPRTGMESLTVTPCSKASANQRAGRAGRVAAGKCFRLYTAWAYQHELEETTVPEIQRTSLGNVVLLLKSLGIHDLMHFDFLDPPPYETLLLTLEQLYALGALNHLGELTTSGRKMAELPVDPMLSKMILASEKYSCSEEILTVAAMLSVNNSIFYRPKDKVVHADNARVNFFLPGGDHLVLLNVYTQWAESGYSSQWCCENFVQFRSMRRARDVREQLEGLLERVEVGLSSCQGDYIRVRKAITAGYFYHTARLTRSGYRTVKQQQTVFIHPNSSLFEQQPRWLLYHELVLTTKEFMRQVLEIESSWLLEVAPHYYKAKELEDPHAKKMPKKIGKTREELG

SEQ ID NO: 1442 - DNA, 1433 bp, Homo sapiens
acccctccatttctcgccatggcccctgcactgctcctgatccctgctgccctcgcctctttcatcctggcctttggcaccggagtggagttcgtgcgctttacctcccttcggccacttcttggagggatcccggagtctggtggtccggatgcccgccagggatggctggctgccctgcaggaccgcagcatccttgcccccctggcatgggatctggggctcctgcttctatttgttgggcagcacagcctcatggcagctgaaagagtgaaggcatggacatcccggtactttggggtccttcagaggtcactgtatgtggcctgcactgccctggccttgcagctggtgatgcggtactgggagcccatacccaaaggccctgtgttgtgggaggctcgggctgagccatgggccacctgggtgccgctcctctgctttgtgctccatgtcatctcctggctcctcatctttagcatccttctcgtctttgactatgctgagctcatgggcctcaaacaggtatactaccatgtgctggggctgggcgagcctctggccctgaagtctccccgggctctcagactcttctcccacctgcgccacccagtgtgtgtggagctgctgacagtgctgtgggtggtgcctaccctgggcacggaccgtctcctccttgctttcctccttaccctctacctgggcctggctcacgggcttgatcagcaagacctccgctacctccgggcccagctacaaagaaaactccacctgctctctcggccccaggatggggaggcagagtgaggagctcactctggttacaagccctgttcttcctctcccactgaattctaaatccttaacatccaggccctggctgcttcatgccagaggcccaaatccatggactgaaggagatgccccttctactacttgagactttattctctgggtccagctccataccctaaattctgagtttcagccactgaactccaaggtccacttctcaccagcaaggaagagtggggtatggaagtcatctgtcccttcactgtttagagcatgacactctccccctcaacagcctcctgagaaggaaaggatctgccctgaccactcccctggcactgttacttgcctctgcgcctcaggggtccccttctgcaccgctggcttccactccaagaaggtggaccagggtctgcaagttcaacggtcatagctgtccctccaggccccaaccttgcctcaccactcccggccctagtctctgcacctccttaggccctgcctctgggctcagaccccaacctagtcaaggggattctcctgctcttaactcgatgacttggggctccctgctctcccgaggaagatgctctgcaggaaaataaaagtcagcctttttctacaaaaaaaaaaaaaaa

SEQ ID NO: 1443 - protein, 262 aa, Homo sapiens
MAPALLLIPAALASFILAFGTGVEFVRFTSLRPLLGGIPESGGPDARQGWLAALQDRSILAPLAWDLGLLLLFVGQHSLMAAERVKAWTSRYFGVLQRSLYVACTALALQLVMRYWEPIPKGPVLWEARAEPWATWVPLLCFVLHVISWLLIFSILLVFDYAELMGLKQVYYHVLGLGEPLALKSPRALRLFSHLRHPVCVELLTVLWVVPTLGTDRLLLAFLLTLYLGLAHGLDQQDLRYLRAQLQRKLHLLSRPQDGEAE

SEQ ID NO: 1444 - DNA, 6940 bp, Homo sapiens
cttaaagtagatcatggaggacacccaggctattgactgggatgttgaagaagaggaggagacagagcaatccagtgaatccttgaggtgtaacgtggagccagtagggcggctacatatctttagtggtgcccatggaccagaaaaagatttcccactacacctcgggaagaatgtggtaggccgaatgcctgactgctctgtggccctgccctttccatctatctccaaacaacatgcagagattgaaatcttagcctgggacaaggcacctatcctccgagactgtgggagccttaatggtactcaaatcctgagacctcctaaggttttgagccctggggtgagtcaccgtctgagggaccaggaattgattctctttgctgacttgctctgccagtaccatcgcctggatgtctctctgccctttgtctcccggggccctctgacagtagaagagacacccagagtacagggagaaactcaaccccagaggcttctgttggctgaggactcggaggaggaagtagattttctttctgaaaggcgtatggtaaaaaaatcaaggaccacatcttcctctgtgatagttccagagagtgatgaagaggggcattccccggtcctgggcggccttgggccgccttttgccttcaatttgaacagtgacacagatgtggaagaaggtcagcaaccagccacagaggaggcctcctcagctgccagaagaggtgccactgtagaggcaaagcagtctgaagctgaagttgtaactgaaatccagcttgaaaaggatcagcctttagtgaaggagagggacaatgatacaaaagtcaagaggggtgcagggaatggggtggttccagctggggtgattctggagaggagccaacctcctggagaggacagtgacacagatgtggatgatgacagcaggcctcctggaaggccagctgaggtccatttggaaagggctcagccttttggcttcatcgacagcgacactgatgcggaagaagagaggatcccagcaaccccagttgtcattcctatgaagaagaggaagatcttccatggagtaggtacaaggggtcctggagcaccaggcctggcccatctgcaggagagccaggctggtagtgatacagatgtggaagaaggcaaggccccacaggctgtccctctggagaaaagccaagcttccatggttatcaacagcgatacagatgacgaggaagaagtctcagcagcgctgactttggcacatctgaaagagagccagcctgctatatggaacagagatgcagaagaggacatgccccaacgtgtggtccttctgcagcgaagccaaaccaccactgagagagacagtgacacagacgtggaggaggaagagctcccagtggaaaatagagaagctgtcctcaaggatcacacaaagattagagcccttgttagagcacattcagaaaaggaccaacctccttttggggacagtgatgacagtgtggaagcagataagagctcacctgggatccacctggagagaagccaagcctccaccacagtggacatcaacacacaagtggagaaggaagtcccgccagggtcagccattatgcatataaagaagcatcaggtgtctgtggaggggacaaatcaaacagatgtgaaagcagttgggggaccagcaaagctgcttgtggtatctctagaggaagcctggcctctgcatggggactgtgaaacagatgcagaggagggcacctccctaacagcctcagtagttgcagatgtaagaaagagccagcttccagcagaaggggatgctggggcagagtgggctgcagctgttcttaagcaggagagagctcatgaggtgggggcccagggtgggccacctgtggcacaagtggagcaggacctccctatctcaagagagaacctcacagatctggtggtggacacagacactctaggggaatccacccagccacagagagagggagcccaggtccccacaggaagggagagagaacaacatgtgggtgggaccaaggactctgaagacaactatggtgattctgaagatctggacctacaagctacccagtgctttctggagaatcagggcctggaagcagtccagagcatggaggatgaacctacccaggccttcatgttgactccaccccaagagcttggcccttcccattgcagcttccagacaacaggtaccctagatgaaccatgggaggtcctggctacacagccattctgtctgagagagtctgaggactctgagacccagccttttgacacgcaccttgaggcctatggaccttgcctgtctccacctagggcaataccaggagaccaacatccagagagcccagttcacacagagccaatggggattcaaggcagagggaggcagactgtggataaagtcatgggtataccaaaagaaacagcagagagggtgggccctgagagagggccattggagagagaaactgagaaactgctaccagaaagacagacagatgtgacaggagaggaagaattaaccaaggggaaacaggacagagaacaaaaacagttgttagctagagacacccagagacaagaatctgacaaaaatggggaaagtgcaagtcctgaaagagatagggagagtttgaaggtagaaattgagacatctgaggaaatacaagagaaacaagtacagaagcagacccttccaagcaaagcatttgagagagaagtagagagaccagtagcaaacagagagtgcgatccagccgagttagaagagaaggtgcccaaagtgatcctggagagagatacacagagaggggagccagagggagggagccaggaccagaaagggcaggcctccagcccaacaccagagcctggggtgggggcgggggaccttccgggacctacctcagcccccgtaccttctgggagccagtcaggtggaaggggatccccagtgagccccaggaggcatcagaaaggcctcctgaattgcaagatgccacctgctgagaaggcttccaggatcagagctgctgagaaggtttccaggggcgatcaggaatctccagatgcttgtctgcctcctgcagtacctgaagccccagccccaccccaaaagccccttaactctcagagccagaaacatcttgcacctccgccccttctttctccccttttaccttctatcaagccaaccgttcgtaagaccaggcaagatgggagtcaggaagctccagaggctcccttgtcctcagagctggagcctttccacccaaagcctaaaattagaactcggaagtcctccagaatgacaccctttccagctacctctgctgcccctgagccccacccttccacctccacagcccagccagtcactcccaagcccacatctcaggccactaggagcaggacaaataggtcctctgtcaagacccctgaaccagttgtccccacagcccctgagctccagccttccacctccacagaccagcctgtcacctctgagcccacatctcaggttactaggggaagaaaaagtagatcctctgtcaagacccctgaaacagttgtgcccacagcccttgagctccagccttccacctccaccgaccgacctgtcacctctgaacccacctctcaggctactaggggaagaaaaaatagatcctctgtcaagacccctgaaccagttgtccccacagcccctgagctccagccttccacctccacagaccagcctgtcacttctgagcccacatatcaggctactaggggaagaaaaaatagatcctctgtcaagacccctgaaccagttgtgcccacagcccctgagctccggccttccacctccacagaccgacctgtcacccccaagcccacatctcggaccactaggagcaggacaaatatgtcctctgtcaagacccctgaaacagttgtccccacagcccctgagctccagatttccacctccacagaccaacctgtcacccctaagcccacatctcggaccactaggagcaggacaaatatgtcctctgtgaagaaccctgaatcaactgtccctatagcccctgagctcccaccttccacctccacagagcagcctgtcacccctgagcccacatctcgggctactaggggaagaaaaaatagatcctctggcaagacccctgaaacacttgtccccacagcccctaagctcgagccttccacttccacagaccaacctgtcactcctgagcccacatctcaggccaccaggggcaggacaaataggtcctctgtgaagacccctgaaacagttgtccccacagcccctgagctccagccttccacctccacagaccagcctgttacccctgagcctacgtctcaggctactaggggaagaacagatagatcctctgtcaagactcctgaaacagttgtccccacagcccctgagctacaggcttccgcctccacagaccagcctgtcacctctgagcccacatctcggaccactaggggaagaaaaaatcggtcctctgtcaagacccctgaaacagttgtgcccgcagcccctgagctccagcctcccacctccacagaccgacctgtcacccctgagcccacatctcgggccactaggggcaggacaaataggtcctctgtcaagacccctgaatcaattgtccctatagcccctgagcttcagccttccacctccagaaaccagcttgtcacccctgagcccacatctcgggccactaggtgcaggacaaataggtcctctgtcaagacccctgagccagttgtccccacagcccctgagccccatcctaccacctccacagaccagcctgtcacccccaagctcacatctagggccactaggagaaagacaaataggtcctctgtcaagactcccaaaccagttgaaccagcagcctctgatcttgagccttttacccccacagaccagtccgtcacccctgaggccatagctcagggtggtcagagcaaaacactgaggtcttccacagtaagagctatgccggttcctaccacccctgaattccaatctcctgtcaccacagaccagcctatttcccctgagcctattactcaacccagttgcatcaagaggcagagagccgctgggaaccctggctccctcgcagctcccattgaccataagccttgctctgcacccttggaacctaaatcccaggcctcaaggaaccaaagatggggagcagtgagagcagctgaatcccttacagccattcctgagcctgcctctccccagcttcttgagacaccaattcatgcctcccagatccaaaaggtggaaccagcaggtagatctaggttcaccccggagctccagcctaaggcctctcaaagccgcaagaggtctttagctaccatggattcaccaccacatcaaaaacagccccaaagaggggaagtctcccagaagacagtgattatcaaggaagaggaagaagatactgcagagaagccagggaaggaagaggatgtcgtgactccaaaaccaggcaagagaaagagagaccaggcagaggaggagcccaacagaataccaagccgcagcctccgacggaccaaacttaaccaagaatcaacagcccccaaagtgctcttcacaggagtggtggatgctcggggagagcgggctgtgctggcactggggggaagtctggctggttcagcggcagaggcttcccacctggtcactgatcgcatccgccggacagtcaagttcctgtgtgccctggggcggggaatccccattctgtccctggactggctgcatcagtcccgcaaggctggtttcttcttacccccggatgaatatgtggtgaccgaccctgagcaagagaagaactttggctttagccttcaagacgcactgagcagggctcgggagcgaaggctgctagagggctatgagatctatgtgacccctggagtccagccaccaccacctcagatgggagagattattagctgctgtggaggcacatacctacccagcatgcctcggtcctataagcctcagagagttgtgatcacatgccctcaggacttccctcattgctccattccactacgggttgggctgcccctcctctcgcctgagttcctgctgactggagtgctgaagcaggaagccaagccagaggcctttgtcctctcccctttggagatgtcatccacctgagaactccactacccttttccctcccagaccacgaattagaagatatgtggaagaaagaactcagggcgttagaaaggattggggtatattgatacaacttgtcctggaacatgggtgggaccagaaatctttatgaataaatgaaaagataagggatttggaagccacaggttgttttttgtttgtttgtttgtttttttaatggccattttattttatttgtatttatagttttttatttgtatagatttaggggatacaagatttcttacatgcatgtattaaatggccattttaaaattagctagtttcatgctcagatgtcataagtggcagctatctttagccagactgttgcagttattgctcgatgccactcatggtgtcctacctcctatttggaaaccatctctatttttttcttactgagattcttactttggggtcaggaacttgaagggatgcttggagtgagtagatttgagggtccagttatggagtgctactaaaacattttcttctctcctggcctctggaagcatctttagctttgactttgggcaagtctctgtacttttctggccagcttttccaggatttataaaattagagcttcggcttgacctctgtgataaataaatattcactctgtgcctt

SEQ ID NO: 1445 - protein, 2089 aa, Homo sapiens
MEDTQAIDWDVEEEEETEQSSESLRCNVEPVGRLHIFSGAHGPEKDFPLHLGKNVVGRMPDCSVALPFPSISKQHAEIEILAWDKAPILRDCGSLNGTQILRPPKVLSPGVSHRLRDQELILFADLLCQYHRLDVSLPFVSRGPLTVEETPRVQGETQPQRLLLAEDSEEEVDFLSERRMVKKSRTTSSSVIVPESDEEGHSPVLGGLGPPFAFNLNSDTDVEEGQQPATEEASSAARRGATVEAKQSEAEVVTEIQLEKDQPLVKERDNDTKVKRGAGNGVVPAGVILERSQPPGEDSDTDVDDDSRPPGRPAEVHLERAQPFGFIDSDTDAEEERIPATPVVIPMKKRKIFHGVGTRGPGAPGLAHLQESQAGSDTDVEEGKAPQAVPLEKSQASMVINSDTDDEEEVSAALTLAHLKESQPAIWNRDAEEDMPQRVVLLQRSQTTTERDSDTDVEEEELPVENREAVLKDHTKIRALVRAHSEKDQPPFGDSDDSVEADKSSPGIHLERSQASTTVDINTQVEKEVPPGSAIMHIKKHQVSVEGTNQTDVKAVGGPAKLLVVSLEEAWPLHGDCETDAEEGTSLTASVVADVRKSQLPAEGDAGAEWAAAVLKQERAHEVGAQGGPPVAQVEQDLPISRENLTDLVVDTDTLGESTQPQREGAQVPTGREREQHVGGTKDSEDNYGDSEDLDLQATQCFLENQGLEAVQSMEDEPTQAFMLTPPQELGPSHCSFQTTGTLDEPWEVLATQPFCLRESEDSETQPFDTHLEAYGPCLSPPRAIPGDQHPESPVHTEPMGIQGRGRQTVDKVMGIPKETAERVGPERGPLERETEKLLPERQTDVTGEEELTKGKQDREQKQLLARDTQRQESDKNGESASPERDRESLKVEIETSEEIQEKQVQKQTLPSKAFEREVERPVANRECDPAELEEKVPKVILERDTQRGEPEGGSQDQKGQASSPTPEPGVGAGDLPGPTSAPVPSGSQSGGRGSPVSPRRHQKGLLNCKMPPAEKASRIRAAEKVSRGDQESPDACLPPAVPEAPAPPQKPLNSQSQKHLAPPPLLSPLLPSIKPTVRKTRQDGSQEAPEAPLSSELEPFHPKPKIRTRKSSRMTPFPATSAAPEPHPSTSTAQPVTPKPTSQATRSRTNRSSVKTPEPVVPTAPELQPSTSTDQPVTSEPTSQVTRGRKSRSSVKTPETVVPTALELQPSTSTDRPVTSEPTSQATRGRKNRSSVKTPEPVVPTAPELQPSTSTDQPVTSEPTYQATRGRKNRSSVKTPEPVVPTAPELRPSTSTDRPVTPKPTSRTTRSRTNMSSVKTPETVVPTAPELQISTSTDQPVTPKPTSRTTRSRTNMSSVKNPESTVPIAPELPPSTSTEQPVTPEPTSRATRGRKNRSSGKTPETLVPTAPKLEPSTSTDQPVTPEPTSQATRGRTNRSSVKTPETVVPTAPELQPSTSTDQPVTPEPTSQATRGRTDRSSVKTPETVVPTAPELQASASTDQPVTSEPTSRTTRGRKNRSSVKTPETVVPAAPELQPPTSTDRPVTPEPTSRATRGRTNRSSVKTPESIVPIAPELQPSTSRNQLVTPEPTSRATRCRTNRSSVKTPEPVVPTAPEPHPTTSTDQPVTPKLTSRATRRKTNRSSVKTPKPVEPAASDLEPFTPTDQSVTPEAIAQGGQSKTLRSSTVRAMPVPTTPEFQSPVTTDQPISPEPITQPSCIKRQRAAGNPGSLAAPIDHKPCSAPLEPKSQASRNQRWGAVRAAESLTAIPEPASPQLLETPIHASQIQKVEPAGRSRFTPELQPKASQSRKRSLATMDSPPHQKQPQRGEVSQKTVIIKEEEEDTAEKPGKEEDVVTPKPGKRKRDQAEEEPNRIPSRSLRRTKLNQESTAPKVLFTGVVDARGERAVLALGGSLAGSAAEASHLVTDRIRRTVKFLCALGRGIPILSLDWLHQSRKAGFFLPPDEYVVTDPEQEKNFGFSLQDALSRARERRLLEGYEIYVTPGVQPPPPQMGEIISCCGGTYLPSMPRSYKPQRVVITCPQDFPHCSIPLRVGLPLLSPEFLLTGVLKQEAKPEAFVLSPLEMSST

SEQ ID NO: 1446 - DNA, 2510 bp, Homo sapiens
gcacctcgctgctccagcctctggggcgcattccaaccttccagcctgcgacctgcggagaaaaaaaattacttattttcttgccccatacataccttgaggcgagcaaaaaaattaaattttaaccatgagggaaatcgtgcacatccaggctggtcagtgtggcaaccagatcggtgccaagttctgggaggtgatcagtgatgaacatggcatcgaccccaccggcacctaccacggggacagcgacctgcagctggaccgcatctctgtgtactacaatgaagccacaggtggcaaatatgttcctcgtgccatcctggtggatctagaacctgggaccatggactctgttcgctcaggtccttttggccagatctttagaccagacaactttgtatttggtcagtctggggcaggtaacaactgggccaaaggccactacacagagggcgccgagctggttgattctgtcctggatgtggtacggaaggaggcagagagctgtgactgcctgcagggcttccagctgacccactcactgggcgggggcacaggctctggaatgggcactctccttatcagcaagatccgagaagaataccctgatcgcatcatgaataccttcagtgtggtgccttcacccaaagtgtctgacaccgtggtcgagccctacaatgccaccctctccgtccatcagttggtagagaatactgatgagacctattgcattgacaacgaggccctctatgatatctgcttccgcactctgaagctgaccacaccaacctacggggatctgaaccaccttgtctcagccaccatgagtggtgtcaccacctgcctccgtttccctggccagctcaatgctgacctccgcaagttggcagtcaacatggtccccttcccacgtctccatttctttatgcctggctttgcccctctcaccagccgtggaagccagcagtatcgagctctcacagtgccggaactcacccagcaggtcttcgatgccaagaacatgatggctgcctgtgacccccgccacggccgatacctcaccgtggctgctgtcttccgtggtcggatgtccatgaaggaggtcgatgagcagatgcttaacgtgcagaacaagaacagcagctactttgtggaatggatccccaacaatgtcaagacagccgtctgtgacatcccacctcgtggcctcaagatggcagtcaccttcattggcaatagcacagccatccaggagctcttcaagcgcatctcggagcagttcactgccatgttccgccggaaggccttcctccactggtacacaggcgagggcatggacgagatggagttcaccgaggctgagagcaacatgaacgacctcgtctctgagtatcagcagtaccaggatgccaccgcagaagaggaggaggatttcggtgaggaggccgaagaggaggcctaaggcagagcccccatcacctcaggcttctcagttcccttagccgtcttactcaactgcccctttcctctccctcagaatttgtgtttgctgcctctatcttgttttttgttttttcttctggggggggtctagaacagtgcctggcacatagtaggcgctcaataaatacttgtttgttgaatgtctcctctctctttccactctgggaaacctaggtttctgccattctgggtgaccctgtatttctttctggtgcccattccatttgtccagttaatacttcctcttaaaaatctccaagaagctgggtctccagatcccatttagaaccaaccaggtgctgaaaacacatgtagataatggccatcatcctaagcccaaagtagaaaatggtagaaggtagtgggtagaagtcactatataaggaaggggatgggattttccattctaaaagttttggagagggaaatccaggctattaaagtcactaaatttctaagtatgtccatttcccatctcagcttcaagggaggtgtcagcagtattatctccactttcaatctccctccaagctctactctggaggagtctgtcccactctgtcaagtggaatccttccctttccaactctacctccctcactcagctcctttcccctgatcagagaaagggatcaagggggttgggaggggggaaagagaccagccttggtccctaagcctccagaaacgtcttcttaatccccaccttttcttactcccaaaaaagaatgaacacccctgactctggagtggtgtatactgccacatcagtgtttgagtcagtccccagaggagaggggaaccctcctccatcttttttgcaacatctcatttcttccttttgctgttgcttcccccctcacacacttggttttgttctatcctacatttgagatttctattttatgttgaacttgctgctttttttcatattgaaaagatgacatcgccccaagagccaaaaataaatgggaattgaaaaaaaaaaaaaaaaaaaaaaaaaaaaa

SEQ ID NO: 1447 - protein, 444 aa, Homo sapiens
MREIVHIQAGQCGNQIGAKFWEVISDEHGIDPTGTYHGDSDLQLDRISVYYNEATGGKYVPRAILVDLEPGTMDSVRSGPFGQIFRPDNFVFGQSGAGNNWAKGHYTEGAELVDSVLDVVRKEAESCDCLQGFQLTHSLGGGTGSGMGTLLISKIREEYPDRIMNTFSVVPSPKVSDTVVEPYNATLSVHQLVENTDETYCIDNEALYDICFRTLKLTTPTYGDLNHLVSATMSGVTTCLRFPGQLNADLRKLAVNMVPFPRLHFFMPGFAPLTSRGSQQYRALTVPELTQQVFDAKNMMAACDPRHGRYLTVAAVFRGRMSMKEVDEQMLNVQNKNSSYFVEWIPNNVKTAVCDIPPRGLKMAVTFIGNSTAIQELFKRISEQFTAMFRRKAFLHWYTGEGMDEMEFTEAESNMNDLVSEYQQYQDATAEEEEDFGEEAEEEA

SEQ ID NO: 1448 - DNA, 1839 bp, Homo sapiens
agcaacggggtgcggcagggtggggaacgcgggagcggggccagctcccaggaaagctggtctgcgagcggcccctgcccggctcccaggtccctgcgcgaccccgcccttcccgagaccccagccgggctgccgcccgcgtcccggaagctccagcctgaaccatgtttttcacttgtggcccaaatgaggccatggtggtctccgggttctgccgaagccccccagtcatggtggctggagggcgtgtctttgtcctgccctgcatccaacagatccagaggatctctctcaacacactgaccctcaatgtcaagagtgaaaaggtttacactcgccatggggtccccatctcagtcactggcattgcccaggtaaaaatccaggggcagaacaaggagatgttggcggccgcctgtcagatgttcctggggaagacggaggctgagattgcccacattgccctggagacgttagagggccaccagagggccatcatggcccacatgactgtggaggagatctataaggacaggcagaaattctcagaacaggttttcaaagtggcctcctcagacctggtcaacatgggcatcagtgtggttagctacactctgaaggacattcacgatgaccaggactatttgcactctttggggaaggctcgaacagctcaagtccaaaaagatgcacggattggagaagcagaggccaagagagatgctgggatccgggaagctaaagccaagcaggaaaaggtgtctgctcagtacctgagtgagatcgagatggccaaggcacagagagattacgaactgaagaaggccgcctatgacatcgaggtcaacacccgccgagcacaggctgacctggcctatcagcttcaggtggccaagactaagcagcagattgaggagcagcgggtgcaggtgcaggtggtggagcgggcccagcaggtggcagtgcaggagcaggagatcgcccggcgggagaaggagctggaggcccgggtgcggaagccagcggaagcggagcgctacaagctggagcgcctagccgaggcagagaagtcccaactaattatgcaggcggaggcagaagccgcgtctgtgcggatgcgtggggaagctgaggcctttgccataggggcccgagcccgagccgaggctgagcagatggccaagaaggcagaagccttccagctgtaccaagaggctgctcagctggacatgctgctagagaagctgccccaggtggcagaggagatcagtggtcccttgacttcagccaataagatcacactggtgtccagcggcagtgggaccatgggggcagccaaagtgactggggaagtactggacattctaactcgcctgccagagagtgtggaaagactcacaggcgtgagcatctcccaggtgaatcacaagcctttgagaacagcctgagccttcagccctcacagatgcccagcctcatagctgaagttgcctgaatgatcctcctgttgcatgtaacccactggcctccctgagcatgtccattgacagtgaggtcccacccctcatctctccttgccaaatagtttgtgccttgtcttgaagggggttgctccccttgccaacctcacactgctatgattgccaactccagcggtcccatgtcagccttctgatgatcccactccaccccacctcaacttatttaacttcctaattaaatcagactgtttgagcctgttgtctagaatattttcctgaccaagactgagggatgggctggaggttttcaactttgctacccaaataaattgctgtaagtaagtactaaaaaaaaaaa

SEQ ID NO: 1449 - protein, 427 aa, Homo sapiens
MFFTCGPNEAMVVSGFCRSPPVMVAGGRVFVLPCIQQIQRISLNTLTLNVKSEKVYTRHGVPISVTGIAQVKIQGQNKEMLAAACQMFLGKTEAEIAHIALETLEGHQRAIMAHMTVEEIYKDRQKFSEQVFKVASSDLVNMGISVVSYTLKDIHDDQDYLHSLGKARTAQVQKDARIGEAEAKRDAGIREAKAKQEKVSAQYLSEIEMAKAQRDYELKKAAYDIEVNTRRAQADLAYQLQVAKTKQQIEEQRVQVQVVERAQQVAVQEQEIARREKELEARVRKPAEAERYKLERLAEAEKSQLIMQAEAEAASVRMRGEAEAFAIGARARAEAEQMAKKAEAFQLYQEAAQLDMLLEKLPQVAEEISGPLTSANKITLVSSGSGTMGAAKVTGEVLDILTRLPESVERLTGVSISQVNHKPLRTA

SEQ ID NO: 1450 - DNA, 1236 bp, Homo sapiens
acttggccttacactccgctcggctcaccatgtgtcactctcgcagctgccacccgaccatgaccatcctgcaggccccgaccccggccccctccaccatcccgggaccccggcggggctccggtcctgagatcttcaccttcgaccctctcccggagcccgcagcggcccctgccgggcgccccagcgcctctcgcgggcaccgaaagcgcagccgcagggttctctaccctcgagtggtccggcgccagctgccagtcgaggaaccgaacccagccaaaaggcttctctttctgctgctcaccatcgtcttctgccagatcctgatggctgaagagggtgtgccggcgcccctgcctccagaggacgcccctaacgccgcatccctggcgcccacccctgtgtcccccgtcctcgagccctttaatctgacttcggagccctcggactacgctctggacctcagcactttcctccagcaacacccggccgccttctaactgtgactccccgcactccccaaaaagaatccgaaaaaccacaaagaaacaccaggcgtacctggtgcgcgagagcgtatccccaactgggacttccgaggcaacttgaactcagaacactacagcggagacgccacccggtgcttgaggcgggaccgaggcgcacagagaccgaggcgcatagagaccgaggcacagcccagctggggctaggcccggtgggaaggagagcgtcgttaatttatttcttattgctcctaattaatatttatatgtatttatgtacgtcctcctaggtgatggagatgtgtacgtaatatttattttaacttatgcaagggtgtgagatgttccccctgctgtaaatgcaggtctcttggtatttattgagctttgtgggactggtggaagcaggacacctggaactgcggcaaagtaggagaagaaatggggaggactcgggtgggggaggacgtcccggctgggatgaagtctggtggtgggtcgtaagtttaggaggtgactgcatcctccagcatctcaactccgtctgtctactgtgtgagacttcggcggaccattaggaatgagatccgtgagatccttccatcttcttgaagtcgcctttagggtggctacgaggtagaggggtgggggttggtgggctgtcacggagcgactgtcgagatcgcctagtatgttctgtgaacacaaataaaattgatttactgtctgc

SEQ ID NO: 1451 - protein, 156 aa, Homo sapiens
MCHSRSCHPTMTILQAPTPAPSTIPGPRRGSGPEIFTFDPLPEPAAAPAGRPSASRGHRKRSRRVLYPRVVRRQLPVEEPNPAKRLLFLLLTIVFCQILMAEEGVPAPLPPEDAPNAASLAPTPVSPVLEPFNLTSEPSDYALDLSTFLQQHPAAF

SEQ ID NO: 1452 - DNA, 1345 bp, Homo sapiens
acttggccttacactccgctcggctcaccatgtgtcactctcgcagctgccacccgaccatgaccatcctgcaggccccgaccccggccccctccaccatcccgggaccccggcggggctccggtcctgagatcttcaccttcgaccctctcccggagcccgcagcggcccctgccgggcgccccagcgcctctcgcgggcaccgaaagcgcagccgcagggtctctctaccctcgagtggtgagtatcgccgaagtgggcattcgcggtgtgcgctgccctggagtcactggggaacgacccgactccagagcctcgacctgacctgtctcctgttttgtctccccttagtccggcgccagctgccagtcgaggaaccgaacccagccaaaaggcttctctttctgctgctcaccatcgtcttctgccagatcctgatggctgaagagggtgtgccggcgcccctgcctccagaggacgcccctaacgccgcatccctggcgcccacccctgtgtcccccgtcctcgagccctttaatctgacttcggagccctcggactacgctctggacctcagcactttcctccagcaacacccggccgccttctaactgtgactccccgcactccccaaaaagaatccgaaaaaccacaaagaaacaccaggcgtacctggtgcgcgagagcgtatccccaactgggacttccgaggcaacttgaactcagaacactacagcggagacgccacccggtgcttgaggcgggaccgaggcgcacagagaccgaggcgcatagagaccgaggcacagcccagctgggctaggccggtgggaaggagagcgtcgttaatttatttcttattgctcctaattaatatttatatgtatttatgtacgtcctcctaggtgatggagatgtgtacgtaatatttattttaacttatgcaagggtgtgagatgttccctctgctgtaaatgcaggtctcttggtatttattgagctttgtgggactggtggaagcaggacacctggaactgcggcaaagtaggagaagaaatggggaggactcgggtgggggaggacgtcccggctgggatgaagtctggtggtgggtcgtaagtttaggaggtgactgcatcctccagcatctcaactccgtctgtctactgtgtgagacttcggcggaccattaggaatgagatccgtgagatccttccatcttcttgaagtcgcctttagggtggctgcgaggtagagggttgggggttggtgggctgtcacggagcgactgtcgagatcgcctagtatgttctgtgaacacaaataaaattgatttactgtctgc

SEQ ID NO: 1453 - protein, 193 aa, Homo sapiens
MCHSRSCHPTMTILQAPTPAPSTIPGPRRGSGPEIFTFDPLPEPAAAPAGRPSASRGHRKRSRRVSLPSSGEYRRSGHSRCALPWSHWGTTRLQSLDLTCLLFCLPLVRRQLPVEEPNPAKRLLFLLLTIVFCQILMAEEGVPAPLPPEDAPNAASLAPTPVSPVLEPFNLTSEPSDYALDLSTFLQQHPAAF

SEQ ID NO: 1454 - DNA, 3840 bp, Homo sapiens
gtcttcccctcgtgggccctgagcgggactgcagccagccccctggggcgccagctttggaggcccccgacagctgctctcgggagccgcctcccgacacccgagccccgccggcgcctcccgctcccggctcccggctcctggctccctccgcctcccccgcccctcgccccgccgccgaagaggccccgctcccgggtcggacgcctgggtctgccgggaagagcgatgagaggtgtctgaaggtggctattcactgagcgatggggttggacttgaaggaatgccaagagatgctgcccccacccccttaggcccgagggatcaggagctatgggaccagaggccctgtcatctttactgctgctgctcttggtggcaagtggagatgctgacatgaagggacattttgatcctgccaagtgccgctatgccctgggcatgcaggaccggaccatcccagacagtgacatctctgcttccagctcctggtcagattccactgccgcccgccacagcaggttggagagcagtgacggggatggggcctggtgccccgcagggtcggtgtttcccaaggaggaggagtacttgcaggtggatctacaacgactgcacctggtggctctggtgggcacccagggacggcatgccgggggcctgggcaaggagttctcccggagctaccggctgcgttactcccgggatggtcgccgctggatgggctggaaggaccgctggggtcaggaggtgatctcaggcaatgaggaccctgagggagtggtgctgaaggaccttgggccccccatggttgcccgactggttcgcttctacccccgggctgaccgggtcatgagcgtctgtctgcgggtagagctctatggctgcctctggagggatggactcctgtcttacactgcccctgtggggcagacaatgtatttatctgaggccgtgtacctcaacgactccacctatgacggacataccgtgggcggactgcagtatgggggtctgggccagctggcagatggtgtggtggggctggatgactttaggaagagtcaggagctgcgggtctggccaggctatgactatgtgggatggagcaaccacagcttctccagtggctatgtggagatggagtttgagtttgaccggctgagggccttccaggctatgcaggtccactgtaacaacatgcacacgctgggagcccgtctgcctggcggggtggaatgtcgcttccggcgtggccctgccatggcctgggagggggagcccatgcgccacaacctagggggcaacctgggggaccccagagcccgggctgtctcagtgccccttggcggccgtgtggctcgctttctgcagtgccgcttcctctttgcggggccctggttactcttcagcgaaatctccttcatctctgatgtggtgaacaattcctctccggcactgggaggcaccttcccgccagccccctggtggccgcctggcccacctcccaccaacttcagcagcttggagctggagcccagaggccagcagcccgtggccaaggccgaggggagcccgaccgccatcctcatcggctgcctggtggccatcatcctgctcctgctgctcatcattgccctcatgctctggcggctgcactggcgcaggctcctcagcaaggctgaacggagggtgttggaagaggagctgacggttcacctctctgtccctggggacactatcctcatcaacaaccgcccaggtcctagagagccacccccgtaccaggagccccggcctcgtgggaatccgccccactccgctccctgtgtccccaatggctctgcctacagtggggactatatggagcctgagaagccaggcgccccgcttctgcccccacctccccagaacagcgtcccccattatgccgaggctgacattgttaccctgcagggcgtcaccgggggcaacacctatgctgtgcctgcactgcccccaggggcagtcggggatgggccccccagagtggatttccctcgatctcgactccgcttcaaggagaagcttggcgagggccagtttggggaggtgcacctgtgtgaggtcgacagccctcaagatctggttagtcttgatttcccccttaatgtgcgtaagggacaccctttgctggtagctgtcaagatcttacggccagatgccaccaagaatgccaggaatgatttcctgaaagaggtgaagatcatgtcgaggctcaaggacccaaacatcattcggctgctgggcgtgtgtgtgcaggacgaccccctctgcatgattactgactacatggagaacggcgacctcaaccagttcctcagtgcccaccagctggaggacaaggcagccgagggggcccctggggacgggcaggctgcgcaggggcccaccatcagctacccaatgctgctgcatgtggcagcccagatcgcctccggcatgcgctatctggccacactcaactttgtacatcgggacctggccacgcggaactgcctagttggggaaaatttcaccatcaaaatcgcagactttggcatgagccggaacctctatgctggggactattaccgtgtgcagggccgggcagtgctgcccatccgctggatggcctgggagtgcatcctcatggggaagttcacgactgcgagtgacgtgtgggcctttggtgtgaccctgtgggaggtgctgatgctctgtagggcccagccctttgggcagctcaccgacgagcaggtcatcgagaacgcgggggagttcttccgggaccagggccggcaggtgtacctgtcccggccgcctgcctgcccgcagggcctatatgagctgatgcttcggtgctggagccgggagtctgagcagcgaccacccttttcccagctgcatcggttcctggcagaggatgcactcaacacggtgtgaatcacacatccagctgcccctccctcagggagcgatccaggggaagccagtgacactaaaacaagaggacacaatggcacctctgcccttcccctcccgacagcccatcacctctaatagaggcagtgagactgcaggtgggctgggcccacccagggagctgatgccccttctccccttcctggacacactctcatgtccccttcctgttcttccttcctagaagcccctgtcgcccacccagctggtcctgtggatgggatcctctccaccctcctctagccatcccttggggaagggtggggagaaatataggatagacactggacatggcccattggagcacctgggccccactggacaacactgattcctggagaggtggctgcgcccccagcttctctctccctgtcacacactggaccccactggctgagaatctgggggtgaggaggacaagaaggagaggaaaatgtttccttgtgcctgctcctgtacttgtcctcagcttgggcttcttcctcctccatcacctgaaacactggacctgggggtagccccgccccagccctcagtcacccccacttcccacttgcagtcttgtagctagaacttctctaagcctatacgtttctgtggagtaaatattgggattggggggaaagagggagcaacggcccatagccttggggttggacatctctagtgtagctgccacattgatttttctataatcacttggggtttgtacatttttggggggagagacacagatttttacactaatatatggacctagcttgaggcaattttaatcccctgcactaggcaggtaataataaaggttgagttttccacaaaaaaaaaaaaaaaaaa

SEQ ID NO: 1455 - protein, 876 aa, Homo sapiens
MGPEALSSLLLLLLVASGDADMKGHFDPAKCRYALGMQDRTIPDSDISASSSWSDSTAARHSRLESSDGDGAWCPAGSVFPKEEEYLQVDLQRLHLVALVGTQGRHAGGLGKEFSRSYRLRYSRDGRRWMGWKDRWGQEVISGNEDPEGVVLKDLGPPMVARLVRFYPRADRVMSVCLRVELYGCLWRDGLLSYTAPVGQTMYLSEAVYLNDSTYDGHTVGGLQYGGLGQLADGVVGLDDFRKSQELRVWPGYDYVGWSNHSFSSGYVEMEFEFDRLRAFQAMQVHCNNMHTLGARLPGGVECRFRRGPAMAWEGEPMRHNLGGNLGDPRARAVSVPLGGRVARFLQCRFLFAGPWLLFSEISFISDVVNNSSPALGGTFPPAPWWPPGPPPTNFSSLELEPRGQQPVAKAEGSPTAILIGCLVAIILLLLLIIALMLWRLHWRRLLSKAERRVLEEELTVHLSVPGDTILINNRPGPREPPPYQEPRPRGNPPHSAPCVPNGSAYSGDYMEPEKPGAPLLPPPPQNSVPHYAEADIVTLQGVTGGNTYAVPALPPGAVGDGPPRVDFPRSRLRFKEKLGEGQFGEVHLCEVDSPQDLVSLDFPLNVRKGHPLLVAVKILRPDATKNARNDFLKEVKIMSRLKDPNIIRLLGVCVQDDPLCMITDYMENGDLNQFLSAHQLEDKAAEGAPGDGQAAQGPTISYPMLLHVAAQIASGMRYLATLNFVHRDLATRNCLVGENFTIKIADFGMSRNLYAGDYYRVQGRAVLPIRWMAWECILMGKFTTASDVWAFGVTLWEVLMLCRAQPFGQLTDEQVIENAGEFFRDQGRQVYLSRPPACPQGLYELMLRCWSRESEQRPPFSQLHRFLAEDALNTV

SEQ ID NO: 1456 - DNA, 3877 bp, Homo sapiens
tgctctcgggagccgcctcccgacacccgagccccgccggcgcctcccgctcccggctcccggctcctggctccctccgcctcccccgcccctcgccccgccgccgaagaggccccgctcccgggtcggacgcctgggtctgccgggaagagcgatgagaggtgtctgaaggtggctattcactgagcgatggggttggacttgaaggaatgccaagagatgctgcccccacccccttaggcccgagggatcaggagctatgggaccagaggccctgtcatctttactgctgctgctcttggtggcaagtggagatgctgacatgaagggacattttgatcctgccaagtgccgctatgccctgggcatgcaggaccggaccatcccagacagtgacatctctgcttccagctcctggtcagattccactgccgcccgccacagcaggttggagagcagtgacggggatggggcctggtgccccgcagggtcggtgtttcccaaggaggaggagtacttgcaggtggatctacaacgactgcacctggtggctctggtgggcacccagggacggcatgccgggggcctgggcaaggagttctcccggagctaccggctgcgttactcccgggatggtcgccgctggatgggctggaaggaccgctggggtcaggaggtgatctcaggcaatgaggaccctgagggagtggtgctgaaggaccttgggccccccatggttgcccgactggttcgcttctacccccgggctgaccgggtcatgagcgtctgtctgcgggtagagctctatggctgcctctggagggatggactcctgtcttacaccgcccctgtggggcagacaatgtatttatctgaggccgtgtacctcaacgactccacctatgacggacataccgtgggcggactgcagtatgggggtctgggccagctggcagatggtgtggtggggctggatgactttaggaagagtcaggagctgcgggtctggccaggctatgactatgtgggatggagcaaccacagcttctccagtggctatgtggagatggagtttgagtttgaccggctgagggccttccaggctatgcaggtccactgtaacaacatgcacacgctgggagcccgtctgcctggcggggtggaatgtcgcttccggcgtggccctgccatggcctgggagggggagcccatgcgccacaacctagggggcaacctgggggaccccagagcccgggctgtctcagtgccccttggcggccgtgtggctcgctttctgcagtgccgcttcctctttgcggggccctggttactcttcagcgaaatctccttcatctctgatgtggtgaacaattcctctccggcactgggaggcaccttcccgccagccccctggtggccgcctggcccacctcccaccaacttcagcagcttggagctggagcccagaggccagcagcccgtggccaaggccgaggggagcccgaccgccatcctcatcggctgcctggtggccatcatcctgctcctgctgctcatcattgccctcatgctctggcggctgcactggcgcaggctcctcagcaaggctgaacggagggtgttggaagaggagctgacggttcacctctctgtccctggggacactatcctcatcaacaaccgcccaggtcctagagagccacccccgtaccaggagccccggcctcgtgggaatccgccccactccgctccctgtgtccccaatggctctgcgttgctgctctccaatccagcctaccgcctccttctggccacttacgcccgtccccctcgaggcccgggcccccccacacccgcctgggccaaacccaccaacacccaggcctacagtggggactatatggagcctgagaagccaggcgccccgcttctgcccccacctccccagaacagcgtcccccattatgccgaggctgacattgttaccctgcagggcgtcaccgggggcaacacctatgctgtgcctgcactgcccccaggggcagtcggggatgggccccccagagtggatttccctcgatctcgactccgcttcaaggagaagcttggcgagggccagtttggggaggtgcacctgtgtgaggtcgacagccctcaagatctggttagtcttgatttcccccttaatgtgcgtaagggacaccctttgctggtagctgtcaagatcttacggccagatgccaccaagaatgccaggaatgatttcctgaaagaggtgaagatcatgtcgaggctcaaggacccaaacatcattcggctgctgggcgtgtgtgtgcaggacgaccccctctgcatgattactgactacatggagaacggcgacctcaaccagttcctcagtgcccaccagctggaggacaaggcagccgagggggcccctggggacgggcaggctgcgcaggggcccaccatcagctacccaatgctgctgcatgtggcagcccagatcgcctccggcatgcgctatctggccacactcaactttgtacatcgggacctggccacgcggaactgcctagttggggaaaatttcaccatcaaaatcgcagactttggcatgagccggaacctctatgctggggactattaccgtgtgcagggccgggcagtgctgcccatccgctggatggcctgggagtgcatcctcatggggaagttcacgactgcgagtgacgtgtgggcctttggtgtgaccctgtgggaggtgctgatgctctgtagggcccagccctttgggcagctcaccgacgagcaggtcatcgagaacgcgggggagttcttccgggaccagggccggcaggtgtacctgtcccggccgcctgcctgcccgcagggcctatatgagctgatgcttcggtgctggagccgggagtctgagcagcgaccacccttttcccagctgcatcggttcctggcagaggatgcactcaacacggtgtgaatcacacatccagctgcccctccctcagggagcgatccaggggaagccagtgacactaaaacaagaggacacaatggcacctctgcccttcccctcccgacagcccatcacctctaatagaggcagtgagactgcaggtgggctgggcccacccagggagctgatgccccttctccccttcctggacacactctcatgtccccttcctgttcttccttcctagaagcccctgtcgcccacccagctggtcctgtggatgggatcctctccaccctcctctagccatcccttggggaagggtggggagaaatataggatagacactggacatggcccattggagcacctgggccccactggacaacactgattcctggagaggtggctgcgcccccagcttctctctccctgtcacacactggaccccactggctgagaatctgggggtgaggaggacaagaaggagaggaaaatgtttccttgtgcctgctcctgtacttgtcctcagcttgggcttcttcctcctccatcacctgaaacactggacctgggggtagccccgccccagccctcagtcacccccacttcccacttgcagtcttgtagctagaacttctctaagcctatacgtttctgtggagtaaatattgggattggggggaaagagggagcaacggcccatagccttggggttggacatctctagtgtagctgccacattgatttttctataatcacttggggtttgtacatttttggggggagagacacagatttttacactaatatatggacctagcttgaggcaattttaatcccctgcactaggcaggtaataataaaggttgagttttccacaaaaaaaaaaaaaaaaaa

SEQ ID NO: 1457 - protein, 913 aa, Homo sapiens
MGPEALSSLLLLLLVASGDADMKGHFDPAKCRYALGMQDRTIPDSDISASSSWSDSTAARHSRLESSDGDGAWCPAGSVFPKEEEYLQVDLQRLHLVALVGTQGRHAGGLGKEFSRSYRLRYSRDGRRWMGWKDRWGQEVISGNEDPEGVVLKDLGPPMVARLVRFYPRADRVMSVCLRVELYGCLWRDGLLSYTAPVGQTMYLSEAVYLNDSTYDGHTVGGLQYGGLGQLADGVVGLDDFRKSQELRVWPGYDYVGWSNHSFSSGYVEMEFEFDRLRAFQAMQVHCNNMHTLGARLPGGVECRFRRGPAMAWEGEPMRHNLGGNLGDPRARAVSVPLGGRVARFLQCRFLFAGPWLLFSEISFISDVVNNSSPALGGTFPPAPWWPPGPPPTNFSSLELEPRGQQPVAKAEGSPTAILIGCLVAIILLLLLIIALMLWRLHWRRLLSKAERRVLEEELTVHLSVPGDTILINNRPGPREPPPYQEPRPRGNPPHSAPCVPNGSALLLSNPAYRLLLATYARPPRGPGPPTPAWAKPTNTQAYSGDYMEPEKPGAPLLPPPPQNSVPHYAEADIVTLQGVTGGNTYAVPALPPGAVGDGPPRVDFPRSRLRFKEKLGEGQFGEVHLCEVDSPQDLVSLDFPLNVRKGHPLLVAVKILRPDATKNARNDFLKEVKIMSRLKDPNIIRLLGVCVQDDPLCMITDYMENGDLNQFLSAHQLEDKAAEGAPGDGQAAQGPTISYPMLLHVAAQIASGMRYLATLNFVHRDLATRNCLVGENFTIKIADFGMSRNLYAGDYYRVQGRAVLPIRWMAWECILMGKFTTASDVWAFGVTLWEVLMLCRAQPFGQLTDEQVIENAGEFFRDQGRQVYLSRPPACPQGLYELMLRCWSRESEQRPPFSQLHRFLAEDALNTV

SEQ ID NO: 1458 - DNA, 3678 bp, Homo sapiens
agatgctgcccccacccccttaggcccgagggatcaggagctatgggaccagaggccctgtcatctttactgctgctgctcttggtggcaagtggagatgctgacatgaagggacattttgatcctgccaagtgccgctatgccctgggcatgcaggaccggaccatcccagacagtgacatctctgcttccagctcctggtcagattccactgccgcccgccacagcaggttggagagcagtgacggggatggggcctggtgccccgcagggtcggtgtttcccaaggaggaggagtacttgcaggtggatctacaacgactgcacctggtggctctggtgggcacccagggacggcatgccgggggcctgggcaaggagttctcccggagctaccggctgcgttactcccgggatggtcgccgctggatgggctggaaggaccgctggggtcaggaggtgatctcaggcaatgaggaccctgagggagtggtgctgaaggaccttgggccccccatggttgcccgactggttcgcttctacccccgggctgaccgggtcatgagcgtctgtctgcgggtagagctctatggctgcctctggagggatggactcctgtcttacaccgcccctgtggggcagacaatgtatttatctgaggccgtgtacctcaacgactccacctatgacggacataccgtgggcggactgcagtatgggggtctgggccagctggcagatggtgtggtggggctggatgactttaggaagagtcaggagctgcgggtctggccaggctatgactatgtgggatggagcaaccacagcttctccagtggctatgtggagatggagtttgagtttgaccggctgagggccttccaggctatgcaggtccactgtaacaacatgcacacgctgggagcccgtctgcctggcggggtggaatgtcgcttccggcgtggccctgccatggcctgggagggggagcccatgcgccacaacctagggggcaacctgggggaccccagagcccgggctgtctcagtgccccttggcggccgtgtggctcgctttctgcagtgccgcttcctctttgcggggccctggttactcttcagcgaaatctccttcatctctgatgtggtgaacaattcctctccggcactgggaggcaccttcccgccagccccctggtggccgcctggcccacctcccaccaacttcagcagcttggagctggagcccagaggccagcagcccgtggccaaggccgaggggagcccgaccgccatcctcatcggctgcctggtggccatcatcctgctcctgctgctcatcattgccctcatgctctggcggctgcactggcgcaggctcctcagcaaggctgaacggagggtgttggaagaggagctgacggttcacctctctgtccctggggacactatcctcatcaacaaccgcccaggtcctagagagccacccccgtaccaggagccccggcctcgtgggaatccgccccactccgctccctgtgtccccaatggctctgcgttgctgctctccaatccagcctaccgcctccttctggccacttacgcccgtccccctcgaggcccgggcccccccacacccgcctgggccaaacccaccaacacccaggcctacagtggggactatatggagcctgagaagccaggcgccccgcttctgcccccacctccccagaacagcgtcccccattatgccgaggctgacattgttaccctgcagggcgtcaccgggggcaacacctatgctgtgcctgcactgcccccaggggcagtcggggatgggccccccagagtggatttccctcgatctcgactccgcttcaaggagaagcttggcgagggccagtttggggaggtgcacctgtgtgaggtcgacagccctcaagatctggttagtcttgatttcccccttaatgtgcgtaagggacaccctttgctggtagctgtcaagatcttacggccagatgccaccaagaatgccagcttctccttgttctccaggaatgatttcctgaaagaggtgaagatcatgtcgaggctcaaggacccaaacatcattcggctgctgggcgtgtgtgtgcaggacgaccccctctgcatgattactgactacatggagaacggcgacctcaaccagttcctcagtgcccaccagctggaggacaaggcagccgagggggcccctggggacgggcaggctgcgcaggggcccaccatcagctacccaatgctgctgcatgtggcagcccagatcgcctccggcatgcgctatctggccacactcaactttgtacatcgggacctggccacgcggaactgcctagttggggaaaatttcaccatcaaaatcgcagactttggcatgagccggaacctctatgctggggactattaccgtgtgcagggccgggcagtgctgcccatccgctggatggcctgggagtgcatcctcatggggaagttcacgactgcgagtgacgtgtgggcctttggtgtgaccctgtgggaggtgctgatgctctgtagggcccagccctttgggcagctcaccgacgagcaggtcatcgagaacgcgggggagttcttccgggaccagggccggcaggtgtacctgtcccggccgcctgcctgcccgcagggcctatatgagctgatgcttcggtgctggagccgggagtctgagcagcgaccacccttttcccagctgcatcggttcctggcagaggatgcactcaacacggtgtgaatcacacatccagctgcccctccctcagggagcgatccaggggaagccagtgacactaaaacaagaggacacaatggcacctctgcccttcccctcccgacagcccatcacctctaatagaggcagtgagactgcaggtgggctgggcccacccagggagctgatgccccttctccccttcctggacacactctcatgtccccttcctgttcttccttcctagaagcccctgtcgcccacccagctggtcctgtggatgggatcctctccaccctcctctagccatcccttggggaagggtggggagaaatataggatagacactggacatggcccattggagcacctgggccccactggacaacactgattcctggagaggtggctgcgcccccagcttctctctccctgtcacacactggaccccactggctgagaatctgggggtgaggaggacaagaaggagaggaaaatgtttccttgtgcctgctcctgtacttgtcctcagcttgggcttcttcctcctccatcacctgaaacactggacctgggggtagccccgccccagccctcagtcacccccacttcccacttgcagtcttgtagctagaacttctctaagcctatacgtttctgtggagtaaatattgggattggggggaaagagggagcaacggcccatagccttggggttggacatctctagtgtagctgccacattgatttttctataatcacttggggtttgtacatttttggggggagagacacagatttttacactaatatatggacctagcttgaggcaattttaatcccctgcactaggcaggtaataataaaggttgagttttccacaaaaaaaaaaaaaaaaaa

SEQ ID NO: 1459 - protein, 919 aa, Homo sapiens
MGPEALSSLLLLLLVASGDADMKGHFDPAKCRYALGMQDRTIPDSDISASSSWSDSTAARHSRLESSDGDGAWCPAGSVFPKEEEYLQVDLQRLHLVALVGTQGRHAGGLGKEFSRSYRLRYSRDGRRWMGWKDRWGQEVISGNEDPEGVVLKDLGPPMVARLVRFYPRADRVMSVCLRVELYGCLWRDGLLSYTAPVGQTMYLSEAVYLNDSTYDGHTVGGLQYGGLGQLADGVVGLDDFRKSQELRVWPGYDYVGWSNHSFSSGYVEMEFEFDRLRAFQAMQVHCNNMHTLGARLPGGVECRFRRGPAMAWEGEPMRHNLGGNLGDPRARAVSVPLGGRVARFLQCRFLFAGPWLLFSEISFISDVVNNSSPALGGTFPPAPWWPPGPPPTNFSSLELEPRGQQPVAKAEGSPTAILIGCLVAIILLLLLIIALMLWRLHWRRLLSKAERRVLEEELTVHLSVPGDTILINNRPGPREPPPYQEPRPRGNPPHSAPCVPNGSALLLSNPAYRLLLATYARPPRGPGPPTPAWAKPTNTQAYSGDYMEPEKPGAPLLPPPPQNSVPHYAEADIVTLQGVTGGNTYAVPALPPGAVGDGPPRVDFPRSRLRFKEKLGEGQFGEVHLCEVDSPQDLVSLDFPLNVRKGHPLLVAVKILRPDATKNASFSLFSRNDFLKEVKIMSRLKDPNIIRLLGVCVQDDPLCMITDYMENGDLNQFLSAHQLEDKAAEGAPGDGQAAQGPTISYPMLLHVAAQIASGMRYLATLNFVHRDLATRNCLVGENFTIKIADFGMSRNLYAGDYYRVQGRAVLPIRWMAWECILMGKFTTASDVWAFGVTLWEVLMLCRAQPFGQLTDEQVIENAGEFFRDQGRQVYLSRPPACPQGLYELMLRCWSRESEQRPPFSQLHRFLAEDALNTV

SEQ ID NO: 1460 - DNA, 1736 bp, Homo sapiens
cttttccactcctccccttacctcccttctcttctgaattctccattctgggctcttgcctgtgaaatctttctttgctttccccatcttttcctcgcattttttcaccatctttccctcaatctccaggagccaatgcgagactttggctccgattaagcgacggcccgagactcggggtgcgcgaggaggatcgacagagtggtgatggagagcaccccttcaaggggactgaaccgagtacacctacaatgcaggaatctgcaggaattcttagggggcctgagccctggggtattggaccgattgtatgggcaccctgccacatgtctggctgtcttcagggagctcccatccttggctaagaactgggtgatgcggatgctctttctggagcagcctttgccacaggctgctgtagctctgtgggtaaagaaggaattcagcaaggctcaggaggaaagtacagggctgctgagcggcctccggatctggcacacacagctgctcccaggcgggctccagggcctcatcctcaaccccattttccgccagaacctccgcattgcccttctgggtggggggaaggcctggtctgatgacacaagtcagctgggaccagacaagcatgcccgggacgttccctcccttgacaagtacgccgaggagcgatgggaggtggtcttgcacttcatggtgggctcccccagtgcagctgtcagccaggacttggctcagctcctcagccaggctgggctcatgaagagtactgaacctggagagccgccctgcattacttccgctggcttccagttcctgttgctggacaccccggctcagctctggtactttatgttgcagtatttgcagacagcccagagccggggcatggacctggtagagattctctccttcctcttccagctcagcttctctactctgggcaaggattactctgtggaaggtatgagtgattctctgttgaacttcctgcaacatctgcgtgagtttgggcttgttttccagaggaagaggaaatctcggcgttactaccccacacgcctggccatcaatctctcatcaggtgtctctggagctgggggcactgtgcatcagccaggtttcattgtcgtggaaaccaattaccgactgtatgcctacacggagtcggagctgcagattgccctcattgccctcttctctgagatgctctatcggttccccaacatggtggtggcgcaggtgacccgggagagtgtgcagcaggcaatcgccagtggcatcacagcccagcagataatccatttcctaaggacaagagcccacccagtgatgctcaaacagacacctgtgctgccccccaccatcaccgaccagatccggctctgggagctggaaagggacagactccggttcactgagggtgtcctgtataaccagttcctgtcgcaagtggactttgagctgctgctggcccacgcgcgggagctgggcgtgctcgtgttcgagaactcggccaagcggctcatggtggtgaccccggccgggcacagcgacgtcaagcgcttttggaagcggcagaaacatagctcctgagagcgcgggacttggacacggacctcggcgggcgggactgggcggggcggggcatcagaactcaggtgttttttatttacgcgtcagggcttttcttgtttaataaagttatgatagctaaaaaaaaaaaaaaaaaaaaa

SEQ ID NO: 1461 - protein, 462 aa, Homo sapiens
MESTPSRGLNRVHLQCRNLQEFLGGLSPGVLDRLYGHPATCLAVFRELPSLAKNWVMRMLFLEQPLPQAAVALWVKKEFSKAQEESTGLLSGLRIWHTQLLPGGLQGLILNPIFRQNLRIALLGGGKAWSDDTSQLGPDKHARDVPSLDKYAEERWEVVLHFMVGSPSAAVSQDLAQLLSQAGLMKSTEPGEPPCITSAGFQFLLLDTPAQLWYFMLQYLQTAQSRGMDLVEILSFLFQLSFSTLGKDYSVEGMSDSLLNFLQHLREFGLVFQRKRKSRRYYPTRLAINLSSGVSGAGGTVHQPGFIVVETNYRLYAYTESELQIALIALFSEMLYRFPNMVVAQVTRESVQQAIASGITAQQIIHFLRTRAHPVMLKQTPVLPPTITDQIRLWELERDRLRFTEGVLYNQFLSQVDFELLLAHARELGVLVFENSAKRLMVVTPAGHSDVKRFWKRQKHSS

SEQ ID NO: 1462 - DNA, 4070 bp, Homo sapiens
gccagctgctgcgcatgcgccggccggggccccgcccccatgcgccgcgcggctccagggccacgttccagggtcgggtttggtggattcctcagtccctgccgccgcggggcgccctgggatagcggcggggcctcctggtgagcgcgcgccggggcggcctccgggaagtgggagacgctgcgggtcctgggcccaggccttgggatgggcgggaaggcttggccgcgccgggctgtgggcactgcaggaggcccctgtgcaggtggagatcgccgcggccctggcgggactccttgctggctcttgggcgcgctgatgcccatcatctccctgagtttctgagccctatctctcatgtgtcagtggtcaccgccgaatccagacactccggccctgttccggaagagccctgatatccgtggctccatggtgctgtctgtcgataccatgcactctagctctcaaggaggaaaggttttgtggaagggaatagagacttggaataacagacctgtgctaattagagacaggaaagatggaacaaggggagtgacccttctccacccccatatcctaatgtgctctctctctatccagaacagatctcggcccctttccaaacactcctgatgcctcatttgcctctcgcctcttttcgaccaccattttgggggctgaggcactcacggggcctccccaggtttcactccgtttctacacagtcggagccccatggatctcccatctcccggaggaaccgtgaagccaaacagaagcgcctgcgagagaagcaggcgactctggaggctgagatagcaggggagagcaagtcacctgcagaatccattaaggcctggaggcctaaggagttagtattgtatgaaatccctacgaaacccggtgaaaagaaagatgtctctgggcccctgcctcctgcatacagcccccgatatgttgaggctgcctggtacccgtggtgggtacgagagggcttcttcaaaccagaatatcaggcccggctgccccaagctacaggggagaccttttccatgtgtatcccacctcccaatgtcactggctccctgcacattggccacgcactcacggtggccatacaggatgccctcgtgcgctggcaccggatgcgtggggatcaagtgctgtgggtccctggttcagatcatgcaggaattgctacacaagctgtggtggagaaacaactgtggaaggaacggggagtgaggagacatgagctgagccgggaggccttccttagggaggtgtggcagtggaaggaggcgaaaggtggagagatctgtgagcagctgcgagctctgggtgcctccctggactgggatcgagagtgttttaccatggatgttggctcctcagtggctgtgactgaagcttttgtgcggctctacaaggcggggttgctgtaccggaaccatcagcttgtcaactggtcatgtgctttaagatcagccatctcggacattgaggtggagaaccggcccctgcctggccacacacagcttcgactgcctggctgccccacccccgtgtcttttggcctcctattttctgttgccttccccgtggatggagagcctgatgcagaggttgtggtaggaaccacaaggccagagacgctgcctggagatgtggctgtggccgttcatccagacgactcgcgatacacacatctacacgggcgacagcttcgtcaccccttgatggggcagcctcttcccctcatcacagactatgctgttcagccacatgtgggcacgggggcagtgaaggtgactccagctcacagtcctgccgatgctgagatgggggcccgacatggcttgagccccttgaatgtcattgcggaggatgggaccatgacctccctctgcggggactggctgcagggtcttcaccggtttgtggcccgggaaaagataatgtctgtgctgagtgaatggggcctgttccggggcctccagaaccaccccatggtactgcccatctgcagccgttctggggatgtgatagaatacctgctgaagaaccagtggtttgtccgctgccaggaaatgggggcccgagctgccaaggctgtggagtcgggggccctggagctcagtccctccttccaccagaagaactggcagcactggttttcccatattggggactggtgtgtctcccggcagctgtggtggggccatcagattccagcctacctggttgtagaggaccatgcgcagggagaagaggactgttgggtggttgggcggtcagaggctgaggccagagaggtagcagcggaactgacagggaggccaggggcagagctgaccctggagagggatcctgatgtcctagacacatggttttcttctgccctgttccccttttctgccctgggctggccccaagagaccccagaccttgctcgtttctaccccctgtcacttttggaaacgggcagcgaccttctgctgttctgggtgggccgcatggtcatgttggggacccagctcacagggcagctgcccttcagcaaggtgcttcttcatcccatggttcgggacaggcagggccggaagatgagcaagtccctggggaatgtgctggacccaagagacatcatcagtggggtggagatgcaggtgctgcaggaaaagctgagaagcggaaatttggaccctgcagagctggccattgtggctgcagcacagaaaaaggactttcctcacgggatccctgagtgtgggacagatgccctgagattcacactctgctcccatggagttcaggcgggcgacttgcacctgtcagtctctgaggtccagagctgccgacatttctgcaacaagatctggaatgctcttcgctttatcctcaatgctttaggggagaaatttgtgccacagcctgctgaggagctgtctccctcctccccgatggatgcctggatcctgagccgccttgccctggctgcccaggagtgtgagcggggcttcctcacccgagagctctcgctcgtcactcatgccctgcaccacttctggcttcacaacctctgtgacgtctacctggaggctgtgaagcccgtgctgtggcactcgccccgccccctggggccccctcaggtcctgttctcctgcgctgacctcggcctccgcctcctggccccactgatgcccttcctggctgaagagctctggcagaggctgccccccaggcctggttgcccccctgcccccagcatctcggttgccccctaccccagcgcctgcagcttggagcactggcgccagccagagctggagcggcgcttctcccgggtccaagaggtcgtgcaggtgctaagggctctccgagccacgtaccagctcaccaaagcccggccccgagtgctgctgcagagctcagagcctggggaccagggcctcttcgaggccttcttggagcccctgggcaccctgggctactgtggggctgtgggcctgttacccccaggcgcagcagctccctccggctgggcccaggctccactcagtgacacggctcaagtctacatggagctgcagggcctggtggacccgcagatccagctacctctgttagccgcccgaaggtacaagttgcagaagcagcttgatagcctcacagccaggaccccatcagaaggggaggcagggactcagaggcaacaaaagctttcttccctccagctggaattgtcaaaactggacaaggcagcctctcacctccagcagctgatggatgagcctccagccccagggagcccggagctctaactcatcatccccatcagttttcctccctctcagacctgtctttgaggacaaacagatttgtcagctgtcagggtgcagtgggacgtcagagactatgtggtccatcgccttcattgtgtaaatgaggacacagactggcttggtcgcagtgactgtggtgtccttgagatgctcacattactgcccggcctgcctcccacctggaagtctgggaatgaggagattgagataaacttttgaaatccc

SEQ ID NO: 1463 - protein, 1063 aa, Homo sapiens
MPHLPLASFRPPFWGLRHSRGLPRFHSVSTQSEPHGSPISRRNREAKQKRLREKQATLEAEIAGESKSPAESIKAWRPKELVLYEIPTKPGEKKDVSGPLPPAYSPRYVEAAWYPWWVREGFFKPEYQARLPQATGETFSMCIPPPNVTGSLHIGHALTVAIQDALVRWHRMRGDQVLWVPGSDHAGIATQAVVEKQLWKERGVRRHELSREAFLREVWQWKEAKGGEICEQLRALGASLDWDRECFTMDVGSSVAVTEAFVRLYKAGLLYRNHQLVNWSCALRSAISDIEVENRPLPGHTQLRLPGCPTPVSFGLLFSVAFPVDGEPDAEVVVGTTRPETLPGDVAVAVHPDDSRYTHLHGRQLRHPLMGQPLPLITDYAVQPHVGTGAVKVTPAHSPADAEMGARHGLSPLNVIAEDGTMTSLCGDWLQGLHRFVAREKIMSVLSEWGLFRGLQNHPMVLPICSRSGDVIEYLLKNQWFVRCQEMGARAAKAVESGALELSPSFHQKNWQHWFSHIGDWCVSRQLWWGHQIPAYLVVEDHAQGEEDCWVVGRSEAEAREVAAELTGRPGAELTLERDPDVLDTWFSSALFPFSALGWPQETPDLARFYPLSLLETGSDLLLFWVGRMVMLGTQLTGQLPFSKVLLHPMVRDRQGRKMSKSLGNVLDPRDIISGVEMQVLQEKLRSGNLDPAELAIVAAAQKKDFPHGIPECGTDALRFTLCSHGVQAGDLHLSVSEVQSCRHFCNKIWNALRFILNALGEKFVPQPAEELSPSSPMDAWILSRLALAAQECERGFLTRELSLVTHALHHFWLHNLCDVYLEAVKPVLWHSPRPLGPPQVLFSCADLGLRLLAPLMPFLAEELWQRLPPRPGCPPAPSISVAPYPSACSLEHWRQPELERRFSRVQEVVQVLRALRATYQLTKARPRVLLQSSEPGDQGLFEAFLEPLGTLGYCGAVGLLPPGAAAPSGWAQAPLSDTAQVYMELQGLVDPQIQLPLLAARRYKLQKQLDSLTARTPSEGEAGTQRQQKLSSLQLELSKLDKAASHLQQLMDEPPAPGSPEL

SEQ ID NO: 1464 - DNA, 422 bp, Homo sapiens
aaggagaggccaccgggacttcagtgtctcctccatcccaggagcgcagtggccactatggggtctgggctgccccttgtcctcctcttgaccctccttggcagctcacatggaacagggccgggtatgactttgcaactgaagctgaaggagtcttttctgacaaattcctcctatgagtccagcttcctggaattgcttgaaaagctctgcctcctcctccatctcccttcagggaccagcgtcaccctccaccatgcaagatctcaacaccatgttgtctgcaacacatgacagccattgaagcctgtgtccttcttggcccgggcttttgggccggggatgcaggaggcaggccccgaccctgtctttcagcaggcccccaccctcctgagtggcaataaataaaattcggtatgctg

SEQ ID NO: 1465 - protein, 78 aa, Homo sapiens
MGSGLPLVLLLTLLGSSHGTGPGMTLQLKLKESFLTNSSYESSFLELLEKLCLLLHLPSGTSVTLHHARSQHHVVCNT

SEQ ID NO: 1466 - DNA, 1989 bp, Homo sapiens
acatggagaaaggaccacatcacccaatgacaagatcacctcatctgcagcagagtctacagaacatagagatagggctacatcagccaatgtgatcacaccagccccagcagagcctataaaacatgcaaaaaggaccacattggcccatgagaagatgacacaagtcacagaaaagtccacagaacacccagaaaagaccacgtcaaccacagagaaaaccacaagaaccccagaaaagcctacgctatactcagagaagaccatatgcaccaaagggaaaaacacaccagtcccagaaaagcctacagaaaacctggggaacaccacactgaccactgagaccataaaagccccagtaaagtccacagaaaacccagaaaaaacagcagcagtcacaaagactataaaaccttcagtcaaggtcacaggagacaaatctctcactactacctcttctcatctaaataaaactgaagttactcatcaggtgcccactggttctttcaccctcattacatctagaacgaagctgagttctatcacatcagaagccacaggaaacgagagccatccatacctcaataaagatggctcacagaaaggtatccacgctggacagatgggagagaatgattcattccctgcatgggccatagttattgtggtcctggtggctgtgattctcctcctggtgttccttggcctgatcttcttggtctcctatatgatgcggacacgccgcacactaacccagaacacccagtacaatgatgcagaggatgagggtggccccaattcctacccggtctacctgatggagcagcagaatcttggcatgggccagatcccttccccacggtgatcttggagtaggcgcccagccctggctcttccatgctctgcccctttcctggatgaggaaccggactcacaatttctatttccgggactacaggaagggcagagaatactgacggttaccagtattaacccttcatctgttcttgaaactggttggggaatgaggtgataagcaaggagggtgtaagtttaggggacaaagaagaaagaatgaataatacgagcagacattctctgtagaaggtaatggtctgagaatgaaaaggtgtttgatggacatgttgtgggggcaccaatgcagaacactgcactgagtcctaaaggaaggacaggagccttataggcaatgccccagactgacttgtgagtggggtttatggggaaagggagggactgagggcagagtctctgggtttcaggacagcattatgttatttccattcactattacttaagagtttgtgtgtaaacaggctcatctctgagttctcaggacccttgcccccacccccatttttttaatgaaaaaaaaaaacaaaaaaaacggatccaagaagaaaagagaatttatttccttctccactctctccatgccctggagaaaaaaaagtccagaagaaatcataaatatctctcatctacatggttgcttcctcttcctcccaaatcccttagttttcctaaatgtctacagtggacgccctgttggtttggcttgctgggttgtgggtggacacgcaaggaggggatttttatttggccagcagtctcacccactgatctccaccccagaccttccctgattggtgtctcagcatttattttcctgtctcttccaccaaaagccagctgtagctttatctcgtaaaagttacccatcttctctactgtccccattctctctcctcccaccttcaccccagattcaagttttcctccttgtaggcatttcatctgtgtgtgttttctggattttctctctctcttcttatggccatttcaccttattactgattgggtagagggggaaaaggagaatgatgatgatagtttccttctgtctattgaccttttttataataaagtataacatgtttataaagggaaaaaaaaaaaaaaaaaaaa

SEQ ID NO: 1467 - protein, 235 aa, Homo sapiens
MTQVTEKSTEHPEKTTSTTEKTTRTPEKPTLYSEKTICTKGKNTPVPEKPTENLGNTTLTTETIKAPVKSTENPEKTAAVTKTIKPSVKVTGDKSLTTTSSHLNKTEVTHQVPTGSFTLITSRTKLSSITSEATGNESHPYLNKDGSQKGIHAGQMGENDSFPAWAIVIVVLVAVILLLVFLGLIFLVSYMMRTRRTLTQNTQYNDAEDEGGPNSYPVYLMEQQNLGMGQIPSPR

SEQ ID NO: 1468 - DNA, 3646 bp, Homo sapiens
agagaaagaggcaactacattgcctggaggaagcctaaggaacccaggcatccagctgcccacgcccgagtccaagattcttcccaggaacacaaacgtaggagacccacgctcctggaagcaccagcctttatctcttcaccttcaagtcccctttctcaagaatcctctgttctttgccctctaaagtcttggtacatctaggacccaggcatcttgctttccagccacaaagagacagatgaagatgcagaaaggaaatgttctccttatgtttggtctactattgcatttagaagctgcaacaaattccaatgagactagcacctctgccaacactggatccagtgtgatctccagtggagccagcacagccaccaactctgggtccagtgtgacctccagtggggtcagcacagccaccatctcagggtccagcgtgacctccaatggggtcagcatagtcaccaactctgagttccatacaacctccagtgggatcagcacagccaccaactctgagttcagcacagcgtccagtgggatcagcatagccaccaactctgagtccagcacaacctccagtggggccagcacagccaccaactctgagtccagcacaccctccagtggggccagcacagccaccaactctgactccagcacaacctccagtggggctagcacagccaccaactctgactccagcacaacctccagtgaggccagcacagccaccaactctgagtccagcacaacctccagtggggccagcacagccaccaactctgagtccagcacagtgtccagtagggccagcactgccaccaactctgagtccagcacaacctccagtggggccagcacagccaccaactctgagtccagaacgacctccaatggggctggcacagccaccaactctgagtccagcacgacctccagtggggccagcacagccaccaactctgagtccagcacaccctccagtggggccggcacagccaccaactctgagtccagcacgacctccagtggggccggcacagccaccaactctgagtccagcacagtgtccagtgggatcagcacagtcaccaattctgagtccagcacaccctccagtggggccaacacagccaccaactctgagtccagtacaacctccagtggggccaacacagccaccaactctgactccagcacaacctccagtggggccagcacagccaccaactctgagtccagcacgacctccagtggggccagcacagccaccaactctgagtccagcacaacctccagtggggccagcacagccaccaactctgggtccagcacgacctccagtgggaccagcacagccaccaactctgagtccagcacagtgtccagtggggccagcacagccaccacctctgagtccagcacgacctccagtggggccagcacagccaccaactctgagtccagcacagtgtccagtggggccagcactgccaccaattctgagtccagcacaacctccagtggggccaacacagccaccaactctgggtccagtgtgacctctgcaggctctggaacagcagctctgactggaatgcacacaacttcccatagtgcatctactgcagtgagtgaggcgaagcctggtgggtccctggtgccgtgggaaatcttcctcatcaccctggtctcggttgtggcggccgtggggctctttgctgggctcttcttctgtgtgagaaacagcctgtccctgagaaacacctttaacacagctgtctaccaccctcatggcctcaaccatggccttggtccaggccctggagggaatcatggagccccccacaggcccaggtggagtcctaactggttctggaggagaccagtatcctcgatagccatggagatgagcgggaggaacagcgggccctgagcagccccggaagcaagtgccgcattcttcaggaaggaagagacctgggcacccaagacctggtttcctttcattcatcccaggagacccctcccagctttgtttgagatcctgaaaatcttgaagaaggtattcctcacctttcttgcctttaccagacactggaaagagaatactatattgctcatttagctaagaaataaatacatctcatctaacacacacgacaaagagaagctgtgcgtgccccggggtgggtatctagctctgagatgaactcagttataggagaaaacctccatgctggactccatctggcattcaaaatctccacagtaaaatccaaagacctcattcttatctgtgtgtctgcattttctaatcctttttgccccaggcaaggtccctgtatctctgagacaccccgattggctggagaattgacttgggagagataaggagggagggcgggtgccagcatgctatgggctcctgcgtgaggcctgtggtacacagagattaggttgtgatacatgaagagccaagagcaggatgaggtggaggcgttacaactacctgctctgtgtgtggggggggaggggggaggggggtacgcatattcacttgaagtcgaggttcccagggcatttccatgtgctccaggcctgactacccatcagggtggaggagctggtgacactcatctccctgagtgctccctggtttcccaagggaaagactttctggcctgctgaggtcgaatcttccaagaggctcttgcaaagacccgagattctcataaatccccgcccagaagagctgcacgtatccctttcatgagtccagggaagagggtcctccaggtcttggaagacagaggggagctgctttagaggctaagttgctttgagcccacaaggtaatggagggctcctacttgggacagagccctcagcagagaattagcagtctgttggtgggttcaccccaactcacagcagtagaaactgctccatcttccaccacttattgggtttctccagtgtcagcaaaccaaagaattggatcttaccaatgcggctataggaaaacagcctgttgcatggtaagagtgataccatcttgaagtgaaaccaccacaatggccattttttttttagatggagttttgcagtggtgcaatcatagctcattgcagccttcaattcctgggctcaggcaatcctcctgcctcagcctcctgagtagctgggactacagtttcgtgtgccaccatgcctggctaatttttagaattttttgtagggacagggcctcactctgttgcacaagctggtcttgaactcctggcctccttgaactcctcctgccttggcctcccaaaatgctgagattacaggtgtgagccactgcacctcgccagatgtccaatgtctgactcctgcataccaaggtgttctgtatcaagggctttaaaacaatgcctgtagcgtaattaacctctcacaaagatgcttatctaacctccccagcagtcatgggtttcagcaagaaagtctgtgatgtgaccagttgcacatgttttcccctaaaagcttactctagaaaggatattttttggagagggagtgtgggaatccaccatcctgtggccacctcagacatcacttctctttggaagactccattaaatatttctctgtg

SEQ ID NO: 1469 - protein, 566 aa, Homo sapiens
MKMQKGNVLLMFGLLLHLEAATNSNETSTSANTGSSVISSGASTATNSGSSVTSSGVSTATISGSSVTSNGVSIVTNSEFHTTSSGISTATNSEFSTASSGISIATNSESSTTSSGASTATNSESSTPSSGASTATNSDSSTTSSGASTATNSDSSTTSSEASTATNSESSTTSSGASTATNSESSTVSSRASTATNSESSTTSSGASTATNSESRTTSNGAGTATNSESSTTSSGASTATNSESSTPSSGAGTATNSESSTTSSGAGTATNSESSTVSSGISTVTNSESSTPSSGANTATNSESSTTSSGANTATNSDSSTTSSGASTATNSESSTTSSGASTATNSESSTTSSGASTATNSGSSTTSSGTSTATNSESSTVSSGASTATTSESSTTSSGASTATNSESSTVSSGASTATNSESSTTSSGANTATNSGSSVTSAGSGTAALTGMHTTSHSASTAVSEAKPGGSLVPWEIFLITLVSVVAAVGLFAGLFFCVRNSLSLRNTFNTAVYHPHGLNHGLGPGPGGNHGAPHRPRWSPNWFWRRPVSSIAMEMSGRNSGP

SEQ ID NO: 1470 - DNA, 1145 bp, Homo sapiens
atgcagggccgcgtggcagggagctgcgctcctctgggcctgctcctggtctgtcttcatctcccaggcctctttgcccggagcatcggtgttgtggaggagaaagtttcccaaaacttggggaccaacttgcctcagctcggacaaccttcctccactggcccctctaactctgaacatccgcagcccgctctggaccctaggtctaatgacttggcaagggttcctctgaagctcagcgtgcctgcatcagatggcttcccacctgcaggaggttctgcagtgcagaggtggcctccatcgtgggggctgcctgccatggattcctggccccctgaggatccttggcagatgatggctgctgcggctgaggaccgcctgggggaagcgctgcctgaagaactctcttacctctccagtgctgcggccctcgctccgggcagtggccctttgcctggggagtcttctcccgatgccacaggcctctcacccgaggcttcactcctccaccaggactcggagtccagacgactgccccgttctaattcactgggagccgggggaaaaatcctttcccaacgccctccctggtctctcatccacagggttctgcctgatcacccctggggtaccctgaatcccagtgtgtcctggggaggtggaggccctgggactggttggggaacgaggcccatgccacaccctgagggaatctggggtatcaataatcaacccccaggtaccagctggggaaatattaatcggtatccaggaggcagctggggaaatattaatcggtatccaggaggcagctgggggaatattaatcggtatccaggaggcagctgggggaatattcatctatacccaggtatcaataacccatttcctcctggagttctccgccctcctggctcttcttggaacatcccagctggcttccctaatcctccaagccctaggttgcagtggggctagagcacgatagagggaaacccaacattgggagttagagtcctgctcccgccccttgctgtgtgggctcaatccaggccctgttaacatgtttccagcactatccccacttttcagtgcctcccctgctcatctccaataaaataaaagcacttatggaaaaaaaaaaa

SEQ ID NO: 1471 - protein, 325 aa, Homo sapiens
MQGRVAGSCAPLGLLLVCLHLPGLFARSIGVVEEKVSQNLGTNLPQLGQPSSTGPSNSEHPQPALDPRSNDLARVPLKLSVPASDGFPPAGGSAVQRWPPSWGLPAMDSWPPEDPWQMMAAAAEDRLGEALPEELSYLSSAAALAPGSGPLPGESSPDATGLSPEASLLHQDSESRRLPRSNSLGAGGKILSQRPPWSLIHRVLPDHPWGTLNPSVSWGGGGPGTGWGTRPMPHPEGIWGINNQPPGTSWGNINRYPGGSWGNINRYPGGSWGNINRYPGGSWGNIHLYPGINNPFPPGVLRPPGSSWNIPAGFPNPPSPRLQWG

SEQ ID NO: 1472 - DNA, 861 bp, Homo sapiens
caggaaatcgagactcatgactcccagagaggatggcatctagaagtagacgatcaagggtggaatctacagtccatgggccctgacttcttgccttcgtctcaaatagactctgcagccagccatctatgcagcgccccagtggctttgaaatgcaacagaaaccatcacccccggaccgtgggctccatgccagtgggcaaagcacagcctgggaagaattggtttgcagccaggcagtcctccatccagtcttgactttggcacttgtgatatgacttgcacagaccaaaaaagtcactctcaaagagctctcggcacacagaccccagctttacaaggaccccagctccttaacacagatcccagctccaaggaaactcgtcccccccacgttaatcctgaccgactttgccacatggagccagcaaaccatttctggcatgcaggggacctccaagcaatgatatccaaggaattccatctggcagccacccaggatgactgcagaaaaggaaggacacaggaggatatcctggttccctcttcccacccagagctgtttgcatcagtcctgccaatggctccggaagaagctgccaggctccagcaacctcagccccttcctcctccctcaggaatccacctatccgcctctaggaccttggctccaactctattgtactcgtctcctccctcccattctccttttggtctcagctccttgatctaagcctcccagagagacccctagaatgtttccctcaaggacctttctgcctggaagtctgttagcctttcagaagtaacatgtccaaaataaaatttgattcctcccaggttgttccctgcctggtccgc

SEQ ID NO: 1473 - protein, 152 aa, Homo sapiens
MTCTDQKSHSQRALGTQTPALQGPQLLNTDPSSKETRPPHVNPDRLCHMEPANHFWHAGDLQAMISKEFHLAATQDDCRKGRTQEDILVPSSHPELFASVLPMAPEEAARLQQPQPLPPPSGIHLSASRTLAPTLLYSSPPSHSPFGLSSLI

SEQ ID NO: 1474 - DNA, 2549 bp, Homo sapiens
atcagtcaggaggccgtgcagtccgagatgggctcgtctcgggcaccctggatggggcgtgtgggtgggcacgggatgatggcactgctgctggctggtctcctcctgccagggaccttggctaagagcattggcaccttctcagacccctgtaaggaccccacgcgtatcacctcccctaacgacccctgcctcactgggaagggtgactccagcggcttcagtagctacagtggctccagcagttctggcagctccatttccagtgccagaagctctggtggtggctccagtggtagctccagcggatccagcattgcccagggtggttctgcaggatcttttaagccaggaacggggtattcccaggtcagctactcctccggatctggctctagtctacaaggtgcatccggttcctcccagctggggagcagcagctctcactcgggaagcagcggctctcactcgggaagcagcagctctcattcgagcagcagcagcagctttcagttcagcagcagcagcttccaagtagggaatggctctgctctgccaaccaatgacaactcttaccgcggaatactaaacccttcccagcctggacaaagctcttcctcttcccagacctttggggtatccagcagtggccaaagcgtcagctccaaccagcgtccctgtagttcggacatccccgactctccctgcagtggagggcccatcgtctcgcactccggcccctacatccccagctcccactctgtgtcagggggtcagaggcctgtggtggtggtggtggaccagcacggttctggtgcccctggagtggttcaaggtcccccctgtagcaatggtggccttccaggcaagccctgtcccccaatcacctctgtagacaaatcctatggtggctacgaggtggtgggtggctcctctgacagttatctggttccaggcatgacctacagtaagggtaaaatctaccctgtgggctacttcaccaaagagaaccctgtgaaaggctctccaggggtcccttcctttgcagctgggccccccatctctgagggcaaatacttctccagcaaccccatcatccccagccagtcggcagcttcctcggccattgcattccagccagtggggactggtggggtccagctctgtggaggcggctccacgggctccaagggaccctgctctccctccagttctcgagtccccagcagttctagcatttccagcagctccggtttaccctaccatccctgcggcagtgcttcccagagcccctgctccccaccaggcaccggctccttcagcagcagctccagttcccaatccagtggcaaaatcatccttcagccttgtggcagcaagtccagctcttctggtcacccttgcatgtctgtctcctccttgacactgactgggggccccgatggctctccccatcctgatccctccgctggtgccaagccctgtggctccagcagtgctggaaagatcccctgccgctccatccgggatatcctagcccaagtgaagcctctggggccccagctagctgaccctgaagttttcctaccccaaggagagttactcaacagtccataagaagtcaactgttgtgtgtgtgcatgccttgggcacaaacaagcacatacactatatcccatatgggagaagtccagtgcccaggcatagggttagctcagtttccctccttcccaaaagagtggttctgctttctccactaccccaaggttgcagactctctcttatcaccccttcctccttcctcttctcaaaatggtagattcaaagctcctctcttgattctctcctactgtttaaattcccattccaccacagtgcccctcagccagatcaccaccccttacaattccctctactgtgtggaaatggtccattgagtaacacccccatcagcttctcaactgggaaacccctgaaatgctctcagagcacctctgacgcctgaagaagttataccttcctcttcccctttaccaaataaagcaaagtcaaaccatcatctggaaacagtggccacttttcactgacctttcttcgacatctagtcaacccacccaatatgccactgggctctcgctcccaattccaccccaccctccattacagagctcaccacgccctcctagatcaccgtccccaacacacccattgcctctcaaggcccttatctcagccccttcctgtggccacttccctcagtgctcagatgattccctgggtgagggagacactggggcaccctcagaggttgaagcaggctccctgctgtccctggatcctggacagatggctcagtaaactgtggggactaggtgcagactttttgccttcttggagtcctgggtctcctctgagagtctgggtggtgctcttcctacgcctctagaggtctctgtgttcctcattttccttcaaaagcgggctgtgtttctcttctaccttccagctgctcccacagaggaggaagacaataaatatttgttgaactg

SEQ ID NO: 1475 - protein, 529 aa, Homo sapiens
MGSSRAPWMGRVGGHGMMALLLAGLLLPGTLAKSIGTFSDPCKDPTRITSPNDPCLTGKGDSSGFSSYSGSSSSGSSISSARSSGGGSSGSSSGSSIAQGGSAGSFKPGTGYSQVSYSSGSGSSLQGASGSSQLGSSSSHSGSSGSHSGSSSSHSSSSSSFQFSSSSFQVGNGSALPTNDNSYRGILNPSQPGQSSSSSQTFGVSSSGQSVSSNQRPCSSDIPDSPCSGGPIVSHSGPYIPSSHSVSGGQRPVVVVVDQHGSGAPGVVQGPPCSNGGLPGKPCPPITSVDKSYGGYEVVGGSSDSYLVPGMTYSKGKIYPVGYFTKENPVKGSPGVPSFAAGPPISEGKYFSSNPIIPSQSAASSAIAFQPVGTGGVQLCGGGSTGSKGPCSPSSSRVPSSSSISSSSGLPYHPCGSASQSPCSPPGTGSFSSSSSSQSSGKIILQPCGSKSSSSGHPCMSVSSLTLTGGPDGSPHPDPSAGAKPCGSSSAGKIPCRSIRDILAQVKPLGPQLADPEVFLPQGELLNSP

SEQ ID NO: 1476 - DNA, 1143 bp, Homo sapiens
gagatgccaagtgggtattgactgctccaggatgtggatggagggtgtgaaaaccagggtggggtgacgcaggctctgggtcatgatagggagagcaggcagctgggtcctgggctggaggactaaaataagggacgccaccttcaggggtgacacatcagcccaggccctccctacgggtttgaccagtcctgttctgacggtattcctgcgccactgggctggtccctcctccactcctcccctataaagcctcctggggtccccaggcacccagactcagcccaccccagctttgggggccagtacgcagccatgatcctcaactggaagctcctggggatcctggtcctttgcctgcacaccagaggcatctcaggcagcgagggccacccctctcacccacccgcagaggaccgagaggaggcaggctccccaacattgcctcagggccccccagtccccggtgacccttggccaggggcaccccctctctttgaagatcctccgcctacccgccccagtcgtccctggagagacctgcctgaaactggagtctggccccctgaaccgcctagaacggatcctcctcaacctccccggcctgacgacccttggccggcaggaccccagcccccagaaaacccctggcctcctgcccctgaggtggacaaccgacctcaggaggagccagacctagacccaccccgggaagagtacagataatggagtcccctcagccgttctgttcccaggcatctccaggcacccacgccctctccaccctctgattccccgtgaattcttcccaatttagcctatctccttaaacctcttcctcattccctcggttttattctgaacccgtaaggtggtgttctcaatatttcctgtcccctcctgagatccatacttagtcctcacatcgcccgttttttcctctgacagcctaagcctactctcctacctcgcctccaggcctcggccccacctacctcccacccggtcttcctgcccgcgcgatcgctggggcagggctacggtactgtgttcccttctgccacctggtggccggcggcaggaactatcagtagacagctgctgcttccatgaaacggaaaaataaaaatcatgttttcttaa

SEQ ID NO: 1477 - protein, 136 aa, Homo sapiens
MILNWKLLGILVLCLHTRGISGSEGHPSHPPAEDREEAGSPTLPQGPPVPGDPWPGAPPLFEDPPPTRPSRPWRDLPETGVWPPEPPRTDPPQPPRPDDPWPAGPQPPENPWPPAPEVDNRPQEEPDLDPPREEYR

SEQ ID NO: 1478 - DNA, 2972 bp, Homo sapiens
aaagaggaggcgggcagcaggcatggaagctaaggggatagtagagagaagctgagagaacagccgcaggaaagatttgaataagatgtcaggacgctggcttttctgcctggggatctaggcggcctggattcccaaggtcttggggagggtctagccctgcatgtggccacattcagctggggccaggccttgggccagcactttaacagggaaggacccaagagtcatggcctgctggtgtctggatgggcttccctcaggccttgctgagccatggagagaactctggagatggcgctcaagacccctgcactgtgtacctcctttctcacctctggccaggagcagcagggaccatagaaacttaaggaggagggggaacatagatggctgaagacagaatctagagccttcaaataatgtggagatgtttccaccttcaggttccactgggctgattcccccctcccactttcaagctcggcccctttcaactctgccaagaatggctcccacctggctctcagacattcccctggtccaacccccaggctatcaagatgtctcagagaggcggctagacacccagagacctcaagtgaccatgtgggaacgggatgtttccagtgacaggcaggagccagggcggagaggcaggtcctgggggctggaggggtcacaggccctgagccagcaggctgaggtgatcgttcggcagctgcaagagctgcggcggctggaggaggaggtccggctcctgcgggagacctcgctgcagcagaagatgaggctagaggcccaggccatggagctagaggctctggcacgggcggagaaggccggccgagctgaggctgagggcctgcgtgctgctttggctggggctgaggttgtccggaagaacttggaagaggggagccagcgggagctggaagaggttcagaggctgcaccaagagcagctgtcctctttgacacaggctcacgaggaggctctttccagtttgaccagcaaggctgagggcttggagaagtctctgagtagtctggaaaccagaagagcaggggaagccaaggagctggccgaggctcagagggaggccgagctgcttcggaagcagctgagcaagacccaggaagacttggaggctcaggtgaccctggttgagaatctaagaaaatatgttggggaacaagtcccttctgaggtccacagccagacatgggaactggagcgacagaagcttctggaaaccatgcagcacttgcaggaggaccgggacagcctgcatgccaccgcggagctgctgcaggtgcgggtgcagagcctcacacacatcctcgccctgcaggaggaggagctgaccaggaaggttcaaccttcagattccctggagcctgagtttaccaggaagtgccagtccctgctgaaccgctggcgggagaaggtgtttgccctcatggtgcagctaaaggcccaggagctggaacacagtgactctgttaagcagctgaagggacaggtggcctcactccaggaaaaagtgacatcccagagccaggagcaggccatcctgcagcgatccctgcaggacaaagccgcagaggtggaggtggagcgtatgggtgccaagggcctgcagttggagctgagccgtgctcaggaggccaggcgtcagtggcagcagcagacagcctcagccgaggagcagctgaggcttgtggtcaatgctgtcagcagctctcagatctggctcgagaccaccatggctaaggtggaaggggctgccgcccagcttcccagcctcaacaaccgactcagctatgctgtccgcaaggtcctcaccattcggggcctgattgctcgaaagcttgcccttgctcagctgcgccaggagagctgtcccctaccaccaccggccacagatgtgagccttgagttgcagcagctgcgggaagaacggaaccgcctggatgcagaactgcagctgagtgcccgcctcatccagcaggaggtgggccgggctcgggagcaaggggaggcagagcggcagcagctgagcaaggtggcccagcagctggagcaggagctgcagcagacccaggagtccctggctagcttggggctgcagctggaggtagcacgccagggccagcaggagagcacagaggaggctgccagtctgcggcaggagctgacccagcagcaggaactctacgggcaagccctgcaagaaaaggtggctgaagtggaaactcggctgcgggagcaactctcagacacagagaggaggctgaacgaggctcggagggagcatgccaaggccgtggtctccttacgccagattcagcgcagagccgcccaggaaaaggagcggagccaggaactcaggcgtctgcaggaggaggcccggaaggaggaggggcagcgactggcccggcgcttgcaggagctagagagggataagaacctcatgctggccaccttgcagcaggaaggtctcctctcccgttacaagcagcagcgactgttgacagttcttccttccctactggataagaagaaatctgtggtgtccagccccaggcctccagagtgttcagcatctgcacctgtagcagcagcagtgcccaccagggagtccataaaagggtccctctctgtcctgctcgatgacctgcaggacctgagtgaagccatttccaaagaggaagctgtttgtcaaggagacaaccttgacagatgctccagctccaatccccagatgagcagctaagcagctgacagttggagggaaagccagcctgggggctgggaggatcctggagaagtgggtggggacagaccagcccttccccatcctggggttgccctgggggataccagctgagtctgaattctgctctaaataaagacgactacagagggaaaaaaaaaaaaaaaaaaaaaaaaaaaaaaaaaaaaaaaaa

SEQ ID NO: 1479 - protein, 782 aa, Homo sapiens
MFPPSGSTGLIPPSHFQARPLSTLPRMAPTWLSDIPLVQPPGYQDVSERRLDTQRPQVTMWERDVSSDRQEPGRRGRSWGLEGSQALSQQAEVIVRQLQELRRLEEEVRLLRETSLQQKMRLEAQAMELEALARAEKAGRAEAEGLRAALAGAEVVRKNLEEGSQRELEEVQRLHQEQLSSLTQAHEEALSSLTSKAEGLEKSLSSLETRRAGEAKELAEAQREAELLRKQLSKTQEDLEAQVTLVENLRKYVGEQVPSEVHSQTWELERQKLLETMQHLQEDRDSLHATAELLQVRVQSLTHILALQEEELTRKVQPSDSLEPEFTRKCQSLLNRWREKVFALMVQLKAQELEHSDSVKQLKGQVASLQEKVTSQSQEQAILQRSLQDKAAEVEVERMGAKGLQLELSRAQEARRQWQQQTASAEEQLRLVVNAVSSSQIWLETTMAKVEGAAAQLPSLNNRLSYAVRKVLTIRGLIARKLALAQLRQESCPLPPPATDVSLELQQLREERNRLDAELQLSARLIQQEVGRAREQGEAERQQLSKVAQQLEQELQQTQESLASLGLQLEVARQGQQESTEEAASLRQELTQQQELYGQALQEKVAEVETRLREQLSDTERRLNEARREHAKAVVSLRQIQRRAAQEKERSQELRRLQEEARKEEGQRLARRLQELERDKNLMLATLQQEGLLSRYKQQRLLTVLPSLLDKKKSVVSSPRPPECSASAPVAAAVPTRESIKGSLSVLLDDLQDLSEAISKEEAVCQGDNLDRCSSSNPQMSS

SEQ ID NO: 1480 - DNA, 1080 bp, Homo sapiens
atgctgccctgcttccaactgctgcgcatagggggcggcaggggcggtgatctctacaccttccacccccccgccggggttggctgcacctatcgcttgggccacagggccgacctgtgtgatgtggccctgcggccccagcaggagcctggcctcatctctgggatccacgccgaactgcatgccgagccccggggtgatgactggagggtcagcctggaagaccacagcagccaaggtactttggtcaataatgtccgactcccaagaggtcacaggctggaattgagtgatggagacctcctgacctttggccctgaagggcccccaggaaccagcccctcggagttctacttcatgttccaacaagtacgagtcaagcctcaggactttgctgccattaccatcccacggtctaggggagaagcccgggttggggctggtttccggcctatgctgccctcccagggggctccacagcggcctctcagcaccttctcccctgcccccaaggccacactgatcctaaactccataggcagcctcagcaagctccggccccagcccctcaccttctcccctagttggggtggaccaaagagcctgcctgttcccgccccacctggggaagtggggaccacgccttctgctccaccccaacgcaatcggaggaaatctgttcaccgagtgttggcggaactggatgatgagagtgagcctcctgagaacccgccaccggtccttatggagcccaggaagaaactccgtgtagacaaagccccactgactcccactggaaatgcacgtggccgtcctcggaagtacccagtgagcgctcccatggctccccctgcagttggggcggggagccctgtgcagctccttgttgctgcctgccccaggaagagacagtggcctgggttcagtgtgatggctgtgacgtctggttccatgtggcctgtgttggctgcagcatccaggctgccagggaggccgacttccgatgcccagggtgccgggctggcattcagcctaaggtccaccgccaaggcaccatcggacacacctgcccatgagtag

SEQ ID NO: 1481 - protein, 359 aa, Homo sapiens
MLPCFQLLRIGGGRGGDLYTFHPPAGVGCTYRLGHRADLCDVALRPQQEPGLISGIHAELHAEPRGDDWRVSLEDHSSQGTLVNNVRLPRGHRLELSDGDLLTFGPEGPPGTSPSEFYFMFQQVRVKPQDFAAITIPRSRGEARVGAGFRPMLPSQGAPQRPLSTFSPAPKATLILNSIGSLSKLRPQPLTFSPSWGGPKSLPVPAPPGEVGTTPSAPPQRNRRKSVHRVLAELDDESEPPENPPPVLMEPRKKLRVDKAPLTPTGNARGRPRKYPVSAPMAPPAVGAGSPVQLLVAACPRKRQWPGFSVMAVTSGSMWPVLAAASRLPGRPTSDAQGAGLAFSLRSTAKAPSDTPAHE

SEQ ID NO: 1482 - DNA, 1417 bp, Homo sapiens
tcccttcgcaagccctcatttcaccaggcccccggcttggggcgccttccttccccatggcgggacacctggcttcggatttcgccttctcgccccctccaggtggtggaggtgatgggccaggggggccggagccgggctgggttgatcctcggacctggctaagcttccaaggccctcctggagggccaggaatcgggccgggggttgggccaggctctgaggtgtgggggattcccccatgccccccgccgtatgagttctgtggggggatggcgtactgtgggccccaggttggagtggggctagtgccccaaggcggcttggagacctctcagcctgagggcgaagcaggagtcggggtggagagcaactccgatggggcctccccggagccctgcaccgtcacccctggtgccgtgaagctggagaaggagaagctggagcaaaacccggaggagtcccaggacatcaaagctctgcagaaagaactcgagcaatttgccaagctcctgaagcagaagaggatcaccctgggatatacacaggccgatgtggggctcaccctgggggttctatttgggaaggtattcagccaaacgaccatctgccgctttgaggctctgcagcttagcttcaagaacatgtgtaagctgcggcccttgctgcagaagtgggtggaggaagctgacaacaatgaaaatcttcaggagatatgcaaagcagaaaccctcgtgcaggcccgaaagagaaagcgaaccagtatcgagaaccgagtgagaggcaacctggagaatttgttcctgcagtgcccgaaacccacactgcagcagatcagccacatcgcccagcagcttgggctcgagaaggatgtggtccgagtgtggttctgtaaccggcgccagaagggcaagcgatcaagcagcgactatgcacaacgagaggattttgaggctgctgggtctcctttctcagggggaccagtgtcctttcctctggccccagggccccattttggtaccccaggctatgggagccctcacttcactgcactgtactcctcggtccctttccctgagggggaagcctttccccctgtctccgtcaccactctgggctctcccatgcattcaaactgaggtgcctgcccttctaggaatgggggacagggggaggggaggagctagggaaagaaaacctggagtttgtgccagggtttttgggattaagttcttcattcactaaggaaggaattgggaacacaaagggtgggggcaggggagtttggggcaactggttggagggaaggtgaagttcaatgatgctcttgattttaatcccacatcatgtatcacttttttcttaaataaagaagcctgggacacagtaaaaaaaaaaaaaaaaaaaaaaaaaaaaa

SEQ ID NO: 1483 - protein, 360 aa, Homo sapiens
MAGHLASDFAFSPPPGGGGDGPGGPEPGWVDPRTWLSFQGPPGGPGIGPGVGPGSEVWGIPPCPPPYEFCGGMAYCGPQVGVGLVPQGGLETSQPEGEAGVGVESNSDGASPEPCTVTPGAVKLEKEKLEQNPEESQDIKALQKELEQFAKLLKQKRITLGYTQADVGLTLGVLFGKVFSQTTICRFEALQLSFKNMCKLRPLLQKWVEEADNNENLQEICKAETLVQARKRKRTSIENRVRGNLENLFLQCPKPTLQQISHIAQQLGLEKDVVRVWFCNRRQKGKRSSSDYAQREDFEAAGSPFSGGPVSFPLAPGPHFGTPGYGSPHFTALYSSVPFPEGEAFPPVSVTTLGSPMHSN

SEQ ID NO: 1484 - DNA, 1177 bp, Homo sapiens
gtagtcctttgttacatgcatgagtcagtgaacagggaatgggtgaatgacatttgtgggtaggttatttctagaagttaggtgggcagcttggaaggcagaggcacttctacagactattccttggggccacacgtaggttcttgaatcccgaatggaaaggggagattgataactggtgtgtttatgttcttacaagtcttctgccttttaaaatccagtcccaggacatcaaagctctgcagaaagaactcgagcaatttgccaagctcctgaagcagaagaggatcaccctgggatatacacaggccgatgtggggctcaccctgggggttctatttgggaaggtattcagccaaacgaccatctgccgctttgaggctctgcagcttagcttcaagaacatgtgtaagctgcggcccttgctgcagaagtgggtggaggaagctgacaacaatgaaaatcttcaggagatatgcaaagcagaaaccctcgtgcaggcccgaaagagaaagcgaaccagtatcgagaaccgagtgagaggcaacctggagaatttgttcctgcagtgcccgaaacccacactgcagcagatcagccacatcgcccagcagcttgggctcgagaaggatgtggtccgagtgtggttctgtaaccggcgccagaagggcaagcgatcaagcagcgactatgcacaacgagaggattttgaggctgctgggtctcctttctcagggggaccagtgtcctttcctctggccccagggccccattttggtaccccaggctatgggagccctcacttcactgcactgtactcctcggtccctttccctgagggggaagcctttccccctgtctccgtcaccactctgggctctcccatgcattcaaactgaggtgcctgcccttctaggaatgggggacagggggaggggaggagctagggaaagaaaacctggagtttgtgccagggtttttgggattaagttcttcattcactaaggaaggaattgggaacacaaagggtgggggcaggggagtttggggcaactggttggagggaaggtgaagttcaatgatgctcttgattttaatcccacatcatgtatcacttttttcttaaataaagaagcctgggacacagtaaaaaaaaaaaaaaaaaaaaaaaaaaaaa

SEQ ID NO: 1485 - protein, 164 aa, Homo sapiens
MCKLRPLLQKWVEEADNNENLQEICKAETLVQARKRKRTSIENRVRGNLENLFLQCPKPTLQQISHIAQQLGLEKDVVRVWFCNRRQKGKRSSSDYAQREDFEAAGSPFSGGPVSFPLAPGPHFGTPGYGSPHFTALYSSVPFPEGEAFPPVSVTTLGSPMHSN

SEQ ID NO: 1486 - DNA, 1719 bp, Homo sapiens
atttctctactcacctgtctccgaatccgccgtggtgtttcaagcgagtcaagattccagacgcgccccaggctggactcggaattactgccccgcgggtctgcattttcacagcggcaggtggcttgtggtccctgacaaggaggaccctgagggcaaccacaccttgccatgcagagcacctggcttctcatctgccaacctcactctgacccggctgcaggaagggaaggagccaaccccggactcaagactcaaggggaccagaaccagggagatgagacataccagggctgggcagctgtgggggtccttccagagaggagctgagatacgcctacctggaggggcccctgggcctggaggggctcctcagtgtgactgggtgaagtgttttcagaggaccagggttgaggttgggggcatctcatccagaccctgccggcatctgcccccagaacccaagggcccctccttcctccctcctcgatggaaatgctggggatgtcctcagtcaccctctgagcactcacacatcaccccttatttggaaatttttctcactctaaccttccttcctgctgcaccttctgccccatccccaggctctggcctctctctctcctcttctaccctttagcaggtaatgactcagttcccactgaggagccagctgtaggtgagagtctgggctctcggtgaggttgggagaaggaaaaggcttatgggccagggggtgggagggagaatgggcacagccagagcagagtggaagggttgggggaggcgataaagacagatgtttccgtattaccatttttctttcatggtccgagggagctgcccttcccccaagcccaggaaagtgaaaagagaagcaggaacagtaaaatactccacaggaaagaaaaatcttagtgatccctcctgctgtctctttccttttgcctattctggcaaattttgtaagtgaaatttgttaccaagatgtgaaaatcttataagaaagtctctaaatatttgagaataaaattatcaatgtctcagctctgcaggctgaaaaaacggaggctttacaaaataaaatcatgcttggaaaacttctcctctgagggatgtcaaaggctgcactgaataagctgtaaggtggtgctgaaatgggtcatttatttgcctgtgtaagctcaggcaggtgttggaattgaggaagtataggtaatgaaaaaagtaaccatgtcctcgggacatagcgactggtgatgaccacacaatcaacacaataaactctagcattcacattgtagtccagctcattcaagcaaagctatctccaatagggagtttaccctgtacagaacacgtgcatttccacctgttctcagactgaccctttgctcatcacaatagtgaaaaaaaacacagccctgggtggagatttaagatgctaatgagtcatgagacgtatgaacaagcatgtacagctactgcacacgtgcacccagaagaccgcccagaacatgcttgctagtaacacctcttcccacccacctcctgtaaataatcatgtaagactcccataaagggagtttctccagcagtgatcaatgctgtctcatccttaggagcagcccaccctgaatcctctcagggtgtacagtttattttgcacttaactttcaaaataatatttttcctttgtaataaattgctttgtacttc

SEQ ID NO: 1487 - protein, 120 aa, Homo sapiens
MRHTRAGQLWGSFQRGAEIRLPGGAPGPGGAPQCDWVKCFQRTRVEVGGISSRPCRHLPPEPKGPSFLPPRWKCWGCPQSPSEHSHITPYLEIFLTLTFLPAAPSAPSPGSGLSLSSSTL

SEQ ID NO: 1488 - DNA, 1543 bp, Homo sapiens
ggccgagatgcgggtcatggcgccccgagccctcctcctgctgctctcgggaggcctggccctgaccgagacctgggcctgctcccactccatgaggtatttcgacaccgccgtgtcccggcccggccgcggagagccccgcttcatctcagtgggctacgtggacgacacgcagttcgtgcggttcgacagcgacgccgcgagtccgagaggggagccgcgggcgccgtgggtggagcaggaggggccggagtattgggaccgggagacacagaagtacaagcgccaggcacaggctgaccgagtgagcctgcggaacctgcgcggctactacaaccagagcgaggacgggtctcacaccctccagaggatgtctggctgcgacctggggcccgacgggcgcctcctccgcgggtatgaccagtccgcctacgacggcaaggattacatcgccctgaacgaggacctgcgctcctggaccgccgcggacaccgcggctcagatcacccagcgcaagttggaggcggcccgtgcggcggagcagctgagagcctacctggagggcacgtgcgtggagtggctccgcagatacctggagaacgggaaggagacgctgcagcgcgcagaacccccaaagacacacgtgacccaccaccccctctctgaccatgaggccaccctgaggtgctgggccctgggcttctaccctgcggagatcacactgacctggcagcgggatggggaggaccagacccaggacaccgagcttgtggagaccaggccagcaggagatggaaccttccagaagtgggcagctgtggtggtgccttctggacaagagcagagatacacgtgccatatgcagcacgaggggctgcaagagcccctcaccctgagctgggagccatcttcccagcccaccatccccatcatgggcatcgttgctggcctggctgtcctggttgtcctagctgtccttggagctgtggtcaccgctatgatgtgtaggaggaagagctcaggtggaaaaggagggagctgctctcaggctgcgtgcagcaacagtgcccagggctctgatgagtctctcatcacttgtaaagcctgagacagctgcctgtgtgggactgagatgcaggatttcttcacacctctcctttgtgacttcaagagcctctggcatctctttctgcaaaggcacctgaatgtgtctgcgttcctgttagcataatgtgaggaggtggagagacagcccacccccgtgtccaccgtgacccctgtccccacactgacctgtgttccctccccgatcatctttcctgttccagagaggtggggctggatgtctccatctctgtctcaaattcatggtgcactgagctgcaacttcttacttccctaatgaagttaagaacctgaatataaatttgtgttctcaaatatttgctatgaagcgttgatggattaattaaataagtcaattcctagaagttgagagagcaaataaagacctgagaaccttccaaaaaaaaaaaaaaaaaaa

SEQ ID NO: 1489 - protein, 366 aa, Homo sapiens
MRVMAPRALLLLLSGGLALTETWACSHSMRYFDTAVSRPGRGEPRFISVGYVDDTQFVRFDSDAASPRGEPRAPWVEQEGPEYWDRETQKYKRQAQADRVSLRNLRGYYNQSEDGSHTLQRMSGCDLGPDGRLLRGYDQSAYDGKDYIALNEDLRSWTAADTAAQITQRKLEAARAAEQLRAYLEGTCVEWLRRYLENGKETLQRAEPPKTHVTHHPLSDHEATLRCWALGFYPAEITLTWQRDGEDQTQDTELVETRPAGDGTFQKWAAVVVPSGQEQRYTCHMQHEGLQEPLTLSWEPSSQPTIPIMGIVAGLAVLVVLAVLGAVVTAMMCRRKSSGGKGGSCSQAACSNSAQGSDESLITCKA

SEQ ID NO: 1490 - DNA, 1533 bp, Homo sapiens
atgctggtcatggcgccccgaaccgtcctcctgctgctctcggcggccctggccctgaccgagacctgggccggctcccactccatgaggtatttctacacctccgtgtcccggcccggccgcggggagccccgcttcatctcagtgggctacgtggacgacacccagttcgtgaggttcgacagcgacgccgcgagtccgagagaggagccgcgggcgccgtggatagagcaggaggggccggagtattgggaccggaacacacagatctacaaggcccaggcacagactgaccgagagagcctgcggaacctgcgcggctactacaaccagagcgaggccgggtctcacaccctccagagcatgtacggctgcgacgtggggccggacgggcgcctcctccgcgggcatgaccagtacgcctacgacggcaaggattacatcgccctgaacgaggacctgcgctcctggaccgccgcggacacggcggctcagatcacccagcgcaagtgggaggcggcccgtgaggcggagcagcggagagcctacctggagggcgagtgcgtggagtggctccgcagatacctggagaacgggaaggacaagctggagcgcgctgaccccccaaagacacacgtgacccaccaccccatctctgaccatgaggccaccctgaggtgctgggccctgggtttctaccctgcggagatcacactgacctggcagcgggatggcgaggaccaaactcaggacactgagcttgtggagaccagaccagcaggagatagaaccttccagaagtgggcagctgtggtggtgccttctggagaagagcagagatacacatgccatgtacagcatgaggggctgccgaagcccctcaccctgagatgggagccgtcttcccagtccaccgtccccatcgtgggcattgttgctggcctggctgtcctagcagttgtggtcatcggagctgtggtcgctgctgtgatgtgtaggaggaagagttcaggtggaaaaggagggagctactctcaggctgcgtgcagcgacagtgcccagggctctgatgtgtctctcacagcttgaaaagcctgagacagctgtcttgtgagggactgagatgcaggatttcttcacgcctcccctttgtgacttcaagagcctctggcatctctttctgcaaaggcacctgaatgtgtctgcgtccctgttagcataatgtgaggaggtggagagacagcccacccttgtgtccactgtgacccctgttcccatgctgacctgtgtttcctccccagtcatctttcttgttccagagaggtggggctggatgtctccatctctgtctcaactttacgtgcactgagctgcaacttcttacttccctactgaaaataagaatctgaatataaatttgttttctcaaatatttgctatgagaggttgatggattaattaaataagtcaattcctggaatttgaaagagcaaataaagacctgagaaccttccagaaaaaaaaaaaaaaaaa

SEQ ID NO: 1491 - protein, 362 aa, Homo sapiens
MLVMAPRTVLLLLSAALALTETWAGSHSMRYFYTSVSRPGRGEPRFISVGYVDDTQFVRFDSDAASPREEPRAPWIEQEGPEYWDRNTQIYKAQAQTDRESLRNLRGYYNQSEAGSHTLQSMYGCDVGPDGRLLRGHDQYAYDGKDYIALNEDLRSWTAADTAAQITQRKWEAAREAEQRRAYLEGECVEWLRRYLENGKDKLERADPPKTHVTHHPISDHEATLRCWALGFYPAEITLTWQRDGEDQTQDTELVETRPAGDRTFQKWAAVVVPSGEEQRYTCHVQHEGLPKPLTLRWEPSSQSTVPIVGIVAGLAVLAVVVIGAVVAAVMCRRKSSGGKGGSYSQAACSDSAQGSDVSLTA

SEQ ID NO: 1492 - DNA, 1365 bp, Homo sapiens
cactgcttgagccgctgagagggtggcgacgtcggggccatggggctgggcccggtcttcctgcttctggctggcatcttcccttttgcacctccgggagctgctgctgagccccacagtcttcgttataacctcacggtgctgtcctgggatggatctgtgcagtcagggtttctcactgaggtacatctggatggtcagcccttcctgcgctgtgacaggcagaaatgcagggcaaagccccagggacagtgggcagaagatgtcctgggaaataagacatgggacagagagaccagagacttgacagggaacggaaaggacctcaggatgaccctggctcatatcaaggaccagaaagaaggcttgcattccctccaggagattagggtctgtgagatccatgaagacaacagcaccaggagctcccagcatttctactacgatggggagctcttcctctcccaaaacctggagactaaggaatggacaatgccccagtcctccagagctcagaccttggccatgaacgtcaggaatttcttgaaggaagatgccatgaagaccaagacacactatcacgctatgcatgcagactgcctgcaggaactacggcgatatctaaaatccggcgtagtcctgaggagaacagtgccccccatggtgaatgtcacccgcagcgaggcctcagagggcaacattaccgtgacatgcagggcttctggcttctatccctggaatatcacactgagctggcgtcaggatggggtatctttgagccacgacacccagcagtggggggatgtcctgcctgatgggaatggaacctaccagacctgggtggccaccaggatttgccaaggagaggagcagaggttcacctgctacatggaacacagcgggaatcacagcactcaccctgtgccctctgggaaagtgctggtgcttcagagtcattggcagacattccatgtttctgctgttgctgctgctgctatttttgttattattattttctatgtccgttgttgtaagaagaaaacatcagctgcagagggtccagagctcgtgagcctgcaggtcctggatcaacacccagttgggacgagtgaccacagggatgccacacagctcggatttcagcctctgatgtcagatcttgggtccactggctccactgagggcgcctagactctacagccaggcagctgggattcaattccctgcctggatctcacgagcactttccctcttggtgcctcagtttcctgacctatgaaacagagaaaataaaagcacttatttattgttgttggaggctgcaaaatgttagtagatatgaggcgtttgcagctgtaccatatt

SEQ ID NO: 1493 - protein, 383 aa, Homo sapiens
MGLGPVFLLLAGIFPFAPPGAAAEPHSLRYNLTVLSWDGSVQSGFLTEVHLDGQPFLRCDRQKCRAKPQGQWAEDVLGNKTWDRETRDLTGNGKDLRMTLAHIKDQKEGLHSLQEIRVCEIHEDNSTRSSQHFYYDGELFLSQNLETKEWTMPQSSRAQTLAMNVRNFLKEDAMKTKTHYHAMHADCLQELRRYLKSGVVLRRTVPPMVNVTRSEASEGNITVTCRASGFYPWNITLSWRQDGVSLSHDTQQWGDVLPDGNGTYQTWVATRICQGEEQRFTCYMEHSGNHSTHPVPSGKVLVLQSHWQTFHVSAVAAAAIFVIIIFYVRCCKKKTSAAEGPELVSLQVLDQHPVGTSDHRDATQLGFQPLMSDLGSTGSTEGA

SEQ ID NO: 1494 - DNA, 2451 bp, Homo sapiens
ctcagattctccccagacgccaaggttgcgggtcatggagtcccgaaccctcctcctgctgttctcgggagccgtggccctgatccagacctgggcagattacaattacaatcaaggcagaaatgatctcatttttacattacaactctggaaaaggcaatagactgagatgcaagtgtgcccccaagtgatgggcagaaggagagaaggtgttttggatgcattctagaacacaggtaatctaaggagagttgatcaaggccgtggaagagtcctccagccactattggccatcaaaggagtcctctgtgtcccaggaatggtcctgctttggtgtccctggtgtgacccatcacccgctgggaacagcctgagagaagtagggcctctgcaccaatgctgctgaggatgtcagagcacaggaacgaggccttgggaaattacctggaaatgcgactgaaatcttccttcctgaggggtctgggctcttggaaatcaaaccctctcaggttgggtggctggacgattctcctcacacttacaatgggacaaggggaaccaggaggcccccaaggggatccctgggttccacacgaactcctcctaccctcattgtgtgacagcagccatgcctcctcctggggatcaggatctattacctgtgcctggagaggaggggactcctcttctcacccgctggtctctggacacatactgtccaattcccctgtggcagctgtaatgtgtagttcaatgggcactcatttgtccccttttaagggtaccctcctttagaatccaggaccttctaccctgcagagtgttgttttgggagagaagtgcaaaatcccacgacaggtgagttgaaggaatgggatatggagccacatccacttccaccccttggtatctggacccacgtgttcttcctactgagattacagaactgtagagatgtctttgatttttaaaatgcaccatgtcctgaaagatggcaccctcccacccgcagagtgcttcctgcaagctggcgttgagctgtgcctatagaagctcttttcaacattctttatggtcagcagcccttggttggtgcagatggtgataggaccagtgggtcccacagcatggccacactgcacctccttcgctgtcaagtgggtcccccacgaagatactgcacggagagcagtgccaagcctgtggatcaggaatatcaacagcccccagagagtggtgctggctgagggtctgagagcaggacaggaaaacccacctatggaataggtgcctatccctgtgaagatgaacctctggcccttccaggatggaaggagtgcaatgtagtcaactcctcacttagggtctggttggtcacctaaagaaatagagccctaccagggaagatcattgggttcaaatgctgatgagtaggacatttagaggtggcagtgtctggatctaccttggtaggagggagtcagtactgttggacccataggtagcctcatccctgccactgtgtttgctccatttatgtacccatcctacccggcctgggctgacccatggggaaggctggctaatttcagtgcttctgcttggttgttcagggccatttcaggtttgggtgttttctggggatgttaacatgggattcaggctcaactcacaagaaacttttccatctcatgatggatgctgttgggcatgtccaatgtatgacttcatgagttacacagatgctaattcgtaggggcacttggaatcacatggttgttttgtgtcccatggtcaagcattctatcttatcagggcctacagtaacatgccaaaagttgcttccaacatatttctctgctttggatggggcatatttctgtgctgtggatgacatggccttactccagaatcccaggccctccactgtgactctcctactggtgcttggttcagctccaccccaaatcttaccccaccactggcactttcagcaccagggggtctgaaggatggtgactgcgccatggcctggatctgctgcagtgtcctttcctgtggaggctccactcaaagctggcatcctcctatgtcacctagagtgtgggtcaaagcaatacacctacatgtagaatgtgatgtcagaactcaaacaggctcaccaggcagtgtgcttccttccttgcatgaggatgcaagatgcaacagtttgtctttcacattggaagggacacccctggatgcccctaaccactagacctgtaaaacttcactgcagtggccacttctgaatctctgtaaggtttatttatcttcaccctctggagagaagatgttttaccaaagcctctagtgtaccttcctcctcttactcatccatcccagtcaacatgatgttgtcaatgaaataaaggaatttaatattctatagtaaaaaaaaaaaaaaaaaaa

SEQ ID NO: 1495 - protein, 132 aa, Homo sapiens
MLLRMSEHRNEALGNYLEMRLKSSFLRGLGSWKSNPLRLGGWTILLTLTMGQGEPGGPQGDPWVPHELLLPSLCDSSHASSWGSGSITCAWRGGDSSSHPLVSGHILSNSPVAAVMCSSMGTHLSPFKGTLL

SEQ ID NO: 1496 - DNA, 2385 bp, Homo sapiens
gggccatggggctgggccgggtcctgctgtttctggccgtcgccttcccttttgcacccccggcagccgccgctgagccccacagtcttcgttacaacctcatggtgctgtcccaggatggatctgtgcagtcagggtttctcgctgagggacatctggatggtcagcccttcctgcgctatgacaggcagaaacgcagggcaaagccccagggacagtgggcagaagatgtcctgggagctgagacctgggacacagagaccgaggacttgacagagaatgggcaagacctcaggaggaccctgactcatatcaaggaccagaaaggaggcttgcattccctccaggagattagggtctgtgagatccatgaagacagcagcaccaggggctcccggcatttctactacaatggggagctcttcctctcccaaaacctggagactcaagaatcgacagtgccccagtcctccagagctcagaccttggctatgaacgtcacaaatttctggaaggaagatgccatgaagaccaagacacactatcgcgctatgcaggcagactgcctgcagaaactacagcgatatctgaaatccggggtggccatcaggagaacagtgccccccatggtgaatgtcacctgcagcgaggtctcagagggcaacatcaccgtgacatgcagggcttccagcttctatccccggaatatcacactgacctggcgtcaggatggggtatctttgagccacaacacccagcagtggggggatgtcctgcctgatgggaatggaacctaccagacctgggtggccaccaggattcgccaaggagaggagcagaggttcacctgctacatggaacacagcgggaatcacggcactcaccctgtgccctctgggaaggcgctggtgcttcagagtcaacggacagactttccatatgtttctgctgctatgccatgttttgttattattattattctctgtgtcccttgttgcaagaagaaaacatcagcggcagagggtccagagcttgtgagcctgcaggtcctggatcaacacccagttgggacaggagaccacagggatgcagcacagctgggatttcagcctctgatgtcagctactgggtccactggttccactgagggcgcctagactctacagccaggcggccaggattcaactccctgcctggatctcaccagcactttccctctgtttcctgacctatgaaacagaaaataacatcacttatttattgttgttggatgctgcaaagtgttagtaggtatgaggtgtttgctgctctgccacgtagagagccagcaaagggatcatgaccaactcaacattccattggaggctatatgatcaaacagcaaattgtttatcatgaatgcaggatgtgggcaaactcacgactgctcctgccaacagaaggtttgctgagggcattcactccatggtgctcattggagttatctactgggtcatctagagcctattgtttgaggaatgcagtcttacaagcctactctggacccagcagctgactccttcttccacccctcttcttgctatctcctataccaataaatacgaagggctgtggaagatcagagcccttgttcacgagaagcaagaagccccctgaccccttgttccaaatatactcttttgtctttctctttattcccacgttcgccctttgttcagtccaatacagggttgtggggcccttaacagtgccatattaattggtatcattatttctgttgtttttgtttttgtttttgtttttgtttttgagacagagtctcactctgtcacccaggctgcagttcactggtgtgatctcagctcactgcaacctctgcctcccaggttcaagcacttctcgtacctcagactcccgaatagctgggattacagacaggcaccaccacacccagctaatttttgtattttttgtagagacggggtttcgccaagttgaccagcccagtttcaaactcctgacctcaggtgatctgcctgccttggcatcccaaagtgctgggattacaagaatgagccaccgtgcctggcctattttattatattgtaatatattttattatattagccaccatgcctgtcctattttcttatgttttaatatattttaatatattacatgtgcagtaattagattatcatgggtgaactttatgagtgagtatcttggtgatgactcctcctgaccagcccaggaccagctttcttgtcaccttgaggtcccctcgccccgtcacaccgttatgcattactctgtgtctactattatgtgtgcataatttataccgtaaatgtttactctttaaatagaaaaaaaaaaaaaaaa

SEQ ID NO: 1497 - protein, 383 aa, Homo sapiens
MGLGRVLLFLAVAFPFAPPAAAAEPHSLRYNLMVLSQDGSVQSGFLAEGHLDGQPFLRYDRQKRRAKPQGQWAEDVLGAETWDTETEDLTENGQDLRRTLTHIKDQKGGLHSLQEIRVCEIHEDSSTRGSRHFYYNGELFLSQNLETQESTVPQSSRAQTLAMNVTNFWKEDAMKTKTHYRAMQADCLQKLQRYLKSGVAIRRTVPPMVNVTCSEVSEGNITVTCRASSFYPRNITLTWRQDGVSLSHNTQQWGDVLPDGNGTYQTWVATRIRQGEEQRFTCYMEHSGNHGTHPVPSGKALVLQSQRTDFPYVSAAMPCFVIIIILCVPCCKKKTSAAEGPELVSLQVLDQHPVGTGDHRDAAQLGFQPLMSATGSTGSTEGA

SEQ ID NO: 1498 - DNA, 709 bp, Homo sapiens
agttcctggtggccgttggacagctcacacagctcccggccaggtcacccgccatggtcctccctctgccctggctctctcggtaccatttccttcgcctccttctgccctcctggtccttggcaccccagggctcccatgggtgctgctcccaaaaccccaaagcaagcatggaagagcagaccaactccagaggaaatgggaagatgacgtcccctcccaggggccctgggacccaccgcacagctgagctggcccgagctgaagagttgttggagcagcagctggagctgtaccaggccctccttgaagggcaggagggagcctgggaggcccaagccctggtgctcaagatccagaagctgaaggaacagatgaggaggcaccaagagagccttggaggaggtgcctaagtttcccccagtgcccacagcaccctccggcactgaaaatacacgcaccacccaccaggagccttgggatcataaacaccccagcgtcttcccaggccagagaaagtggaagagaccacaaaccgcaggcaattggcaggcagtgggggagccagggctctgcagtcttagtcccattcccctttgatctcacagcaggcagggcacccaggccttataggaattcaccctggaccatgccctaaaataacctcaccccaaatacaataaagggacgaagcacttatagataccac

SEQ ID NO: 1499 - protein, 119 aa, Homo sapiens
MVLPLPWLSRYHFLRLLLPSWSLAPQGSHGCCSQNPKASMEEQTNSRGNGKMTSPPRGPGTHRTAELARAEELLEQQLELYQALLEGQEGAWEAQALVLKIQKLKEQMRRHQESLGGGA

SEQ ID NO: 1500 - DNA, 2133 bp, Homo sapiens
ctcagctagggcctgccggttcctagtgcgtgcccagcagtcctcaggtcaccttcactaccgggccaaggaccccgtgggaactcgcagccttcgccacactcgttcctcgcgcatccatggaggggtgcctacagagaagacctgcgtggcaaaaacctaaacgaagagatgaggggcatggagaggagtaggataagagaataaagataacagtgggggggagacgttagtttcctttatatcttttgttactggcggtagcagtgaagttagaaacggttttaaaacaaatttcagacaggcattttccaaaggcaagcctggagcgcacggatctgtataaccgcggaaggccctgtttccggtcccttgcgcctgcgctcttgcagccaagaaggcgggaggctggagtagagggaagcctgcaaccggaagtgaaggcagatttccctccttcgtcgctgttgctgccgccatacgcgctctccctgtttagctcttctgttagaaatagtatctttgttttcctttgctgttcctcaatcccctactcttcaccccttgttttcacctattttgcgagaacccatccagatcccccttcccttcttcccctgccggcccagttatggcagagaacgatgtggacaatgagctcttggactatgaagatgatgaggtggagacagcagctgggggagatggggctgaggcccctgccaagaaggatgtcaagggctcctatgtctccatccacagctctggctttcgtgacttcctgctcaagccagagttgctccgggccattgtcgactgtggctttgagcatccgtcagaagtccagcatgagtgcatccctcaggccattctgggaatggatgtcctgtgccaggccaagtcgggcatgggaaagacagcagtgtttgtcttggccacactgcaacagctggagccagttactgggcaggtgtctgtactggtgatgtgtcacactcgggagttggcttttcagatcagcaaggaatatgagcgcttctctaaatacatgcccaatgtcaaggttgctgttttttttggtggtctgtctatcaagaaggatgaagaggtgctgaagaagaactgcccgcatatcgtcgtggggactccaggccgtatcctagccctggctcgaaataagagcctcaacctcaaacacattaaacactttattttggatgaatgtgataagatgcttgaacagctcgacatgcgtcgggatgtccaggaaatttttcgcatgaccccccacgagaagcaggtcatgatgttcagtgctaccttgagcaaagagatccgtccagtctgccgcaagttcatgcaagatccaatggagatcttcgtggatgatgagacgaagttgacgctgcatgggttgcagcagtactacgtgaaactgaaggacaacgagaagaaccggaagctctttgaccttctggatgtccttgagttcaaccaggtggtgatctttgtgaagtctgtgcagcggtgcattgccttggcccagctactagtggagcagaacttcccagccattgccatccaccgtgggatgccccaggaggagaggctttctcggtatcagcagtttaaagattttcaacgacgaattcttgtggctaccaacctatttggccgaggcatggacatcgagcgggtgaacattgcttttaattatgacatgcctgaggattctgacacctacctgcatcgggtggccagagcaggccggtttggcaccaagggcttggctatcacatttgtgtccgatgagaatgatgccaagatcctcaatgatgtgcaggatcgctttgaggtcaatattagtgagctgcctgatgagatagacatctcctcctacattgaacagacacggtagaagactcgcccattttggaatgtgaccgtctgtccttcaggagaggacaccagggtgggggtgaaggagacactactgcccccacccctgacagcccccaccccatggcttccatcttttgcatcaccaccactcctgaacccccatttctgatttgtcagaatttttttttaacaaaactaaaaatgaaacacatgtgtctgtggtatctataa

SEQ ID NO: 1501 - protein, 428 aa, Homo sapiens
MAENDVDNELLDYEDDEVETAAGGDGAEAPAKKDVKGSYVSIHSSGFRDFLLKPELLRAIVDCGFEHPSEVQHECIPQAILGMDVLCQAKSGMGKTAVFVLATLQQLEPVTGQVSVLVMCHTRELAFQISKEYERFSKYMPNVKVAVFFGGLSIKKDEEVLKKNCPHIVVGTPGRILALARNKSLNLKHIKHFILDECDKMLEQLDMRRDVQEIFRMTPHEKQVMMFSATLSKEIRPVCRKFMQDPMEIFVDDETKLTLHGLQQYYVKLKDNEKNRKLFDLLDVLEFNQVVIFVKSVQRCIALAQLLVEQNFPAIAIHRGMPQEERLSRYQQFKDFQRRILVATNLFGRGMDIERVNIAFNYDMPEDSDTYLHRVARAGRFGTKGLAITFVSDENDAKILNDVQDRFEVNISELPDEIDISSYIEQTR

SEQ ID NO: 1502 - DNA, 2003 bp, Homo sapiens
ctcagctagggcctgccggttcctagtgcgtgcccagcagtcctcaggtcaccttcactaccgggccaaggaccccgtgggaactcgcagccttcgccacactcgttcctcgcgcatccatggaggggtgcctacagagaagacctgcgtggcaaaaacctaaacgaagagatgaggggcatggagaggagtaggataagagaataaagataacagtgggggggagacgttagtttcctttatatcttttgttactggcggtagcagtgaagttagaaacggttttaaaacaaatttcagacaggcattttccaaaggcaagcctggagcgcacggatctgtataaccgcggaaggccctgtttccggtcccttgcgcctgcgctcttgcagccaagaaggcgggaggctggagtagagggaagcctgcaaccggaagtgaaggcagatttccctccttcgtcgctgttgctgccgccatacgcgctctccctgtttagttatggcagagaacgatgtggacaatgagctcttggactatgaagatgatgaggtggagacagcagctgggggagatggggctgaggcccctgccaagaaggatgtcaagggctcctatgtctccatccacagctctggctttcgtgacttcctgctcaagccagagttgctccgggccattgtcgactgtggctttgagcatccgtcagaagtccagcatgagtgcatccctcaggccattctgggaatggatgtcctgtgccaggccaagtcgggcatgggaaagacagcagtgtttgtcttggccacactgcaacagctggagccagttactgggcaggtgtctgtactggtgatgtgtcacactcgggagttggcttttcagatcagcaaggaatatgagcgcttctctaaatacatgcccaatgtcaaggttgctgttttttttggtggtctgtctatcaagaaggatgaagaggtgctgaagaagaactgcccgcatatcgtcgtggggactccaggccgtatcctagccctggctcgaaataagagcctcaacctcaaacacattaaacactttattttggatgaatgtgataagatgcttgaacagctcgacatgcgtcgggatgtccaggaaatttttcgcatgaccccccacgagaagcaggtcatgatgttcagtgctaccttgagcaaagagatccgtccagtctgccgcaagttcatgcaagatccaatggagatcttcgtggatgatgagacgaagttgacgctgcatgggttgcagcagtactacgtgaaactgaaggacaacgagaagaaccggaagctctttgaccttctggatgtccttgagttcaaccaggtggtgatctttgtgaagtctgtgcagcggtgcattgccttggcccagctactagtggagcagaacttcccagccattgccatccaccgtgggatgccccaggaggagaggctttctcggtatcagcagtttaaagattttcaacgacgaattcttgtggctaccaacctatttggccgaggcatggacatcgagcgggtgaacattgcttttaattatgacatgcctgaggattctgacacctacctgcatcgggtggccagagcaggccggtttggcaccaagggcttggctatcacatttgtgtccgatgagaatgatgccaagatcctcaatgatgtgcaggatcgctttgaggtcaatattagtgagctgcctgatgagatagacatctcctcctacattgaacagacacggtagaagactcgcccattttggaatgtgaccgtctgtccttcaggagaggacaccagggtgggggtgaaggagacactactgcccccacccctgacagcccccaccccatggcttccatcttttgcatcaccaccactcctgaacccccatttctgatttgtcagaatttttttttaacaaaactaaaaatgaaacacatgtgtctgtggtatctataa

SEQ ID NO: 1503 - protein, 428 aa, Homo sapiens; identical to SEQ ID NO: 1501

SEQ ID NO: 1504 - DNA, 1594 bp, Homo sapiens
ggctaacctgttgtaagcccgcagctttgggcctggtctctgctgctcccaggcggcccctttgggtactgcctgagcaagaagtgctggagaggaggaccagtcatcaataggaggatgagattgggagagacactcggtgcaggaggctgagtgagcaggggagcactaagacccaggggtagtggaggactgcagcaacgagctggaggaggagaagtaagcggtggggggtgggagccatctggtactttgacagcattcaaaacagcatcggccataacaacagaaatggccagtcagtcccaaggtatccagcagcttctgcaagctgagaagcgggcagctgagaaggtggcagatgccagaaagaggaaggcccggcgactgaagcaggcaaaggaggaggcacagatggaggtggagcaataccgcagagagcgagagcacgaattccagagcaagcagcaggcggccatgggctcccaggggaacctgtctgctgaggtggagcaggctacaaggcgccaggtgcagggcatgcagagctcccagcagagaaaccgagagcgtgtcctggcccagcttcttggcatggtctgcgacgtcaggccccaggtccaccccaactaccggatttctgcctagggccaccgtagggcctgactccttctgccagttccctccctcaaagaaatcctccaatcaaaatcacctcccaccataatccctgtcttctttccatcccctagaaatcctgggaggcaggatccaataattttcctgtgacacttataaatatcctgctcacatctgaatctccttgttgttctttaaccctcactgggactttgtaaacttccaagtcattctcacctaaaccctctgtgaaatttgtaatatggggaagtaggaatgtggaaaacatcctgacttcagtgtctggccgatgtgggtccctctcttgaccctgtcacttgctggctgtgaaaccaggacaagctacttaacttggtagcctcgatgtcctcctctgtgaaactgggatgataataatgcctaccttgtgagggttgcttcaatgattaggaatcattctgtaaagtctagcacagttccttgcatgttgtagcagtgattcagtaagtagcaaccctgtgatactattaccaccacctgctcactggtcaaaacctacacagctgtttcctcacgtccatcactggctctctaattccacttgttcattctgtgaccctagttattttctgaaaaattggttcttctcttttcccagagaccttctgatctccaaaaagaggagatgactacatttagcccctctcttataattccaggtagataactgcattttgtagcctctctttgtttttcttttgctgatctttgtctttattagattttcctcctttcctatttccccaaagacttatcagatgctcattgctttctaagatctaaaatgatactgtgttccctcatatgcatgcccttcctttctatatccttgacaccttactttcccattgtaacaataaaaaaagtatcaataaaataattattggcaaataaa

SEQ ID NO: 1505 - protein, 118 aa, Homo sapiens
MASQSQGIQQLLQAEKRAAEKVADARKRKARRLKQAKEEAQMEVEQYRREREHEFQSKQQAAMGSQGNLSAEVEQATRRQVQGMQSSQQRNRERVLAQLLGMVCDVRPQVHPNYRISA

SEQ ID NO: 1506 - DNA, 1440 bp, Homo sapiens
ggctaacctgttgtaagcccgcagctttgggcctggtctctgctgctcccaggcggcccctttgggtactgcctgagcaagaagtgctggagaggaggaccagtcatcaataggaggatgagattgggagagacactcggtgcaggaggctgagtgagcaggggagcactaagacccaggggtagtggaggactgcagcaacgagctggaggaggagaaggaaggcccggcgactgaagcaggcaaaggaggaggcacagatggaggtggagcaataccgcagagagcgagagcacgaattccagagcaagcagcaggcggccatgggctcccaggggaacctgtctgctgaggtggagcaggctacaaggcgccaggtgcagggcatgcagagctcccagcagagaaaccgagagcgtgtcctggcccagcttcttggcatggtctgcgacgtcaggccccaggtccaccccaactaccggatttctgcctagggccaccgtagggcctgactccttctgccagttccctccctcaaagaaatcctccaatcaaaatcacctcccaccataatccctgtcttctttccatcccctagaaatcctgggaggcaggatccaataattttcctgtgacacttataaatatcctgctcacatctgaatctccttgttgttctttaaccctcactgggactttgtaaacttccaagtcattctcacctaaaccctctgtgaaatttgtaatatggggaagtaggaatgtggaaaacatcctgacttcagtgtctggccgatgtgggtccctctcttgaccctgtcacttgctggctgtgaaaccaggacaagctacttaacttggtagcctcgatgtcctcctctgtgaaactgggatgataataatgcctaccttgtgagggttgcttcaatgattaggaatcattctgtaaagtctagcacagttccttgcatgttgtagcagtgattcagtaagtagcaaccctgtgatactattaccaccacctgctcactggtcaaaacctacacagctgtttcctcacgtccatcactggctctctaattccacttgttcattctgtgaccctagttattttctgaaaaattggttcttctcttttcccagagaccttctgatctccaaaaagaggagatgactacatttagcccctctcttataattccaggtagataactgcattttgtagcctctctttgtttttcttttgctgatctttgtctttattagattttcctcctttcctatttccccaaagacttatcagatgctcattgctttctaagatctaaaatgatactgtgttccctcatatgcatgcccttcctttctatatccttgacaccttactttcccattgtaacaataaaaaaagtatcaataaaataattattggcaaataaa

SEQ ID NO: 1507 - protein, 77 aa, Homo sapiens
MEVEQYRREREHEFQSKQQAAMGSQGNLSAEVEQATRRQVQGMQSSQQRNRERVLAQLLGMVCDVRPQVHPNYRISA

SEQ ID NO: 1508 - DNA, 1491 bp, Homo sapiens
ggagtgtctccgcccttcccgcctcccgtctccgagcttcttaaacacaggccttgggcctacggctctgggggtacttgggggggcgggggcaggtctgatgagtaacccctccccccaggttccagaggaagaagcctccacatctgtctgccggcccaagagttccatggcctccacttcccgccgccaacgccgagaacgtcgctttcgtcgttacttgtctgcaggacggctggtccgggcccaggccctcctccagcgacacccaggcctcgatgtagatgctgggcagcccccaccactgcaccgggcctgtgcccgccacgatgcccctgccctgtgcctgctgcttcggctcggggctgaccctgcccaccaggaccgccatggggacacggcactgcatgctgctgcccgccagggcccagatgcctacaccgatttcttcctcccgctgctaagccgctgtccctccgccatgggaataaagaataaggatggggagacccctggccaaattttgggctggggacccccctgggattctgctgaagaggaggaagaagatgatgcctccaaggagcgggaatggagacagaagctccagggtgagctggaggacgagtggcaggaagtcatggggaggtttgaaggtgatgcctcccatgaaacccaggaacctgagtccttctcagcctggtcagatcgcctggcccgggaacatgcccagaagtgccagcagcagcagcgagaagcagagggatcctgtcgacccccacgtgctgagggctccagccagagctggcgacagcaggaggaggagcagcggctcttcagggagcgagcccgggccaaggaggaagagctgcgtgagagccgagccaggagggcgcaggaggctctaggggaccgagaacccaagccaaccagggccgggcccagggaagagcaccccagaggagcggggaggggcagcctctggcgatttggtgatgtgccctggccctgccctgggggaggggacccagaggccatggctgcagccctggtggccaggggcccccctttggaggaacagggggctctgaggaggtacttgagggtccagcaggtccgctggcaccctgaccgcttcctgcagcgattccgaagccagattgagacctgggagctgggccgtgtgatgggagcagtgacagccctttctcaggccctgaatcgccatgcagaggccctcaagtgaccctagggaagaagcaagaaacttcggggctgcagcctcaggatgaggcagaaggaagggtaagggaaaggatggggaccacaaggaagagccaggtgctgctcagcagaggatatgggtgggagcgaaagttgtaacaagtgggggtggggggtgcgggccgccaccactgctccttgactctgccgtttcctaataagacctggttccacatctcaaaaaaaaaaaaaaaaaaaaaaaaaaaa

SEQ ID NO: 1509 - protein, 381 aa, Homo sapiens
MSNPSPQVPEEEASTSVCRPKSSMASTSRRQRRERRFRRYLSAGRLVRAQALLQRHPGLDVDAGQPPPLHRACARHDAPALCLLLRLGADPAHQDRHGDTALHAAARQGPDAYTDFFLPLLSRCPSAMGIKNKDGETPGQILGWGPPWDSAEEEEEDDASKEREWRQKLQGELEDEWQEVMGRFEGDASHETQEPESFSAWSDRLAREHAQKCQQQQREAEGSCRPPRAEGSSQSWRQQEEEQRLFRERARAKEEELRESRARRAQEALGDREPKPTRAGPREEHPRGAGRGSLWRFGDVPWPCPGGGDPEAMAAALVARGPPLEEQGALRRYLRVQQVRWHPDRFLQRFRSQIETWELGRVMGAVTALSQALNRHAEALK

SEQ ID NO: 1510 - DNA, 1386 bp, Homo sapiens
gccccatctccttgggctgcccgtgcttcgtgctttggactaccgcccagcagtgtcctgccctctgcctgggcctcggtccctcctgcacctgctgcctggatccccggcctgcctgggcctgggccttggttctccccatgacaccacctgaacgtctcttcctcccaagggtgtgtggcaccaccctacacctcctccttctggggctgctgctggttctgctgcctggggcccaggggctccctggtgttggcctcacaccttcagctgcccagactgcccgtcagcaccccaagatgcatcttgcccacagcaccctcaaacctgctgctcacctcattggagaccccagcaagcagaactcactgctctggagagcaaacacggaccgtgccttcctccaggatggtttctccttgagcaacaattctctcctggtccccaccagtggcatctacttcgtctactcccaggtggtcttctctgggaaagcctactctcccaaggccacctcctccccactctacctggcccatgaggtccagctcttctcctcccagtaccccttccatgtgcctctcctcagctcccagaagatggtgtatccagggctgcaggaaccctggctgcactcgatgtaccacggggctgcgttccagctcacccagggagaccagctatccacccacacagatggcatcccccacctagtcctcagccctagtactgtcttctttggagccttcgctctgtagaacttggaaaaatccagaaagaaaaaataattgatttcaagaccttctccccattctgcctccattctgaccatttcaggggtcgtcaccacctctcctttggccattccaacagctcaagtcttccctgatcaagtcaccggagctttcaaagaaggaattctaggcatcccaggggaccacacctccctgaaccatccctgatgtctgtctggctgaggatttcaagcctgcctaggaattcccagcccaaagctgttggtctgtcccaccagctaggtggggcctagatccacacacagaggaagagcaggcacatggaggagcttgggggatgactagaggcagggaggggactatttatgaaggcaaaaaaattaaattatttatttatggaggatggagagaggggaataatagaagaacatccaaggagaaacagagacaggcccaagagatgaagagtgagagggcatgcgcacaaggctgaccaagagagaaagaagtaggcatgagggatcacagggccccagaaggcagggaaaggctctgaaagccagctgccgaccagagccccacacggaggcatctgcaccctcgatgaagcccaataaacctcttttctctg

SEQ ID NO: 1511 - protein, 205 aa, Homo sapiens
MTPPERLFLPRVCGTTLHLLLLGLLLVLLPGAQGLPGVGLTPSAAQTARQHPKMHLAHSTLKPAAHLIGDPSKQNSLLWRANTDRAFLQDGFSLSNNSLLVPTSGIYFVYSQVVFSGKAYSPKATSSPLYLAHEVQLFSSQYPFHVPLLSSQKMVYPGLQEPWLHSMYHGAAFQLTQGDQLSTHTDGIPHLVLSPSTVFFGAFAL

SEQ ID NO: 1512 - DNA, 1669 bp, Homo sapiens
ctccctcagcaaggacagcagaggaccagctaagagggagagaagcaactacagaccccccctgaaaacaaccctcagacgccacatcccctgacaagctgccaggcaggttctcttcctctcacatactgacccacggctccaccctctctcccctggaaaggacaccatgagcactgaaagcatgatccgggacgtggagctggccgaggaggcgctccccaagaagacaggggggccccagggctccaggcggtgcttgttcctcagcctcttctccttcctgatcgtggcaggcgccaccacgctcttctgcctgctgcactttggagtgatcggcccccagagggaagagttccccagggacctctctctaatcagccctctggcccaggcagtcagatcatcttctcgaaccccgagtgacaagcctgtagcccatgttgtagcaaaccctcaagctgaggggcagctccagtggctgaaccgccgggccaatgccctcctggccaatggcgtggagctgagagataaccagctggtggtgccatcagagggcctgtacctcatctactcccaggtcctcttcaagggccaaggctgcccctccacccatgtgctcctcacccacaccatcagccgcatcgccgtctcctaccagaccaaggtcaacctcctctctgccatcaagagcccctgccagagggagaccccagagggggctgaggccaagccctggtatgagcccatctatctgggaggggtcttccagctggagaagggtgaccgactcagcgctgagatcaatcggcccgactatctcgactttgccgagtctgggcaggtctactttgggatcattgccctgtgaggaggacgaacatccaaccttcccaaacgcctcccctgccccaatccctttattaccccctccttcagacaccctcaacctcttctggctcaaaaagagaattgggggcttagggtcggaacccaagcttagaactttaagcaacaagaccaccacttcgaaacctgggattcaggaatgtgtggcctgcacagtgaagtgctggcaaccactaagaattcaaactggggcctccagaactcactggggcctacagctttgatccctgacatctggaatctggagaccagggagcctttggttctggccagaatgctgcaggacttgagaagacctcacctagaaattgacacaagtggaccttaggccttcctctctccagatgtttccagacttccttgagacacggagcccagccctccccatggagccagctccctctatttatgtttgcacttgtgattatttattatttatttattatttatttatttacagatgaatgtatttatttgggagaccggggtatcctgggggacccaatgtaggagctgccttggctcagacatgttttccgtgaaaacggagctgaacaataggctgttcccatgtagccccctggcctctgtgccttcttttgattatgttttttaaaatatttatctgattaagttgtctaaacaatgctgatttggtgaccaactgtcactcattgctgagcctctgctccccaggggagttgtgtctgtaatcgccctactattcagtggcgagaaataaagtttgcttagaaaagaa

SEQ ID NO: 1513 - protein, 233 aa, Homo sapiens
MSTESMIRDVELAEEALPKKTGGPQGSRRCLFLSLFSFLIVAGATTLFCLLHFGVIGPQREEFPRDLSLISPLAQAVRSSSRTPSDKPVAHVVANPQAEGQLQWLNRRANALLANGVELRDNQLVVPSEGLYLIYSQVLFKGQGCPSTHVLLTHTISRIAVSYQTKVNLLSAIKSPCQRETPEGAEAKPWYEPIYLGGVFQLEKGDRLSAEINRPDYLDFAESGQVYFGIIAL

SEQ ID NO: 1514 - DNA, 894 bp, Homo sapiens
cagtctcaatgggggcactggggctggagggcaggggtgggaggctccaggggaggggttccctcctgctagctgtggcaggagccacttctctggtgaccttgttgctggcggtgcctatcactgtcctggctgtgctggccttagtgccccaggatcagggaggactggtaacggagacggccgaccccggggcacaggcccagcaaggactggggtttcagaagctgccagaggaggagccagaaacagatctcagccccgggctcccagctgcccacctcataggcgctccgctgaaggggcaggggctaggctgggagacgacgaaggaacaggcgtttctgacgagcgggacgcagttctcggacgccgaggggctggcgctcccgcaggacggcctctattacctctactgtctcgtcggctaccggggccgggcgccccctggcggcggggacccccagggccgctcggtcacgctgcgcagctctctgtaccgggcggggggcgcctacgggccgggcactcccgagctgctgctcgagggcgccgagacggtgactccagtgctggacccggccaggagacaagggtacgggcctctctggtacacgagcgtggggttcggcggcctggtgcagctccggaggggcgagagggtgtacgtcaacatcagtcaccccgatatggtggacttcgcgagagggaagaccttctttggggccgtgatggtggggtgagggaatatgagtgcgtggtgcgagtgcgtgaatattgggggcccggacgcccaggaccccatggcagtgggaaaaatgtaggagactgtttggaaattgattttgaacctgatgaaaataaagaatggaaagcttcagtgctgccgataaa

SEQ ID NO: 1515 - protein, 244 aa, Homo sapiens
MGALGLEGRGGRLQGRGSLLLAVAGATSLVTLLLAVPITVLAVLALVPQDQGGLVTETADPGAQAQQGLGFQKLPEEEPETDLSPGLPAAHLIGAPLKGQGLGWETTKEQAFLTSGTQFSDAEGLALPQDGLYYLYCLVGYRGRAPPGGGDPQGRSVTLRSSLYRAGGAYGPGTPELLLEGAETVTPVLDPARRQGYGPLWYTSVGFGGLVQLRRGERVYVNISHPDMVDFARGKTFFGAVMVG

SEQ ID NO: 1516 - DNA, 848 bp, Homo sapiens
cagtctcaatgggggcactggggctggagggcaggggtgggaggctccaggggaggggttccctcctgctagctgtggcaggagccacttctctggtgaccttgttgctggcggtgcctatcactgtcctggctgtgctggccttagtgccccaggatcagggaggactgggtttcagaagctgccagaggaggagccagaaacagatctcagccccgggctcccagctgcccacctcataggcgctccgctgaaggggcaggggctaggctgggagacgacgaaggaacaggcgtttctgacgagcgggacgcagttctcggacgccgaggggctggcgctcccgcaggacggcctctattacctctactgtctcgtcggctaccggggccgggcgccccctggcggcggggacccccagggccgctcggtcacgctgcgcagctctctgtaccgggcggggggcgcctacgggccgggcactcccgagctgctgctcgagggcgccgagacggtgactccagtgctggacccggccaggagacaagggtacgggcctctctggtacacgagcgtggggttcggcggcctggtgcagctccggaggggcgagagggtgtacgtcaacatcagtcaccccgatatggtggacttcgcgagagggaagaccttctttggggccgtgatggtggggtgagggaatatgagtgcgtggtgcgagtgcgtgaatattgggggcccggacgcccaggaccccatggcagtgggaaaaatgtaggagactgtttggaaattgattttgaacctgatgaaaataaagaatggaaagcttcagtgctgccgataaa

SEQ ID NO: 1517 - protein, 77 aa, Homo sapiens
MGALGLEGRGGRLQGRGSLLLAVAGATSLVTLLLAVPITVLAVLALVPQDQGGLGFRSCQRRSQKQISAPGSQLPTS

SEQ ID NO: 1518 - DNA, 765 bp, Homo sapiens
aggctgggggagaagttaaagccagaggaggggcaggaatgtctgaggtggcaacacttctcttcagccagacagcactggccagtttggagtctgtccatcctgcaggccacaagctctggatgaggaacttgaggcaagtcaccagcccctgatcatttcgcctaaaagagcaaggactagagttcctgacctccaggccagtccctgatccctgacctaatgttatcgcggaatgatgatatatgtatctacgggggcctggggctgggcgggctcctgcttctggcagtggtccttctgtccgcctgcctgtgttggctgcatcgaagagtaaagaggctggagaggagctggcccagggctcctcagagcaggaactccactatgcatctctgcagaggctgccagtgcccagcagtgagggacctgacctcaggggcagagacaagagaggcaccaaggaggatccaagagctgactatgcctgcattgctgagaacaaacccacctgagcaccccagacaccttcctcaacccaggcgggtggacagggtccccctgtggtccagccagtaaaaaccatggtccccccacttctgtgtctcagtcctctcagtccatctcgagcctccgttcaaattgatcatcatcaaaacttatgtggctttttgacctttgaatagggaattttttaaattttttaaaaattaaaataaaaaaaacacatggctcacccttccacccaaaaaaaaaaaaaaaaaa

SEQ ID NO: 1519 - protein, 118 aa, Homo sapiens
MLSRNDDICIYGGLGLGGLLLLAVVLLSACLCWLHRRVKRLERSWPRAPQSRNSTMHLCRGCQCPAVRDLTSGAETREAPRRIQELTMPALLRTNPPEHPRHLPQPRRVDRVPLWSSQ

SEQ ID NO: 1520 - DNA, 619 bp, Homo sapiens
cacccacccaggcccaggctccttcccctccatcatccccttaccagcacctagaaccatccagggctgaaaagtcccctccaaaccacgtgatgaggaacttgaggcaagtcaccagcccctgatcatttcgcctaaaagagcaaggactagagttcctgacctccaggccagtccctgatccctgacctaatgttatcgcggaatgatgcccagggctcctcagagcaggaactccactatgcatctctgcagaggctgccagtgcccagcagtgagggacctgacctcaggggcagagacaagagaggcaccaaggaggatccaagagctgactatgcctgcattgctgagaacaaacccacctgagcaccccagacaccttcctcaacccaggcgggtggacagggtccccctgtggtccagccagtaaaaaccatggtccccccacttctgtgtctcagtcctctcagtccatctcgagcctccgttcaaattgatcatcatcaaaacttatgtggctttttgacctttgaatagggaattttttaaattttttaaaaattaaaataaaaaaaacacatggctcacccttccacccaaaaaaaaaaaaaaaaaa

SEQ ID NO: 1521 - protein, 75 aa, Homo sapiens
MMPRAPQSRNSTMHLCRGCQCPAVRDLTSGAETREAPRRIQELTMPALLRTNPPEHPRHLPQPRRVDRVPLWSSQ

SEQ ID NO: 1522 - DNA, 628 bp, Homo sapiens
aggctgggggagaagttaaagccagaggaggggcaggaatgtctgaggtggcaacacttctcttcagccagacagcactggccagtttggagtctgtccatcctgcaggccacaagctctggatgaggaacttgaggcaagtcaccagcccctgatcatttcgcctaaaagagcaaggactagagttcctgacctccaggccagtccctgatccctgacctaatgttatcgcggaatgatgtaaagaggctggagaggagctggaggctgccagtgcccagcagtgagggacctgacctcaggggcagagacaagagaggcaccaaggaggatccaagagctgactatgcctgcattgctgagaacaaacccacctgagcaccccagacaccttcctcaacccaggcgggtggacagggtccccctgtggtccagccagtaaaaaccatggtccccccacttctgtgtctcagtcctctcagtccatctcgagcctccgttcaaattgatcatcatcaaaacttatgtggctttttgacctttgaatagggaattttttaaattttttaaaaattaaaataaaaaaaacacatggctcacccttccacccaaaaaaaaaaaaaaaaaa

SEQ ID NO: 1523 - protein, 51 aa, Homo sapiens
MLSRNDVKRLERSWRLPVPSSEGPDLRGRDKRGTKEDPRADYACIAENKPT

SEQ ID NO: 1524 - DNA, 650 bp, Homo sapiens
aggctgggggagaagttaaagccagaggaggggcaggaatgtctgaggtggcaacacttctcttcagccagacagcactggccagtttggagtctgtccatcctgcaggccacaagctctggatgaggaacttgaggcaagtcaccagcccctgatcatttcgcctaaaagagcaaggactagagttcctgacctccaggccagtccctgatccctgacctaatgttatcgcggaatgatggcccagggctcctcagagcaggaactccactatgcatctctgcagaggctgccagtgcccagcagtgagggacctgacctcaggggcagagacaagagaggcaccaaggaggatccaagagctgactatgcctgcattgctgagaacaaacccacctgagcaccccagacaccttcctcaacccaggcgggtggacagggtccccctgtggtccagccagtaaaaaccatggtccccccacttctgtgtctcagtcctctcagtccatctcgagcctccgttcaaattgatcatcatcaaaacttatgtggctttttgacctttgaatagggaattttttaaattttttaaaaattaaaataaaaaaaacacatggctcacccttccacccaaaaaaaaaaaaaaaaaa

SEQ ID NO: 1525 - protein, 63 aa, Homo sapiens
MHLCRGCQCPAVRDLTSGAETREAPRRIQELTMPALLRTNPPEHPRHLPQPRRVDRVPLWSSQ

SEQ ID NO: 1526 - DNA, 605 bp, Homo sapiens
aggctgggggagaagttaaagccagaggaggggcaggaatgtctgaggtggcaacacttctcttcagccagacagcactggccagtttggagtctgtccatcctgcaggccacaagctctggatgaggaacttgaggcaagtcaccagcccctgatcatttcgcctaaaagagcaaggactagagttcctgacctccaggccagtccctgatccctgacctaatgttatcgcggaatgatgaggctgccagtgcccagcagtgagggacctgacctcaggggcagagacaagagaggcaccaaggaggatccaagagctgactatgcctgcattgctgagaacaaacccacctgagcaccccagacaccttcctcaacccaggcgggtggacagggtccccctgtggtccagccagtaaaaaccatggtccccccacttctgtgtctcagtcctctcagtccatctcgagcctccgttcaaattgatcatcatcaaaacttatgtggctttttgacctttgaatagggaattttttaaattttttaaaaattaaaataaaaaaaacacatggctcacccttccacccaaaaaaaaaaaaaaaaaa

SEQ ID NO: 1527 - protein, 39 aa, Homo sapiens
MMRLPVPSSEGPDLRGRDKRGTKEDPRADYACIAENKPT

SEQ ID NO: 1528 - DNA, 1061 bp, Homo sapiens
ccacaagctggccccttggcctcctagagaccctgacatctcctccagcagcatctgtcctctctcctcagggaggcaagcatttgatgctcgaggtccctggcagttgtggtccttggcaagtgatgtgtgagtcccgtgtgtcataggaagctccccatccccatctggtgaccaaaggcctggctacaagtagtgagtccttcctcctccacccagacctcactgctcagatccccttcgccaactgggacatcttccgacatggcctggatgctgttgctcatcttgatcatggtccatccaggatcctgtgctctctgggtgtcccagccccctgagattcgtaccctggaaggatcctctgccttcctgccctgctccttcaatgccagccaagggagactggccattggctccgtcacgtggttccgagatgaggtggttccagggaaggaggtgaggaatggaaccccagagttcaggggccgcctggccccacttgcttcttcccgtttcctccatgaccaccaggctgagctgcacatccgggacgtgcgaggccatgacgccagcatctacgtgtgcagagtggaggtgctgggccttggtgtcgggacagggaatgggactcggctggtggtggagaaagaacatcctcagctaggggctggtacagtcctcctccttcgggctggattctatgctgtcagctttctctctgtggccgtgggcagcaccgtctattaccagggcaaatgtctgacctggaaaggtccaagaaggcagctgccggctgtggtcccagcgcccctcccaccaccatgtgggagctcagcacatctgcttcccccagtcccaggaggctgagcctgattgtcctgagaaatgggaaggatcagatatgactcctccttggcaactgccctttcctgccaggcccacacataccctcttctggctgttaggggagcttgggtccctgaacactgtcattcacccaataaattactatttgaccccagagtgggtggaagggtgaaaaaaaaaaaaaaaaaaaa

SEQ ID NO: 1529 - protein, 201 aa, Homo sapiens
MAWMLLLILIMVHPGSCALWVSQPPEIRTLEGSSAFLPCSFNASQGRLAIGSVTWFRDEVVPGKEVRNGTPEFRGRLAPLASSRFLHDHQAELHIRDVRGHDASIYVCRVEVLGLGVGTGNGTRLVVEKEHPQLGAGTVLLLRAGFYAVSFLSVAVGSTVYYQGKCLTWKGPRRQLPAVVPAPLPPPCGSSAHLLPPVPGG

SEQ ID NO: 1530 - DNA, 639 bp, Homo sapiens
gagagaaggagagcctgcagacagaggcctccagcttggtctgtctccccacctctaccagcatctgctgagctatgagccaaaccagggatttacagggaggaaaagctttcggactgctgaaggcccagcaggaagagaggctggatgagatcaacaagcaattcctagacgatcccaaatatagcagtgatgaggatctgccctccaaactggaaggcttcaaagagaaatacatggagtttgaccttaatggaaatggcgatattgatatcatgtccctgaaacgaatgctggagaaacttggagtccccaagactcacctagagctaaagaaattaattggagaggtgtccagtggctccggggagacgttcagctaccctgactttctcaggatgatgctgggcaagagatctgccatcctaaaaatgatcctgatgtatgaggaaaaagcgagagaaaaggaaaagccaacaggccccccagccaagaaagctatctctgagttgccctgatttgaagggaaaagggatgatgggattgaaggggcttctaatgacccagatatggaaacagaagacaaaattgtaagccagagtcaacaaattaaataaattaccccctcctccagatcaa

SEQ ID NO: 1531 - protein, 147 aa, Homo sapiens
MSQTRDLQGGKAFGLLKAQQEERLDEINKQFLDDPKYSSDEDLPSKLEGFKEKYMEFDLNGNGDIDIMSLKRMLEKLGVPKTHLELKKLIGEVSSGSGETFSYPDFLRMMLGKRSAILKMILMYEEKAREKEKPTGPPAKKAISELP

SEQ ID NO: 1532 - DNA, 1363 bp, Homo sapiens
gaggaaaagctttcggactgctgaaggcccagcaggaagagaggctggatgagatcaacaagcaattcctagacgatcccaaatatagcagtgatgaggatctgccctccaaactggaaggcttcaaaggtgagggggaaactgtaggcggtggagacagggctgggggtaggagggttaggatttccacaagaacaaggcaggaacagcagagataaaaagtttacttttgtggtagcaaaaggggaacctgcctttattgccctcctgccacactgcggtccctttcccgggcctgcctctctcagcatcccctctagctccttacaccctagcggggcccctcaactccccaaccccacttcctctgcctgcccctcctcctccttccacgttgtctcctccacctagcagttggttggcaaccccttcctcactcacccagagaaatacatggagtttgaccttaatggaaatggcgatattggtgagaaacgggtgatttgcgggggcagggtggtgtgcaggcctaagaagacagaggtctctcctacatgctccattcctcatgatttgggagggggcccacctaccacagtgggaggaaggagaatggggatgcggaagtgggagaggagagagagggtctccccaccttctccccatccccatcctctgcccccagatatcatgtccctgaaacgaatgctggagaaacttggagtccccaagactcacctagagctaaagaaattaattggagaggtgtccagtggctccggggagacgttcagctaccctgactttctcaggatgatgctgggcaagagatctgccatcctaaaaatgtgagtgtcaatttccaacctcccctgtacttacctgttttctcctcccccatccctacccttgtccacaggctcaacatttctacacgttgcccatcatcccttcttccatccttagagggacccttccaaggtcccgaccccatccctatccatagtcctggtccccagaaactccaacccctgcccttcctcttcccccttccaccctcacatccccatccccttctagcctttcctagcaccctatgatttattcccttgagaggagtgttccctgatccctgtgcctcttcccatctcaaccaggatcctgatgtatgaggaaaaagcgagagaaaaggaaaagccaacaggccccccagccaagaaagctatctctgagttgccctgatttgaagggaaaagggatgatgggattgaaggggcttctaatgacccagatatggaaacagaagacaaaattgtaagccagagtcaacaaattaaataaattaccccctcctccagatcaa

SEQ ID NO: 1533 - protein, 132 aa, Homo sapiens
MEFDLNGNGDIGEKRVICGGRVVCRPKKTEVSPTCSIPHDLGGGPPTTVGGRRMGMRKWERRERVSPPSPHPHPLPPDIMSLKRMLEKLGVPKTHLELKKLIGEVSSGSGETFSYPDFLRMMLGKRSAILKM

SEQ ID NO: 1534 - DNA, 503 bp, Homo sapiens
cacctagcagttggttggcaaccccttcctcagtcccctgctgaaaaccctccagtcagcgcttatcccttctgctctctcccctcacccagagaaatacatggagtttgaccttaatggaaatggcgatattgatatcatgtccctgaaacgaatgctggagaaacttggagtccccaagactcacctagagctaaagaaattaattggagaggtgtccagtggctccggggagacgttcagctaccctgactttctcaggatgatgctgggcaagagatctgccatcctaaaaatgatcctgatgtatgaggaaaaagcgagagaaaaggaaaagccaacaggccccccagccaagaaagctatctctgagttgccctgatttgaagggaaaagggatgatgggattgaaggggcttctaatgacccagatatggaaacagaagacaaaattgtaagccagagtcaacaaattaaataaattaccccctcctccagatcaa

SEQ ID NO: 1535 - protein, 93 aa, Homo sapiens
MEFDLNGNGDIDIMSLKRMLEKLGVPKTHLELKKLIGEVSSGSGETFSYPDFLRMMLGKRSAILKMILMYEEKAREKEKPTGPPAKKAISELP

SEQ ID NO: 1536 - DNA, 6714 bp, Homo sapiens
ccctaggcccgggtcccggatccccgcgcacccggccaggctctggcacgttttgggggaggtgcctgcaggacccaacatactcaatgagcttccagcgcaatgtccgatcgctcggggccgactgccaagggaaaggatggaaagaagtattcctcgctcaacctgtttgatacgtataagggcaagtccttagagatccagaaacccgctgttgcccctcgccatggcctgcagagtctcgggaaagttgccattgcccggcgtatgccacctccagccaaccttccaagcctgaaagccgagaacaaaggcaatgaccccaatgtctcactagtgccaaaagacggaacaggatgggcaagcaaacaggagcagtccgaccccaagagttccgatgcctcaaccgctcagccgccggaatcgcagccactgccggcttcacagacgcctgcctccaaccagccgaaacgacccccagcagcccccgagaacactcctttggttccaagcggggtaaagtcctgggcacaagccagcgtcacccatggagcacatggagatggtggaagggcatcaagcctactgtcacgattctctcgagaggaatttccgaccctgcaggcggctggcgaccaggacaaggctgccaaggaaagggagtctgccgaacagtcgtctgggcccggaccaagcctccgcccccaaaattctacaacttggagggacggaggtgggcgtggccctgatgagctggagggcccggactccaaacttcatcatggtcatgatccccggggtgggctacagccttcaggcccaccccagttccctccctaccgcggaatgatgccgcctttcatgtatcccccatatctcccgttccctccgccctatggaccccaggggccttaccgataccccactcctgatgggcccagccgttttccccgtgtggcgggcccccgaggctcagggccaccaatgcgcttagtagagcctgtgggtcgtccctctattctcaaagaggataatctcaaagagtttgatcagttggatcaggagaatgatgatggttgggcaggggcccatgaagaggttgactacactgaaaagctcaagttcagcgatgaggaagatgggcgagactctgatgaggagggagctgagggccacagggattcccaatcagcttctggtgaggaacggccccctgaagcagatggcaaaaagggcaactcccccaacagcgaaccgcccactcctaagacggcctgggcagaaacctctcggcctccagagacagagccgggacctcctgccccaaagcctcccctaccccctggggactacccagatcgtgggggtcctccctgcaagcccccagcacctgaagatgaggatgaggcatggcggcagcgacgaaagcagtcgtcatctgagatttccctggcagtggagcgggcccggcgacggcgagaagaagaggagcggcgcatgcaagaagagcgccgggcagcctgtgctgagaagctcaagcgactcgatgaaaagtttggggcacctgacaagcggctcaaagcagagcctgctgccccacctgctgccccttctaccccagctccaccacctgcagtccctaaagaactccctgcacctccagctccacctccagcatcagccccaacaccagagaaagaacctgaagagccagcacaggcccctcctgcccaatctactcctactccaggtgtggctgcggctcccactctggtgagtggtggtggcagtaccagtagcaccagcagtggcagcttcgaagccagcccagtggaaccacaactgccctcaaaagagggtcctgaaccaccagaagaggttcctcctcctaccacacccccagttccaaaggtggaacccaagggtgatgggattggtcccacccgccagccccctagtcagggcttgggctaccccaaatatcagaagtcgttgcctcctcgtttccagcggcagcagcaggagcagctcctgaagcagcagcagcagcaccagtggcagcagcatcaacagggctctgcccctcctaccccagtgcccccatcaccaccacagcctgtgaccctgggggctgtgccagctccacaggctccacccccgccccccaaggccctgtacccaggtgctctgggccggcccccacccatgcccccaatgaactttgatccccgatggatgatgattcctccttatgtggacccccggctcctccagggtcgtccccctctagacttctaccctcctggtgtgcatccctctggcctagttccccgagagcgttcagacagtgggggctcaagctcagagccatttgaccgtcatgcacctgctatgttacgggaacggggcactccaccggtggatccaaagttggcctgggtaggagatgtcttcaccgccacacccgctgaaccccgcccacttacctcacctctgcgccaggctgcggatgaggatgacaaggggatgaggagcgagactcctccagtacctcccccaccaccctatctggccagttatccaggctttcctgagaatggagcccctgggcccccaatctctcgctttcctctggaggaaccagggccccgtccactcccctggcccccaggcagtgatgaagtggccaagatacaaactccaccacccaagaaggagccccctaaggaggagactgcacagctgacggggccagaagcaggccgaaagcctgcccgcggagtcgggagtggaggccagggccccccaccaccacgcagagagagtcgcacagagacccgctggggccctcgtccagggagcagtcgtcgtggaatccctccagaggagccaggggccccaccccgccgggctgggcctataaagaaacctccaccacctacaaaagtagaagagctgcctcccaagcccctcgaacagggggatgaaacccccaaacccccaaagccagacccactcaagataaccaaggggaagctagggggccccaaggagaccccacccaatggaaatctttcccctgccccaaggcttcggagggactattcgtatgaaagagtgggtcctacctcttgccggggtcggggccgaggcgagtattttgccagagggaggggttttcgggggacctatgggggacgagggcggggagcccgaagccgggaattccgcagttaccgagagtttcgaggagatgatgggcgtggaggtgggacagggggaccaaaccaccctcctgctccccgaggccgcactgccagcgagacacggagcgagggttcagagtatgaggaaatccccaagcggcgccggcagcggggctcagaaacaggcagcgagacccatgagagtgatctggctccttcagacaaggaggctcccacacccaaggagggaacactcacccaggtccctctcgctcccccaccaccaggagccccaccttcaccagccccagcccgcttcactgcccggggtgggcgagtcttcactcccagaggggtgccatctcgccggggccgaggaggagggaggccccctcctcaagtttgcccaggctggagccctccagccaagtctctggctcccaagaaacctcccacaggccctttgccaccaagtaaggagcctttgaaagagaagttgatcccagggcctctgtcccctgtggcgcgcggaggcagcaatggaggtagcaatgtgggcatggaagatggggagcgaccccgaaggaggcgacatgggagggctcagcagcaggataaaccgcctcgtttccggaggctgaagcaggaacgggagaatgccgcaagggggtctgagggcaagccctccctaacccttccagcctccgctcctgcacctgaggaggccctcacaacagtcacagtggccccagcacctcgccgggcagctgccaagtctcctgatctgtcaaaccagaactcagaccaagccaatgaggaatgggagactgcatcagagagcagtgacttcaccagtgagcgccgaggggacaaagaggcacccccaccagtactgctgacacccaaggctgtgggaactcctgggggaggtggaggtggagccgtaccaggtatttcagccatgtcccgcggagatctgagccagagagccaaggatttgagtaaacggagcttctcaagtcagcggccaggcatggaacggcagaatcggcgccctggcccagggggcaaggctggcagcagtggcagcagcagtggaggaggcggtgggggtcctggaggaaggaccgggccaggacgaggcgacaagaggagctggccctctcccaagaaccgaagtcgtcctccagaggagcgtcccccggggcttcccctgcctcccccacctcccagcagttctgctgtcttccgcctggaccaagttatccacagcaaccctgctggcatccaacaggctctggcccagcttagtagccgtcaagggagtgtaactgcaccagggggtcatccaaggcacaagcctgggcctccccaagcccctcagggcccctctcctaggcccccaacccgatacgagccccagagggtcaacagcggcctcagttctgacccccactttgaggagccggggccaatggtgagaggggtgggtgggactcctcgggactctgccggggttagtccctttccccctaaacgtcgggagcggcctcccagaaaaccagagctgctacaggaggaatctttgccacctcctcatagctctggattcttgggctctaagcctgagggcccaggccctcaggcagagtccagagatacaggcacagaggccctgacccctcacatctggaaccgtttacatactgccactagccgaaagagttaccggcccagctccatggagccttggatggagcccctgagtccttttgaggatgtggctggcacagaaatgagtcagtctgacagtggggtggacctgagtggggattctcaggtgtcatcaggtccctgcagccagcgaagttcccctgatggaggactcaagggggcagcagagggaccccccaagaggcctggaggctcctcacccctgaatgctgttccttgtgagggtccacctggctctgaacctcctaggagaccaccacctgccccccacgatggggacagaaaggagctgccccgggagcagcctctgccccctggccccattggcacagaacgatcacagcatacagaccgaggcacagagcctggccccattcggccatcccatcgacctggtcccccagtccagtttggcactagtgacaaggactcagacttacgcctagtggtaggagacagcttgaaagcagagaaggagctaacagcatcagtcactgaggccattcctgtatcacgagactgggagctgcttcccagtgctgctgcctctgctgagccacaatccaagaacctggattctgggcactgtgtcccggagcccagctcctcaggccagcgcctgtatcctgaggttttctatggcagtgctgggccttccagttctcagatctctgggggagccatggactctcaattacatccaaacagtggaggcttccgccctgggacaccctcactgcacccttacagatcacagcccctatacctaccccccggcccagcccctccctcagcactgctctctggggtagctctcaagggccagtttctggatttctccacaatgcaagctacagagctggggaagttgccggctggaggagttctctaccctccaccttccttcctctactctccggctttctgccccagtcctttgcctgacacatcgttgcttcaggtacgccaggatctgccatccccttcggatttttattctactcctctgcagcctggtggccaaagtggctttctcccttcaggggctcctgcccagcagatgcttctacccatggtagactcacagctgcctgtggtgaactttggctccctgccgccagcaccacctcctgccccacctcccctttctctgttacctgtgggccctgctctgcagccccccagcctggctgtgcggcccccacctgctcctgctactcgggtgctgccttcacctgccaggcccttccccgctagcttggggcgagcagagctgcatccagtggaactaaagccgttccaggattatcaaaaactgagcagcaaccttgggggacctggatcatcacggactcccccaactggaaggtccttctctggcctcaattcccgtctcaaggccacgccttccacctacagtggagtcttccgcacccagcgcgtcgacctttaccagcaggcctccccaccagatgccctgcgctggatacctaagccttgggagcggacagggctgccacctcgagaagggccctcccgacgggcagaggagcctgggtcccgaggggacaaggagcctgggttgcccccaccccgctgagggagttcctcttgccccctacccccggggcttgtatatagattataaatatataagggggaaaggggtgggcggggaggggttgtggggctggggcctcacttcccctcctcccccttcccctggtcccctgtccctggggctgtttgttaaaaaagagtaataaaaggattt

SEQ ID NO: 1537 - protein, 2145 aa, Homo sapiens
MSDRSGPTAKGKDGKKYSSLNLFDTYKGKSLEIQKPAVAPRHGLQSLGKVAIARRMPPPANLPSLKAENKGNDPNVSLVPKDGTGWASKQEQSDPKSSDASTAQPPESQPLPASQTPASNQPKRPPAAPENTPLVPSGVKSWAQASVTHGAHGDGGRASSLLSRFSREEFPTLQAAGDQDKAAKERESAEQSSGPGPSLRPQNSTTWRDGGGRGPDELEGPDSKLHHGHDPRGGLQPSGPPQFPPYRGMMPPFMYPPYLPFPPPYGPQGPYRYPTPDGPSRFPRVAGPRGSGPPMRLVEPVGRPSILKEDNLKEFDQLDQENDDGWAGAHEEVDYTEKLKFSDEEDGRDSDEEGAEGHRDSQSASGEERPPEADGKKGNSPNSEPPTPKTAWAETSRPPETEPGPPAPKPPLPPGDYPDRGGPPCKPPAPEDEDEAWRQRRKQSSSEISLAVERARRRREEEERRMQEERRAACAEKLKRLDEKFGAPDKRLKAEPAAPPAAPSTPAPPPAVPKELPAPPAPPPASAPTPEKEPEEPAQAPPAQSTPTPGVAAAPTLVSGGGSTSSTSSGSFEASPVEPQLPSKEGPEPPEEVPPPTTPPVPKVEPKGDGIGPTRQPPSQGLGYPKYQKSLPPRFQRQQQEQLLKQQQQHQWQQHQQGSAPPTPVPPSPPQPVTLGAVPAPQAPPPPPKALYPGALGRPPPMPPMNFDPRWMMIPPYVDPRLLQGRPPLDFYPPGVHPSGLVPRERSDSGGSSSEPFDRHAPAMLRERGTPPVDPKLAWVGDVFTATPAEPRPLTSPLRQAADEDDKGMRSETPPVPPPPPYLASYPGFPENGAPGPPISRFPLEEPGPRPLPWPPGSDEVAKIQTPPPKKEPPKEETAQLTGPEAGRKPARGVGSGGQGPPPPRRESRTETRWGPRPGSSRRGIPPEEPGAPPRRAGPIKKPPPPTKVEELPPKPLEQGDETPKPPKPDPLKITKGKLGGPKETPPNGNLSPAPRLRRDYSYERVGPTSCRGRGRGEYFARGRGFRGTYGGRGRGARSREFRSYREFRGDDGRGGGTGGPNHPPAPRGRTASETRSEGSEYEEIPKRRRQRGSETGSETHESDLAPSDKEAPTPKEGTLTQVPLAPPPPGAPPSPAPARFTARGGRVFTPRGVPSRRGRGGGRPPPQVCPGWSPPAKSLAPKKPPTGPLPPSKEPLKEKLIPGPLSPVARGGSNGGSNVGMEDGERPRRRRHGRAQQQDKPPRFRRLKQERENAARGSEGKPSLTLPASAPAPEEALTTVTVAPAPRRAAAKSPDLSNQNSDQANEEWETASESSDFTSERRGDKEAPPPVLLTPKAVGTPGGGGGGAVPGISAMSRGDLSQRAKDLSKRSFSSQRPGMERQNRRPGPGGKAGSSGSSSGGGGGGPGGRTGPGRGDKRSWPSPKNRSRPPEERPPGLPLPPPPPSSSAVFRLDQVIHSNPAGIQQALAQLSSRQGSVTAPGGHPRHKPGPPQAPQGPSPRPPTRYEPQRVNSGLSSDPHFEEPGPMVRGVGGTPRDSAGVSPFPPKRRERPPRKPELLQEESLPPPHSSGFLGSKPEGPGPQAESRDTGTEALTPHIWNRLHTATSRKSYRPSSMEPWMEPLSPFEDVAGTEMSQSDSGVDLSGDSQVSSGPCSQRSSPDGGLKGAAEGPPKRPGGSSPLNAVPCEGPPGSEPPRRPPPAPHDGDRKELPREQPLPPGPIGTERSQHTDRGTEPGPIRPSHRPGPPVQFGTSDKDSDLRLVVGDSLKAEKELTASVTEAIPVSRDWELLPSAAASAEPQSKNLDSGHCVPEPSSSGQRLYPEVFYGSAGPSSSQISGGAMDSQLHPNSGGFRPGTPSLHPYRSQPLYLPPGPAPPSALLSGVALKGQFLDFSTMQATELGKLPAGGVLYPPPSFLYSPAFCPSPLPDTSLLQVRQDLPSPSDFYSTPLQPGGQSGFLPSGAPAQQMLLPMVDSQLPVVNFGSLPPAPPPAPPPLSLLPVGPALQPPSLAVRPPPAPATRVLPSPARPFPASLGRAELHPVELKPFQDYQKLSSNLGGPGSSRTPPTGRSFSGLNSRLKATPSTYSGVFRTQRVDLYQQASPPDALRWIPKPWERTGLPPREGPSRRAEEPGSRGDKEPGLPPPR

SEQ ID NO: 1538 - DNA, 6750 bp, Homo sapiens
ccctaggcccgggtcccggatccccgcgcacccggccaggctctggcacgttttgggggaggtgcctgcaggacccaacatactcaatgagcttccagcgcaatgtccgatcgctcggggccgactgccaagggaaaggatggaaagaagtattcctcgctcaacctgtttgatacgtataagggcaagtccttagagatccagaaacccgctgttgcccctcgccatggcctgcagagtctcgggaaagttgccattgcccggcgtatgccacctccagccaaccttccaagcctgaaagccgagaacaaaggcaatgaccccaatgtctcactagtgccaaaagacggaacaggatgggcaagcaaacaggagcagtccgaccccaagagttccgatgcctcaaccgctcagccgccggaatcgcagccactgccggcttcacagacgcctgcctccaaccagccgaaacgacccccagcagcccccgagaacactcctttggttccaagcggggtaaagtcctgggcacaagccagcgtcacccatggagcacatggagatggtggaagggcatcaagcctactgtcacgattctctcgagaggaatttccgaccctgcaggcggctggcgaccaggacaaggctgccaaggaaagggagtctgccgaacagtcgtctgggcccggaccaagcctccgcccccaaaattctacaacttggagggacggaggtgggcgtggccctgatgagctggagggcccggactccaaacttcatcatggtcatgatccccggggtgggctacagccttcaggcccaccccagttccctccctaccgcggaatgatgccgcctttcatgtatcccccatatctcccgttccctccgccctatggaccccaggggccttaccgataccccactcctgatgggcccagccgttttccccgtgtggcgggcccccgaggctcagggccaccaatgcgcttagtagagcctgtgggtcgtccctctattctcaaagaggataatctcaaagagtttgatcagttggatcaggagaatgatgatggttgggcaggggcccatgaagaggttgactacactgaaaagctcaagttcagcgatgaggaagatgggcgagactctgatgaggagggagctgagggccacagggattcccaatcagcttctggtgaggaacggccccctgaagcagatggcaaaaagggcaactcccccaacagcgaaccgcccactcctaagacggcctgggcagaaacctctcggcctccagagacagagccgggacctcctgccccaaagcctcccctacccccacctcaccggggccccgccgggaactggggcccccctggggactacccagatcgtgggggtcctccctgcaagcccccagcacctgaagatgaggatgaggcatggcggcagcgacgaaagcagtcgtcatctgagatttccctggcagtggagcgggcccggcgacggcgagaagaagaggagcggcgcatgcaagaagagcgccgggcagcctgtgctgagaagctcaagcgactcgatgaaaagtttggggcacctgacaagcggctcaaagcagagcctgctgccccacctgctgccccttctaccccagctccaccacctgcagtccctaaagaactccctgcacctccagctccacctccagcatcagccccaacaccagagaaagaacctgaagagccagcacaggcccctcctgcccaatctactcctactccaggtgtggctgcggctcccactctggtgagtggtggtggcagtaccagtagcaccagcagtggcagcttcgaagccagcccagtggaaccacaactgccctcaaaagagggtcctgaaccaccagaagaggttcctcctcctaccacacccccagttccaaaggtggaacccaagggtgatgggattggtcccacccgccagccccctagtcagggcttgggctaccccaaatatcagaagtcgttgcctcctcgtttccagcggcagcagcaggagcagctcctgaagcagcagcagcagcaccagtggcagcagcatcaacagggctctgcccctcctaccccagtgcccccatcaccaccacagcctgtgaccctgggggctgtgccagctccacaggctccacccccgccccccaaggccctgtacccaggtgctctgggccggcccccacccatgcccccaatgaactttgatccccgatggatgatgattcctccttatgtggacccccggctcctccagggtcgtccccctctagacttctaccctcctggtgtgcatccctctggcctagttccccgagagcgttcagacagtgggggctcaagctcagagccatttgaccgtcatgcacctgctatgttacgggaacggggcactccaccggtggatccaaagttggcctgggtaggagatgtcttcaccgccacacccgctgaaccccgcccacttacctcacctctgcgccaggctgcggatgaggatgacaaggggatgaggagcgagactcctccagtacctcccccaccaccctatctggccagttatccaggctttcctgagaatggagcccctgggcccccaatctctcgctttcctctggaggaaccagggccccgtccactcccctggcccccaggcagtgatgaagtggccaagatacaaactccaccacccaagaaggagccccctaaggaggagactgcacagctgacggggccagaagcaggccgaaagcctgcccgcggagtcgggagtggaggccagggccccccaccaccacgcagagagagtcgcacagagacccgctggggccctcgtccagggagcagtcgtcgtggaatccctccagaggagccaggggccccaccccgccgggctgggcctataaagaaacctccaccacctacaaaagtagaagagctgcctcccaagcccctcgaacagggggatgaaacccccaaacccccaaagccagacccactcaagataaccaaggggaagctagggggccccaaggagaccccacccaatggaaatctttcccctgccccaaggcttcggagggactattcgtatgaaagagtgggtcctacctcttgccggggtcggggccgaggcgagtattttgccagagggaggggttttcgggggacctatgggggacgagggcggggagcccgaagccgggaattccgcagttaccgagagtttcgaggagatgatgggcgtggaggtgggacagggggaccaaaccaccctcctgctccccgaggccgcactgccagcgagacacggagcgagggttcagagtatgaggaaatccccaagcggcgccggcagcggggctcagaaacaggcagcgagacccatgagagtgatctggctccttcagacaaggaggctcccacacccaaggagggaacactcacccaggtccctctcgctcccccaccaccaggagccccaccttcaccagccccagcccgcttcactgcccggggtgggcgagtcttcactcccagaggggtgccatctcgccggggccgaggaggagggaggccccctcctcaagtttgcccaggctggagccctccagccaagtctctggctcccaagaaacctcccacaggccctttgccaccaagtaaggagcctttgaaagagaagttgatcccagggcctctgtcccctgtggcgcgcggaggcagcaatggaggtagcaatgtgggcatggaagatggggagcgaccccgaaggaggcgacatgggagggctcagcagcaggataaaccgcctcgtttccggaggctgaagcaggaacgggagaatgccgcaagggggtctgagggcaagccctccctaacccttccagcctccgctcctgcacctgaggaggccctcacaacagtcacagtggccccagcacctcgccgggcagctgccaagtctcctgatctgtcaaaccagaactcagaccaagccaatgaggaatgggagactgcatcagagagcagtgacttcaccagtgagcgccgaggggacaaagaggcacccccaccagtactgctgacacccaaggctgtgggaactcctgggggaggtggaggtggagccgtaccaggtatttcagccatgtcccgcggagatctgagccagagagccaaggatttgagtaaacggagcttctcaagtcagcggccaggcatggaacggcagaatcggcgccctggcccagggggcaaggctggcagcagtggcagcagcagtggaggaggcggtgggggtcctggaggaaggaccgggccaggacgaggcgacaagaggagctggccctctcccaagaaccgaagtcgtcctccagaggagcgtcccccggggcttcccctgcctcccccacctcccagcagttctgctgtcttccgcctggaccaagttatccacagcaaccctgctggcatccaacaggctctggcccagcttagtagccgtcaagggagtgtaactgcaccagggggtcatccaaggcacaagcctgggcctccccaagcccctcagggcccctctcctaggcccccaacccgatacgagccccagagggtcaacagcggcctcagttctgacccccactttgaggagccggggccaatggtgagaggggtgggtgggactcctcgggactctgccggggttagtccctttccccctaaacgtcgggagcggcctcccagaaaaccagagctgctacaggaggaatctttgccacctcctcatagctctggattcttgggctctaagcctgagggcccaggccctcaggcagagtccagagatacaggcacagaggccctgacccctcacatctggaaccgtttacatactgccactagccgaaagagttaccggcccagctccatggagccttggatggagcccctgagtccttttgaggatgtggctggcacagaaatgagtcagtctgacagtggggtggacctgagtggggattctcaggtgtcatcaggtccctgcagccagcgaagttcccctgatggaggactcaagggggcagcagagggaccccccaagaggcctggaggctcctcacccctgaatgctgttccttgtgagggtccacctggctctgaacctcctaggagaccaccacctgccccccacgatggggacagaaaggagctgccccgggagcagcctctgccccctggccccattggcacagaacgatcacagcatacagaccgaggcacagagcctggccccattcggccatcccatcgacctggtcccccagtccagtttggcactagtgacaaggactcagacttacgcctagtggtaggagacagcttgaaagcagagaaggagctaacagcatcagtcactgaggccattcctgtatcacgagactgggagctgcttcccagtgctgctgcctctgctgagccacaatccaagaacctggattctgggcactgtgtcccggagcccagctcctcaggccagcgcctgtatcctgaggttttctatggcagtgctgggccttccagttctcagatctctgggggagccatggactctcaattacatccaaacagtggaggcttccgccctgggacaccctcactgcacccttacagatcacagcccctatacctaccccccggcccagcccctccctcagcactgctctctggggtagctctcaagggccagtttctggatttctccacaatgcaagctacagagctggggaagttgccggctggaggagttctctaccctccaccttccttcctctactctccggctttctgccccagtcctttgcctgacacatcgttgcttcaggtacgccaggatctgccatccccttcggatttttattctactcctctgcagcctggtggccaaagtggctttctcccttcaggggctcctgcccagcagatgcttctacccatggtagactcacagctgcctgtggtgaactttggctccctgccgccagcaccacctcctgccccacctcccctttctctgttacctgtgggccctgctctgcagccccccagcctggctgtgcggcccccacctgctcctgctactcgggtgctgccttcacctgccaggcccttccccgctagcttggggcgagcagagctgcatccagtggaactaaagccgttccaggattatcaaaaactgagcagcaaccttgggggacctggatcatcacggactcccccaactggaaggtccttctctggcctcaattcccgtctcaaggccacgccttccacctacagtggagtcttccgcacccagcgcgtcgacctttaccagcaggcctccccaccagatgccctgcgctggatacctaagccttgggagcggacagggctgccacctcgagaagggccctcccgacgggcagaggagcctgggtcccgaggggacaaggagcctgggttgcccccaccccgctgagggagttcctcttgccccctacccccggggcttgtatatagattataaatatataagggggaaaggggtgggcggggaggggttgtggggctggggcctcacttcccctcctcccccttcccctggtcccctgtccctggggctgtttgttaaaaaagagtaataaaaggattt

SEQ ID NO: 1539 - protein, 2157 aa, Homo sapiens
MSDRSGPTAKGKDGKKYSSLNLFDTYKGKSLEIQKPAVAPRHGLQSLGKVAIARRMPPPANLPSLKAENKGNDPNVSLVPKDGTGWASKQEQSDPKSSDASTAQPPESQPLPASQTPASNQPKRPPAAPENTPLVPSGVKSWAQASVTHGAHGDGGRASSLLSRFSREEFPTLQAAGDQDKAAKERESAEQSSGPGPSLRPQNSTTWRDGGGRGPDELEGPDSKLHHGHDPRGGLQPSGPPQFPPYRGMMPPFMYPPYLPFPPPYGPQGPYRYPTPDGPSRFPRVAGPRGSGPPMRLVEPVGRPSILKEDNLKEFDQLDQENDDGWAGAHEEVDYTEKLKFSDEEDGRDSDEEGAEGHRDSQSASGEERPPEADGKKGNSPNSEPPTPKTAWAETSRPPETEPGPPAPKPPLPPPHRGPAGNWGPPGDYPDRGGPPCKPPAPEDEDEAWRQRRKQSSSEISLAVERARRRREEEERRMQEERRAACAEKLKRLDEKFGAPDKRLKAEPAAPPAAPSTPAPPPAVPKELPAPPAPPPASAPTPEKEPEEPAQAPPAQSTPTPGVAAAPTLVSGGGSTSSTSSGSFEASPVEPQLPSKEGPEPPEEVPPPTTPPVPKVEPKGDGIGPTRQPPSQGLGYPKYQKSLPPRFQRQQQEQLLKQQQQHQWQQHQQGSAPPTPVPPSPPQPVTLGAVPAPQAPPPPPKALYPGALGRPPPMPPMNFDPRWMMIPPYVDPRLLQGRPPLDFYPPGVHPSGLVPRERSDSGGSSSEPFDRHAPAMLRERGTPPVDPKLAWVGDVFTATPAEPRPLTSPLRQAADEDDKGMRSETPPVPPPPPYLASYPGFPENGAPGPPISRFPLEEPGPRPLPWPPGSDEVAKIQTPPPKKEPPKEETAQLTGPEAGRKPARGVGSGGQGPPPPRRESRTETRWGPRPGSSRRGIPPEEPGAPPRRAGPIKKPPPPTKVEELPPKPLEQGDETPKPPKPDPLKITKGKLGGPKETPPNGNLSPAPRLRRDYSYERVGPTSCRGRGRGEYFARGRGFRGTYGGRGRGARSREFRSYREFRGDDGRGGGTGGPNHPPAPRGRTASETRSEGSEYEEIPKRRRQRGSETGSETHESDLAPSDKEAPTPKEGTLTQVPLAPPPPGAPPSPAPARFTARGGRVFTPRGVPSRRGRGGGRPPPQVCPGWSPPAKSLAPKKPPTGPLPPSKEPLKEKLIPGPLSPVARGGSNGGSNVGMEDGERPRRRRHGRAQQQDKPPRFRRLKQERENAARGSEGKPSLTLPASAPAPEEALTTVTVAPAPRRAAAKSPDLSNQNSDQANEEWETASESSDFTSERRGDKEAPPPVLLTPKAVGTPGGGGGGAVPGISAMSRGDLSQRAKDLSKRSFSSQRPGMERQNRRPGPGGKAGSSGSSSGGGGGGPGGRTGPGRGDKRSWPSPKNRSRPPEERPPGLPLPPPPPSSSAVFRLDQVIHSNPAGIQQALAQLSSRQGSVTAPGGHPRHKPGPPQAPQGPSPRPPTRYEPQRVNSGLSSDPHFEEPGPMVRGVGGTPRDSAGVSPFPPKRRERPPRKPELLQEESLPPPHSSGFLGSKPEGPGPQAESRDTGTEALTPHIWNRLHTATSRKSYRPSSMEPWMEPLSPFEDVAGTEMSQSDSGVDLSGDSQVSSGPCSQRSSPDGGLKGAAEGPPKRPGGSSPLNAVPCEGPPGSEPPRRPPPAPHDGDRKELPREQPLPPGPIGTERSQHTDRGTEPGPIRPSHRPGPPVQFGTSDKDSDLRLVVGDSLKAEKELTASVTEAIPVSRDWELLPSAAASAEPQSKNLDSGHCVPEPSSSGQRLYPEVFYGSAGPSSSQISGGAMDSQLHPNSGGFRPGTPSLHPYRSQPLYLPPGPAPPSALLSGVALKGQFLDFSTMQATELGKLPAGGVLYPPPSFLYSPAFCPSPLPDTSLLQVRQDLPSPSDFYSTPLQPGGQSGFLPSGAPAQQMLLPMVDSQLPVVNFGSLPPAPPPAPPPLSLLPVGPALQPPSLAVRPPPAPATRVLPSPARPFPASLGRAELHPVELKPFQDYQKLSSNLGGPGSSRTPPTGRSFSGLNSRLKATPSTYSGVFRTQRVDLYQQASPPDALRWIPKPWERTGLPPREGPSRRAEEPGSRGDKEPGLPPPR

SEQ ID NO: 1540 - DNA, 3773 bp, Homo sapiens
tagtgcgacgcacgcaggcgtagtacggtcccccgggcgacagcggtggcggctcctcggggtgctcggctccctcccacctaggccggccccggcccgactcgccctcagaaactcactgtttggggctgcggactttctcgtcgtgccccacaaaagtaaagcttggggacctggggggagccggaagtatcgcttcgagatccccaaatactatcggggaaacggaagtggccgtcggtggcaggtttgggggagaccggaagtgacgagacctgtcggccatggagcctaatgatagtaccagtaccgctgtggaggagcctgacagcttggaggtgttggtgaagaccttggactctcaaactcgtacctttattgtgggggcccagatgaatgtaaaagagtttaaggagcacattgctgcctctgtcagcatcccatctgaaaaacaacggctcatttaccagggacgagttctgcaagatgataagaagcttcaggaatacaatgttgggggaaaggttatccacctggtggaacgggctcctcctcagactcacctcccttctggggcatcttctgggacggggtctgcctcagccactcatggtgggggatccccccctggtactcgggggcctggggcctctgttcatgaccggaatgccaacagctatgtcatggttggaaccttcaatcttcctagtgacggctctgctgtggatgttcacatcaacatggaacaggccccgattcagagtgagccccgggtacggctggtgatggctcagcacatgatcagggatatacagaccttactatcccggatggagactctcccctaccttcagtgtcgaggagggccccaaccgcagcacagtcagccgcccccgcagccaccggctgtgaccccggagccagtagccttgagctctcaaacatcagaaccagttgaaagtgaagcacctccccgggagcccatggaggcagaagaagtggaggagcgtgccccagcccagaacccggagctcactcctggcccagccccagcgggcccaacacctgccccggaaacaaatgcacccaaccatccttcccctgcggagtatgtcgaggtgctccaggagctacagcggctggagagtcgcctccagcccttcttgcagcgctactacgaggttctgggtgctgctgccaccacggactacaataacaatcacgagggccgggaggaggatcagcggttgatcaacttggtaggggagagcctgcgactgctgggcaacacctttgttgcactgtctgacctgcgctgcaatctggcctgcacgcccccacgacacctgcatgtggtccggcctatgtctcactacaccacccccatggtgctccagcaggcagccattcccatacagatcaatgtgggaaccactgtgaccatgacaggaaatgggactcggccccccccaactcccaatgcagaggcacctccccctggtcctgggcaggcctcatccgtggctccgtcttctaccaatgtcgagtcctcagctgagggggctcccccgccaggtccagctcccccgccagccaccagccacccgagggtcatccggatttcccaccagagtgtggaacccgtggtcatgatgcacatgaacattcaagattctggcacacagcctggtggtgttccgagtgctcccactggccccctgggaccccctggtcatggccaaaccctgggacagcaggtgccaggcttcccaacagctccaacccgggtggtgattgcccggcccactcctccacaggctcggccttcccatcctggagggcccccagtctctgggacactgcagggcgccggtctgggtaccaatgcctcgttggcccagatggtgagcggccttgtggggcagcttcttatgcagccagtccttgtggctcaggggaccccaggtatggctccaccgccagcccctgccactgcttctgccagtgctggcaccaccaacacagctaccacagctggccccgctcctggggggcctgcccagcctccacccacccctcaaccctccatggctgatcttcagttctctcagcttctggggaacctgctagggcctgcagggccaggggctggagggcctggtgtggcttctcccaccatcactgtggcgatgcctggtgtccctgcctttctccaaggcatgactgacttcttgcaggcaacacagacagcccctccaccacccccacctcctccacccccaccacctgccccagagcagcagaccatgcccccaccaggctccccttctggtggcgcagggagtcctggaggcctgggtcttgagagcctgtcaccggagttttttacctcagtggtgcagggtgtgctcagctccctgctgggctccctgggggctcgggctggcagcagtgaaagtattgctgccttcatacaacgcctcagtggatccagcaacatctttgagcctggagctgatggggcccttggattctttggggccttgctttctcttctgtgccagaacttctctatggtggacgtagtgatgcttctccatgggcatttccagccactacaacggctccagccccagctgcgatccttcttccaccagcactacctgggtggtcaggagcccacacccagtaacatccggatggcaacccacacattgatcacggggctagaagagtatgtgcgggagagtttttccttggtgcaggttcagccaggtgtggacatcatccggacaaacctggaatttctccaagagcagtttaatagcattgctgcgcatgtgctgcattgcacagatagtggatttggggcccggttgctggagttgtgtaaccaaggcctgtttgaatgcctggccctaaacctgcactgcttggggggacagcagatggagcttgctgctgttatcaatggccgaattcgtcgtatgtctcgtggggtgaatccctccttggtgagctggctgaccactatgatgggactgaggcttcaggtggtactggagcacatgcctgtaggccctgatgccattctcagatacgttcgcagggttggtgatcccccccagccacttcctgaggagccaatggaagttcagggagcagaaagagcttcccctgagcctcagcgggagaatgcttccccagcccctggaacaacagcagaagaggccatgtcccgaggtccacctcctgctcctgaggggggctcccgggatgaacaggatggagcttcagctgagacagaaccttgggcagctgcagtccccccagaatgggtccctattatccagcaggacattcagagccagcggaaggtgaaaccgcagccccctctgagtgatgcctacctcagtggtatgcctgccaagagacgcaagacgatgcagggtgagggcccccagctgcttctctcagaggctgtgagccgggcagctaaggcagccggagctcggcccctgacgagccccgagagcctgagccgggacctggaggcaccagaggttcaggagagctacaggcagcagctccggtctgatatacaaaaacgactgcaggaagaccccaactacagtccccagcgcttccccaatgcccagcgggcctttgctgatgatccttagctctttgctctatggcccttcctcatcaggggaccgtttcccccctcttccttcacagtatttaagaaataaaagtcggatttttctggc

SEQ ID NO: 1541 - protein, 1132 aa, Homo sapiens
MEPNDSTSTAVEEPDSLEVLVKTLDSQTRTFIVGAQMNVKEFKEHIAASVSIPSEKQRLIYQGRVLQDDKKLQEYNVGGKVIHLVERAPPQTHLPSGASSGTGSASATHGGGSPPGTRGPGASVHDRNANSYVMVGTFNLPSDGSAVDVHINMEQAPIQSEPRVRLVMAQHMIRDIQTLLSRMETLPYLQCRGGPQPQHSQPPPQPPAVTPEPVALSSQTSEPVESEAPPREPMEAEEVEERAPAQNPELTPGPAPAGPTPAPETNAPNHPSPAEYVEVLQELQRLESRLQPFLQRYYEVLGAAATTDYNNNHEGREEDQRLINLVGESLRLLGNTFVALSDLRCNLACTPPRHLHVVRPMSHYTTPMVLQQAAIPIQINVGTTVTMTGNGTRPPPTPNAEAPPPGPGQASSVAPSSTNVESSAEGAPPPGPAPPPATSHPRVIRISHQSVEPVVMMHMNIQDSGTQPGGVPSAPTGPLGPPGHGQTLGQQVPGFPTAPTRVVIARPTPPQARPSHPGGPPVSGTLQGAGLGTNASLAQMVSGLVGQLLMQPVLVAQGTPGMAPPPAPATASASAGTTNTATTAGPAPGGPAQPPPTPQPSMADLQFSQLLGNLLGPAGPGAGGPGVASPTITVAMPGVPAFLQGMTDFLQATQTAPPPPPPPPPPPPAPEQQTMPPPGSPSGGAGSPGGLGLESLSPEFFTSVVQGVLSSLLGSLGARAGSSESIAAFIQRLSGSSNIFEPGADGALGFFGALLSLLCQNFSMVDVVMLLHGHFQPLQRLQPQLRSFFHQHYLGGQEPTPSNIRMATHTLITGLEEYVRESFSLVQVQPGVDIIRTNLEFLQEQFNSIAAHVLHCTDSGFGARLLELCNQGLFECLALNLHCLGGQQMELAAVINGRIRRMSRGVNPSLVSWLTTMMGLRLQVVLEHMPVGPDAILRYVRRVGDPPQPLPEEPMEVQGAERASPEPQRENASPAPGTTAEEAMSRGPPPAPEGGSRDEQDGASAETEPWAAAVPPEWVPIIQQDIQSQRKVKPQPPLSDAYLSGMPAKRRKTMQGEGPQLLLSEAVSRAAKAAGARPLTSPESLSRDLEAPEVQESYRQQLRSDIQKRLQEDPNYSPQRFPNAQRAFADDP

SEQ ID NO: 1542 - DNA, 3754 bp, Homo sapiens
tagtgcgacgcacgcaggcgtagtacggtcccccgggcgacagcggtggcggctcctcggggtgctcggctccctcccacctaggccggccccggcccgactcgccctcagaaactcactgtttggggctgcggactttctcgtcgtgccccacaaaagtaaagcttggggacctggggggagccggaagtatcgcttcgagatccccaaatactatcggggaaacggaagtggccgtcggtggcagagacctgtcggccatggagcctaatgatagtaccagtaccgctgtggaggagcctgacagcttggaggtgttggtgaagaccttggactctcaaactcgtacctttattgtgggggcccagatgaatgtaaaagagtttaaggagcacattgctgcctctgtcagcatcccatctgaaaaacaacggctcatttaccagggacgagttctgcaagatgataagaagcttcaggaatacaatgttgggggaaaggttatccacctggtggaacgggctcctcctcagactcacctcccttctggggcatcttctgggacggggtctgcctcagccactcatggtgggggatccccccctggtactcgggggcctggggcctctgttcatgaccggaatgccaacagctatgtcatggttggaaccttcaatcttcctagtgacggctctgctgtggatgttcacatcaacatggaacaggccccgattcagagtgagccccgggtacggctggtgatggctcagcacatgatcagggatatacagaccttactatcccggatggagtgtcgaggagggccccaaccgcagcacagtcagccgcccccgcagccaccggctgtgaccccggagccagtagccttgagctctcaaacatcagaaccagttgaaagtgaagcacctccccgggagcccatggaggcagaagaagtggaggagcgtgccccagcccagaacccggagctcactcctggcccagccccagcgggcccaacacctgccccggaaacaaatgcacccaaccatccttcccctgcggagtatgtcgaggtgctccaggagctacagcggctggagagtcgcctccagcccttcttgcagcgctactacgaggttctgggtgctgctgccaccacggactacaataacaatcacgagggccgggaggaggatcagcggttgatcaacttggtaggggagagcctgcgactgctgggcaacacctttgttgcactgtctgacctgcgctgcaatctggcctgcacgcccccacgacacctgcatgtggtccggcctatgtctcactacaccacccccatggtgctccagcaggcagccattcccatacagatcaatgtgggaaccactgtgaccatgacaggaaatgggactcggccccccccaactcccaatgcagaggcacctccccctggtcctgggcaggcctcatccgtggctccgtcttctaccaatgtcgagtcctcagctgagggggctcccccgccaggtccagctcccccgccagccaccagccacccgagggtcatccggatttcccaccagagtgtggaacccgtggtcatgatgcacatgaacattcaagattctggcacacagcctggtggtgttccgagtgctcccactggccccctgggaccccctggtcatggccaaaccctgggacagcaggtgccaggcttcccaacagctccaacccgggtggtgattgcccggcccactcctccacaggctcggccttcccatcctggagggcccccagtctctgggacactgcagggcgccggtctgggtaccaatgcctcgttggcccagatggtgagcggccttgtggggcagcttcttatgcagccagtccttgtggctcaggggaccccaggtatggctccaccgccagcccctgccactgcttctgccagtgctggcaccaccaacacagctaccacagctggccccgctcctggggggcctgcccagcctccacccacccctcaaccctccatggctgatcttcagttctctcagcttctggggaacctgctagggcctgcagggccaggggctggagggtctggtgtggcttctcccaccatcactgtggcgatgcctggtgtccctgcctttctccaaggcatgactgacttcttgcaggcaacacagacagcccctccaccacccccacctcctccacccccaccacctgccccagagcagcagaccatgcccccaccaggctccccttctggtggcgcagggagtcctggaggcctgggtcttgagagcctgtcaccggagttttttacctcagtggtgcagggtgtgctcagctccctgctgggctccctgggggctcgggctggcagcagtgaaagtattgctgccttcatacaacgcctcagtggatccagcaacatctttgagcctggagctgatggggcccttggattctttggggccttgctttctcttctgtgccagaacttctctatggtggacgtagtgatgcttctccatgggcatttccagccactacaacggctccagccccagctgcgatccttcttccaccagcactacctgggtggtcaggagcccacacccagtaacatccggatggcaacccacacattgatcacggggctagaagagtatgtgcgggagagtttttccttggtgcaggttcagccaggtgtggacatcatccggacaaacctggaatttctccaagagcagtttaatagcattgctgcgcatgtgctgcattgcacagatagtggatttggggcccggttgctggagttgtgtaaccaaggcctgtttgaatgcctggccctaaacctgcactgcttggggggacagcagatggagcttgctgctgttatcaatggccgaattcgtcgtatgtctcgtggggtgaatccctccttggtgagctggctgaccactatgatgggactgaggcttcaggtggtactggagcacatgcctgtaggccctgatgccattctcagatacgttcgcagggttggtgatcccccccagccacttcctgaggagccaatggaagttcagggagcagaaagagcttcccctgagcctcagcgggagaatgcttccccagcccctggaacaacagcagaagaggccatgtcccgaggtccacctcctgctcctgaggggggctcccgggatgaacaggatggagcttcagctgagacagaaccttgggcagctgcagtccccccagaatgggtccctattatccagcaggacattcagagccagcggaaggtgaaaccgcagccccctctgagtgatgcctacctcagtggtatgcctgccaagagacgcaagacgatgcagggtgagggcccccagctgcttctctcagaggctgtgagccgggcagctaaggcagccggagctcggcccctgacgagccccgagagcctgagccgggacctggaggcaccagaggttcaggagagctacaggcagcagctccggtctgatatacaaaaacgactgcaggaagaccccaactacagtccccagcgcttccccaatgcccagcgggcctttgctgatgatccttagctctttgctctatggcccttcctcatcaggggaccgtttcccccctcttccttcacagtatttaagaaataaaagtcggatttttctggcaaaaaaaaaaaaaaaaaaaaaaa

SEQ ID NO: 1543 - protein, 1126 aa, Homo sapiens
MEPNDSTSTAVEEPDSLEVLVKTLDSQTRTFIVGAQMNVKEFKEHIAASVSIPSEKQRLIYQGRVLQDDKKLQEYNVGGKVIHLVERAPPQTHLPSGASSGTGSASATHGGGSPPGTRGPGASVHDRNANSYVMVGTFNLPSDGSAVDVHINMEQAPIQSEPRVRLVMAQHMIRDIQTLLSRMECRGGPQPQHSQPPPQPPAVTPEPVALSSQTSEPVESEAPPREPMEAEEVEERAPAQNPELTPGPAPAGPTPAPETNAPNHPSPAEYVEVLQELQRLESRLQPFLQRYYEVLGAAATTDYNNNHEGREEDQRLINLVGESLRLLGNTFVALSDLRCNLACTPPRHLHVVRPMSHYTTPMVLQQAAIPIQINVGTTVTMTGNGTRPPPTPNAEAPPPGPGQASSVAPSSTNVESSAEGAPPPGPAPPPATSHPRVIRISHQSVEPVVMMHMNIQDSGTQPGGVPSAPTGPLGPPGHGQTLGQQVPGFPTAPTRVVIARPTPPQARPSHPGGPPVSGTLQGAGLGTNASLAQMVSGLVGQLLMQPVLVAQGTPGMAPPPAPATASASAGTTNTATTAGPAPGGPAQPPPTPQPSMADLQFSQLLGNLLGPAGPGAGGSGVASPTITVAMPGVPAFLQGMTDFLQATQTAPPPPPPPPPPPPAPEQQTMPPPGSPSGGAGSPGGLGLESLSPEFFTSVVQGVLSSLLGSLGARAGSSESIAAFIQRLSGSSNIFEPGADGALGFFGALLSLLCQNFSMVDVVMLLHGHFQPLQRLQPQLRSFFHQHYLGGQEPTPSNIRMATHTLITGLEEYVRESFSLVQVQPGVDIIRTNLEFLQEQFNSIAAHVLHCTDSGFGARLLELCNQGLFECLALNLHCLGGQQMELAAVINGRIRRMSRGVNPSLVSWLTTMMGLRLQVVLEHMPVGPDAILRYVRRVGDPPQPLPEEPMEVQGAERASPEPQRENASPAPGTTAEEAMSRGPPPAPEGGSRDEQDGASAETEPWAAAVPPEWVPIIQQDIQSQRKVKPQPPLSDAYLSGMPAKRRKTMQGEGPQLLLSEAVSRAAKAAGARPLTSPESLSRDLEAPEVQESYRQQLRSDIQKRLQEDPNYSPQRFPNAQRAFADDP

SEQ ID NO: 1544 - DNA, 3755 bp, Homo sapiens
tagtgcgacgcacgcaggcgtagtacggtcccccgggcgacagcggtggcggctcctcggggtgctcggctccctcccacctaggccggccccggcccgactcgccctcagaaactcactgtttggggctgcggactttctcgtcgtgccccacaaaagtaaagcttggggacctggggggagccggaagtatcgcttcgagatccccaaatactatcggggaaacggaagtggccgtcggtggcaggtttgggggagaccggaagtgacgagacctgtcggccatggagcctaatgatagtaccagtaccgctgtggaggagcctgacagcttggaggtgttggtgaagaccttggactctcaaactcgtacctttattgtgggggcccagatgaatgtaaaagagtttaaggagcacattgctgcctctgtcagcatcccatctgaaaaacaacggctcatttaccagggacgagttctgcaagatgataagaagcttcaggaatacaatgttgggggaaaggttatccacctggtggaacgggctcctcctcagactcacctcccttctggggcatcttctgggacggggtctgcctcagccactcatggtgggggatccccccctggtactcgggggcctggggcctctgttcatgaccggaatgccaacagctatgtcatggttggaaccttcaatcttcctagtgacggctctgctgtggatgttcacatcaacatggaacaggccccgattcagagtgagccccgggtacggctggtgatggctcagcacatgatcagggatatacagaccttactatcccggatggagtgtcgaggagggccccaaccgcagcacagtcagccgcccccgcagccaccggctgtgaccccggagccagtagccttgagctctcaaacatcagaaccagttgaaagtgaagcacctccccgggagcccatggaggcagaagaagtggaggagcgtgccccagcccagaacccggagctcactcctggcccagccccagcgggcccaacacctgccccggaaacaaatgcacccaaccatccttcccctgcggagtatgtcgaggtgctccaggagctacagcggctggagagtcgcctccagcccttcttgcagcgctactacgaggttctgggtgctgctgccaccacggactacaataacaatcacgagggccgggaggaggatcagcggttgatcaacttggtaggggagagcctgcgactgctgggcaacacctttgttgcactgtctgacctgcgctgcaatctggcctgcacgcccccacgacacctgcatgtggtccggcctatgtctcactacaccacccccatggtgctccagcaggcagccattcccatacagatcaatgtgggaaccactgtgaccatgacaggaaatgggactcggccccccccaactcccaatgcagaggcacctccccctggtcctgggcaggcctcatccgtggctccgtcttctaccaatgtcgagtcctcagctgagggggctcccccgccaggtccagctcccccgccagccaccagccacccgagggtcatccggatttcccaccagagtgtggaacccgtggtcatgatgcacatgaacattcaagattctggcacacagcctggtggtgttccgagtgctcccactggccccctgggaccccctggtcatggccaaaccctgggacagcaggtgccaggcttcccaacagctccaacccgggtggtgattgcccggcccactcctccacaggctcggccttcccatcctggagggcccccagtctctgggacactgcagggcgccggtctgggtaccaatgcctcgttggcccagatggtgagcggccttgtggggcagcttcttatgcagccagtccttgtggctcaggggaccccaggtatggctccaccgccagcccctgccactgcttctgccagtgctggcaccaccaacacagctaccacagctggccccgctcctggggggcctgcccagcctccacccacccctcaaccctccatggctgatcttcagttctctcagcttctggggaacctgctagggcctgcagggccaggggctggagggtctggtgtggcttctcccaccatcactgtggcgatgcctggtgtccctgcctttctccaaggcatgactgacttcttgcaggcaacacagacagcccctccaccacccccacctcctccacccccaccacctgccccagagcagcagaccatgcccccaccaggctccccttctggtggcgcagggagtcctggaggcctgggtcttgagagcctgtcaccggagttttttacctcagtggtgcagggtgtgctcagctccctgctgggctccctgggggctcgggctggcagcagtgaaagtattgctgccttcatacaacgcctcagtggatccagcaacatctttgagcctggagctgatggggcccttggattctttggggccttgctttctcttctgtgccagaacttctctatggtggacgtagtgatgcttctccatgggcatttccagccactacaacggctccagccccagctgcgatccttcttccaccagcactacctgggtggtcaggagcccacacccagtaacatccggatggcaacccacacattgatcacggggctagaagagtatgtgcgggagagtttttccttggtgcaggttcagccaggtgtggacatcatccggacaaacctggaatttctccaagagcagtttaatagcattgctgcgcatgtgctgcattgcacagatagtggatttggggcccggttgctggagttgtgtaaccaaggcctgtttgaatgcctggccctaaacctgcactgcttggggggacagcagatggagcttgctgctgttatcaatggccgaattcgtcgtatgtctcgtggggtgaatccctccttggtgagctggctgaccactatgatgggactgaggcttcaggtggtactggagcacatgcctgtaggccctgatgccattctcagatacgttcgcagggttggtgatcccccccagccacttcctgaggagccaatggaagttcagggagcagaaagagcttcccctgagcctcagcgggagaatgcttccccagcccctggaacaacagcagaagaggccatgtcccgaggtccacctcctgctcctgaggggggctcccgggatgaacaggatggagcttcagctgagacagaaccttgggcagctgcagtccccccagaatgggtccctattatccagcaggacattcagagccagcggaaggtgaaaccgcagccccctctgagtgatgcctacctcagtggtatgcctgccaagagacgcaagacgatgcagggtgagggcccccagctgcttctctcagaggctgtgagccgggcagctaaggcagccggagctcggcccctgacgagccccgagagcctgagccgggacctggaggcaccagaggttcaggagagctacaggcagcagctccggtctgatatacaaaaacgactgcaggaagaccccaactacagtccccagcgcttccccaatgcccagcgggcctttgctgatgatccttagctctttgctctatggcccttcctcatcaggggaccgtttcccccctcttccttcacagtatttaagaaataaaagtcggatttttctggc

SEQ ID NO: 1545 - protein, 1126 aa, Homo sapiens; identical to SEQ ID NO: 1543

SEQ ID NO: 1546 - DNA, 790 bp, Homo sapiens
agagtggactgagcagccagtaggggagagagcagttaaggcacacagagcaccagctccctcctgcctgaagatgttccaccaaatttgggcagctctgctctacttctatggtattatccttaactccatctaccagtgccctgagcacagtcaactgacaactctgggcgtggatgggaaggagttcccagaggtccacttgggccagtggtactttatcgcaggggcagctcccaccaaggaggagttggcaacttttgaccctgtggacaacattgtcttcaatatggctgctggctctgccccgatgcagctccaccttcgtgctaccatccgcatgaaagatgggctctgtgtgccccggaaatggatctaccacctgactgaagggagcacagatctcagaactgaaggccgccctgacatgaagactgagctcttttccagctcatgcccaggtggaatcatgctgaatgagacaggccagggttaccagcgctttctcctctacaatcgctcaccacatcctcccgaaaagtgtgtggaggaattcaagtccctgacttcctgcctggactccaaagccttcttattgactcctaggaatcaagaggcctgtgagctgtccaataactgacctgtaacttcatctaagtccccagatgggtacaatgggagctgagttgttggagggagaagctggagacttccagctccagctcccactcaagataataaagataatttttcaatcctcaaaaaaaaaaaaaaaaaaaaaaaaaaaaaa

SEQ ID NO: 1547 - protein, 188 aa, Homo sapiens
MFHQIWAALLYFYGIILNSIYQCPEHSQLTTLGVDGKEFPEVHLGQWYFIAGAAPTKEELATFDPVDNIVFNMAAGSAPMQLHLRATIRMKDGLCVPRKWIYHLTEGSTDLRTEGRPDMKTELFSSSCPGGIMLNETGQGYQRFLLYNRSPHPPEKCVEEFKSLTSCLDSKAFLLTPRNQEACELSNN

SEQ ID NO: 1548 - DNA, 2475 bp, Homo sapiens
ggtgcagctgcttccgggcttcgcggctcccggcggctccccaaggccgcggccccgacgctgggcccgggagcggtccccgcgcacagcgcccggacgcgtaggtcccgaagtaggcccgcgctttgcttcgtaactggggatctctgaggacatcttagttctgaccttgtggaggccgcgtctctgctgcgtgttcgcgggccagtcgggccactttgtagaaatcatagccctctaaatcaagggacgaacgctgctggctggagtttgctggacactttcattccacctcctaacaaagagaattcctattccttgaggtcccttggggcagcagttaaagactacacgatccaggagcacctaggacctggggccaccttcctgcccgctttattggatggagcactgcctccccagtttctgggacaccttggggtgtggccttggtgagtgaaacttggggtgctgcctgctgggaaggaaatccggaaacgcagagaggactctctggtggtgacccaggccttgtcagatctgagattcttggaatctcagattgtgggggtgtggatggtgaatgaatttgggtatgcccccctttaccccagaactgaagaggaagcaaactacttgccacacttgaggctgcatgactattcagagaagggaggagccacttctgaattcagagtaggactgcatcaccaggcaaatacctgttctgagccagaaagactctggcttctgaggagatcctgagagtctgagtagtgccaggaagcagcctcagaatttgggggcccattacacaccccagccatgttcctgcgacggcttggtggctggctacctcgcccttggggccgccggaaaccaatgaggcctgacccgccttacccagaacccagacgggtggacagctcctcggagaattcaggaagtgactgggatagtgccccagaaaccatggaagatgtggggcatcccaagactaaggactcgggggcattgagggtttctggggctgcttccgaaccaagcaaggaggagccccaagttgagcagctagggagcaaaagaatggattccctcaagtgggaccagcctatctctagcactcaagagtctgggagactggaggctggaggggccagtcccaaactcagatgggatcatgtggattcaggtggcaccaggagaccaggggtgtcccctgaagggggactgagcgtccctgggccaggagccccattggagaaacctggtaggcgtgagaagctgttgggctggctgcggggggaaccaggagctccctcccggtacttggggggcccagaagagtgtctgcagatctccaccaacctgaccctgcatcttctggagctgctggcctctgccctgctggccctgtgctcacgaccactgcgggcagccttggacacactgggcctgcgtggaccgctgggcctctggctacatggcctactgtccttcctggctgccctgcatgggctccatgctgttctgagcctacttactgcccaccctttgcacttcgcctgcctctttggtctcctgcaggccttggtgctggctgtcagcctccgggagcccaatggggatgaggcggccactgactgggagagtgaggggttggagagggaaggtgaggagcagaggggagacccgggaaaggggctgtgaccgtggggtgggggcaaagggtgaagagagtgtgggctttaggagaaaagtgtgaggcatgacccaaattgtaagcatagggacctcagggatggggaagaaacccgagtacgagggtgcagggccccccttcatacacaggagagaacagaactatttagggtgtttgtgtttatggacagtgagggcactgctcttggattcaccagctgttatttttgcttttacttttctcccaccttcagttttttttttttttccacctccactttttaaaagcaaaaaaaaaaaaaagtatgatggtggtgaataaagaccaaagggtcctctctacctttgaaaactctcctggggtggaggagaccagggcaggatagacagacctctgcagtaagagagtggttgggaaacccagggtgttccttggatctcaggatctgagccatcgagggaagagtggggctgctaggcaagtggattagggggtctggatagggccccacaggtgacagggagcctgcagggcggatctggtgatcatgggagccagagggagtggggacagtgcaggcagtattggcaggagggccagtgcagaagggctggtagctcaggcagtgtgggggaagcactgaagcctgtagtccccacttgggggctaggggtttgctcactcagcaataaataactgtgtcacatcaaatcctaaatataccactacaaagtgagagttactgccactctgttcttactgacaccgtccag

SEQ ID NO: 1549 - protein, 294 aa, Homo sapiens
MFLRRLGGWLPRPWGRRKPMRPDPPYPEPRRVDSSSENSGSDWDSAPETMEDVGHPKTKDSGALRVSGAASEPSKEEPQVEQLGSKRMDSLKWDQPISSTQESGRLEAGGASPKLRWDHVDSGGTRRPGVSPEGGLSVPGPGAPLEKPGRREKLLGWLRGEPGAPSRYLGGPEECLQISTNLTLHLLELLASALLALCSRPLRAALDTLGLRGPLGLWLHGLLSFLAALHGLHAVLSLLTAHPLHFACLFGLLQALVLAVSLREPNGDEAATDWESEGLEREGEEQRGDPGKGL

SEQ ID NO: 1550 - DNA, 1920 bp, Homo sapiens
gtgacgttatttcattacacggcttctcggcattccacaggtttccctccgcctcctgagggcctttcctaacccacagagtggattcctggctccagaaaatgggcttggagcgggggccacgttgaggaaggcgaagggcattgtgggggcgttatgtaaaagtaggaccccaaccgacagatcctagtgctcgcgccacctgggcgcgcggagctttgctcgtttactattgaaaaagttccagcgcgggaaactgaacccggagctttgcgcacgcccgagccctcaagtaatgtgggttgtggtttttgttgttgttgtcgccacgcatgcgtcttcgtgccgtgtggctatttgattgtgtcaactcttctgattagaatggcgccattttgcggtacggaagctacacagcaacacgtataggagactctccccgagatcttctagggagtgacccatctatttttgtttgggaagaggaaactccgaaatgggatcgcggaagacttaaagggccaggctgatttttttttcctactggtctctgaggctgtggttgctacagggtcaccacgagcttggcttacttgtctcatccttcccttgcctggtatcattttctcagttctcccaaaagccatgtcccggcccttgctcatcaccttcaccccagccactgaccccagcgacctctggaaggatgggcagcagcagccacagcccgagaagccagagtccaccctggatggggctgcagcccgagctttctatgaggccctgattggggatgagagcagcgctcctgactcccagagatctcagactgaacctgccagagaaagaaagagaaagaaaagaagaataatgaaggcaccagcagcagaagcagtggcagaaggagcatcaggaagacatggacaagggagatcccttgaggctgaggataagatgactcaccggatactgagggcagcccaggagggggacctgccagaacttaggagactgctggaaccgcatgaggcaggaggagctggggggaatatcaacgcccgggatgccttctggtggaccccactgatgtgtgctgctcgagcgggccagggggcagctgtgagctatctcctgggccgtggggctgcctgggtgggggtctgtgagctgagtggcagggatgcggctcagctcgctgaagaagctggcttccctgaggtagcccgcatggtcagggagagccatggagagacaaggagcccggaaaaccggtctcctactccctccctccagtactgcgagaactgtgacacccacttccaagattccaaccaccgcacatccactgctcacctgctgtcactgtcgcagggtcctcagcctcccaaccttccacttggggtgcccatctccagcccgggcttcaaactgctgctgagggggggctgggagccaggaatggggctgggaccccggggtgagggccgtgccaatcccatccccactgtcctcaagagggaccaggaaggactaggctacagatcagcaccccagccccgagtgacacatttcccagcttgggatacccgagctgtggctgggagggagagaccccctcgggtggccacactgagctggagggaggagagaaggagggaggagaaagacagggcttgggagcgggatctaaggacttacatgaacctcgagttctgactttggtaaagtctgaccctagtctgctgctgaagtctgaacttgggcctctgacctgggccctttgacttccccttcctgggatctgctcagatgcagatcctgaagtttttggtcaataggctctgtcttcgtgagagacgggctgagagtcagaaataaatcaaccatttgtggtttaaaaaaaaaaaaaaaaaaaaaaaa

SEQ ID NO: 1551 - protein, 356 aa, Homo sapiens
MSRPLLITFTPATDPSDLWKDGQQQPQPEKPESTLDGAAARAFYEALIGDESSAPDSQRSQTEPARERKRKKRRIMKAPAAEAVAEGASGRHGQGRSLEAEDKMTHRILRAAQEGDLPELRRLLEPHEAGGAGGNINARDAFWWTPLMCAARAGQGAAVSYLLGRGAAWVGVCELSGRDAAQLAEEAGFPEVARMVRESHGETRSPENRSPTPSLQYCENCDTHFQDSNHRTSTAHLLSLSQGPQPPNLPLGVPISSPGFKLLLRGGWEPGMGLGPRGEGRANPIPTVLKRDQEGLGYRSAPQPRVTHFPAWDTRAVAGRERPPRVATLSWREERRREEKDRAWERDLRTYMNLEF

SEQ ID NO: 1552 - DNA, 1128 bp, Homo sapiens
gcttctcgttgtgccccgcccgcaagcgccctcctccgggccttcgtgacagccaggtcgtgcgcgggtcatcctgggattggtagttcgctttctctcatttagccagtttctttctctaccggggactccgtgtcccggcatccaccgcggcacctgacccttggcgcttgcgtgttgccctcttccccaccctccctaatttccactccccccaccccacttcgcctgccgcggtcgggtccgcggcctgcgctgtagcggtcgccgccgttccctggaagtagcaacttccctaccccaccccagtcctggtccccgtccagccgctgacgtgaagatgagcagctcagaggaggtgtcctggatttcctggttctgtgggctccgtggcaatgaattcttctgtgaagtggatgaagactacatccaggacaaatttaatcttactggactcaatgagcaggtccctcactaccgacaagctctagacatgatcttggacctggagcctgatgaagaactggaagacaaccccaaccagagtgacctgattgagcaggcagccgagatgctttatggattgatccacgcccgctacatccttaccaaccgtggcatcgcccagatgttggaaaagtaccagcaaggagactttggttactgtcctcgtgtgtactgtgagaaccagccaatgcttcccattggcctttcagacatcccaggtgaagccatggtgaagctctactgccccaagtgcatggatgtgtacacacccaagtcatcaagacaccatcacacggatggcgcctacttcggcactggtttccctcacatgctcttcatggtgcatcccgagtaccggcccaagagacctgccaaccagtttgtgcccaggctctacggtttcaagatccatccgatggcctaccagctgcagctccaagccgccagcaacttcaagagcccagtcaagacgattcgctgattccctcccccacctgtcctgcagtctttgacttttcctttcttttttgccaccctttcaggaaccctgtatggtttttagtttaaattaaaggagtcgttattgtggtgggaatatgaaataaagtagaagaaaaggcc

SEQ ID NO: 1553 - protein, 215 aa, Homo sapiens
MSSSEEVSWISWFCGLRGNEFFCEVDEDYIQDKFNLTGLNEQVPHYRQALDMILDLEPDEELEDNPNQSDLIEQAAEMLYGLIHARYILTNRGIAQMLEKYQQGDFGYCPRVYCENQPMLPIGLSDIPGEAMVKLYCPKCMDVYTPKSSRHHHTDGAYFGTGFPHMLFMVHPEYRPKRPANQFVPRLYGFKIHPMAYQLQLQAASNFKSPVKTIR

SEQ ID NO: 1554 - DNA, 774 bp, Homo sapiens
atgaaggtccatatgcttgtaggtgtgctggtcatggtgggcttcacagtaggaaaggttcctgttcccgacatccggacgtgccacttctgcctcgtagaagacccttctgtaggatgcatttcaggctcagagaagtgtaccatcagcagctcatccctgtgcatggtgatcaccatctattatgatgtcaaggttcgcttcatcgttcgaggctgtggacagtacatttcctaccgctgccaagaaaaacgcaacacctactttgcagagtactggtatcaggcccagtgctgtcagtacgattattgcaactcctggtcaagcccccaactccagagctctctgccggagccccatgacaggcccctggccctgcctctgtctgactcccagattcagtggttctaccaggccctgaacctctccctgcccctccccaatttccatgctgggacggagcctgatggcctggaccccatggtcacactgtccctgaacctgggcttgtcttttgctgagctgcgccgcatgtacttgttcctcaatagttcaggacttttggttcttccccaggctggactcttgacacctcacccttcctgaattccacagtgcaaatatctttctgtaacaccctcagcatcctgcactgccctctctgaaaacacccacattctttggtcactgtgatttcttaggcctccgtctgttgtaccactagcatctatatgacttttgtgtaattttctctcttgaactctggtgctgttt

SEQ ID NO: 1555 - protein, 201 aa, Homo sapiens
MKVHMLVGVLVMVGFTVGKVPVPDIRTCHFCLVEDPSVGCISGSEKCTISSSSLCMVITIYYDVKVRFIVRGCGQYISYRCQEKRNTYFAEYWYQAQCCQYDYCNSWSSPQLQSSLPEPHDRPLALPLSDSQIQWFYQALNLSLPLPNFHAGTEPDGLDPMVTLSLNLGLSFAELRRMYLFLNSSGLLVLPQAGLLTPHPS

SEQ ID NO: 1556 - DNA, 842 bp, Homo sapiens
atgcagaccttcccagttgctggggcgctggaccctgctatactggacacaaggtttcttccccagggaacagagcttgagcggggggccacccccccgtcctaccggagttctgaggtgcggtcaggcgcggagagcggacgcccagcgccagattctgtgggctccggagttcaggcccactgagccgcagctgagcacaggcggggcaggaaaaaggatgaggtaagtttgttcctgtcaattgggaaccccctcaaccacttccattccccaaatacctgcgctgctaccgatgcctcttggagaccaaggagttagggtgccttctgggatctgacatctgcctcaccccagctggcagcagctgcatcactctccacaaaaagaacagcagcggttctgacgtcatggtgagtgactgccgaagtaaggagcagatgagtgattgttcaaatacccgaacttctccggtgtctggcttctggatattctctcaatactgcttcctggatttctgcaatgaccctcaaaacagagggctctatactccttagtgtgactgcagcaaactttggtgtaaaattccaccagtttccagccaccttcctgacttctatctgggcttggccaggacttctagtccctcataccagccctccttgcctccctccagccactggaccccagccttggctcttcctcttggttgacgcccttcagcacacttactgctactctgtacccccagccctactgcccaccaggtttcctctcttgtcccctagtccctggatgtttctcccaaataaatttgtgtgtaaactgttaaaaaaaaaaaa

SEQ ID NO: 1557 - protein, 61 aa, Homo sapiens
MQTFPVAGALDPAILDTRFLPQGTELERGATPPSYRSSEVRSGAESGRPAPDSVGSGVQAH

SEQ ID NO: 1558 - DNA, 823 bp, Homo sapiens
atggcaggccctgcagggagccagagtctgggtcccctgtgcttccacagcagcccccaagccctctacacggtcctcttaatagtgctggtcatgatgagcttggtgtttggtaagtggctccaagggttcagaagggtctcctggcctggatggagaaacccacagacaccaagtgtctgggtacacctgtccaggatgctcaggtaagtttgttcctgtcaattgggaaccccctcaaccacttccattccccaaatacctgcgctgctaccgatgcctcttggagaccaaggagttagggtgccttctgggatctgacatctgcctcaccccagctggcagcagctgcatcactctccacaaaaagaacagcagcggttctgacgtcatggtgagtgactgccgaagtaaggagcagatgagtgattgttcaaatacccgaacttctccggtgtctggcttctggatattctctcaatactgcttcctggatttctgcaatgaccctcaaaacagagggctctatactccttagtgtgactgcagcaaactttggtgtaaaattccaccagtttccagccaccttcctgacttctatctgggcttggccaggacttctagtccctcataccagccctccttgcctccctccagccactggaccccagccttggctcttcctcttggttgacgcccttcagcacacttactgctactctgtacccccagccctactgcccaccaggtttcctctcttgtcccctagtccctggatgtttctcccaaataaatttgtgtgtaaactgttaaaaaaaaaaaa

SEQ ID NO: 1559 - protein, 69 aa, Homo sapiens
MAGPAGSQSLGPLCFHSSPQALYTVLLIVLVMMSLVFGKWLQGFRRVSWPGWRNPQTPSVWVHLSRMLR

SEQ ID NO: 1560 - DNA, 729 bp, Homo sapiens
atggcaggccctgcagggagccagagtctgggtcccctgtgcttccacagcagcccccaagccctctacacggtcctcttaatagtgctggtcatgatgagcttggtgtttggtaagtttgttcctgtcaattgggaaccccctcaaccacttccattccccaaatacctgcgctgctaccgatgcctcttggagaccaaggagttagggtgccttctgggatctgacatctgcctcaccccagctggcagcagctgcatcactctccacaaaaagaacagcagcggttctgacgtcatggtgagtgactgccgaagtaaggagcagatgagtgattgttcaaatacccgaacttctccggtgtctggcttctggatattctctcaatactgcttcctggatttctgcaatgaccctcaaaacagagggctctatactccttagtgtgactgcagcaaactttggtgtaaaattccaccagtttccagccaccttcctgacttctatctgggcttggccaggacttctagtccctcataccagccctccttgcctccctccagccactggaccccagccttggctcttcctcttggttgacgcccttcagcacacttactgctactctgtacccccagccctactgcccaccaggtttcctctcttgtcccctagtccctggatgtttctcccaaataaatttgtgtgtaaactgttaaaaaaaaaaaa

SEQ ID NO: 1561 - protein, 147 aa, Homo sapiens
MAGPAGSQSLGPLCFHSSPQALYTVLLIVLVMMSLVFGKFVPVNWEPPQPLPFPKYLRCYRCLLETKELGCLLGSDICLTPAGSSCITLHKKNSSGSDVMVSDCRSKEQMSDCSNTRTSPVSGFWIFSQYCFLDFCNDPQNRGLYTP

SEQ ID NO: 1562 - DNA, 1960 bp, Homo sapiens
gctggaagagcagcggcccgagccggggccatggcgaagctgctgagctgcgtcctaggcccccggctctacaaaatctaccgggagagggactctgaaagggccccggccagcgtccctgagacgccaacggcagtcactgccccccattccagctcctgggatacgtactatcagccccgtgccctggagaaacatgctgacagcatcctggcactggcttcagtattctggtccatctcttattactcctctcccttcgccttcttctacttgtacaggaaaggttacttgagtttgtccaaagtggtgccgttttctcactatgctgggacattgctgctacttctggcaggtgtggcctgcctccgaggcattggccgctggaccaacccccagtaccggcagttcatcaccatcttggaagcaacacatcggaaccagtcttcagaaaacaagaggcagcttgccaactacaactttgacttccggagctggccagtcgacttccactgggaagaacccagcagccggaaggagtctcgagggggcccttcccgccggggtgtggccctgcttcgcccagagcccctgcaccgggggacagcagacaccctcctcaaccgggttaagaagctgccttgtcagatcaccagctacctggtggcgcacaccctagggcgccggatgctgtatccaggctctgtgtacctgctgcagaaggccctcatgcctgtgctgctgcagggccaggcccgactggtggaagagtgtaatgggcgccgggcaaagctgctggcctgtgatggcaatgagattgacaccatgtttgtggaccggcgggggacagctgagccccagggacagaagctggtgatctgctgtgaggggaatgctgggttttatgaggtgggctgcgtctccacgcccctggaagctggatattcagtcctgggctggaatcatccaggctttgctggaagcacgggggtgccattcccgcagaatgaggctaatgccatggatgtggtggtccagtttgccatccaccgcctgggcttccagccccaggacatcatcatctacgcctggtccatcggcggcttcactgccacgtgggcagccatgtcctacccagatgttagtgccatgatcctggatgcctcctttgatgacctggtgcccttggccttgaaggtcatgccagacagctggaggggcctggtgaccaggaccgtgaggcagcatctcaatctaaacaacgcggagcagctgtgcagataccagggtcctgtactgctgatccggagaaccaaggatgagatcatcaccaccacggttcctgaggacatcatgtccaaccgaggcaatgacctcctgctgaagctcctgcagcatcggtatccccgggtgatggcagaggagggtcttcgagtggtgaggcagtggttggaggcctcctcacagctggaggaagcctcaatttatagccgatgggaggtggaagaggactggtgtctgtctgtcctccgctcctaccaggcagaacacgggcccgacttcccctggagcgtgggggaggacatgagtgcagatggacggcggcagctggctttgtttctggctcggaagcatctgcacaactttgaggccactcactgcaccccactcccagcccagaacttccagatgccctggcacctctagggaccaactgggactcattatggaagaatggggtgagaggagacatgaggaaagaccctcttatttgtgattctctgtgttcatgttgctgtttatagtttgtggaaagtgggggaccatcccccttctcaccactgttcctcttgcacgtttcccctcattcatgtggctgtacttaaccttctccaacatacatcctgcattacatgaatggattattcctaataattaataaaaaggtattttttctact

SEQ ID NO: 1563 - protein, 558 aa, Homo sapiens
MAKLLSCVLGPRLYKIYRERDSERAPASVPETPTAVTAPHSSSWDTYYQPRALEKHADSILALASVFWSISYYSSPFAFFYLYRKGYLSLSKVVPFSHYAGTLLLLLAGVACLRGIGRWTNPQYRQFITILEATHRNQSSENKRQLANYNFDFRSWPVDFHWEEPSSRKESRGGPSRRGVALLRPEPLHRGTADTLLNRVKKLPCQITSYLVAHTLGRRMLYPGSVYLLQKALMPVLLQGQARLVEECNGRRAKLLACDGNEIDTMFVDRRGTAEPQGQKLVICCEGNAGFYEVGCVSTPLEAGYSVLGWNHPGFAGSTGVPFPQNEANAMDVVVQFAIHRLGFQPQDIIIYAWSIGGFTATWAAMSYPDVSAMILDASFDDLVPLALKVMPDSWRGLVTRTVRQHLNLNNAEQLCRYQGPVLLIRRTKDEIITTTVPEDIMSNRGNDLLLKLLQHRYPRVMAEEGLRVVRQWLEASSQLEEASIYSRWEVEEDWCLSVLRSYQAEHGPDFPWSVGEDMSADGRRQLALFLARKHLHNFEATHCTPLPAQNFQMPWHL

SEQ ID NO: 1564 - DNA, 402 bp, Homo sapiens
atgaaaccccagtttgttgggatcttgctcagctccctgctaggggctgccttgggaaaccgaatgcggtgctacaactgtggtggaagccccagcagttcttgcaaagaggccgtgaccacctgtggcgagggcagaccccagccaggcctggaacagatcaagctacctggaaaccccccagtgaccttgattcaccaacatccagcctgcgtcgcagcccatcattgcaatcaagtggagacagagtcggtgggagacgtgacttatccagcccacagggactgctacctgggagacctgtgcaacagcgccgtggcaagccatgtggcccctgcaggcattttggctgcagcagctaccgccctgacctgtctcttgccaggactgtggagcggatag

SEQ ID NO: 1565 - protein, 133 aa, Homo sapiens
MKPQFVGILLSSLLGAALGNRMRCYNCGGSPSSSCKEAVTTCGEGRPQPGLEQIKLPGNPPVTLIHQHPACVAAHHCNQVETESVGDVTYPAHRDCYLGDLCNSAVASHVAPAGILAAAATALTCLLPGLWSG

SEQ ID NO: 1566 - DNA, 383 bp, Homo sapiens
atgggcacctccagcatcttcctctgcgtgctgttcctctgtggggcactgggtctcaccatgtcccctgcccggggaaggctccgctgctacatctgtggcttcaccaaaccctgccaccctgttcccaccgagtgtcgggacgatgaagcttgtggcatcagtattggcacttcaggaaaaagctgcctctcaagggcccagtgccctctgccaggctatgccacctactggctgcactcctacactctgtggcaccactgctgcgagcaggacctgtgcaacatagccgcttccccacagcagctcaccagcctcctcgcctccctgcccctctttgtggccagcttcgctgggagaggacacctcctccactagcttcc

SEQ ID NO: 1567 - protein, 125 aa, Homo sapiens
MGTSSIFLCVLFLCGALGLTMSPARGRLRCYICGFTKPCHPVPTECRDDEACGISIGTSGKSCLSRAQCPLPGYATYWLHSYTLWHHCCEQDLCNIAASPQQLTSLLASLPLFVASFAGRGHLLH

(The sequence listing continues in the following parts.)
